(19) United States
(12) Patent Application Publication
(10) Pub. No.: US 2007/0192889 A1
(43) Pub. Date: Aug. 16, 2007

(54) Nucleic acid molecules and other molecules associated with transcription in plants and uses thereof for plant improvement

(76) Inventors: Thomas J. La Rosa, Fenton, MO (US); Linda L. Lutfiyya, St. Louis, MO (US); Yihua Zhou, Ballwin, MO (US); David K. Kovalic, University City, MO (US); Andrey A. Boukharov, Chesterfield, MO (US); Ping Li, St. Peters, MO (US); Wei Wu, St. Louis, MO (US); Timothy W. Conner, Chesterfield, MO (US); Jingdong Liu, Chesterfield, MO (US)

Correspondence Address: Gail P. Wuellner;Patent Department, E2NA, Monsanto Company, 800 N. Lindbergh Boulevard, St. Louis, MO, 63167, US

(21) Appl. No.: 10/438,246

(22) Filed: May 14, 2003

Related U.S. Application Data
(63) Continuation-in-part of application No. 09/565,386, filed on May 5, 2000, now abandoned.
(60) Provisional application No. 60/132,860, filed on May 7, 1999.

(51) Int. Cl. A01H 1/00; C12Q 1/68; C07H 21/04; C12N 9/22

(52) U.S. Cl. 800/278; 435/6; 435/199; 536/23.2

(57) ABSTRACT

Polynucleotides useful for improvement of plants are provided, in particular, polynucleotide sequences are provided from plant sources. Polypeptides encoded by the polynucleotide sequences are also provided. The disclosed polynucleotides and polypeptides find use in production of transgenic plants to produce plants having improved properties.

[0001] This application claims the benefit of U.S. application Ser. No. 09/938,294 filed Aug. 24, 2001, Ser. No. 10/155,881 filed May 22, 2002, Ser. No. 09/922,293 filed Aug. 6, 2001, Ser. No. 09/816,660 filed Mar. 26, 2001, Ser. No. 10/361,942 filed Feb. 10, 2003, and Ser. No. 09/828,073 filed Apr. 5, 2001, hereby incorporated by reference herein in their entirety.

### INCORPORATION OF SEQUENCE LISTING

[0002] Two copies of the sequence listing (Seq. Listing Copy 1 and Seq. Listing Copy 2) and a computer-readable form of the sequence listing, all on CD-ROMs, each containing the file named pa-00563.rpt, which is 104,542,360 bytes (measured in MS-DOS) and was created OD May 13, 2003, are herein incorporated by reference.

### INCORPORATION OF TABLE

[0003] Two copies of Table 1 (Table 1 Copy 1 and Table 1 Copy 2) all on CD-ROMs, each containing the file named pa 00563.txt, which is 1,588,912 bytes (measured in MS-DOS) and was created on May 13, 2003, are herein incorporated by reference.

### FIELD OF THE INVENTION

[0004] Disclosed herein are inventions iii the field of plant biochemistry and genetics. More specifically, this invention pertains to transcription factors, nucleic acid fragments encoding transcription factors, as well as plants and other organisms expressing transcription factors. This invention also relates to methods of using such agents, for example, in plant breeding.

### BACKGROUND OF THE INVENTION

[0005] Transcription is the essential first step in the conversion of the genetic information in the DNA into protein and the major point at which gene expression is controlled. Transcription of protein-coding genes is accomplished by the multisubunit enzyme RNA polymerase II and an ensemble of ancillary proteins called transcription factors. Basal (or general) transcription factors (a universal set of cellular proteins required for the transcription of all protein-coding genes) assist RNA polymerase II in aligning itself to the core region encompassing the transcription initiation site of genes and accurately initiating transcription. RNA polymerase II, basal transcription factors and an array of other proteins known as transcription co-factors comprise the basal transcription machinery that determines the constitutive level of gene transcription. Other transcription factors, termed gene-specific transcription factors, modulate transcription of a subset of protein-coding genes in response to specific environmental signals through binding to characteristic, cis-acting DNA sequence elements (motifs) and interactions with the basal transcription machinery. Cis-acting DNA sequence elements are often parts of larger regulatory entities called promoters or enhancers that confer a specific expression pattern to linked transcription units, their target genes. Collectively, these regions might bind several different gene-specific transcription factors each of which might contribute positively (activators) or negatively (repressors) to transcription initiation and rate. Protein-protein interactions between DNA-bound gene-specific transcription factors often result in synergistic or inhibitory regulatory effects. It is the sum of these combinatorial interactions that defines the transcriptional identity of a gene, turning genes on and off as appropriate for a specific biological context. In this manner, genes can be regulated, for example, tissue specifically, with a certain temporal or developmental pattern or become responsive to exogenous cues.

[0006] The identification of transcription factors and the subsequent modification of their activity may result in dramatic changes to a plant leading to plants with highly desirable, commercial traits. Root growth, tolerance to salt or cold stress, and flower characteristics are only some examples of plant traits that may be altered by modifying transcription factors.

[0007] Transcription factors may be identified by the presence of conserved functional domains. Typically, they are comprised of two domains that represent discrete functional entities. One of these is responsible for sequence-specific DNA recognition and binding (DNA binding domain); and the other facilitates communication with the basal transcription machinery, resulting in either the activation or repression of transcription initiation (transeffector domain). In addition, transcription factors also may contain oligomerization domains. This domain type may be adjacent to or overlap DNA binding domains and may act with them to effect the transcription factor's affinity for certain cis elements or other aspects of transcription factor activity. Nuclear localization signals that are characterized by a core peptide enriched in arginine and lysine may be present as well.

[0008] Such functional domains may be identified by examining the primary amino acid sequence of a putative transcription factor. For example, one class of transcription factors, the leucine zipper proteins, derive their name from the repeats they share of four or five leucine residues precisely seven amino acids apart. These domains provide hydrophobic faces through which leucine zipper proteins interact to form dimers. Zinc finger proteins are transcription factors so called because of the presence of repeated motifs of cysteine and histidine that are reported to fold up into a three-dimensional structure coordinated by a zinc ion.

[0009] Protein domains indicative of transcription factors have been described using Profile Hidden Markov Models (e.g. Profile HMM). Profile HMMs are based on position specific sequence information from multiple alignments. Different residues in a functional sequence are subject to different selective pressures. Multiple alignments of a sequence family reveal this in their pattern of conservation. Some positions are more conserved than others, and some regions of a multiple alignment are reported to tolerate insertions and deletions more than other regions.

[0010] An HMM (Hidden Markov Model) is used to statistically describe a protein family's consensus sequence. This statistical description can be used for sensitive and selective database searching. The model consists of a linear sequence of nodes with a “begin” state and an “end” state. A typical model can contain hundreds of nodes. Each node between the beginning and end state corresponds to a column in a multiple alignment. Each node in an HMM has a match state, an insert state, and a delete state with position-specific probabilities for transitioning into each of these states from the previous state. In addition to a transition probability, the match state also has position specific probabilities for emitting a particular residue. Likewise, the insert state has probabilities for inserting a residue at the position given by the node. There is also a chance that no residue is associated with a node. That probability is indicated by the probability of transitioning to the delete state. Both transition and emission probabilities can be generated from a multiple alignment of a family of sequences. An HMM can be aligned with a new sequence to determine the probability that the sequence belongs to the modeled family. The most probable path through the HMM (i.e. which transitions were taken and which residues were emitted at match and insert sites) taken to generate a sequence similar to the new sequence determines the similarity score.

[0011] Several available software packages implement profile HMMs or HMM-like models. These include SAM, HMMER, and HMMpro. Additionally, two collections of profile HMMs are currently available: the Pfam database and the PROSITE Profiles database.

[0012] Sequence similarity searches against known transcription factors or transcription factor domains resulting in statistically significant similarity between a putative and known transcription factor also provide strong evidence that both code for proteins with similar three dimensional structure and are thus likely to exhibit equivalent biochemical functions. The use of amino acid comparison methods-in particular those such as BLAST and FASTA which are sufficiently fast to search protein sequence databases (such as NCBI's non-redundant amino acid databases or Transfac which contains transcription factor domains have been used for such purposes). More rigorous algorithms such as that of the Frame program are also used.

[0013] Nucleic acid sequences and/or translations of nucleic acid sequences disclosed herein are cDNA and genomic sequences that have been queried for the presence of transcription factor functional domains. These sequences may be used in DNA constructs useful for imparting unique genetic properties into transgenic organisms. They may also be used to identify other transcription factor sequences.

### SUMMARY OF THE INVENTION

[0014] This invention provides a substantially purified nucleic acid molecule comprising nucleic acid sequences and the polypeptides encoded by such molecules from corn, soy, and rice. Nucleic acid sequences for the substantially purified nucleic acid molecules of the present invention are provided in the attached Sequence Listing as SEQ ID NO: 1-5429, SEQ ID NO: 10859-15800, SEQ TI) NO: 20743-23549, and SEQ ID NO: 26357-29936. Amino acid sequences for the substantially purified polypeptides or fragment thereof of the present invention are provided as SEQ ID NO: 5430-10858, SEQ ID NO: 15801-20742, SEQ ID NO: 23550-26356, and SEQ ID NO: 29937-33516. Preferred subsets of the polynucleotides and polypeptides of this invention are useful for improvement of one or more important properties in plants.

[0015] The present invention also provides a method of producing a plant containing an overexpressed plant transcription factor comprising transforming said plant with a functional first nucleic acid molecule, wherein said first nucleic acid molecule comprises a promoter region, wherein said promoter region is linked to a, structural region, wherein said structural region comprises a second nucleic acid molecule having a nucleic acid sequence selected from the group consisting of SEQ ID NO: 1-5429, SEQ ID NO: 10859-15800, SEQ ID NO: 20743-23549, and SEQ ID NO: 26357-29936; wherein said structural region is linked to a 3′ non-translated sequence that functions in the plant to cause termination of transcription of transcription and addition of polyadenylated ribonucleotides to a 3′ end of a mRNA molecule; and wherein said function first nucleic acid molecule results in overexpression of the plant transcription factor and then growing said plant.

[0016] The present invention also provides a method for determining a level or pattern of a plant transcription factor in a plant cell or plant tissue comprising incubating, under conditions permitting nucleic acid hybridization, a marker nucleic acid molecule, the marker nucleic acid molecule selected from the group of marker nucleic acid molecules which specifically hybridize to a nucleic acid molecule having the nucleic acid sequence selected from the group consisting of SEQ ID NO: 1-5429, SEQ ID NO: 10859-15800, SEQ ID NO: 20743-23549, and SEQ ID NO: 26357-29936 or complements thereof or fragments of either, with a complementary nucleic acid molecule obtained from the plant cell or plant tissue, wherein nucleic acid hybridization between the marker nucleic acid molecule and the complementary nucleic acid molecule obtained from the plant cell or plant tissue permits the detection of an mRNA for the enzyme; permitting hybridization between the marker nucleic acid molecule and the complementary nucleic acid molecule obtained from the plant cell or plant tissue; and then detecting the level or pattern of the complementary nucleic acid, wherein the detection of the complementary nucleic acid is predictive of the level or pattern of the plant transcription factor.

[0017] This invention also provides a transformed organism, particularly a transformed plant, preferably a transformed crop plant, comprising a recombinant DNA construct of the present invention.

### DETAILED DESCRIPTION OF THE INVENTION

[0018] The present invention provides polynucleotides, or nucleic acid molecules, representing DNA sequences and the polypeptides encoded by such polynucleotides from corn, soy, and rice. The polynucleotides and polypeptides of the present invention find a number of uses, for example in recombinant DNA constructs, in physical arrays of molecules, and for use as plant breeding markers. In addition, the nucleotide and amino acid sequences of the polynucleotides and polypeptides find use in computer based storage and analysis systems.

[0019] Depending on the intended use, the polynucleotides of the present invention may be present in the form of DNA, such as cDNA or genomic DNA, or as RNA, for example mRNA. The polynucleotides of the present invention may be single or double stranded and may represent the coding, or sense strand of a gene, or the non-coding, antisense, strand.

[0020] The polynucleotides of the present invention find particular use in generation of transgenic plants to provide for increased or decreased expression of the polypeptides encoded by the cDNA polynucleotides provided herein. As a result of such biotechnological applications, plants, particularly crop plants, having improved properties are obtained. Crop plants of interest in the present invention include, but are not limited to soy, cotton, canola, maize, wheat, sunflower, sorghum, alfalfa, barley, millet, rice, tobacco, fruit and vegetable crops, and turf grass. Of particular interest are uses of the disclosed polynucleotides to provide plants having improved yield resulting from improved utilization of key biochemical compounds, such as nitrogen, phosphorous and carbohydrate, or resulting from improved responses to environmental stresses, such as cold, heat, drought, salt, and attack by pests or pathogens. Polynucleotides of the present invention may also be used to provide plants having improved growth and development, and ultimately increased yield, as the result of modified expression of plant growth regulators or modification of cell cycle or photosynthesis pathways. Other traits of interest that may be modified in plants using polynucleotides of the present invention include flavonoid content, seed oil and protein quantity and quality, herbicide tolerance, and rate of homologous recombination.

[0021] The term “isolated” is used herein in reference to purified polynucleotide or polypeptide molecules. As used herein, “purified” refers to a polynucleotide or polypeptide molecule separated from substantially all other molecules normally associated with it in its native state. More preferably, a substantially purified molecule is the predominant species present in a preparation. A substantially purified molecule may be greater than 60% free, preferably 75% free, more preferably 90% free, and most preferably 95% free from the other molecules (exclusive of solvent) present in the natural mixture. The term “isolated” is also used herein in reference to polynucleotide molecules that are separated from nucleic acids which normally flank the polynucleotide in nature. Thus, polynucleotides fused to regulatory or coding sequences with which they are not normally associated, for example as the result of recombinant techniques, are considered isolated herein. Such molecules are considered isolated even when present, for example in the chromosome of a host cell, or in a nucleic acid solution. The terms “isolated” and “purified” as used herein are not intended to encompass molecules present in their native state.

[0022] As used herein a “transgenic” organism is one whose genome has been altered by the incorporation of foreign genetic material or additional copies of native genetic material e.g. by transformation or recombination.

[0023] It is understood that the molecules of the invention may be labeled with reagents that facilitate detection of the molecule. As used herein, a label can be any reagent that facilitates detection, including fluorescent labels, chemical labels, or modified bases, including nucleotides with radioactive elements, e.g. ³²P, ³³P, ³⁵S or ¹²⁵I such as ³²P deoxycytidine-5′-triphosphate (³²PdCTP).

[0024] Polynucleotides of the present invention are capable of specifically hybridizing to other polynucleotides under certain circumstances. As used herein, two polynucleotides are said to be capable of specifically hybridizing to one another if the two molecules are capable of forming an anti-parallel, double-stranded nucleic acid structure. A nucleic acid molecule is said to be the “complement” of another nucleic acid molecule if the molecules exhibit complete complementarity. As used herein, molecules are said to exhibit “complete complementarity” when every nucleotide in each of the molecules is complementary to the corresponding nucleotide of the other. Two molecules are said to be “minimally complementary” if they can hybridize to one another with sufficient stability to permit them to remain annealed to one another under at least conventional “low-stringency” conditions. Similarly, the molecules are said to be “complementary” if they can hybridize to one another with sufficient stability to permit them to remain annealed to one another under conventional “high-stringency” conditions. Conventional stringency conditions are known to those skilled in the art and can be found, for example in Molecular Cloning: A Laboratory Manual, 3^{rd} edition Volumes 1, 2, and 3. J. F. Sambrook, D. W. Russell, and N. Irwin, Cold Spring Harbor laboratory Press, 2000.

[0025] Departures from complete complementarity are therefore permissible, as long as such departures do not completely preclude the capacity of the molecules to form a double-stranded structure. Thus, in order for a nucleic acid molecule to serve as a primer or probe it need only be sufficiently complementary in sequence to be able to form a stable double-stranded structure under the particular solvent and salt concentrations employed. Appropriate stringency conditions which promote DNA hybridization are, for example, 6.0× sodium chloride/sodium citrate (SSC) at about 45° C., followed by a wash of 2.0×SSC at 50° C. Such conditions are known to those skilled in the art and can be found, for example in Current Protocols in Molecular Biology, John Wiley & Sons, N.Y. (1989). Salt concentration and temperature in the wash step can be adjusted to alter hybridization stringency. For example, conditions may vary from low stringency of about 2.0×SSC at 40° C. to moderately stringent conditions of about 2.0×SSC at 50° C. to high stringency conditions of about 0.2×SSC at 50° C.

[0026] As used herein “sequence identity” refers to the extent to which two optimally aligned polynucleotide or peptide sequences are invariant throughout a window of alignment of components, e.g. nucleotides or amino acids. An “identity fraction” for aligned segments of a test sequence and a reference sequence is the number of identical components which are shared by the two aligned sequences divided by the total number of components in the reference sequence segment, i.e. the entire reference sequence or a smaller defined part of the reference sequence. “Percent identity” is the identity fraction times 100. Comparison of sequences to determine percent identity can be accomplished by a number of well-known methods, including for example by using mathematical algorithms, such as those in the BLAST suite of sequence analysis programs.

[0027] Polynucleotides

[0028] This invention provides polynucleotides comprising regions that encode polypeptides. The encoded polypeptides may be the complete protein encoded by the gene represented by the polynucleotide, or may be fragments of the encoded protein. Preferably, polynucleotides provided herein encode polypeptides constituting a substantial portion of the complete protein, and more preferentially, constituting a sufficient portion of the complete protein to provide the relevant biological activity.

[0029] A particularly preferred embodiment of the nucleic acid molecules of the present invention are plant nucleic acid molecules that comprise a nucleic acid sequence which encodes a transcription factor from one of the categories of transcription factors in Table 2 or fragment thereof, more preferably a nucleic acid molecule comprising a nucleic acid selected from the group consisting of SEQ ID NO: 1-5429, SEQ ID NO: 10859-15800, SEQ ID NO: 20743-23549, and SEQ ID NO: 26357-29936 or a nucleic acid molecule comprising a nucleic acid sequence which encodes a transcription factor from one of the categories of transcription factors in Table 2 or fragment thereof comprising an amino acid selected from the group consisting of SEQ ID NO: 1-5429, SEQ ID NO: 10859-15800, SEQ ID NO: 20743-23549, and SEQ ID NO: 26357-29936.

[0030] Polynucleotides of the present invention are generally used to impart such biological properties by providing for enhanced protein activity in a transgenic organism, preferably a transgenic plant, although in some cases, improved properties are obtained by providing for reduced protein activity in a transgenic plant. Reduced protein activity and enhanced protein activity are measured by reference to a wild type cell or organism and can be determined by direct or indirect measurement. Direct measurement of protein activity might include an analytical assay for the protein, per se, or enzymatic product of protein activity. Indirect assay might include measurement of a property affected by the protein. Enhanced protein activity can be achieved in a number of ways, for example by overproduction of mRNA encoding the protein or by gene shuffling. One skilled in the are will know methods to achieve overproduction of mRNA, for example by providing increased copies of the native gene or by introducing a construct having a heterologous promoter linked to the gene into a target cell or organism. Reduced protein activity can be achieved by a variety of mechanisms including antisense, mutation or knockout. Antisense RNA will reduce the level of expressed protein resulting in reduced protein activity as compared to wild type activity levels. A mutation in the gene encoding a protein may reduce the level of expressed protein and/or interfere with the function of expressed protein to cause reduced protein activity.

[0031] The polynucleotides of this invention represent cDNA sequences from corn, soy, and rice. Nucleic acid sequences of the polynucleotides of the present invention are provided herein as SEQ ID NO: 1-5429, SEQ ID NO: 10859-15800, SEQ ID NO: 20743-23549, and SEQ ID NO: 26357-29936.

[0032] A subset of the nucleic molecules of this invention includes fragments of the disclosed polynucleotides consisting of oligonucleotides of at least 15, preferably at least 16 or 17, more preferably at least 18 or 19, and even more preferably at least 20 or more, consecutive nucleotides. Such oligonucleotides are fragments of the larger molecules having a sequence selected from the group of polynucleotide sequences consisting of SEQ ID NO: 1-5429, SEQ ID NO: 10859-15800, SEQ ID NO: 20743-23549, and SEQ ID NO: 26357-29936, and find use, for example as probes and primers for detection of the polynucleotides of the present invention.

[0033] Also of interest in the present invention are variants of the polynucleotides provided herein. Such variants may be naturally occurring, including homologous polynucleotides from the same or a different species, or may be non-natural variants, for example polynucleotides synthesized using chemical synthesis methods, or generated using recombinant DNA techniques. With respect to nucleotide sequences, degeneracy of the genetic code provides the possibility to substitute at least one base of the protein encoding sequence of a gene with a different base without causing the amino acid sequence of the polypeptide produced from the gene to be changed. Hence, the DNA of the present invention may also have any base sequence that has been changed from SEQ ID NO: 1-5429, SEQ ID NO: 10859-15800, SEQ ID NO: 20743-23549, and SEQ ID NO: 26357-29936 by substitution in accordance with degeneracy of the genetic code.

[0034] Polynucleotides of the present invention that are variants of the polynucleotides provided herein will generally demonstrate significant identity with the polynucleotides provided herein. Of particular interest are polynucleotide homologs having at least about 60% sequence identity, at least about 70% sequence identity, at least about 80% sequence identity, at least about 85% sequence identity, and more preferably at least about 90%, 95% or even greater, such as 98% or 99% sequence identity with polynucleotide sequences described herein.

[0035] Nucleic acid molecules of the present invention also include homologues. Particularly preferred homologues are selected from the group consisting of Arabidopsis, alfalfa, barley, Brassica, broccoli, cabbage, citrus, cotton, garlic, oat, oilseed rape, onion, canola, flax, an ornamental plant, peanut, pepper, potato, rye, sorghum, strawberry, sugarcane, sugarbeet, tomato, wheat, poplar, pine, fir, eucalyptus, apple, lettuce, lentils, grape, banana, tea, turf grasses, sunflower, and Phaseolus.

[0036] In a preferred embodiment, nucleic acid molecules having SEQ ID NO: 1-5429, SEQ ID NO: 10859-15800, SEQ ID NO: 20743-23549, AND SEQ ID NO: 26357-29936 or complements thereof and fragments of either can be utilized to obtain such homologues.

[0037] Protein and Polypeptide Molecules

[0038] This invention also provides polypeptides encoded by polynucleotides of the present invention. Amino acid sequences of the polypeptides of the present invention are provided herein as SEQ ID NO: 5430-10858, SEQ ID NO: 15801-20742, SEQ ID NO: 23550-26356, and SEQ ID NO: 29937-33516.

[0039] As used herein, the term “protein molecule” or “peptide molecule” includes any molecule that comprises five or more amino acids. It is well known in the art that proteins may undergo modification, including post-translational modifications, such as, but not limited to, disulfide bond formation, glycosylation, phosphorylation, or oligomerization. Thus, as used herein, the term “protein molecule” or “peptide molecule” includes any protein molecule that is modified by any biological or non-biological process. The terms “amino acid” and “amino acids” refer to all naturally occurring L-amino acids. This definition is meant to include norleucine, norvaline, ornithine, homocysteine, and homoserine.

[0040] One or more of the protein or fragment of peptide molecules may be produced via chemical synthesis, or more preferably, by expressing in a suitable bacterial or eukaryotic host. Suitable methods for expression are well known to those skilled in the art.

[0041] A “protein fragment” is a peptide or polypeptide molecule whose amino acid sequence comprises a subset of the amino acid sequence of that protein. A protein or fragment thereof that comprises one or more additional peptide regions not derived from that protein is a “fusion” protein. Such molecules may be derivatized to contain carbohydrate or other moieties (such as keyhole limpet hemocyanin, etc.). Fusion protein or peptide molecules of the invention are preferably produced via recombinant means.

[0042] Another class of agents comprise protein or peptide molecules or fragments or fusions thereof comprising SEQ ID NO: 5430-10858, SEQ ID NO: 15801-20742, SEQ ID NO: 23550-26356, and SEQ ID NO: 29937-33516 in which conservative, non-essential or non-relevant amino acid residues have been added, replaced or deleted. Computerized means for designing modifications in protein structure are known in the art.

[0043] In a preferred embodiment, nucleic acid molecules having SEQ ID NO: 1-5429, SEQ ID NO: 10859-15800, SEQ ID NO: 20743-23549, and SEQ ID NO: 26357-29936 or polypeptide molecules having SEQ ID NO: 5430-10858, SEQ ID NO: 15801-20742, SEQ ID NO: 23550-26356, and SEQ ID NO: 29937-33516 or complements and fragments of any can be utilized to obtain such homologues.

[0044] Agents of the invention include proteins comprising at least about a contiguous 10 amino acid region more preferably comprising at least a contiguous 25, 40, 50, 75 or 125 amino acid region of a protein or fragment thereof of the present invention. In another preferred embodiment, the proteins of the present invention include a between about 10 and about 25 contiguous amino acid region, more preferably between about 20 and about 50 contiguous amino acid region and even more preferably between about 40 and about 80 contiguous amino acid region.

[0045] In a preferred embodiment the protein is selected from the group consisting of a plant, more preferably a maize, soybean, or rice transcription factor from the group consisting of Table 2. In another preferred embodiment, the protein comprises an amino acid sequence selected from the group consisting of SEQ ID NO: 5430-10858, SEQ ID NO: 15801-20742, SEQ ID NO: 23550-26356, and SEQ ID NO: 29937-33516.

[0046] Protein molecules of the present invention include homologues of proteins or fragments thereof comprising a protein sequence selected from SEQ ID NO: 5430-10858, SEQ ID NO: 15801-20742, SEQ ID NO: 23550-26356, and SEQ ID NO: 29937-33516 or fragment thereof or encoded by SEQ ID NO: 1-5429, SEQ ID NO: 10859-15800, SEQ ID NO: 20743-23549, and SEQ ID NO: 26357-29936 or fragments thereof. Preferred protein molecules of the invention include homologues of proteins or fragments having an amino acid sequence selected from the group consisting of SEQ ID NO: 5430-10858, SEQ ID NO: 15801-20742, SEQ ID NO: 23550-26356, and SEQ ID NO: 29937-33516 or fragment thereof.

[0047] A homologue protein may be derived from, but not limited to, alfalfa, barley, Brassica, broccoli, cabbage, citrus, cotton, garlic, oat, oilseed rape, onion, canola, flax, an ornamental plant, pea, peanut, pepper, potato, rye, sorghum, strawberry, sugarcane, sugar beet, tomato, wheat, poplar, pine, fir, eucalyptus, apple, lettuce, lentils, grape, banana, tea, turf grasses, sunflower, oil palm, Phaseolus etc. Particularly preferred species for use in the isolation of homologs would include, barley, cotton, oat, oilseed rape, canola, ornamentals, sugarcane, sugar beet, tomato, potato, wheat and turf grasses. Such a homologue can be obtained by any of a variety of methods. Most preferably, as indicated above, one or more of the disclosed sequences (such as SEQ ID NO: 1-5429, SEQ JD NO: 10859-15800, SEQ ID NO: 20743-23549, and SEQ ID NO: 26357-29936 or complements thereof) will be used in defining a pair of primers to isolate the homologue-encoding nucleic acid molecules from any desired species. Such molecules can be expressed to yield protein homologues by recombinant means.

[0048] Recombinant DNA Constructs

[0049] The present invention also encompasses the use of polynucleotides of the present invention in recombinant constructs, i.e. constructs comprising polynucleotides that are constructed or modified outside of cells and that join nucleic acids that are not found joined in nature. Using methods known to those of ordinary skill in the art, polypeptide encoding sequences of this invention can be inserted into recombinant DNA constructs that can be introduced into a host cell of choice for expression of the encoded protein, or to provide for reduction of expression of the encoded protein, for example by antisense or cosuppression methods. Potential host cells include both prokaryotic and eukaryotic cells. Of particular interest in the present invention is the use of the polynucleotides of the present invention for preparation of constructs for use in plaint transformation.

[0050] In plant transformation, exogenous genetic material is transferred into a plant cell. By “exogenous” it is meant that a nucleic acid molecule, for example a recombinant DNA construct comprising a polynucleotide of the present invention, is produced outside the organism, e.g. plant, into which it is introduced. An exogenous nucleic acid molecule can have a naturally occurring or non-naturally occurring nucleotide sequence. One skilled in the art recognizes that an exogenous nucleic acid molecule can be derived from the same species into which it is introduced or from a different species. Such exogenous genetic material may be transferred into either monocot or dicot plants including, but not limited to, soy, cotton, canola, maize, teosinte, wheat, rice and Arabidopsis plants. Transformed plant cells comprising such exogenous genetic material may be regenerated to produce whole transformed plants.

[0051] Exogenous genetic material may be transferred into a plant cell by the use of a DNA vector or construct designed for such a purpose. A construct can comprise a number of sequence elements, including promoters, encoding regions, and selectable markers. Vectors are available which have been designed to replicate in both E. coli and A. tumefaciens and have all of the features required for transferring large inserts of DNA into plant chromosomes. Design of such vectors is generally within the skill of the art.

[0052] A construct will generally include a plant promoter to direct transcription of the protein-encoding region or the antisense sequence of choice. Numerous promoters, which are active in plant cells, have been described in the literature. These include the nopaline synthase (NOS) promoter and octopine synthase (OCS) promoters carried on tumor-inducing plasmids of Agrobacterium tumefaciens or caulimovirus promoters such as the Cauliflower Mosaic Virus (CaMV) 19S or 35S promoter (U.S. Pat. No. 5,352,605), and the Figwort Mosaic Virus (FMV) 35S-promoter (U.S. Pat. No. 5,378,619). These promoters and numerous others have been used to create recombinant vectors for expression in plants. Any promoter known or found to cause transcription of DNA in plant cells can be used in the present invention. Other useful promoters are described, for example, in U.S. Pat. Nos. 5,378,619; 5,391,725; 5,428,147; 5,447,858; 5,608,144; 5,614,399; 5,633,441; and 5,633,435, all of which are incorporated herein by reference.

[0053] In addition, promoter enhancers, such as the CaMV 35S enhancer or a tissue specific enhancer, may be used to enhance gene transcription levels. Enhancers often are found 5′ to the start of transcription in a promoter that functions in eukaryotic cells, but can often be inserted in the forward or reverse orientation 5′ or 3′ to the coding sequence. In some instances, these 5′ enhancing elements are introns. Deemed to be particularly useful as enhancers are the 5′ introns of the rice actin 1 and rice actin 2 genes. Examples of other enhancers which could be used in accordance with the invention include elements from octopilie synthase genes, the maize alcohol dehydrogenase gene intron 1, elements from the maize shrunken 1 gene, the sucrose synthase intron, the TMV omega element, and promoters from non-plant eukaryotes.

[0054] DNA constructs can also contain one or more 5′ non-translated leader sequences which serve to enhance polypeptide production from the resulting mRNA transcripts. Such sequences may be derived from the promoter selected to express the gene or can be specifically modified to increase translation of the mRNA. Such regions may also be obtained from viral RNAs, from suitable eukaryotic genes, or from a synthetic gene sequence. For a review of optimizing expression of transgenes, see Koziel et al. (1996) Plant Mol. Biol. 32:393-405).

[0055] Constructs and vectors may also include, with the coding region of interest, a nucleic acid sequence that acts, in whole or in part, to terminate transcription of that region. One type of 3′ untranslated sequence which may be used is a 3′ UTR from the nopaline synthase gene (nos 3′) of Agrobacterium tumefaciens. Other 3′ termination regions of interest include those from a gene encoding the small subunit of a ribulose-1,5-bisphosphate carboxylase-oxygenase (rbcS), and more specifically, from a rice rbcS gene (U.S. Pat. No. 6,426,446), the 3′ UTR for the T7 transcript of Agrobacterium tumefaciens, the 3′ end of the protease inhibitor I or II genes from potato or tomato, and the 3′ region isolated from Cauliflower Mosaic Virus. Alternatively, one also could use a gamma coixin, olcosin 3 or other 3′ UTRs from the genus Coix (PCT Publication WO 99/58659).

[0056] Constructs and vectors may also include a selectable marker. Selectable markers may be used to select for plants or plant cells that contain the exogenous genetic material. Useful selectable marker genes include those conferring resistance to antibiotics such as kanamycin (nptII), hygromycin B (aph IV) and gentamycin (aac3 and aacC4) or resistance to herbicides such as glufosinate (bar or pat) and glyphosate (EPSPS). Examples of such selectable markers are illustrated in U.S. Pat. Nos. 5,550,318; 5,633,435; 5,780,708 and 6,118,047, all of which are incorporated herein by reference.

[0057] Constructs and vectors may also include a screenable marker. Screenable markers may be used to monitor transformation. Exemplary screenable markers include genes expressing a colored or fluorescent protein such as a luciferase or green fluorescent protein (GFP), a β-glucuronidase or uidA gene (GUS) which encodes an enzyme for which various chromogenic substrates are known or an R-locus gene, which encodes a product that regulates the production of anthocyanin pigments (red color) in plant tissues. Other possible selectable and/or screenable marker genes will be apparent to those of skill in the art.

[0058] Constructs and vectors may also include a transit peptide for targeting of a gene target to a plant organelle, particularly to a chloroplast, leucoplast or other plastid organelle (U.S. Pat. No. 5,188,642).

[0059] For use in Agrobacterium mediated transformation methods, constructs of the present invention will also include T-DNA border regions flanking the DNA to be inserted into the plant genome to provide for transfer of the DNA into the plant host chromosome as discussed in more detail below. An exemplary plasmid that finds use in such transformation methods is PMON18365, a T-DNA vector that can be used to clone exogenous genes and transfer them into plants using Agrobacterium-mediated transformation. See US Patent Application 20030024014, herein incorporated by reference. This vector contains the left border and right border sequences necessary for Agrobacterium transformation. The plasmid also has origins of replication for maintaining the plasmid in both E. coli and Agrobacterium tumefaciens strains.

[0060] A candidate gene is prepared for insertion into the T-DNA vector, for example using well-known gene cloning techniques such as PCR. Restriction sites may be introduced onto each end of the gene to facilitate cloning. For example, candidate genes may be amplified by PCR techniques using a set of primers. Both the amplified DNA and the cloning vector are cut with the same restriction enzymes, for example, NotI and PstI. The resulting fragments are gel-purified, ligated together, and transformed into E. coli. Plasmid DNA containing the vector with inserted gene may be isolated from E. coli cells selected for spectinomycin resistance, and the presence of the desired insert verified by digestion with the appropriate restriction enzymes. Undigested plasmid may then be transformed into Agrobacterium tumefaciens using techniques well known to those in the art, and transformed Agrobacterium cells containing the vector of interest selected based on spectinomycin resistance. These and other similar constructs useful for plant transformation may be readily prepared by one skilled in the art.

[0061] Transformation Methods and Transgenic Plants

[0062] Methods and compositions for transforming bacteria and other microorganisms are known in the art. See for example Molecular Cloning. A Laboratory Manual, 3^{rd} edition Volumes 1, 2, and 3. J. F. Sambrook, D. W. Russell, and N. Irwin, Cold Spring Harbor Laboratory Press, 2000.

[0063] Technology for introduction of DNA into cells is well known to those of skill in the art. Methods and materials for transforming plants by introducing a transgenic DNA construct into a plant genome in the practice of this invention can include any of the well-known and demonstrated methods including electroporation as illustrated in U.S. Pat. No. 5,384,253, microprojectile bombardment as illustrated in U.S. Pat. Nos. 5,015,580; 5,550,318; 5,538,880; 6,160,208; 6,399,861 and 6,403,865, Agrobacterium-mediated transformation as illustrated in U.S. Pat. Nos. 5,635,055; 5,824,877; 5,591,616; 5,981,840 and 6,384,301, and protoplast transformation as illustrated in U.S. Pat. No. 5,508,184, all of which are incorporated herein by reference.

[0064] Any of the polynucleotides of the present invention may be introduced into a plant cell in a permanent or transient manner in combination with other genetic elements such as vectors, promoters enhancers etc. Further any of the polynucleotides of the present invention may be introduced into a plant cell in a manner that allows for production of the polypeptide or fragment thereof encoded by the polynucleotide in the plant cell, or in a manner that provides for decreased expression of an endogenous gene and concomitant decreased production of protein.

[0065] It is also to be understood that two different transgenic plants can also be mated to produce offspring that contain two independently segregating added, exogenous genes. Selfing of appropriate progeny can produce plants that are homozygous for both added, exogenous genes that encode a polypeptide of interest. Back-crossing to a parental plant and out-crossing with a non-transgenic plant are also contemplated, as is vegetative propagation.

[0066] Expression of the polynucleotides of the present invention and the concomitant production of polypeptides encoded by the polynucleotides is of interest for production of transgenic plants having improved properties, particularly, improved properties which result in crop plant yield improvement. Expression of polypeptides of the present invention in plant cells may be evaluated by specifically identifying the protein products of the introduced genes or evaluating the phenotypic changes brought about by their expression. It is noted that when the polypeptide being produced in a transgenic plant is native to the target plant species, quantitative analyses comparing the transformed plant to wild type plants may be required to demonstrate increased expression of the polypeptide of this invention.

[0067] Assays for the production and identification of specific proteins make use of various physical-chemical, structural, functional, or other properties of the proteins. Unique physical-chemical or structural properties allow the proteins to be separated and identified by electrophoretic procedures, such as native or denaturing gel electrophoresis or isoelectric focusing, or by chromatographic techniques such as ion exchange or gel exclusion chromatography. The unique structures of individual proteins offer opportunities for use of specific antibodies to detect their presence in formats such as an ELISA assay. Combinations of approaches may be employed with even greater specificity such as western blotting in which antibodies are used to locate individual gene products that have been separated by electrophoretic techniques. Additional techniques may be employed to absolutely confirm the identity of the product of interest such as evaluation by amino acid sequencing following purification. Although these are among the most commonly employed, other procedures may be additionally used.

[0068] Assay procedures may also be used to identify the expression of proteins by their functionality, particularly where the expressed protein is an enzyme capable of catalyzing chemical reactions involving specific substrates and products. These reactions may be measured, for example in plant extracts, by providing and quantifying the loss of substrates or the generation of products of the reactions by physical and/or chemical procedures.

[0069] In many cases, the expression of a gene product is determined by evaluating the phenotypic results of its expression. Such evaluations may be simply as visual observations, or may involve assays. Such assays may take many forms including but not limited to analyzing changes in the chemical composition, morphology, or physiological properties of the plant. Chemical composition may be altered by expression of genes encoding enzymes or storage proteins which change amino acid composition and may be detected by amino acid analysis, or by enzymes which change starch quantity which may be analyzed by near infrared reflectance spectrometry. Morphological changes may include greater stature or thicker stalks.

[0070] Plants with decreased expression of a gene of interest can also be achieved through the use of polynucleotides of the present invention, for example by expression of antisense nucleic acids, or by identification of plants transformed with sense expression constructs that exhibit cosuppression effects.

[0071] Antisense approaches are a way of preventing or reducing gene function by targeting the genetic material as disclosed in U.S. Pat. Nos. 4,801,540; 5,107,065; 5,759,829; 5,910,444; 6,184,439; and 6,198,026, all of which are incorporated herein by reference. The objective of the antisense approach is to use a sequence complementary to the target gene to block its expression and create a mutant cell line or organism in which the level of a single chosen protein is selectively reduced or abolished. Antisense techniques have several advantages over other ‘reverse genetic’ approaches. The site of inactivation and its developmental effect can be manipulated by the choice of promoter for antisense genes or by the timing of external application or microinjection. Antisense can manipulate its specificity by selecting either unique regions of the target gene or regions where it shares homology to other related genes.

[0072] The principle of regulation by antisense RNA is that RNA that is complementary to the target mRNA is introduced into cells, resulting in specific RNA:RNA duplexes being formed by base pairing between the antisense substrate and the target. Under one embodiment, the process involves the introduction and expression of an antisense gene sequence. Such a sequence is one in which part or all of the normal gene sequences are placed under a promoter in inverted orientation so that the ‘wrong’ or complementary strand is transcribed into a noncoding antisense RNA that hybridizes with the target mRNA and interferes with its expression. An antisense vector is constructed by standard procedures and introduced into cells by transformation, transfection, electroporation, microinjection, infection, etc. The type of transformation and choice of vector will determine whether expression is transient or stable. The promoter used for the antisense gene may influence the level, timing, tissue, specificity, or inducibility of the antisense inhibition.

[0073] As used herein “gene suppression” means any of the well-known methods for suppressing expression of protein from a gene including sense suppression, anti-sense suppression and RNAi suppression. In suppressing genes to provide plants with a desirable phenotype, anti-sense and RNAi gene suppression methods are preferred. More particularly, for a description of anti-sense regulation of gene expression in plant cells see U.S. Pat. No. 5,107,065 and for a description of RNAi gene suppression in plants by transcription of a dsRNA see U.S. Pat. No. 6,506,559, U.S. Patent Application Publication No. 2002/0168707 A1, and U.S. patent application Ser. No. 09/423,143 (see WO 98/53083), 09/127,735 (see WO 99/53050) and 09/084,942 (see WO 99/61631), all of which are incorporated herein by reference. Suppression of an gene by RNAi can be achieved using a recombinant DNA construct having a promoter operably linked to a DNA element comprising a sense and anti-sense element of a segment of genomic DNA of the gene, e.g., a segment of at least about 23 nucleotides, more preferably about 50 to 200 nucleotides where the sense and anti-sense DNA components can be directly linked or joined by an intron or artificial DNA segment that can form a loop when the transcribed RNA hybridizes to form a hairpin structure. For example, genomic DNA from a polymorphic locus of SEQ ID NO: 1-5429, SEQ ID NO: 10859-15800, SEQ ID NO: 20743-23549, AND SEQ ID NO: 26357-29936 can be used in a recombinant construct for suppression of a cognate gene by RNAi suppression.

[0074] Insertion mutations created by transposable elements may also prevent gene function. For example, in many dicot plants, transformation with the T-DNA of Agrobacterium may be readily achieved and large numbers of transformants can be rapidly obtained. Also, some species have lines with active transposable elements that can efficiently be used for the generation of large numbers of insertion mutations, while some other species lack such options. Mutant plants produced by Agrobacterium or transposon mutagenesis and having altered expression of a polypeptide of interest can be identified using the polynucleotides of the present invention. For example, a large population of mutated plants may be screened with polynucleotides encoding the polypeptide of interest to detect mutated plants having an insertion in the gene encoding the polypeptide of interest.

[0075] Polynucleotides of the present invention may be used in site-directed mutagenesis. Site-directed mutagenesis may be utilized to modify nucleic acid sequences, particularly as it is a technique that allows one or more of the amino acids encoded by a nucleic acid molecule to be altered (e.g., a threonine to be replaced by a methionine). Three basic methods for site-directed mutagenesis are often employed. These are cassette mutagenesis, primer extension, and methods based upon PCR.

[0076] In addition to the above-discussed procedures, practitioners are familiar with the standard resource materials which describe specific conditions and procedures for the construction, manipulation and isolation of macromolecules (e.g., DNA molecules, plasmids, etc.), generation of recombinant organisms and the screening and isolating of clones.

[0077] Arrays

[0078] The polynucleotide or polypeptide molecules of this invention may also be used to prepare arrays of target molecules arranged on a surface of a substrate. The target molecules are preferably known molecules, e.g. polynucleotides (including oligonucleotides) or polypeptides, which are capable of binding to specific probes, such as complementary nucleic acids or specific antibodies. The target molecules are preferably immobilized, e.g. by covalent or non-covalent bonding, to the surface in small amounts of substantially purified and isolated molecules in a grid pattern. By immobilized is meant that the target molecules maintain their position relative to the solid support under hybridization and washing conditions. Target molecules are deposited in small footprint, isolated quantities of “spotted elements” of preferably single-stranded polynucleotide preferably arranged in rectangular grids in a density of about 30 to 100 or more, e.g. up to about 1000, spotted elements per square centimeter. In addition in preferred embodiments arrays comprise at least about 100 or more, e.g. at least about 1000 to 5000, distinct target polynucleotides per unit substrate. Where detection of transcription for a large number of genes is desired, the economics of arrays favors a high density design criteria provided that the target molecules are sufficiently separated so that the intensity of the indicia of a binding event associated with highly expressed probe molecules does not overwhelm and mask the indicia of neighboring binding events. For high-density microarrays each spotted element may contain up to about 10⁷ or more copies of the target molecule, e.g. single stranded cDNA, oil glass substrates or nylon substrates.

[0079] Arrays of this invention can be prepared with molecules from a single species, preferably a plant species, or with molecules from other species, particularly other plant species. Arrays with target molecules from a single species can be used with probe molecules from the same species or a different species due to the ability of cross species homologous genes to hybridize. It is generally preferred for high stringency hybridization that the target and probe molecules are from the same species.

[0080] In preferred aspects of this invention the organism of interest is a plant and the target molecules are polynucleotides or oligonucleotides with nucleic acid sequences having at least 80 percent sequence identity to a corresponding sequence of the same length in a polynucleotide having a sequence selected from the group consisting of SEQ ID NO: 1-5429, SEQ ID NO: 10859-15800, SEQ ID NO: 20743-23549, and SEQ ID NO: 26357-29936 or complements thereof. In other preferred aspects of the invention at least 10% of the target molecules on an array have at least 15, more preferably at least 20, consecutive nucleotides of sequence having at least 80%, more preferably up to 100%, identity with a corresponding sequence of the same length in a polynucleotide having a sequence selected from the group consisting of SEQ ID NO: 1-5429, SEQ ID NO: 10859-15800, SEQ ID NO: 20743-23549, and SEQ ID NO: 26357-29936 or complements or fragments thereof.

[0081] Such arrays are useful in a variety of applications, including gene discovery, genomic research, molecular breeding and bioactive compound screening. One important use of arrays is in the analysis of differential gene transcription, e.g. transcription profiling where the production of mRNA in different cells, normally a cell of interest and a control, is compared and discrepancies in gene expression are identified. In such assays, the presence of discrepancies indicates a difference in gene expression levels in the cells being compared. Such information is useful for the identification of the types of genes expressed in a particular cell or tissue type in a known environment. Such applications generally involve the following steps: (a) preparation of probe, e.g. attaching a label to a plurality of expressed molecules; (b) contact of probe with the array under conditions sufficient for probe to bind with corresponding target, e.g. by hybridization or specific binding; (c) removal of unbound probe from the array; and (d) detection of bound probe.

[0082] A probe may be prepared with RNA extracted from a given cell line or tissue. The probe may be produced by reverse transcription of mRNA or total RNA and labeled with radioactive or fluorescent labeling. A probe is typically a mixture containing many different sequences in various amounts, corresponding to the numbers of copies of the original mRNA species extracted from the sample.

[0083] The initial RNA sample for probe preparation will typically be derived from a physiological source. The physiological source may be selected from a variety of organisms, with physiological sources of interest including single celled organisms such as yeast and multicellular organisms, including plants and animals, particularly plants, where the physiological sources from multicellular organisms may be derived from particular organs or tissues of the multicellular organism, or from isolated cells derived from an organ, or tissue of the organism. The physiological sources may also be multicellular organisms at different developmental stages (e.g., 10-day-old seedlings), or organisms grown under different environmental conditions (e.g., drought-stressed plants) or treated with chemicals.

[0084] In preparing the RNA probe, the physiological source may be subjected to a number of different processing steps, where such processing steps might include tissue homogenation, cell isolation and cytoplasmic extraction, nucleic acid extraction and the like, where such processing steps are known to the those of skill in the art. Methods of isolating RNA from cells, tissues, organs or whole organisms are known to those of skill in the art.

[0085] Computer Based Systems and Methods

[0086] The sequence of the molecules of this invention can be provided in a variety of media to facilitate use thereof. Such media can also provide a subset thereof in a form that allows a skilled artisan to examine the sequences. In a preferred embodiment, 20, preferably 50, more preferably 100, even more preferably 200 or more of the polynucleotide and/or the polypeptide sequences of the present invention can be recorded on computer readable media. As used herein, “computer readable media” refers to any medium that can be read and accessed directly by a computer. Such media include, but are not limited to: magnetic storage media, such as floppy discs, hard disc, storage medium, and magnetic tape: optical storage media such as CD-ROM; electrical storage media such as RAM and ROM; and hybrids of these categories such as magnetic/optical storage media. A skilled artisan can readily appreciate how any of the presently known computer readable media can be used to create a manufacture comprising a computer readable medium having recorded thereon a nucleotide sequence of the present invention.

[0087] As used herein, “recorded” refers to a process for storing information on computer readable media. A skilled artisan can readily adopt any of the presently known methods for recording information on computer readable media to generate media comprising the nucleotide sequence information of the present invention. A variety of data storage structures are available to a skilled artisan for creating a computer readable medium having recorded thereon a nucleotide sequence of the present invention. The choice of the data storage structure will generally be based on the means chosen to access the stored information. In addition, a variety of data processor programs and formats can be used to store the nucleotide sequence information of the present invention on computer readable media. The sequence information can be represented in a word processing text file, formatted in commercially-available software such as WordPerfect and Microsoft Word, or represented in the form of an ASCII file, stored in a database application, such as DB2, Sybase, Oracle, or the like. A skilled artisan can readily adapt any number of data processor structuring formats (e.g., text file or database) in order to obtain a computer readable medium having recorded thereon the nucleotide sequence information of the present invention.

[0088] By providing one or more of polynucleotide or polypeptide sequences of the present invention in a computer readable medium, a skilled artisan can routinely access the sequence information for a variety of purposes. The examples which follow demonstrate how software which implements the BLAST and BLAZE search algorithms on a Sybase system can be used to identify open reading frames (ORFs) within the genome that contain homology to ORFs or polypeptides from other organisms. Such ORFs are polypeptide encoding fragments within the sequences of the present invention and are useful in producing commercially important polypeptides such as enzymes used in amino acid biosynthesis, metabolism, transcription, translation, RNA processing, nucleic acid and a protein degradation, protein modification, and DNA replication, restriction, modification, recombination, and repair.

[0089] The present invention further provides systems, particularly computer-based systems, which contain the sequence information described herein. Such systems are designed to identify commercially important fragments of the nucleic acid molecule of the present invention. As used herein, “a computer-based system” refers to the hardware, software, and memory used to analyze the sequence information of the present invention. A skilled artisan can readily appreciate that any one of the currently available computer-based systems are suitable for use in the present invention.

[0090] As indicated above, the computer-based systems of the present invention comprise a database having stored therein a nucleotide sequence of the present invention and the necessary hardware and software for supporting and implementing a homology search. As used herein, “database” refers to memory system that can store searchable nucleotide sequence information. As used herein “query sequence” is a nucleic acid sequence, or an amino acid sequence, or a nucleic acid sequence corresponding to an amino acid sequence, or an amino acid sequence corresponding to a nucleic acid sequence, that is used to query a collection of nucleic acid or amino acid sequences. As used herein, “homology search” refers to one or more programs which are implemented on the computer-based system to compare a query sequence, i.e., gene or peptide or a conserved region (motif), with the sequence information stored within the database. Homology searches are used to identify segments and/or regions of the sequence of the present invention that match a particular query sequence. A variety of known searching algorithms are incorporated into commercially available software for conducting homology searches of databases and computer readable media comprising sequences of molecules of the present invention.

[0091] Commonly preferred sequence length of a query sequence is from about 10 to 100 or more amino acids or from about 20 to 300 or more nucleotide residues. There are a variety of motifs known in the art. Protein motifs include, but are not limited to, enzymatic active sites and signal sequences. An amino acid query is converted to all of the nucleic acid sequences that encode that amino acid sequence by a software program, such as TBLASTN, which is then used to search the database. Nucleic acid query sequences that are motifs include, but are not limited to, promoter sequences, cis elements, hairpin structures and inducible expression elements (protein binding sequences).

[0092] Thus, the present invention further provides an input device for receiving a query sequence, a memory for storing sequences (the query sequences of the present invention and sequences identified using a homology search as described above) and an output device for outputting the identified homologous sequences. A variety of structural formats for the input and output presentations can be used to input and output information in the computer-based systems of the present invention. A preferred format for an output presentation ranks fragments of the sequence of the present invention by varying degrees of homology to the query sequence. Such presentation provides a skilled artisan with a ranking of sequences that contain various amounts of the query sequence and identifies the degree of homology contained in the identified fragment.

[0093] Having now generally described the invention, the same will be more readily understood through reference to the following examples which are provided by way of illustration, and are not intended to be limiting of the present invention, unless specified.

### EXAMPLE 1

[0094] This example illustrates the construction of the rice genomic library. BACs are stable, non-chimeric cloning systems having genomic fragment inserts (100-300 kb) and their DNA can be prepared for most types of experiments including DNA sequencing. BAC vector, pBeloBAC11, is derived from the endogenous E. coli F-factor plasmid, which contains genes for strict copy number control and unidirectional origin of DNA replication. Additionally, pBeloBAC11 has three unique restriction enzyme sites (Hind III, Bam HI and Sph I) located within the LacZ gene that can be used as cloning sites for megabase-size plant DNA. Indigo, another BAC vector contains Hind III and Eco RI cloning sites. This vector also contains a random mutation in the LacZ gene that allows for darker blue colonies.

[0095] As an alternative, the P1-derived artificial chromosome (PAC) can be used as a large DNA fragment cloning vector (Ioannou et al., Nature Genet. 6:84-89 (1994; Suzuki et al., Gene 199:133-137 (1997). The PAC vector has most of the features of the BAC system, but also contains some of the elements of the bacteriophage P1 cloning system.

[0096] BAC libraries are generated by ligating size-selected restriction digested DNA with pBeloBAC11 followed by electroporation into E. coli. BAC library construction and characterization is extremely efficient when compared to YAC (yeast artificial chromosome) library construction and analysis, particularly because of the chimerism associated with YACs and difficulties associated with extracting YAC DNA.

[0097] There are general methods for preparing megabase-size DNA from plants. For example, the protoplast method yields megabase-size DNA of high quality with minimal breakage. The process involves preparing young leaves that are manually feathered with a razor-blade before being incubated for four to five hours with cell-wall-degrading enzymes. The second method developed by Zhange et al., Plant J. 7:175-184 (1995), is a universal nuclei method that works well for several divergent plant taxa. Fresh or frozen tissue is homogenized with a blender or mortar and pestle. Nuclei are then isolated and embedded. DNA prepared by the nucleic method is often more concentrated and is reported to contain lower amounts of chloroplast DNA than the protoplast method.

[0098] Once protoplasts or nuclei are produced, they are embedded in an agarose matrix as plugs or microbeads. The agarose provides a support matrix to prevent shearing of the DNA while allowing enzymes and buffers to diffuse into the DNA. The DNA is purified and manipulated in the agarose and is stable for more than one year at 4° C.

[0099] Once high molecular weight DNA has been prepared, it is fragmented to the desired size range. In general, DNA fragmentation utilizes two general approaches, 1) physical shearing and 2) partial digestion with a restriction enzyme that cuts relatively frequently within the genome. Since physical shearing is not dependent upon the frequency and distribution of particular restriction enzymes sites, this method should yield the most random distribution of DNA fragments. However, the ends of the sheared DNA fragments must be repaired and cloned directly or restriction enzyme sites added by the addition of synthetic linkers. Because of the subsequent steps required to clone DNA fragmented by shearing, most protocols fragment DNA by partial restriction enzyme digestion. The advantage of partial restriction enzyme digestion is that no further enzymatic modification of the ends of the restriction fragments is necessary. Four common techniques that can be used to achieve reproducible partial digestion of megabase-size DNA are 1) varying the concentration of the restriction enzyme, 2) varying the time of incubation with the restriction enzyme 3) varying the concentration of an enzyme cofactor (e.g., Mg²⁺) and 4) varying the ratio of endonuclease to methylase.

[0100] There are three cloning sites in pBeloBAC11, but only Hind III and Bam HI produce 5′ overhangs for easy vector dephosphorylation. These two restriction enzymes are primarily used to construct BAC libraries. The optimal partial digestion conditions for megabase-size DNA are determined by wide and narrow window digestions. To optimize the optimum amount of Hind III, 1, 2, 3, 10, and 5-units of enzyme are each added to 50 ml aliquots of microbeads and incubated at 37° C. for 20 minutes.

[0101] After partial digestion of megabase-size DNA, the DNA is run on a pulsed-field gel, and DNA in a size range of 100-500 kb is excised from the gel. This DNA is ligated to the BAC vector or subjected to a second size selection on a pulsed field gel under different running conditions. Studies have previously reported that two rounds of size selection can eliminate small DNA fragments co-migrating with the selected range in the first pulse-field fractionation. Such a strategy results in an increase in insert sizes and a more uniform insert size distribution. A practical approach to performing size selections is to first test for the number of clones/microliter of ligation and insert size from the first size selected material. If the numbers are good (500 to 2000 white colony/microliter of ligation) and the size range is also good (50 to 300 kb) then a second size selection is practical. When performing a second size selection one expects an 80 to 95% decrease in the number of recombinant clones per transformation.

[0102] Twenty to two hundred nanograms of the size-selected DNA are ligated to dephosphorylated BAC vector (molar ratio of 10 to 1 in BAC vector excess). Most BAC libraries use a molar ratio of 5 to 15:1 (size selected DNA: BAC vector).

[0103] Transformation is carried out by electroporation and the transformation efficiency for BACs is about 40 to 1,500 transformants from one microliter of ligation product or 20 to 1000 transformants/ng DNA.

[0104] Several tests can be carried out to determine the quality of a BAC library. Three basic tests to evaluate the quality include: the genome coverage of a BAC library-average insert size, average number of clones hybridizing with single copy probes and chloroplast DNA content.

[0105] The determination of the average insert size of the library is assessed in two ways. First, during library construction every ligation is tested to determine the average insert size by assaying 20-50 BAC clones per ligation. DNA is isolated from recombinant clones using a standard mini preparation protocol, digested with Not I to free the insert from the BAC vector and then sized using pulsed field gel electrophoresis (Maule, Molecular Biotechnology 9:107-126 (1998)).

[0106] To determine the genomic coverage of the library, it is screened with single copy RFLP markers distributed randomly across the genome by hybridization. Microtiter plates containing BAC clones are spotted onto Hybond membranes. Bacteria from 48 or 72 plates are spotted twice onto one membrane resulting in 18,000 to 27,648 unique clones on each membrane in either a 4×4 or 5×5 orientation. Since each clone is present twice, false positives are easily eliminated and true positives are easily recognized and identified.

[0107] Finally, the chloroplast DNA content in the BAC library is estimated by hybridizing three chloroplast genes spaced evenly across the chloroplast genome to the library on high density hybridization filters.

[0108] There are strategies for isolating rare sequences within the genome. For example, higher plant genomes can range in size from 100 Mb/1C (Arabidopsis) to 15,966 Mb/C (Triticum aestivum), (Arumuganathan and Earle, Plant Mol Bio Rep. 9: 208-219 (1991)). The number of clones required to achieve a given probability that any DNA sequence will be represented in a genomic library is N=(In(1−P))/(In(1−L/G)) where N is the number of clones required, P is the probability desired to get the target sequence, L is the length of the average clone insert in base pairs and G is the haploid genome length in base pairs (Clarke et al., Cell 9:91-100 (1976)).

[0109] The rice BAC library of the present invention is constructed in the pBeloBAC11 or similar vector. Inserts are generated by partial Eco RI digestion or other enzymatic digestion of DNA.

### EXAMPLE 2

[0110] This example serves to illustrate how the genomic sequences are sequenced and combined into contigs. Basic methods can be used for DNA sequencing and are well known to one skilled in the art. Automation and advances in technology such as the replacement of radioisotopes with fluorescence-based sequencing have reduced the effort required to sequence DNA. Automated sequencers are available from, for example, Pharmacia. Biotech, Inc., Piscataway, N.J. (Pharmacia ALF), LI-COR, Inc., Lincoln, Nebr. (LI-COR 4,000) and Millipore, Bedford, Mass. (Millipore BaseStation).

[0111] In addition, advances in capillary gel electrophoresis have also reduced the effort required to sequence DNA and such advances provide a rapid high resolution approach for sequencing DNA samples. The 3700 DNA Sequencer (Perkin-Elmer Corp., Applied Biosystems Div., Foster City, Calif.) is a machine that uses this technology.

[0112] A number of sequencing techniques are known in the art, including fluorescence-based sequencing methodologies. These methods have the detection, automation and instrumentation capability necessary for the analysis of large volumes of sequence data. With these types of automated systems, fluorescent dye-labeled sequence reaction products are detected and data entered directly into the computer, producing a chromatogram that is subsequently viewed, stored, and analyzed using the corresponding software programs. These methods are known to those of skill in the art and have been described and reviewed.

[0113] PHRED is used to call the bases from the sequence trace files. Phred uses Fourier methods to examine the four base traces in the region surrounding each point in the data set in order to predict a series of evenly spaced predicted locations. That is, it determines where the peaks would be centered if there were no compressions, dropouts, or other factors shifting the peaks from their “true” locations. Next, PHRED examines each trace to find the centers of the actual, or observed peaks and the areas of these peaks relative to their neighbors. The peaks are detected independently along each of the four traces so many peaks overlap. A dynamic programming algorithm is used to match the observed peaks detected in the second step with the predicted peak locations found in the first step.

[0114] After the base calling is completed, contaminating sequences (e.g., E. coli) are removed, and BAC vector and sub-cloning vectors sequence segments with >30 bases are trimmed and constraints are made for the assembler. Rice contigs are assembled using CAP3.

[0115] A two-step re-assembly process is employed to reduce sequence redundancies caused by overlaps between BAC clones. In the first step, BAC clones are grouped into clusters based on overlaps between contig sequences from different BACs. These overlaps are identified by comparing each sequence in the dataset against every other sequence, by BLASTN. BACs containing overlaps greater than 5,000 base pairs in length and greater than 94% in sequence identity are put into the same cluster. Repetitive sequences are masked prior to this procedure to avoid false joining by repetitive elements present in the genome. In the second step, sequences from each BAC cluster are assembled by PHRAP.longread, which is able to handle very long sequences. A minimum match is set at 100 bp and a minimum score is set at 600 as a threshold to join input contigs into longer contigs.

[0116] Oryza sativa contigs are assembled using PANGEA clustering tools and PHRAP. PANGEA clustering tools are a series of scripts that group sequences (clusters) by comparing pairs of sequences for overlapping bases. The overlap is determined using the following high stringency parameters: word size=8; window size=60; and identity is 93%. Each of the clusters is then assembled using PHRAP. This step results in islands. The next step is to combine the islands together to collapse the contig number even further. Default, less stringent parameters, are used in this step: minimum match=14, minimum score=30; and the penalty is 2.

### EXAMPLE 3

[0117] This example illustrates the identification of genes within rice genomic contig libraries as assembled above. The genes and partial genes embedded in such contigs are identified through a series of bioinformatic analyses. The tools to define genes fall into two categories: homology-based and predictive-based methods. Homology-based searches (e.g., GAP2, BLASTX supplemented by NAP and TBLASTX) detect conserved sequences during comparisons of DNA sequences or hypothetically translated protein sequences to public and/or proprietary DNA and protein databases. Existence of an Oryza sativa gene is inferred if significant sequence similarity extends over the majority of the target gene. Since homology-based methods may overlook genes unique to Oryza sativa, for which homologous nucleic acid molecules have not yet been identified in databases, gene prediction programs are also used. Predictive methods employed in the definition of the Oryza sativa genes include the use of the GenScan gene predictive software program. In general terms, GenScan infers the presence and extent of a gene through a search for “gene-like” grammar.

[0118] The homology-based methods used to define the Oryza sativa gene set include BLASTX supplemented by NAP. NAP is part of the Analysis and Annotation Tool (AAT) for Finding Genes in Genomic Sequences. The AAT package includes two sets of programs, one set DPS/NAP (referred to as “NAP”) for comparing the query sequence with a protein database, and the other set DDS/GAP2 (referred to as “GAP2”) for comparing the query sequence with a cDNA database. Each set contains a fast database search program and a rigorous alignment program. The database search program quickly identifies regions of the query sequence that are similar to a database sequence. Then the alignment program constructs an optimal alignment for each region and the database sequence. The alignment program also reports the coordinates of exons in the query sequence.

[0119] The NAP program computes a global alignment of a DNA sequence and a protein sequence without penalizing terminal gaps. NAP handles frameshifts and long introns in the DNA sequence. The program delivers the alignment in linear space; so long sequences can be aligned. It makes use of splice site consensuses in alignment computation. Both strands of the DNA sequence are compared with the protein sequence and one of the two alignments with the larger score is reported.

[0120] NAP takes a nucleotide sequence, translates it in three forward reading frames and three reverse complement reading frames, and then compares the six translations against a protein sequence database (e.g. the non-redundant protein (i.e., nr-aa) database maintained by the National Center for Biotechnology Information as part of GenBank and available at the web site: www.ncbi.nlm.nih.gov).

[0121] The second homology-based method used for gene discovery is BLASTX hits extended with the NAP software package. BLASTX is run with the Oryza sativa genomic contigs as queries against the GenBank non-redundant: protein data library identified as “nr.aa”. NAP is used to better align the amino acid sequences as compared to the genomic sequence. NAP extends the match in regions where BLASTX has identified high-scoring-pairs (HSPs), predicts introns, and then links the exons into a single ORF prediction. Experience suggests that NAP tends to mispredict the first exon. The NAP parameters are:

[0122] gap extension penalty=1

[0123] gap open penalty=15

[0124] gap length for constant penalty=25

[0125] min exon length (in aa)=7

[0126] minimum total length of all exons in a gene (in nucleotide)=200

[0127] homology>40%

[0128] The NAP alignment score and GenBank reference number for best match are reported for each contig for which there is a NAP hit.

[0129] The GenScan program is “trained” with Arabidopsis thaliana characteristics. Though better than the “off-the-shelf” version, the GenScan trained to identify Oryza sativa and Arabidopsis thaliana genes proved more proficient at predicting exons than predicting full-length genes. Predicting full-length genes is compromised by point mutations in the unfinished contigs, as well as by the short length of the contigs relative to the typical length of a gene. Due to the errors found in the full-length gene predictions by GenScan, inclusion of GenScan-predicted genes is limited to those genes and exons whose probabilities are above a conservative probability threshold. The GenScan parameters are:

[0130] weighted mean GenScan P value>0.4

[0131] mean GenScan T value>0

[0132] mean GenScan Coding score>50

[0133] length>200 bp

[0134] The weighted mean GenScan P value is a probability for correctly predicting ORFs or partial ORFs and is defined as the (1/Σlᵢ)(Σlᵢ Pᵢ), where “l” is the length of an exon and “P” is the probability or correctness for the exon.

### EXAMPLE 4

[0135] This example illustrates the generation of the ESI libraries from cDNA prepared from a variety of Glycine max, Oryza sativa, and Zea mays tissue. Seeds are planted in commonly used planting pots and grown in an environmental chamber. Tissue is harvested as follows:
[0136] a) For leaf tissue-based cDNA, leaf blades are cut with sharp scissors at seven weeks after planting;
[0137] b) For root tissue-based cDNA, roots of seven-week old plants are rinsed intensively with tap water to wash away dirt, and briefly blotted by paper towel to take away free water;
[0138] c) For stem tissue-based cDNA, stems are collected seven to eight weeks after planting by cutting the stems from the base and cutting the top of the plant to remove the floral tissue;
[0139] d) For flower bud tissue-based cDNA, green and unopened flower buds are harvested about seven weeks after planting;
[0140] e) For open flower tissue-based cDNA, completely opened flowers with all parts of floral structure observable, but no siliques are appearing, and are harvested about seven weeks after planting;
[0141] f) For immature seed tissue-based cDNA, seeds are harvested at approximately 7-8 weeks of age. The seeds range in maturity from the smallest seeds that could be dissected from siliques to just before starting to turn yellow in color.

[0142] All tissue is immediately frozen in liquid nitrogen and stored at −80° C. until total RNA extraction. The stored RNA is purified using Trizol reagent from life Technologies (Gibco BRL, Life Technologies, Gaithersburg, Md. U.S.A.), essentially as recommended by the manufacturer. Poly A+ RNA (mRNA) is purified using magnetic oligo dT beads essentially as recommended by the manufacturer (Dynabeads, Dynal Corporation, Lake Success, New York U.S.A.).

[0143] Construction of plant cDNA libraries is well-known in the art and a number of cloning strategies exist. A number of cDNA library construction kits are commercially available. The Superscript™ Plasmid System for cDNA synthesis and Plasmid Cloning (Gibco BRL, Life Technologies, Gaithersburg, Md. U.S.A.) is used, following the conditions suggested by the manufacturer.

[0144] The cDNA libraries are plated on LB agar containing the appropriate antibiotics for selection and incubated at 37° for a sufficient time to allow the growth of individual colonies. Single colonies are individually placed in each well of a 96-well microtiter plates containing LB liquid including the selective antibiotics. The plates are incubated overnight at approximately 37° C. with gentle shaking to promote growth of the cultures. The plasmid DNA is isolated from each clone using Qiaprep plasmid isolation kits, using the conditions recommended by the manufacturer (Qiagen Inc., Santa. Clara, Calif. U.S.A.).

[0145] The template plasmid DNA clones are used for subsequent sequencing. For sequencing the cDNA libraries, a commercially available sequencing kit, such as the ABI PRISM dRhodamine Terminator Cycle Sequencing Ready Reaction Kit with AmpliTaq® DNA Polymerase, FS, is used under the conditions recommended by the manufacturer (PE Applied Biosystems, Foster City, Calif.). The EST's of the present invention are generated by sequencing initiated from the 5′ end of each cDNA clone.

[0146] A number of sequencing techniques are known in the art, including fluorescence-based sequencing methodologies. These methods have the detection, automation and instrumentation capability necessary for the analysis of large volumes of sequence data. Currently, the 377 DNA Sequencer (Perkin-Elmer Corp., Applied Biosystems Div., Foster City, Calif.) allows the most rapid electrophoresis and data collection. With these types of automated systems, fluorescent dye-labeled sequence reaction products are detected and data entered directly into the computer, producing a chromatogram that is subsequently viewed, stored, and analyzed using the corresponding software programs. These methods are known to those of skill in the art and have been described and reviewed.

[0147] The generated ESTs (including any full length cDNA sequences) are combined with ESTs and full length cDNA sequences in public databases such as GenBank. Duplicate sequences are removed; and duplicate sequence identification numbers are replaced. The combined dataset is then clustered and assembled using Pangea, Systems tool identified as CAT v.3.2. First, the EST sequences are screened and filtered, e.g. high frequency words are masked to prevent spurious clustering; sequence common to known contaminants such as cloning bacteria are masked; high frequency repeated sequences and simple sequences are masked; unmasked sequences of less than 100 bp are eliminated. The thus-screened and filtered ESTs are combined and subjected to a word-based clustering algorithm which calculates sequence pair distances based on word frequencies and uses a single linkage method to group like sequences into clusters of more than one sequence, as appropriate. Clustered sequence files are assembled individually using an iterative method based on PHRAP/CRAW/MAP providing one or more self-consistent consensus sequences and inconsistent singleton sequences. The assembled clustered sequence files are checked for completeness and parsed to create data representing each consensus contiguous sequence (contig), the initial EST sequences, and the relative position of each EST in a respective contig. The sequence of the 5′ most clone is identified from each contig. The initial sequences that are not included in a contig are separated out. A FASTA file is created consisting of sequences comprising the sequence of each contig and all original sequences which were not included in a contig.

### EXAMPLE 5

[0148] cDNA sequences are assembled as above and are translated into all six reading frames. Translations of genes or gene fragments from genomic DNA whose coordinates are determined by Genscan or AAT/NAP are searched against standard or fragment Pfam (version 5.3) profile Hidden Markov Models for transcription factor families as are the cDNA translations. HMMs for transcription factor families in Pfam were rebuilt using HMMER software based on the full alignment provided in Pfam. The E value cutoff is set at 10.

[0149] Hidden Markov Models are constructed for transcription factor families not included in the Pfam database by aligning known domains manually. Hidden Markov Models are built using hmmbuild (with and without the f option) using the HMMER software with the alignments as input. HMM models are calibrated using the HMMER software (hmmcalibrate) with the HMM model as input. Protein data sets are searched with the HMM models using hmmsearch in the HMMER software package version 2.1.1 using default parameters.

[0150] Framealign searches are used when known transcription factor domains are not detected by Hidden Markov Models. In these cases, the domains per transcription factor family are listed from the Transfac database. Using Gencore software version 4.5.4 DNA datasets are framealign searched with each domain using an E value cutoff of 1E-3 all other parameters are default. The search results are combined for all domains per family.

[0151] Additional transcription factors are found by keyword searches that are carried out against cDNA sequences annotated using the BLAST 2.0 suite of programs with default parameters. Keyword searching is carried out against the top hit (E value better than or equal to 1E-08) using terms indicative of transcription factor families from Table 2.

### Description of the Tables

[0152] Table 1 lists the amino acid sequences translated from nucleotide sequences determined to be transcription factors as analyzed in Example 5, above. Column headings are as follows:
[0153] SEQ NUM: The entries in the SEQ NUM column refer to the corresponding sequence in the sequence listing.
[0154] SEQ ID: The SEQ ID is the name of the sequence.
[0155] Family/Method/E value: Entries in this column list the transcription factor family to which the sequence belongs. The families are described in Table 2. The entries also list the method used to determine transcription factor family. “HMM” refers to the Hidden Markov Model method as described in Example 5. “Framesearch” refers to the framealign search method described in Example 5 and “keyword” refers to BLAST annotation followed by keyword searching as described in Example 5. The E value for each of the methods is also listed in this column. E value is defined as the expectation E (range 0 to infinity) calculated for an alignment between the query sequence and a database sequence can be extrapolated to an expectation over the entire database search, by converting the pairwise expectation to a probability (range 0-1) and multiplying the result by the ratio of the entire database size (expressed in residues) to the length of the matching database sequence. In detail:
   [0156] E_database=(1−exp(−E))D/d where D is the size of the database; d is the length of the matching database sequence; and the quantity (1−exp(−E)) is the probability, P, corresponding to the expectation E for the pairwise sequence comparison.

[0157] Table 2 lists transcription factor families, a brief description of each, and other related families. Column headings are as follows:
[0158] Transcription Factor Family: Entries in this column list the transcription factor families as listed in the Pfam database, Transfac, or PROSITE.

[0159] Family Name and Domain Description: Entries in this column describe the transcription factor families listed in column 1. These descriptions are from the Pfam database, Transfac, or PROSITE.

TABLE 2

| Transcription | |
|---|---|
| Factor Family | Family Name and Domain Description |
| AP2 | This 60 amino acid residue domain can bind to DNA - this domain is plant specific - members |
| | of this family are suggested to be related to pyridoxal phosphate-binding domains such as found |
| | in aminotran 2-ethylene response (inducible). Examples: ethylene-responsive element binding |
| | proteins (EREBPs) & E. coli universal stress protein UspA |
| ANK | Ankyrin repeat. Some Ankyrin-only proteins will interact with rel-ankyrin proteins to inhibit |
| | DNA binding activity. Exaniples: IkB α, γ, β and cactus. |
| ARF | Auxin response factor - plant specific. Not in Pfam- not to be confused with similarly named |
| | ADP-ribosylation factor (GTP binding protein) that is listed as ARF in Pfam. |
| ARID | AT-Rich Interaction Domain - DNA-binding. Examples: Structural homology with T4 RNase |
| | H, E. coli endonuclease III & Bacillus subtilis DNA polymerase I |
| AT-hook | The AT-hook is an AT-rich DNA-binding motif that was first described in mammalian high- |
| | mobility-group non-histone chromosomal protein HMG-I/Y. It is necessary and sufficient for |
| | binding to the narrow minor groove of stretches of AT-rich DNA via a conserved nine amino |
| | acid peptide (KRPRGRPKK). Many of the AT-hook DNA-binding motif proteins have been |
| | shown to have an effect on the structure and architecture of chromatin at levels beyond the |
| | action of the basic histones. They have been shown to also play a role in transcription regulation |
| | by acting as cofactors. |
| 14-3-3 | The 14-3-3 proteins are a family of closely related acidic homodimeric proteins of about 30 Kd. |
| | The GF14 (G-Box Factor 14-3-3 Homolog) family is a group of proteins similar to 14-3-3 |
| | proteins that bind G-box oligonucleotides in promoters to regulate transcription. |
| B3 | Similar to ARF - plant specific. Not in Pfam. Binds DNA directly. |
| BAH | Bromo-adjacent homology. Appears to act as a protein-protein interaction module specialized |
| | in gene silencing. It might play an important role by linking DNA methylation, replication and |
| | transcriptional regulation. Examples: DNA (cytosine-5) methyltransferases & Origin recognition |
| | complex 1 (Orc1) proteins. |
| basic | This basic domain is found in the MyoD family of muscle specific proteins that control muscle |
| | development. The bHLH region of the MyoD family includes the basic domain and the Helix- |
| | loop-helix (HLH) motif. The bHLH region mediates specific DNA binding with 12 residues of |
| | the basic domain involved in DNA binding. The basic domain forms an extended alpha helix in |
| | the structure. |
| BPF-1 | The parsley BPF-1 protein (Box P-binding factor) was identified as a transcription factor that |
| | bound the promoter of phenylalanine ammonia lyase (PAL1) in response to a fungal elicitor. An |
| | Arabidopsis homolog HPPBF-1 (H-protein promoter binding factor-1), was found to regulate |
| | light-dependent expression of the H subunit of glycine decarboxylase, a mitochondrial enzyme |
| | complex involved in photorespiration. |
| bromodomain | About 70 amino acids - Exact function of this domain is not yet known but it is thought to be |
| | involved in protein-protein interactions and it may be important for the assembly or activity of |
| | multicomponent complexes involved in transcriptional activation. Examples: Mammalian |
| | CREB-binding protein; also found in many chromatin associated proteins - bromodomains can |
| | interact specifically with acetylated lysine. |
| BTB | Named for BR-C, ttk and bab - approximately 115 amino acids. The POZ or BTB domain is |
| | also known as BR-C/Ttk or ZiN Found primarily in zinc finger proteins - present near the N- |
| | terminus of a fraction of zinc finger (zf-C2H2) proteins. The BTB/POZ domain mediates |
| | homomeric dimerization and in some instances heteromeric dimerization - inhibits the |
| | interaction of their associated finger regions with DNA - shown to mediate transcriptional |
| | repression and to interact with components of histone deacetylase co-repressor complexes. Other |
| | Examples: Drosophila bric a brac protein plus an estimated 40 members in Drosophila. |
| BZIP | Basic region mediating sequence-specific DNA-binding followed by a leucine zipper required |
| | for dimerization - family is quite large. Examples: Fos, Jun, CRE, & Arabidopsis G-box |
| | binding factors GBF. |
| CBFD, NFYB, | Histone-like transcription factors (CBF/NF-Y) and archaeal histones CCAAT-binding factor |
| HMF | (CBF). Heteromeric transcription factor that consists of two different components, both needed |
| | for DNA-binding. First subunit of CBFD (NF-YB) binds DNA (protein of 116 to 210 amino- |
| | acid residues); the second subunit of CBFD (NF-YA) contains an N-terminal subunit-association |
| | domain and a C-terminal DNA recognition domain (a protein of 265 to 350 amino-acid |
| | residues). Other Examples: histone-like subunits of transcription factor IID. |
| chromo | CHRromatin Organization MOdifier - about 60 amino acids Originally found in proteins that |
| | modify the structure of chromatin to the condensed morphology of heterochromatin (Drosophila |
| | modifiers of variegation). Examples: Fission yeast swi6 (repression of the silent mating-type |
| | loci mat2 and mat3), Drosophila protein Su(var)3-9 (a suppressor of position-effect variegation), |
| | & mammalian DNA-binding/helicase proteins CHD-1 to CHD-4. |
| chromo shadow | This domain is distantly related to chromo. This domain is always found in association with a |
| | chromo domain although not all chromo domain proteins contain the chromo shadow. |
| | Examples: Fission yeast swi6 (repression of the silent mating-type loci mat2 and mat3). |
| Copper-fist | Some fungal transcription factors contain a N-terminal domain that seems to be involved in |
| | copper-dependent DNA-binding - undergo a conformational change in presence of copper. |
| | Examples: Yeast ACE1 (or CUP2) and Candida glabrata AMT1 that regulate the expression of |
| | the metallothionein genes - Yarrowia lipolytica copper resistance protein CRF1. |
| CSD | Cold shock domain - about 70 amino acids. Binds to the CCAAT-containing Y box and the B |
| | box. Binds to cold tolerance gene promoters in bacteria. Examples: E. coli protein CS7.4 (gene |
| | cspA) that is induced in response to low temperature & Bacillus subtilis cold-shock proteins |
| | cspB and cspC. |
| Ctf/nf1 | Nuclear factor I (NF-I) or CCAAT box-binding transcription factor (CTF) (also known as |
| | TGGCA-binding proteins) are a family of vertebrate nuclear proteins which recognize and bind, |
| | as dimers, the palindromic DNA sequence 5′-TGGCANNNTGCCA-3′. CTF/NF-I binding sites |
| | are present in viral and cellular promoters and in the origin of DNA replication of Adenovirus |
| | type 2. |
| Dm-domain | The DM domain is named after dsx and mab-3 - dsx contains a single amino-terminal DM |
| | domain, whereas mab-3 contains two amino-terminal domains. The DM domain has a pattern of |
| | conserved zinc chelating residues C2H2C4. The dsx DM domain has been shown to dimerize |
| | and bind palindromic DNA. |
| Dof | Dof proteins are a family of TFs that share a unique DNA-binding domain of ˜52 aa. May form |
| | a single zinc-finger that is essential for DNA recognition. Plant specific and have various roles |
| | in the cell. Found in both monocots and dicots. |
| DPB | Described by Mendel as the DNA-binding protein (DBP) family, a collection of miscellaneous |
| | proteins that have been functionally identified by their ability to physically bind to DNA via a |
| | DNA-binding domain. Here, includes the remorin like DNA-binding proteins. |
| | Also see TEO which describes the PCF1/2 like TFs. |
| ENBP | ENBP1 (early nodulin gene-binding protein 1), binds to an AT-rich regulatory element of |
| | psENOD12b to regulate its expression upon infection of plant root hairs by nitrogen-fixing |
| | bacteria. ENBP1 and ENBP1-like transcription factors are probably involved in general cellular |
| | processes, others than in a symbiotic context. |
| Ets | Ets transcription factors are nuclear effectors of the Ras-MAP-kinase signaling pathway. |
| | Avian leukemia virus E26 is a replication defective retrovirus that induces a mixed |
| | erythroid/myeloid leukemia in chickens. E26 virus carries two distinct oncogenes, v-myb and v- |
| | ets. The ets portion of this oncogene is required for the induction of erythroblastosis. V-ets and |
| | c-ets-1, its cellular progenitor, have been shown to be nuclear DNA-binding proteins. |
| Fork_head | About 100 amino-acid residues, also known as the “winged helix” - present in some eukaryotic |
| | trasncription factors - involved in DNA-binding. Examples: Drosophila forkhead (fkh), |
| | mammalian transcriptional activators HNF-3-alpha, -beta, and -gamma, human HTLF, Xenopus |
| | XFKH1, yeast HCM1, yeast FKH1. |
| GATA | GATA family of transcription factors are proteins that bind to DNA sites with the consensus |
| | sequence (A/T)GATA(A/G). Contain a pair of highly similar ‘zinc finger’ type domains. |
| | Examples: GATA 1-4 are TF found in mammals; they regulate development in certain cell |
| | types by binding to the GATA promoter region of globulin genes, & others. Note: A similar |
| | single ‘zinc finger’ domain protein is involved in positive and negative nitrogen metabolism |
| | gene regulation in fungus and yeast and also Neurospora crassa light regulated genes. |
| Gld | A domain with limited amino acid similarity to the TEA DNA binding domain found in a |
| | number of regulatory genes from fungi, insects, and mammals. This domain is predicted to form |
| | two alpha helices with sequence similarity to two alpha helices of the TEA domain that are |
| | implicated in DNA binding. These proteins are not picked up by Pfam's TEA model. Found in |
| | some response_reg proteins. Examples: ARR, AT1; both in Arabidopsis. Golden2 in maize. |
| HhH | Helix-hairpin-helix motif - multiple domains found in a protein. These HhH motifs bind DNA in |
| | a non-sequence-specific manner. Examples: Rat pol beta, endonuclease III, AlkA, & the 5′ |
| | nuclease domain of Taq pol I. |
| Hist_deacetyl | Regulation of transcription is caused in part by reversibly acetylating histones on several lysine |
| | residues. Histone deacetylases catalyze the removal of the acetyl group. |
| HLH | Helix-loop-helix domain - 40 to 50 amino acid residues. Two amphipathic helices joined by a |
| | variable length linker region that could form a loop. This ‘helix-loop-helix’ (HLH) domain |
| | mediates protein dimerization - most of these proteins have an extra basic region of about 15 |
| | amino acid residues adjacent to the HLH domain which specifically binds to DNA - members of |
| | the family are referred to as basic helix-loop-helix proteins (bHLH) - bind E boxes - |
| | dimerization is necessary but independent of DNA binding - proteins without basic region act |
| | as repressors since they are unable to bind DNA but do dimerize. Examples: Myc (oncogene), |
| | Myo (muscle differentiation), Maize anthocyanin regulatory proteins, and other cellular |
| | differentiation TFs. |
| HMG_box | High mobility group; relatively low molecular weight non-histone components in chromatin |
| | Known to bind to nucleosomes in active chromatin - thought to be involved in chromatin |
| | formation. |
| HMG14_17 | High mobility group. HMG14 and HMG17 are two related proteins of about 100 amino acid |
| | residues that bind to the inner side of the nucleosomal DNA thus altering the interaction between |
| | the DNA and the histone octamer. These two proteins may be involved in the process that |
| | maintains transcribable genes in a unique chromatin conformation. |
| Homeobox | Master control homeotic genes that determine body plan - 60-residue motif - subfamilies |
| | named for 3 Drosophila gene families. Play an important role in development - most are known |
| | to be sequence-specific DNA-binding transcription factors. The domain binds DNA through a |
| | helix-turn-helix (HTH) structure. - Homeobox is a 3-element fingerprint that provides a |
| | signature for the homeobox domain of homeotic proteins. Examples: Drosophila hox proteins: |
| | antennapedia (Antp), abdominal-A (abd-A), deformed (Dfd), proboscipedia (pb), sex combs |
| | reduced (scr), and ultrabithorax (ubx) which are collectively known as the ‘antennapedia’ |
| | subfamily; the engrailed subfamily defined by engrailed (en) which specifies the body |
| | segmentation pattern and is required for the development of the CNS; and the paired gene |
| | subfamily. |
| Histone | Histone protein is unique to eukaryotes - an octamer is assembled to form chromatin with 146 |
| | base pairs of DNA organized into a superhelix around a histone octomer to create a nucleosome |
| | (‘beads on a string’). Examples: H2A, H2B, H3, & H4. |
| HSF_DNA- | Heat shock factor (HSF) is a DNA-binding protein that specifically binds heat shock promoter |
| binding | elements (HSE). HSF is expressed at normal temperatures but is activated by heat shock or |
| | chemical stresses. |
| IAA | The Aux/IAA proteins were identified as a class of short-lived, nuclear localized proteins that |
| | are rapidly transcriptionally induced in response to auxin. These proteins contain four highly |
| | conserved domains (boxes I, II, III, IV)- this model covers boxes III and IV. See ARF family in |
| | this document for related proteins. |
| IBR | The IBR (In Between Ring fingers) domain is found to occur between pairs of ring fingers (Zf- |
| | C3HC4). The function of this domain is unknown. |
| irf | This family of transcription factors is important in the regulation of interferons in response to |
| | infection by virus and in the regulation of interferon-inducible genes. Three of the five |
| | conserved tryptophan residues bind to DNA. |
| K-box | K-box region is commonly found associated with SRF-type transcription factors. The K-box is a |
| | possible coiled-coil structure. Possible role in multimer formation. Examples: PISTILLATA |
| | (PI) gene of Arabidopsis causes homeotic conversion of petals to sepals and of stamens to |
| | carpels & SRF (Serum response factor) binds the serum response element. |
| KRAB | The KRAB domain (or Kruppel-associated box) is present in about a third of zinc finger |
| | proteins containing C2H2 fingers. The KRAB domain is found to be involved in protein-protein |
| | interactions. |
| LIM | Cysteine-rich domain of about 60 amino-acid residues. Generally occurs as two tandem copies |
| | in proteins - in the LIM domain, there are seven conserved cysteine residues and a histidine - |
| | the LIM domain binds two zinc ions - LIM does not bind DNA, rather it seems to act as |
| | interface for protein-protein interaction. Examples: Pollen specific protein (SF3), Mammalian |
| | zinc absorption protein, Vertebrate paxillin (cytoskeletal focal adhesion protein), Plaque |
| | adhesion protein, and several homeotic proteins. |
| Linker_histone | Member of histone octamer - see histone. Examples: H1, H5 |
| MADS | See SRF-TF |
| Myb_DNA- | This family contains the DNA-binding domains from the Myb proteins, as well as the SANT |
| binding | domain family. Retroviral oncogene v-myb, and its cellular counterpart c-myb, encode nuclear |
| | DNA-binding proteins that specifically recognize the sequence YAAC(G/T)G. |
| | Examples: Maize C1 protein (anthocyanin biosynthesis), Maize P protein (regulates the |
| | biosynthetic pathway of a flavonoid-derived pigment in certain floral tissues), Arabidopsis GL1 |
| | (required for the initiation of differentiation of leaf hair cells/trichomes), Yeast txn & telomere |
| | length proteins. |
| Myc N Term | Myc amino-terminal region. The myc family belongs to the basic helix-loop-helix leucine zipper |
| | class of transcription factors. Myc forms a heterodimer with Max, and this complex regulates |
| | cell growth through direct activation of genes involved in cell replication. c-Myc can also |
| | repress the transcription of specific genes. |
| NAM | The NAM (no apical meristem) family is a group of transcription factors that share a highly |
| | conserved N-terminal domain of about 150 amino acids, designated the NAC domain (NAC |
| | stands for Petunia, NAM, and Arabidopsis, ATAF1, ATAF2 and CUC2). Present in monocots |
| | and dicots. Probably have roles in the regulation of embryo and flower development. Plant |
| | specific. |
| NAP_FAMILY | Nucleosome assembly protein (NAP) - histone chaperonel May be involved in regulating gene |
| | expression as a result of histone accessibility. NAP-2 (human NAP clone) can interact with both |
| | core and linker histones and recombinant NAP-2 can transfer histones onto naked DNA |
| | templates. |
| P53 | The p53 tumor antigen is a protein found in increased amounts in a wide variety of transformed |
| | cells. p53 is probably involved in cell cycle regulation, and may be a trans-activator that acts to |
| | negatively regulate cellular division by controlling a set of genes required for this process. |
| Pax | “paired box” domain - a 124 amino-acid conserved domain - generally located in the N- |
| | terminal section of the proteins - function of this conserved domain is not yet known. In some |
| | of the pax proteins, there is a homeobox domain upstream of the paired box. Examples: |
| | Drosophila segmentation pair-rule class protein paired (prd), Drosophila proteins Pox-meso and |
| | Pox-neuro, the PAX proteins. |
| PHD | Zinc finger-like motif. Regulate the expression of the homeotic genes through a mechanism |
| | thought to involve some aspect of chromatin structure. Speculate that the PHD-fingers are |
| | protein-protein interaction domains or that they recognize a family of related targets in the |
| | nucleus such as the nucleosomal histone tails. |
| POU | ‘POU’ (pronounced ‘pow’) domain - a 70 to 75 amino-acid region found upstream of a |
| | homeobox domain in some eukaryotic transcription factors. It is thought to confer high-affinity |
| | site-specific DNA-binding and to mediate cooperative protein-protein interaction on DNA. |
| | Examples: Oct genes (bind to immunoglobulim promoter octomer region to activate genes), |
| | Neuronal development genes, & C. elegans development genes |
| Protamine_p2 | Protamine P2 can substitute for histones in the chromatin of sperm. |
| Response_reg | This domain receives the signal from the sensor partner in bacterial two-component systems. It |
| | is usually found N-terminal to a DNA binding effector domain (e.g.GLD). |
| Rhd | Conserved domain in a family of eukaryotic transcription factors with basic impact on |
| | oncogenesis, embryonic development and differentiation including immune response and acute |
| | phase reaction - composed of two structural domains, the N-terminal region is similar to that |
| | found in P53, whereas the C terminal region is an immunoglobulin-like fold. Examples: NF- |
| | kappa-B, RelB, Drosophila Dif. |
| Runt | New family of heteromeric TFs. |
| Scan | The SCAN domain (named after SRE-ZBP, CTfin51, AW-1 and Number 18 cDNA) is found in |
| | several zf-c2h2 proteins. This conserved domain has been shown to be able to mediate homo- |
| | and hetero-oligomerisation. |
| SCR | The Arabidopsis SCARECROW gene regulates an assymetric cell division essential for proper |
| | radial organization of root cell layers. It was tentatively described as a transcription factor based |
| | on the presence of homopolymeric stretches of several amino acids, the presence of a basic |
| | domain similar to that of the basic-leucine zipper family of transcription factors, and the |
| | presence of leucine heptad repeats. Two SCARECROW homologs, RGA and GA1, are involved |
| | in the gibberellin signal transduction pathway. |
| SBPB | A new family of DNA binding proteins (putative transcriptional regulators) called squamosa |
| | promoter binding proteins or SBPs that potentially regulate floral transition. The SBPs possess a |
| | bipartite nuclear localization signal, a putative acidic activation domain and a so-called SBP-box |
| | DNA binding domain motif that does not show similarity to any known DNA binding motif. |
| SET | SET (Suvar3-9, Enhancer-of-zeste, & Trithorax) domains appear to be protein-protein |
| | interaction domains. It has been demonstrated that SET domains mediate interactions with a |
| | family of proteins that display similarity with dual-specificity phosphatases (dsPTPases). Link |
| | SET-domain containing components of the epigenetic regulatory machinery with signalling |
| | pathways involved in growth and differentiation. Examples: ASH1 protein contains a SET |
| | domain and a PHD finger (required for stable patterns of homeotic gene expression in |
| | Drosophila). |
| SNF2_N | SNF2 and “others” N-terminal domain. Examples: This domain is found in proteins involved in |
| | a variety of processes including transcription regulation (e.g., SNF2, STH1, brahma, MOT1), |
| | DNA repair (e.g., ERCC6, RAD16, RAD5), DNA recombination (e.g., RAD54), & chromatin |
| | unwinding (e.g., ISWI) as well as a variety of other proteins with little functional information |
| | (e.g., lodestar, ETL1). |
| SRF-TF | 56 amino-acid residues - function as dimers- commonly homeotic proteins. Examples: Human |
| (MADS) | serum response factor (SRF), a ubiquitous nuclear protein important for cell proliferation and |
| | differentiation; homeotic proteins involved in control of floral development; yeast arginine |
| | metabolism regulation protein I, & yeast mating type specific genes. |
| Stat | STAT proteins (Signal Transducers and Activators of Transcription) are a family of |
| | transcription factors that are specifically activated to regulate gene transcription when cells |
| | encounter cytokines and growth factors. STAT proteins also include an SH2 domain. |
| TBP | Transcription factor TFIID (or TATA-binding protein, TBP). General factor that plays a major |
| | role in the activation of eukaryotic genes transcribed by RNA polymerase II - binds the TATA |
| | box - C-terminal domain of about 180 residues contains two conserved repeats of a 77 amino- |
| | acid region. Generates a saddle-shaped structure that sits astride the DNA. |
| t-box | About 170 to 190 amino acids, known as the T-box domain. First found in mouse T locus |
| | (Brachyury) protein, a transcription factor involved in mesoderm differentiation. |
| | Essential in tissue specification, morphogenesis and organogenesis |
| Tea | A DNA-binding region of about 66 to 68 amino acids that has been found in the N-terminal |
| | section of several regulatory proteins. Examples: Mammalian enhancer factor TEF-1, |
| | Drosophila scalloped protein (gene sd), Emericella nidulans regulatory protein abaA, yeast |
| | trans-acting factor TEC1, C. elegans hypothetical protein F28B12.2. |
| TEO | The founding members of this gene family are teosinte-branched1 of maize and cycloidea of |
| | Antirrhinum (snapdragon), both of which are involved in the control of plant form and structure. |
| | They have limited similarity to the rice DNA binding proteins PCF1 and PCF2. All share a |
| | predicted basic-helix-loop-helix domain, TCP, which has been shown to be required for DNA |
| | binding of PCF1 and PCF2. |
| TFIIS | Transcription factor S-II (TFIIS). Necessary for efficient RNA polymerase II transcription |
| | elongation, past template-encoded pause sites. TFIIS shows DNA-binding activity only in the |
| | presence of RNA polymerase II. Contains four cysteines that bind a zinc ion and fold in a |
| | conformation termed a ‘zinc ribbon’. Examples: also includes the eukaryotic and archebacterial |
| | RNA polymerase subunits of the 15 Kd/M family, African swine fever virus protein I243L, & |
| | Vaccinia virus RNA polymerase. |
| Trihelix | Plant specific domain involved in light response - plant specific; not in Pfam. |
| Transcript_fac2 | Transcription factor TFIIB repeat. |
| WRKY | ˜50-60 aa domain. Often repeated within a WRKY protein, but it may also be present as a single |
| | copy. WRKY proteins contain several general features typical of transcription factors, like |
| | putative nuclear localization signals and transcription activation domains. Founding members |
| | are ABF1 and ABF2 proteins. May be involved in regulation of sporamin and alpha-amy genes. |
| | May also play a role in the signal transduction pathway that leads to pathogenesis-related (PR) |
| | gene activation in response to pathogens. |
| ZF-B box | B-box zinc finger. |
| ZF-C2H2 | The first zinc finger class to be characterized - the first pair of zinc coordinating residues are |
| | cysteines, while the second pair are histidines. A number of experimental reports have |
| | demonstrated the zinc-dependent DNA or RNA binding property of some members of this class. |
| | Examples: Mammalian transcription factors Sp1-4, Xenopus transcription factor TFIIIA, & |
| | Drosophila Hunchback and Kruppel |
| Zf-C3HC4 | Conserved cysteine-rich domain of 40 to 60 residues (called C3HC4 zinc-finger or ‘RING’ |
| | finger) that binds two atoms of zinc, and is probably involved in mediating protein-protein |
| | interactions. |
| ZF-C4 | Conserved cysteine-rich DNA-binding region of some 65 residues. Almost always the DNA- |
| | binding domain of a nuclear hormone receptor. Receptors for steroid, thyroid, and retinoid |
| | hormones belong to a family of nuclear trans-acting transcriptional regulatory factors. These |
| | proteins regulate diverse biological processes such as pattern formation, cellular differentiation |
| | and homeostasis. |
| ZF-CCCH | Zinc finger |
| ZF-CCHC | A family of CCHC zinc fingers, mostly from retroviral gag proteins (nucleocapsid). Prototype |
| | structure is from HIV. Also contains members involved in eukaryotic gene regulation, such as |
| | C. elegans GLH-1. Structure is an 18-residue zinc finger. |
| ZF-CHC2 | CHC2 zinc finger |
| ZF-CONSTANS | CONSTANS family zinc finger. So far only reported in plants. CONSTANS (CO) gene of |
| | Arabidopsis promotes flowering. Some transgenic plants containing extra copies of CO flowered |
| | earlier than wild type, suggesting that CO activity is limiting on flowering time. Double mutants |
| | were constructed containing CO and mutations affecting gibberellic acid responses, meristem |
| | identity, or phytochrome function, and their phenotypes suggested a model for the role of CO in |
| | promoting flowering. |
| Zf-C2HC | A DNA-binding zinc finger domain. Examples: human myelin transcription factor (Myt), C. elegans |
| | hypothetical protein F52F12.6, |
| ZF-MYND | DNA-binding domain found in Drosophila DEAF-1 protein that binds to a 120 bp homeotic |
| | response element. |
| ZN_CLUS | A cysteine-rich region that binds DNA in a zinc-dependent fashion. Found in fungal |
| | transcriptional activator proteins. It has been shown that this region forms a binuclear zinc |
| | cluster where six conserved cysteines bind two zinc cations. |
| ZZ | New putative zinc finger in dystrophin and other proteins. Binds calmodulin. DNA-binding not |
| | yet shown. |
| ZF-NF-X1 | Cysteine-rich sequence-specific DNA-binding protein. Interacts with the conserved X-box motif |
| | of the human major histocompatibility complex class II genes via a repeated Cys-His domain |
| | and functions as a transcriptional repressor. |

[0160] All publications and patent applications cited herein are incorporated by reference in their entirely to the same extent as if each individual publication or patent application was specifically and individually indicated to be incorporated by reference.

[0161] Although the foregoing invention has been described in some detail by way of illustration and example for purposes of clarity of understanding, it will be obvious that certain changes and modifications may be practiced within the scope of the appended claims.

The application's sequence listing, which the Patent Office published only in electronic form, follows.

SEQUENCE LISTING (33516 sequences)

SEQ ID NO: 1 - DNA, 186 bp, Zea mays
  Clone ID: TF_LIB3180-007-P2-M1-H1
tcgcgcgttggattcggttcacaggatcctctgcgccaccgcaaccgtgtgaccggccgtgccgccggcgattccgattcggcgacccgtgccaggcccggtcgcagacatgttgccgtcggagccgacccgggaggagagcgtgtacatgggcaagcttgcggagcaagcggagcggtaccagga

SEQ ID NO: 2 - DNA, 1680 bp, Zea mays
  Clone ID: TF_ZmC261_27
gaatagatgagacttttgtctaacttcaatgtaggagtttacaatgcagagaggattgagatgcattatcgatatactcctcaccagtataagttttgcctgctcgcatgaatagatgagactcaagtgtggcttcatgtgagtctaaagcaaaaaatatgcagggggaggggtatcaaaactaccttctccaagtattcttgcaacttttttattctgcccatatagtcttgatcctcaacgcacaatgaaataggatttgaatcgacacctggtccttcaaactggagcgggcctgggtttctgtagacatcttccaacaaaaagctggaagaattctgtctcaacacactaggaaaagttgagctgaatcatcagattcgggatgtagtagtagctgcttccttataaaagggggcaaaaactcaaagtgcagatgcccatggtgaaagctgagaagagatattctcaacagaaacacctttgccatggaagccatggatttcctataaacaaatagctccagtgagtaaaattataaatgggtagtcataagacgtgtaaacgtacctaaagcagagcatatagttcaggaatattctccacaagtgtctcaaataatcagatccaagcaaccatgagcatgacaaaattaagtattaggtatgtattgtttcatttgataattctaggatgtttgtacttcacatcagagttcagttgtttcaacatctttgtttctctaatgcagctactactacatcctgaatctgatgattcagctcaactttcctagattgagactgaaaagctgctagcccagttagttgagactgagatgaacagacgtttgaaggaggacacttacaaaggaaagaagtttaatgcattctgtcacttcttgggctaccaagctaggggagcactgcctgcaaagtttgattgcgattatgcctacgttttggggcatgtgtgctaccacatcatagctgccggattgaacggataacggatacatgactacagtgacaaatcttaagaatccagtgaacaagtggcgatgtggtgcgactcctatttcgtattactactttattcgcttgatgggacgcaaggcttcccatgtggcattggaatgtgctcttcaatcacatccaaacatggtcaaattttcaccattgatccaacctctgctacggcaatttccagcatcggcggtgtgctctttacaaagccttagagctgcctctcctgcaaagtctgaacttgcagagatagtcccacaagagaaatcaccaaaagattccattcaaccaatgtcaccgagtccaaggtattctacctcaagatgaagggcgactaccacaggtcaggcagagagccttggaaccgaactcttggagatggtgcctagcagggaagaggagattaagttgaaagaataaagggaggatgctttgtcgacttttgtagttaatgattatgtgagacttcagtttaagggctcaacttttactggttcttggaagtcatttagtagccctaagatttcatcagcattcttagtagtaattgctatagtatcaaatgggattgtggtatgagttgctcgagtactaagtactaacgttgttgtacattgtgaagctaagtgggtaatatcaaaagggattaagattt

SEQ ID NO: 3 - DNA, 888 bp, Zea mays
  Clone ID: TF_ZmC74_176
ggatattgctctggaggaattggcccccacccatcctattaggctttggctggtgctgaacttctcaactcgcctgaccatgcgtccatgcttgcagtctcgccaaataggtttgatttttgcacccattacatggactgtgtagtgttattttcttctttttttgcaatccttatgatccgaatgtgagctctgtgaaaaatatgaactaaggttattatgcatttcacagttcagacagctgttatgaaataacctggctttagctataacttgtgactagtgcaacatattagtattttttatagactagtgtaagcaactaaaggtctgtttggttgggctgtggctgtggaaaaagttgctggggctgtgagctgtggaaaaagctgctgtaggctgtatgctgttaaaaagctaaaaaacaattggtggaaaccactaaaagtcgttaaaagttcttcgatatacgttttcacagttccatccaaaagccactaaaagcaggtccaggggtgctttcagttttgcactacgagaaagtcggcttttagaaaaagctgcttcttggatccaaccctttggttggcttttggcttttagggggcaaaagccaaagccaaaagccaaaccaaacacaccctaaaggtgagttgaatctaaactgcagatgaagaactgaagatagtggtaagttattatgatcaacctgggattgccctcaccaacgggcgtgaatcgctcaggagccatcgatcccgtgtatcttttaactagaagtaatttatgctgggacaaagtctaacaacatttttgagcaagttactaataacatcagtaacttggatggttctatcgctataaatgttgattgtgcttcaaaagttg

SEQ ID NO: 4 - DNA, 676 bp, Zea mays
  unsure (1)..(676): unsure at all n locations
  Clone ID: TF_LIB4725-004-R1-K1-B3
cggggnnatgcagcttctgaaggacaacttagcattgtggacatcagaactaactggaggtgaagcatccaagggtaacgacgatgtcgacatggaggtacggcgcccctgccctttgacttgaatttggtttcgttagtaaaactccatgtgcttgagactccgcaatgtatgtgaaaggatgaagtggtcaaaatgcacaaaacactactaatcgtttccatcttatataaacgattttgcaatataaaagcttggatcatatttcacgacctcagcctgcatcaacagagtgaagtgaaatacaagtttgttcccattagatgatgtacttcaaaactatggcctgtgcacattttactctaggctgaagtccatgtcctacccatccggaatttctaattttttttattagcaagccacggtactttctttgctgccaaatctgaagtttgtttgtgtgcatgttttaagatgggcgatggaggctgatacattctccatgtttgggcagggttgatacattctccatgttttaaggaaacacagaaagcacgcaaaatatccaggctgtgatgctagcgaacctgngtcctcaagttntttctgcatcggaactcagaggagccttgtgtatttttctgaagtttctgtccgtctcgggttttttttttga

SEQ ID NO: 5 - DNA, 294 bp, Zea mays
  Clone ID: TF_LIB4763-041-A1-K1-A8
tagccaagtactgctgactcggaggagctcacggtggaggagcgaaacctcatgtctgtgcctacaagaacgccaccggacgccgccgcgcctcatggcgcatcatctcctccatcgagccgaggccgaggggcgaggcatgaggacgagtaacactcataagattaatcgtgccagattgaactgcctcgcaagatctggtctggcaatccccaacctgcttgagacccatctttgctgccgtcatccacccccccccggaggccaacggtcttctacctccccgatggaagg

SEQ ID NO: 6 - DNA, 601 bp, Zea mays
  Clone ID: TF_LIB4740-096-A1-K1-E7
gggacctcgagccgggcgggacccgaaccaaagccactcggatccatctcccactctcccctcctcgtcatcggctcctccgcctccacctccgcccgccccctgatccggatcgacgacgccgaccccagatccctttcctctccgccgtctcgcggagcgcgcggaggaggaggagagatacgaggaaagggttgaagtaatgaagaaggcagatgagatggttgagtgggaggagtacactagaggaggagggaaaaatgatgtgtgaggcatagaagaacgacaagggagggagaagagtaagaatgacatgaaatagtaggcgattgagcataaggaggaggtgcgaggcaatgaggattgagtaagagacagcaaggattataggagaaaagatgagattgagctgagaggatgtgggaggatattgtaaagatgcatgagactcatcaagagtcgtcttccattgctcccgagtcaaaggaattctataagaagaagaagggagagaagtacagatacgaagctgaaataaagaatggagctgagagaaaggatatagctgagaacgagaagaggagatacgaggatgagaagg

SEQ ID NO: 7 - DNA, 322 bp, Zea mays
  Clone ID: TF_LIB3136-048-Q1-K1-H1
gttgaccaagatctgtgatggcatcctcaagctgcttgagacccatcttgggccgacttccactgacgaccagttcaatgtcttctatgtcaagatgaagggtgactgctacagattccttgatgtgttcaagactggagctgtgagacaggacgccgttctaaacacgatcgtggcatacatagctgcccatgacattgctctggctgagctcgctacaactcaccctattgggcttggactggctcttaacttctcagtgttctactatgagattctgaacgcacctgatcctcacctgcatgtctagcaaagcatgctt

SEQ ID NO: 8 - DNA, 1257 bp, Zea mays
  Clone ID: TF_ZmC74_212
gcgtagtccgtcgcctaccggctatcatcagcacgcaccgccgccgcctctcatctcatcgccgcgctgcttccccgcccgcccccggattggcgctgccgcacccagatcttccccacccaaatcgactccgccatcgtccggatccacgcagagccgtcgcggatcgacgtgctgccgccacagattgcgcgctgtcgtacggatcgagagacacccaccgcaagccttccgcgctggcgccgttcgggaagtaaggaggctacggagagggcacaagctggggggtgtcgaactccgtggagaacgcgcgggcggtggatgcctagctctggtagtctggtgggagggtgaggaaaatctagattctgagaagtatgaagagctgattgagttcatggagaaggtggctaagacagttgattctgaggagcactacgttctgtcaattgcttacaagattgtcatggaacccaatgtgcttcatggtgcatcatatcctccattgagtagggggaagaaggccgtgtcaacgtggactgtgtcactctcattgaggactaccataacaagattgaagttgaactcagcaagatctgtgatggaatcctcaagctccttgattcccaccgtttccgcctcattaacagctgcagagtccaaggtcttctacctcaagatgaagggtgattactacgggtaccttgcggagtttgaaactggatctaggagaaaagatgcagctagaataccatggatattgctctggaggaattggcccccacccatcctattaggctttggctggtgctgaacttctcaactcgcctgaccatgcgtccatgcttgcagtctcgccaaataggaccgtgagatgatgatcgagccagggatgtggtgccaaccacaagatgccgtggtggacgaccggaaaaatgatggacttacccagtggatgctcgccaagcgagtacctcccccagcaaacactatttaagtgttaaaataaaggtactccttaggatgattggttgctggtgtgacttggcctccatccctgccaccgggatagacggtcgagtgggttattgcttccgcaggagaggaccaggaggagtggcgtggccaggcttcaccatgttgctcggttcttctccgttagttatttccgctgcattaaaaattttggttattatttctaaaactccgataatgtaatcactaatgatacttattaaatttatggtattgtgtttt

SEQ ID NO: 9 - DNA, 630 bp, Zea mays
  Clone ID: TF_LIB4720-012-R1-K1-B9
gcatgtattccacgctctttgtttggatcccaatttcatgaccgagagcagcgcatggccattgcctttgggttcgatttccaacgatcaagaggacacgatgttctatgctgcagatgaagggagactactactgatacctctctttgtataagactggcacctccaaagaaaggacgctgctaactacaccatctcgacctagaaggataccaactacattaattactgtgaccttcatgcaacttactgtattaggctccaactgaaactatacctaccacaggtctactatgaaaaacacagctaacttgattacgcatggagctttaaacaacatgcactttactactgcatgtgggtactgcataccctagctgaggagtgctacatggacaccactctgatgatgaacatacttattcatcactggatgctatggactattgacatatcggaagcacctgctgaagacatcagatgggcgcccaaccaccactgctgcgagggcaaggaagacctgtcttacatgccttgaacctactgcctagtgttggatgctgtctattgacattatgcaatgtgatctgcaccctgctttattgtaagcgacgcttgtagcatccgtct

SEQ ID NO: 10 - DNA, 417 bp, Zea mays
  Clone ID: TF_LIB189-022-Q1-E1-E2
agtacatggccatatcgataatatcgataaaagaacaaacttaatcctggcgccgggggaaaatgttcaaatgggcaaactgggttaacaaggccaaagaaaggagaatcccgttagaaacaaaaacaatttaaacttaacaagggaaaacgttccaaaattcaaggctaaactgagcaatatctgtaatggcatcctgaagctgcttgactcccacctagtgccttcttttactgctgctgaatcaaaggtcttctacctcaagatgaagggtgactatcacaggtatcttgcggaatttaagactggtcctgagaggaaggaatctgctgagagcacgatgatggcctacaaaggtgctcaaggaaattgcccgggttaacctggaacctacccatccgataaggcttgggcttg

SEQ ID NO: 11 - DNA, 648 bp, Zea mays
  Clone ID: TF_LIB4742-038-R1-K1-B11
cattgggacctcgagccggcgggatcccgcatattctcaggagcctctccgaaacacgacttcgatggattccaccaccacgaccttcctcgattcctgctggtcgtgaaaatgtccacggagcccctacggaccagctccccgcgcgaccaccgcttcctgctgaagatgaagcatgtgctcggcaactacaccaatgcgtggagctggatgatcaagatgatcaactgcccgatcgagctactcatgcgatacaagttcagcctctaggatccacaaccccatcttgatggccgcgagcgtccatgtcaaggcataccccatgatgatccgcctgcgagagcgcgagcatgtgacgcacatctacaccacatcaccaggcagtcggcgagaatttcgtcctctcctacgacaagtctgtaaccgaagccgccaagagtgtggcaaacgacatctgcaggcttaacgtgcccacgattctagttgccgatatctagagatgcaggccgattactacactatacctaggttggcactgactggaactgaaagactcgacgcctctgataacacgatggtgcgatatcaggctgtccatgacattgctctggttgagcttgctccaactcatcctagtagggttgtact

SEQ ID NO: 12 - DNA, 295 bp, Zea mays
  unsure (1)..(295): unsure at all n locations
  Clone ID: TF_LIB3245-475-P1-N1-F12
gcacgccnnccggnnngggaaggcgaggagaggggaaccccggcccagggagaggggnggggaggggaacggcggcggaggagaaggaggagcgggagaagcncgngngccnggccaagcnngccgagcaggcggagcggnacgacgaaanggnggaaaacaagaagaancnngcnagganggacgngganangagngcngaagaaaggcannngnncncagnnggnnncaagaacacnannggagcaaagagggcancaaggagaancaaggggncacaagagcaaaagggcgc

SEQ ID NO: 13 - DNA, 1342 bp, Zea mays
  Clone ID: TF_ZmC25776_1
tttttcacacacacacacacacacaaggggggggggggagcggaattaagccagctcgtggcgcaatccgaccacgcgtctgtgggcgcgtcgtgtttagtttactgttgtgtgcccaagtgatccagtccacaggctcaggctctactgctctaggaggaggaggagtgatgagctctgcagccagtgacccctgtcggcggcggtagcttaaattggccaccatgtcgcccgggccatcggactcctctgcaaataaagccatcgggggagtgactgactgagtcagtgagtgggtgtgaggagagctttgaggggaggggagctagctagctactgcctactggaggagggcttcctccgacgccggacatgggggaggtgaagcacctgtgcctggccaagttcaaggagggcgtcgtggtggacgacgtgctcaagggcatgaccgacctcgccgccgggatggacacggtcaagtctttcgagtggggccaggacgtgctgaaccaggagatgctgacgcagggcttcacgcacgtcttctcgctcaccttcgcctccgccgccgacctcgccgcctacatggcccacgacagccacaccgcgttcgccgccaccttcatggccgccatcgacaaggtgctcgtcgtcgacttccccgtcgtcgtcgccaagcctccgccgtcggcatgacccgcttgccgctctcgcatccgccggccactgtacgcctccccttctcaggtcgcgcagcagatccacgtgtgcctgcggccgcggtgctggtagtagtactagtactgtctattgcctattgcctgttatgtatgttctatctatctatgtccacgtacctacctactattattgtttggttatcttcggaataaattttcggtcacttttatggtaacaaatatcaagcggctagctgcttgcaatacaccctttccgatgtttatgatggattctctgtcctaatcgaaaaaaaaaaaaaaaagcccctaaggctattcttacagatctaaagagctttgatgctgccttcatgtgcacactggagtgggatgaatatgtaaccttgtgtcggaaaaacttgctatactctgggtcctctcgaatttactttactcgcacctattgactgcgtctgctgctgctgatttagtattctgctacctcaatatgaacggtgactatcacatgtatggtgcggaggttttttttggtgctgagaggaatgcctctgctgggactcagtggtggcctatgaggctgctcaggccattgctctggattagctggcgcctacccatcccgctgcgctggggcttgctct

SEQ ID NO: 14 - DNA, 273 bp, Zea mays
  Clone ID: TF_jC-zmX700102161b1
gtccgacgagatcctcaggtgggcctttctcagccgttgtctgtttatccatgccaccggcgaagatatgttagagctggatggcgctggagctgagtgccccaaagatagcaccccaattatgcaggtgtttgaccacaacgtaaactagtggacttatgacatgcaggatgatggtggcaatcaaatgccatactgaaacacgtctgacgaggagcaggtggaggcagcatgccatgccatgccttgcctgtccaaggaccatagacgcgt

SEQ ID NO: 15 - DNA, 182 bp, Zea mays
  Clone ID: TF_LIB4338-018-R1-K1-H6
ttcgaggcggccggccgagggggcactccatgatctgacaacatgatcctcattcttacgggactactccttatgctcgatggaggagagattgcgccatgaggcacgagagggccccaattgcatatctctgtcaacaacatgagtatgagggagccgcctcctccaacggaggaggctct

SEQ ID NO: 16 - DNA, 305 bp, Zea mays
  Clone ID: TF_LIB3067-047-Q1-K1-G7
gctgagcgttcacgagcgcaacctctcgtttgtcgcatacaacaatgtgatcgggactcgccgtgcttcatggcgcattggctcttctattgaacagaaggaggagtcccgtaagaacgaagagcatgtgaaccttatcaaggaataccgtgcgaagatcgaggctttattgtgttatatcttatatgtcatcctgaatttgctttactcccacctagtgccttcttctactgctgctgaatcaatggtcttttaccttatgacgatggtttactatcaaaggtatcttgcggaatttaagactg

SEQ ID NO: 17 - DNA, 592 bp, Zea mays
  Clone ID: TF_LIB4185-048-R1-K1-F7
ggtaccgcggcccctctctcgagtttttttttttttttttttttttttttttttttttttttttttttttttttttttttggattagaaacagccctgacagtctatgcgtggataaaaaaaacagttttccatgggggtacaaagatgcctttgaggcccagaaaaaaaaaaaaaaagcaccaacagatttagaggctcaccagttcaaacctttgaaacacttggtagggggggacggactccaggaccaaacgagggccaaaagaggggaacaaacagacctcaaaaaaaaaacccgggacggacagaaacttcaaaaaaatacacagggctcctttgagttccgaggcaaaaaaaacttggggacccaggttcgttagcatcacagccgggatattttggggggctttttgggtttccttaaaacagggggaagggatcaaccctccatggccacatgggcgctcccctgggaggcttcacctccagttagttttggggtccacaaggctaagtggtccttcaaaagctgcatcataatggggctatccttggaaactcccctcccagaatttatctcaggaggagcc

SEQ ID NO: 18 - DNA, 825 bp, Zea mays
  Clone ID: TF_ZmC261_38
gccttgtgtctttactctaaatgatagtattactactttattcgcttgatgggacgcggggcttcccatgtggcattggaatgtgctcttcaatcacatccaaacatggtatgttttttccttacttgcatgtgacctgtcacatttttttctcacatggatctggaagagccgcgtgagaggaagctaaagggttctggcttaagctgtatcaggtcaaattttcaccattgatccaacctctgctacggcaatttccagcatcggcggtgtgctctttacaaagccttagagctgcctctcctgcaaagtctgaacttgcagagatagtcccacaagagaaatcaccaaaagattccattcaaccaatgtcaccgagtccaaggtattctacctcaagatgaagggcgactaccacagtcaggtgcatagaggaaggatgctgcggggagcaccatgaatccctacaaagctgctcgagtttcctctgactgttcaccattattggaagcaggtcaggcagagagccttggaaccgaactcttggagatggtgcctagcagggaagaggagattaagttgaaagaataaagggaggatgctttgtcgacttttgtagttaatgattatgtgagacttcagtttaagggctcaacttttactggttcttggaagtcatttagtagccctaagatttcatcagcattcttagtagtaattgctatagtatcaaatgggattgtggtatgagttgctcgagtactaagtactaacgttgttgtacattgtgaagctaagtgggtaatatcaaaagggattaagatt

SEQ ID NO: 19 - DNA, 154 bp, Zea mays
  unsure (1)..(154): unsure at all n locations
  Clone ID: TF_LIB3594-021-Q6-K6-C1
cggttccccgnaccacactcgttcctcgcgggacccagnagcagccccgcgccagnagtaatttgttcttttaacaattgtcgcgggnaggacatgtttacatggccaagttggctgtagcaggctgaaggtatgaggagatggttgagtatat

SEQ ID NO: 20 - DNA, 804 bp, Zea mays
  Clone ID: TF_LIB4758-090-R1-K1-A10
cattgggaccctcgaggccggccggacgccactcatgaacacgcccaagctctctaggacttctcataaggcactctgacatcctccgtacttctcgttctgagcacccctcagtaccacttcgtgttcgaagattgctcgctctcaatatgtgcatatgattgaccctgcttggaagacagctcatttgcttcccacgccatgagtgctacgacaaatcgccatgactatgacctcatgactgctcaatgtggaagatacatacgtcttgagtgcggcgtacagaaacgtacttgaatgcgaacgcgccgcatgccgtatgatctcctccatggagcagacgaagctagatgcaggaaatgagcgctgaacgacactcatcagagattatcgcggtgagatatagattcgacttacccttatctgccatgcgtgtactacagtttgcattgagaccgtcttcgtcgcccgcatctactcgcccccgatcccaggggcctctatctcctaccgaaggtgattactacacataccttgcgtgaagtcaagagtggacctgacacacaagacgccgctgataacaaatgtggatacagctgccagcttgctcgttgactgtccactccgctattagttggactgcactacttccaggtctactataattcgactcactgatccgcctgcagtcttgcaaagcaggctgtttgacgaggccatctcggaactggacacctctgagcgaggagtcctacaaggacacgcactttgatcatgcagctccttcgtgataactgtacctat

SEQ ID NO: 21 - DNA, 396 bp, Zea mays
  Clone ID: TF_LIB3150-041-Q1-N1-A4
tcactcgttaaatgtgtacatggcgaaactccccgagcgggcctacaggcacgaggaaatggtttattttatggagaacgtaacgaagactgacgactcgcacgagctcactgtggaggaacactaccttctgagtgctgcatacaagaacgtcattgccgtccgcagtgcgttatagcacatgatctccttcatcgagcagcacgatcagggtcaaggcgctgaggacactcgtcacactcttaagggccaatacctggatcgactgaaactgagctcaccaagatctgtgatggcgagatgaagcttgtctaatgtgagcttgtgccgtcttacatcgttcccgagatcaaggccttatatctcaagatgaaaggtgactactacagatacact

SEQ ID NO: 22 - DNA, 569 bp, Zea mays
  Clone ID: TF_LIB3150-041-Q1-N1-A4.F2
tcattcgggacatgtgtaccatgcgcgaagactcgcgcgcgccatgccgagcaggcactaccgaaatggcccgtatttcatggagaatgaaaccaaaactgttgactcggacgtagctcactgcctaggagcgcaaccttctcgtctgcagcatacacacaacatacttgcagcccgcctagcctgatggcgcatgcatgctgcctacatgagatcagcatagcatgacagttctaggcaatgaggacactgtcacactcataaacgactaccgtggcaagactgatactgaactcaccaagatctgtcacggcatgctgaagcttgtcgaatctcacctctgtgccggtcttccaccgctcccgagtccacggtcttatatctcaagatgaaaggcgactactacagataccttgctgagttcaagactggatctgatagaaaagacgctgatgataacaccatggttggcatacacggctgcccatgacattgctttggctgagcttgctccaactcaccctattaggcttgcactggcactcaacttctgaacgttctactatgag

SEQ ID NO: 23 - DNA, 435 bp, Zea mays
  Clone ID: TF_LIB4602-006-R1-K1-A7
ggacactattccgacgcacacgagtatcacggctgactcggaatgctgtgaaaactcctccgccaaatggcatcagcacaactctcacagggagaaaatgggtgcatggcctaacctcgcccaccatacatagaggtgccaaaaaatggttcagccaatggataacgtacggaaaactggtcacctctagagggaggggggaaaagcacagcctactgtctgtggtgtacaagaacgtctttggaacccctcgttgctggtggcgccttatatactccatcgtccaggaagaggaaggtctacgtattgatgaccggcaacgactgtccttgactaccctggcggggatgaagatgatctcaccatgatctgtgattgggtgctcgctcttgtcgactctcatctcgtgacgtctttcaccggtcccgagtgcaa

SEQ ID NO: 24 - DNA, 298 bp, Zea mays
  Clone ID: TF_LIB4148-012-Q1-K1-E3
cggaaaatcccgggtccgtacccacgcgtgccgattgttgaatgcgagagctcgcaccaactcacccaatccgtctaggtctggcatcgaacttctctgtgtgctactactagatccttaactctcctgatcgtgcctgcagcctcgccaaacaggcctttgctgacgcgatagcccagttggacactgtaggtggcgagccatacaaagacaggaccgtgatcatgcagcttgtccgtgacagcctgactctctggacatccgacatgccggtatgttccctttccatcctaatcct

SEQ ID NO: 25 - DNA, 316 bp, Zea mays
  Clone ID: TF_LIB4605-012-R1-K1-A3
aaaatgtgtacacgatcattatcgctacgcaagtgggcacgttcaagaacatggtcaacttgttggtaaggatcagcaggactgtggactggggggaactgactaccgaggagctaaatctcttgaccgtacaataccagatcgtaaccgcagatcacctgacctcaaggtccatgttctactccgtccagcatcaaggggagggcagtggcattgaggtcagagacacaatgaccctggtttttagggacaagacagacaccgaattgaccatcatgtgcccagagtaaataagctgatcgaaagctatgttgtg

SEQ ID NO: 26 - DNA, 272 bp, Zea mays
  Clone ID: TF_LIB3118-029-P1-K1-H11
gcattaccatattcacgaccgcccagacatagtcattcaccaggagtaaggaggaacttttatagatatacaagagggaagagaacgtctacataaacaagctggctgagcagtaccaaaggcatgaagagaacgtggcgatattgagaaggaggctaacactgaacatgtggaatatgctactgttgcggaccgaaacctttaggtggtctcatacaaaaatgcgagtggcactggctgagcttgacggggcaacgcgtcttgtattgaac

SEQ ID NO: 27 - DNA, 657 bp, Zea mays
  Clone ID: TF_ZmC772117_1
accccgaaatgcgctgccgcccagcacggctgtgcctccgagcacgttatccctcatgctccatcactaatgactgacttttaacggaatgatgagggacagaaaatgtttacatcatcaaactgattaaccaagcatgggaggttgcataccgagctcggaggatatggagagcgtgtgtaacactgtatatgtggatgacctcactgccaaagagcgctaccttctgtgtgacgcgtacaagaatgtgatcgaggctatgcgcgctacatgcatcataggagatgccattcgaacaaaaggaggagtaccctatgaacaaagagcactgtgaatgttatccctacaatatcatagtcgaggatcgcaggcatgatgctgattcagtatactgtgatggtatccttgaactgcaccgacttccacctacgtgcctatttctactgctggtgacacatgtggcgttccactctcaagaggaagggcagagtatcacgagtatctggcgcaatttacgactcttgctcagaggcaggaatctgctgtgagcccatggtggtctataaggatgatcagcacattgctgtagcctgactgtcacctacccatctcgacaggctgtgacttgcacctaaatatacagtgatctattgtgag

SEQ ID NO: 28 - DNA, 272 bp, Zea mays
  Clone ID: TF_700029541H1
tgcggaatttgctttctgtcgcctacaagaacgtcatcggtgcacgccggcctcttggaggatcgttacctcgatcgagcaaaaggaggagtccaaaggcaacgagtctcaggtcacattgatcaaggagtaccgtcagaagattgagaccgagttggccaagatctgcgaagacatccttgaagttttggacaagcacttgattccttccgctcagaccggtgaatccaaggttttctaccacaagatgaagggtgactaccaccgttact

SEQ ID NO: 29 - DNA, 341 bp, Zea mays
  Clone ID: TF_LIB3591-080-Q6-K6-E7
cctgctagttccggtccggtcttcccgggcccatcttgtgccgtcttccactgcccccgagtccaaggtcttctatctcaagatgggtctcaagcagtttgaggctgccatcacatatcttggtcattttattcttaagctgtttgttacccatcttgtgctgtttttcactgttctctagttcatggttttttctcttctgattttcgtgtatcccttcagattccttgttttgtttaagactgtagttctctgataggtctctttttttaacattatgttgtttcaccttgttgttcagcactttctttctctttgtttttccctgttttttttttttt

SEQ ID NO: 30 - DNA, 342 bp, Zea mays
  Clone ID: TF_LIB3608-027-Q6-K2-D4
gacacacgcatagccgcagagatccgttacatctgcatgttttgaaaactgaactgtgagatggcatcagctagagctcttccgtgaggaaaatgtgtacatggctaatctcgtcgagcaggccgagaggtactaggaaatggttgagttcatggagaaggtaccgaacactgttgactcggaggagctcactgtggacgaccgcaacctcctgtctgttgcatacaagaacgttattggagcccgacgagcctcatggcgcatcatctactccatcgagcagaacgaggagggtcgacgcaatgaggaccgtgtaacactcattaacgactaccgtggcaa

SEQ ID NO: 31 - DNA, 450 bp, Zea mays
  unsure (1)..(450): unsure at all n locations
  Clone ID: TF_LIB3592-001-P1-K6-H4
ccctgcgtccgnctagttctagtacgcgggcggccgctcgctgactagtactagtcggatacttctagatcgcgggcggtcgcgcttggtttctttctgtcgtcacgctttttggtacgaggagatggttgagtgcatggagaaggtgtccatgactgttgactcggaggagctcactgtggaggagggaagcctcttgtttgttgcatacaagaacgtgattggagcccgacgtgacttattgggcattatttacttcagtgagctagaagaggttggcctaggcaatgaggacctagtaatactcatcaaggattatcgtggttagattgagactgagttgactcaagactgtgatggcattctgaagctggttgagacctatattgtgtcggttttcacttttnncgagttcaagatttttatgttaagatgaagggtgattattac

SEQ ID NO: 32 - DNA, 288 bp, Zea mays
  Clone ID: TF_LIB3152-012-P1-K1-D11
cgtgagtaaaatgtgtactatgcttagctcgccgagcaggcggagagggtcgaggagatggttgagttcatggagaaggtattcaagactgttgacttggaggagctcactgtggaggagcgaaaccttcttgttgttgcatacaataactttattggagcccgccgctccttatggcgcatcattttcttcatcgagcataaggaggatggccaaggtcttgatgtcctagtttcactcattaaggattattttggcaagattgatactgagctgatcatagatctg

SEQ ID NO: 33 - DNA, 379 bp, Zea mays
  Clone ID: TF_LIB3150-049-Q1-N1-C9
caagatcgaggctgaactgagcaatatcttgccacgatattccgtgatgagggactgcaaattatgaaaactgaactgtaagacggcatcaacagagctttaccgagaggaaaatgtgtacatggcagaagctcgccgaacaagcgaagaggtacgaggagatggatgagttcatgtaaaaggtaaccaatactgtatactggtaggaactaactgtggaggagcgaaacctcctgtactgagcatacaagaacgtgattggagcccgacgcgcctcatggcgcataatatactccatagagcagaaagaagaaggccgaagcaatgaggaccgagtaacactcatcaaggattatcgtggcaagactgagactgagct

SEQ ID NO: 34 - DNA, 332 bp, Zea mays
  Clone ID: TF_LIB3075-028-Q1-K1-D9
gcgttcaaagctgtaccccagaggtcggatcctttgtcaatgacagtgaatggcatccagcgtgcctagaacattacgtcaggcgagatctgtctccaacccaccccatcaagcttgtgctcgctctcaacttctcagtgttctactaccaaatccttaacttccgtgatctctcctgcaaccctgcaaaacaggtcttcgattaggcaatctcttagctacacagcctgtgataggagttctacaaagacatgactttgatcatgcagttcctgcacgacaactcgaccctattgacttcctacacctactacgatggctgcaactagatc

SEQ ID NO: 35 - DNA, 675 bp, Zea mays
  Clone ID: TF_LIB4171-050-R1-L1-G6
aattcggcacgaggctccgggatagccctaatcagatgactagaaggcagctcgtcaagaaaattacacaaagaagaaatatacttgatgtatgaactttgtgtcagctatgtattcagtaatttatacgtcgtcgcaacgcacgggcacataactattgataaattatgttggcaacaaaagcaatttggaattcattatttttgtggacatgcattaatgaaatcaacacagtatagaaagtgaagactaggaaaggtgcagcagaaactccagctgtgtcatacctcaggaatctgaagatttgccgtactcaagccatgctgctccaatacccttggcgtttgatgaggctatttctcagttggatacgcttggcgaggattcatacaaagatagcaccttaatcatgcagctcctgagggacaacttaaccctatggtccgctgacagcacaacgttaacgaaccggagcacctgaactagcagtcacgtctgcaatatacacaccagcaaaacactcatgtaacactaaacagttcatgcatatccttgaccgaagacgatgttgcaaaggtttcagacatcagcttttggcgttgacaagaaacaagatgacgagtacaaatgctcctgatgagtacaacgccagtgtattaagtttgcttttgtact

SEQ ID NO: 36 - DNA, 689 bp, Zea mays
  Clone ID: TF_LIB4758-089-R1-K1-A5
cattgggaccctcgaggccggccgggacacccctccttcagacctccagctcttgcggccgacctgcctcacacgcgaggacgccatggtctgcggatcttgagtgctgaactgaacgcatgcgatcagcacgacgctttaccgcgtgctgaatgtgtctctcctcgatcatcgctgagcaggtgctcagtgaccagaagatggtcgacgtcctgtgcaaggtaatctgcattgctgactcgctcgacctcactgagatggagcacctcctcttgctcggtgcgtacatgaacgccattgcagcccgccgcgccttccgcttcctcgtctcctccatcatcctgagggacgacatccgaggcattgttccccgcaaaaccctcatcaaggattatcctctcgagattgtcactgcgctcaacgacatctctgctgcgatcctcaagatgcttgagatgcatcttgctgccgctcccactgccctcaagctccaggccgtctatctctacaggctcctcgattacttctcataccgttgctgagtgcaactctggtgatgccatcaaggacctcgctgagaacacgatggagaaatacaaggctgcccacgacattgctctgcctgtagcttgctctcgactcaccctattaagattgcactcgaacattaacttctcagtgctctacta

SEQ ID NO: 37 - DNA, 279 bp, Zea mays
  Clone ID: TF_LIB3245-170-P1-N1-A6
gcgatttctacagatacctcgctgagaacaagactggggctgagagaaaggaggcgggctgagaacacgatggaggcatacaaggctggccaggacattgctctggctgagctagctccaactcaccctattaggcttggactggcactgaacttctcagggggctactacgagagtccgaactcacctgatcgcgcctgcaggctcggaaagcaggcttttgacgaggccatctcggaactggacaccccgagcgagggaggccgacaaggacaggac

SEQ ID NO: 38 - DNA, 551 bp, Zea mays
  unsure (1)..(551): unsure at all n locations
  Clone ID: TF_LIB4827-032-A1-N1-B4
ccggccgggnnaaaagtgacccgtgcactggcccccgttcgccgccctccccgccgtggggtccggtccgccgccctccccgcccatcccccgcccaacccgccgccggttcccgtccagccacacgcgccttcttcctcccccggcgccttctcggtgaaccagacccgtccggccgtccctcacccgtgcgactcccgcagcgccggcccctccgtcacctccgcatcctccccgtccttgcggccatatccgtcgtctccgcatcctccttcctacgctctgtcggcgtggcctccccatcccggtgttctccgattttggggggcgtccctttgcccgctccggtctgctcctccagagtccggtccagcggagcgcactacgacacagatcggcagccgtccatccctttccagctctccagagcctccgccggcgcatccggcgactgatttgcagcatttgatgaggctcttactgagataaattctggtgagggagtttacaaggatagcacacttattatgcaacttctgaaggacaacttg

SEQ ID NO: 39 - DNA, 1534 bp, Zea mays
  Clone ID: TF_ZmC5000_20
tttggtatcatcatgtctgactaacccttttttactttcattgaatgaagttcgtacatgtatttgaggtattttttattttcttcctactataagccttgcttagatactgatctaagatcatctccaagggacagacaaaaaatcctagaggttctcacataagtacggtttagagaagggataaaccgaggaaagcctcccccacaaatacagaaaggctgcctcgaacctatgatttggtgactcagtgaaacaaacaactctcactactgcactaggcctgccattgtttacgagcatccccaagggccttacttaaattcactctctaaattttaatttggtgagccattttaataaaaatatgtttgataggttttttatcttctaacaatttttatgtatcttgtacgcactctagagaaccaacccactcactgctctttatttactgcatgctatttaggtctgctaagcaaaaaatgatattctttctcaatcttttgtcatgtttagataaatttggtggttttaggataaagtttgtgaagggcttcactttttttttctataattagaatttaactcaaaagttttcccttgaaattcaagttgattttgagaagtatgaagggatgattaaggtcatggagaaggtggtaatacagttaattctatggagctcactggaggagcactaccttttgccagttgcttgcaagaatgtaattggaatccgatgtgcttcatggcgcatcgtatcctccattgagtatagggaataaggttgtgtcaacatggaccgtgccactctcatcgagggctaccataacaagattgaagttgaactcaacaagatctgcgttggaatcctcaagctctttgcttcccaccttcccccctcattaatagttccaaagtccaaggtcttctacctcaagatgaagggtgattactacaggatattgctttggaggagttggcccccttatcctattaggctttggctgatgcttaacctctcaactctcctgatcttgctcgtggtctccccaaacaggtttggtttctagatccattacatggagtgtgtagtgtttttcctcttttttgcaatcctcatgatgtgccaccaggtctggtctaatcgttcccctaaaattgtggcctataatcagcttcttggcctatgatccttttgtatgtaggcaaagccaacgaatgaaagggactcactcgcagcaacaaccaaaaagctgatcacgcattctccttttcacatttgttgcatttaattaattcatccaatagcataaattggcactccttttgtgttattgctctttggttggtcttattgttgttgttgtactgcttgccatgtgtattttatcataagtgttgttttggctaatccctaacgatgcaatacatttgagcaacaattcaattgttttgttttttgaactagttattctaaatacccaatgttcacagcatatttcacttccaaaaaaaaaaaaaaaaaaaa

SEQ ID NO: 40 - DNA, 331 bp, Zea mays
  Clone ID: TF_LIB4742-139-Q1-K1-E4
ccggccgggaatctatccaccgagcacgacgcacgcagagccgctgagatccgtcacactgcaagttttgaaaactgaactggaagatggcatcagcatagctttcccgtgaggaaaatgtgcacatggcgaagctcgccgagtatgcacagaggtaccaggaaatgcttgaggtcatggagaagggaccgaaaactgttgactcggaggagctcactgtggaggagcgcaacctcctgtctgttgcatacaagaacgccattggagcccgccgtgcctcatgccgcatcatctcctccgtccacaataaggaggagcgaccaagaacacg

SEQ ID NO: 41 - DNA, 770 bp, Zea mays
  Clone ID: TF_LIB5116-030-A1-PF1-H7
catcccgcacctccccacaaacgcgtattgcctcctacgcccccggatccgctgctccaccccccaactccgttgccacacgcccttgcacaagcgagcgagcaaccatgtcgccagcagagccgacgcgagacgagagcgtctacatggccaagcttgcggagcaggccgagcgctacgaggagatggtggagttcatggagcgcgtcgcgaaggccaccggcggagcagaaggaggaaggtcggggcaacgacgcgcacgccgccaccatccgctcctaccgcagcaagatcgaggccgagctcgcaaagatctgcgacggcatcctcgccctgcttgattcccacctcgtgccatccgccggagctgccgagtccaaagtcttctatctcaagatgaagggcgactaccacaggtaccttgcagagtttaagtccggtggggagaggaaggaagccgccgagagcaccatgaacgcgtacaaagctgctcaggatatcgccctagcagatttggctccaacccaccccatcaggcttgggcttgcactcaacttttctgtgttctactatgagatcttgaactcccctgaccgcgcctgcaaccttgcaaaacaagcctttgatgaggctatatcagagctggacagcttaggcgaggaatcctacaaggacagcactttaatcatgcagctcctgcgtgacaatttgactctatggacatccgacaccaatgaggatgacgttgatgagattaaggaagccccagc

SEQ ID NO: 42 - DNA, 585 bp, Zea mays
  Clone ID: TF_ZmC374965_1
gcggagatccgctgccacaccgatcgtggctgctccgtatctatctcacgacctcaaggaagatacctatttcaccaataacggcgagagagtgaacacgcacgcacgggccatcatggaccagagcatactacctgtgctggtcgtgctggaagatcatatggttatgtgtttgcatactgatgccgcggaaaagctgagtgctggcctccgaaacctttggggtgaagcctacccaactgtgatagagaccgaccgagctatgccgcacgccggtattaccgttgcacaaaaggacgtgtgctgaactactttcatatgtgaaccttatcaaggaggacggccgctctatcggagccgaactgaccaacacctgcgagggaatcttgaacctgcttgtctcccacctaaagccttcttctacggccgctgaatcacaggcttctaccgcaaaaacactggcgactatcacaggaatcttgcggaatttaatactgctgctgacaggaaggaatctgctgaaaacaccctggcggactataatgctgatcaggacattgctctggctgagctggcacctaccca

SEQ ID NO: 43 - DNA, 399 bp, Zea mays
  Clone ID: TF_LIB3150-097-P1-N1-B9
ctactttagctaatctcagatcccccccgccctagacgcaggcccatgccaggagtgggtgggttcttttatcgatattatccatatggcgagggaggagaatgtctacatggccaagctggctgagcaggccgaaaggtatgaagagatggttgagtatattgagaacgtggctaagactgtatatgttgaagagcttacttgtgaggagcgtaactctattgtcaggcgcatacaaatattttattggagctagctttgttttatgttgcattgtcatttctatttgaactaatgaggattcccttttagaactaatagcctgttaaccctatcaagggatacccgtccgaatattcaggcttaactttgctcttttttgtaatggcatatccttaa

SEQ ID NO: 44 - DNA, 189 bp, Zea mays
  Clone ID: TF_ZM4633.C5.o3.fg
atggattgtgtcactctcatcgaggactaccataacaagattgaatttgaactcaataagatctatgatggaatcctcaagctctttgcttcccaccttcccccctcactaacagttccaaagtccaaggtcttctacctcaagatgaagggtgattactacaggtaccttgcggagtttgaaacttga

SEQ ID NO: 45 - DNA, 326 bp, Zea mays
  unsure (1)..(326): unsure at all n locations
  Clone ID: TF_LIB4760-023-R1-K1-E2
gctgcttgagacccatcttgtgtccgtcttccctgcccccgatccaggtcttctatgtaagatgaagggtgattacatacagatacctcgctgagttcaagactggagctgagagagggggcgctgctgagaacacgatggtggcatacaaggctgcccaggacattgctctggctgagcttgctccaactcaccctattangcttgnactgggattagacaaggcactnttctactatnanaccctcaactcacctaaccgcgggggcagtcttncaaancannnctggggcccggcccccccccgcccggcccccccccccccc

SEQ ID NO: 46 - DNA, 361 bp, Zea mays
  unsure (1)..(361): unsure at all n locations
  Clone ID: TF_LIB4725-021-R2-K1-H11
cgacgcacgcagagccgcactttacgcgcacactgcaagatttagaaacctgttttttaagagggcatcagcagagcttcccgcttgaaaagtgacatggcgaactcgcggcaggcccagaggacgaggaaaggacgagtcatggagaaggtagcgaaaactggtgactcagacgagctcactggggaggagcgcaacctactgactgttgtattcaagaacgncattggagcccgccatgcctcatggcgcatcatctactccatagagcataaagaggagggtagaggcaatgatgaccgagacacactcatcaaggactaccgaggcaagatcgaaactgagcacaccaaggactgcg

SEQ ID NO: 47 - DNA, 857 bp, Zea mays
  Clone ID: TF_LIB5075-004-R1-XP1-A10
gccggccggttcgggattacctactccaccatcaatccccccaatcctgttcaaccacaccaccgcccttcttccgccaaacacccccaccccaccgacacaacacataccgctctcactccatccacccacccgaacaacatctccaaaatggccactgagcgcgagagcaagaccttcctcgcgaggctctgcgagcaggccgagcgctacgatgagatggtcacctacatgaaggaagtcgcaaagatcggtggcgagctcacagtcgacgagcgcaacctcctttccgttgcctacaagaacgtcgtcggcacccgccgtgcttcctggcgcatcatctccagcatcgagcagaaggaggaggccaagggcaccgacaagcacgtcggcatcatccgcgagtaccgccagaagatcgagctcgagctcgagaaggtctgcgaggatgttctctccgtcctcgacgagagcctcatccccaaggccgagactggcgagagcaaggtcttctaccacaagatgaagggtgactaccaccgttacctcgccgagttcgcctctggcgacaagcgcaagtctgccgccaccgccgcgcacgacgcctacaagaacgccaccgacgtcgcccagaccgagcttactcccactcaccccatccgtctcggcctcgccctcaacttctccgtcttctactacgagatcctcaactctcccgaccgtgcctgccacctcgccaagcaggccttcgacgacgccatcgccgagctcgacagcctcagcgaggagtcctaccgcgacagcaccctcatcatgcagctcctccgtgacacctcaccctctggacctcctctgac

SEQ ID NO: 48 - DNA, 276 bp, Zea mays
  Clone ID: TF_700028918H1
cggctcgagcggctcgaggcagttcacccgcgcccgagacgcaaccccgcgccaagactaagtttgctcttttatcgatatggcgagggacgagacatgtctacatggccaagctggctgagcaggccgtaaggtatgaagagatggttgagtatatggagaaggtggctaagactgtagatgtggaagagctcactgttgaggagcgtaacctcttgtcggtcgcatacaagaatgtgattggggctcgccgtgcttcatggcgcattgtctctt

SEQ ID NO: 49 - DNA, 678 bp, Zea mays
  Clone ID: TF_LIB4743-076-R1-K1-E9
ccggccgggcccaatcttaacgatggagcacgatgcacgcatgagtcgtagagattcgcctctctgcatgttttgaaaactgaactgccagatggcactacccagagctttcccgcgaggaaaatgtgtacatggcgaagctctgcctagcaggcatagaggcaaccaagaaatggttgagtctatggagaacgcagcgacaactgccgactcggacgagctcattgtggacgagcgcaccctgctgactgctggctacatcaacgagattcgagcccgccgcgcctcaagtatcatcatgtgcttcatctagcagaacgatgagaggccgaggcagacaggaccgtgtaacactcatcaaggactaccgatacatgattgaaactgcgctcaccaagatctgtgatggcatactcaagcttctcgaatctcaccttgtgccggcttacaccgctcccgagtgcaagggcttctatctcaagatgaagggtgactactacagataccttgctgagttcaagactggagctgagagaaaggacgctgctgagaacaccatggtggcatacaaggctgcccaggacattgctttggctgagcttgctccaactcaccctattaggcttggactggcactcaacttctcagtgttctactatgagattcttaacttacccg

SEQ ID NO: 50 - DNA, 274 bp, Zea mays
  unsure (1)..(274): unsure at all n locations
  Clone ID: TF_14202479
ggcctgcctgccgtttccatctccatccagttctccgcvvccacccasccasscactcsagtsstttcsccaacscakggssgccgccgccgccgccgccggcacccgggaggagatggtctacatggccaagctagcbgacagngcggacggtacgaggagatggtcgagttcatggwtwwtktcgcdgccgccgccgagctcaccgtcgaggagcgsaacctgctctccgtcgcgctacaagaacgtcatcggcgcgcgccgccctgcctgg

SEQ ID NO: 51 - DNA, 325 bp, Zea mays
  Clone ID: TF_LIB3354-005-P1-K1-E2
gcacaaacgcgttgcatcacgtccacaggatcctgtgcgccaccgcaaccgtgtgaccgcccgtgccgccggcgatcccgatccgccgacccgtcccagcctcgctcgtagccatgtggccggcggagccgacgcgggaggagagcgtgtacatggccaagcttgcggagcaggcggagcggtacgaggagatggtcgagttcatggagcgcgtcgcgcgctacgcctgggggcgccggtggcaggaactagctctcggtggaggggctgaacctgatgtccagcgcacacatgaacgtgatggggctccgatgtgcctggtggt

SEQ ID NO: 52 - DNA, 864 bp, Zea mays
  Clone ID: TF_13150965
ggttccccgaccacaccgttcctccgagcccwggagcagccccgcgccaggaggaagtttgttcttttaacaatatgtcgagggaggagaatgtktacatggccaagttggctgagbaggctgaaaggtatgargagatggttgagtatatkgagaaggtggctaaractgtagawgttgaagarctcactgttgaggagcgtaaccctytgtctkttgcatacaagaatgtkawttgggctcgccgcgcttcawggcgcattgtttcttccattgaacaaaargaggagtyccgtaagaacgaagagcatgttaaccttatcaaggaatatcgtggcaagatcsaggctkaactkagcmatawctgttawggaatcttgaagcygcctkactcccaccyagtgcctycttctacygcygccgaatcaaaggkcttctacctcaagawgaagggtgactatcacaggkatcttgcggaatttaagacttgtgcygagaggaaggaatctctcygararcacaawggtggcctawaargctgcccaggacawttctcttgctgaaccggcaccyacccatccsataaggctgggacttgctcytaatttttcartkttctattatgagaatctkaacyccccagacaaagcttgcaacctggcaaagcaggsgtttgawgaagcbatctcttaattagacagcctttgtgaggagtyawacaaggatagcactctkatcatgcmactccygagggataacttgaccctttggacaaccgacctcacggaggatggtgctgaagaaggcaaaaatgccccsaaargtgaagcaggcgaaggacaataatcttcggagggggtkcaa

SEQ ID NO: 53 - DNA, 420 bp, Zea mays
  Clone ID: TF_LIB3075-048-Q1-K1-C12
gcagttccccgaccacaccgttcctccgagcccattagcagccccgctccaggaggaagtttgttgttttaacaatatgtcgagggaggagaatgtttacatggccaagttggctgatcaggctgaaaggtatgaggagatggttgagtatatggagaaggtggctaagactgtagatgtggaagagctcactgttgaggagcgtaaccttctgtctgttgcatacaagaatgtgattggggctcgcctcgcttgatggcgcattgattctttcattgaacaaaaggacgagtgccgtaagaacgaagagcatgtgaaccttatcaaggaatatcgcgtcatgatcgacgctgaactgatcaatttctgggacgcttcttgaagctgcttgacttccacttattgccttcttatactgct

SEQ ID NO: 54 - DNA, 422 bp, Zea mays
  unsure (1)..(422): unsure at all n locations
  Clone ID: TF_LIB143-064-Q1-E1-A12
tacaacactctatactgactcctagtacctccgagcccaagagcaaccccgcgccaagaagaaatttggtcctttaacaataagttcaaggaaggaaatgtttaaaatggcaaatttgctgaacaaggctaaaaggtataaggaaatggttaattaaatgaaaaaggtggtaaaaacggtaaatgtggaagagctcaatgtttaaggagcgtaaaccttctgtctgtttgcatacaaagaatgtgattgggggctcgccgcgcttcatggcgcattgtttcatccaatgaacaaaaggangagtcccgtaagaacgaagagcatgtgaatcttatcaaggaatatcgtggcaagatcgaggctgaactgagcaatatctgtgatggcatcttgaagctgcttgactcccacctagtgccttc

SEQ ID NO: 55 - DNA, 359 bp, Zea mays
  Clone ID: TF_LIB3227-018-P1-K1-F4
cccacccatgcgcaagcccaggcccggacgaaggccaggaggaaaacagtatttttaacaatgtgaatggggacgtgaacgattacattgaccaggctgctaggcatgctgagaggtatgaggatatggataaggatattgagactgtggatatgactgagcatactgaagagctgactgaccttgtgcgtgacctatacactaatgcatacaagactgtgattgctgcatggcgcactgtatgttgcattgaacattacgttgaacacaaggaggactaccagcatatcgacctgcttgtggactatatcaaggagtttcatgctaagatcaacgctgtactgaacagcatctgggat

SEQ ID NO: 56 - DNA, 828 bp, Zea mays
  Clone ID: TF_ZmC744_7
cctcgaggccggccgggctccgccctagcgcactgagccactcaacgtcgagatcgagacgacccgagtccgccgcgcccgtgcaccaccgaccgtcgaactcccgaaagtaactctatttcttgatcaacatcaacatgtcgcgggaggataatgtttacatggccaagctggctgagcaagcagaacggtacgaggaaatggttgagtacatggagaaggtggctaagaccgtagatgtggaagagctcaccgttgaggagcggaacctcttatctgttgcctacaagaacgtaattggggcccgccgtgcctcatggcgcattatctcctccatcgagcataaggaggagtcccagtcgaaggtgttttacctcaagatgaagggagattatcacaggtaccttgctgagtttaagactggtgctgagaggaaggaagctgcagagagtacaatgatagcttataaggcagctcaggatattgcgttggcggaactggcatctactcatcccataagacttggacttgcacttaacttctcagttttctattacgagattctgaactctccagacaaagcttgcaaccttgccaggcaggcgtttgatgaggctatttctcagttggatacgcttggcgaggattcatacaaagatagcaccttgatcatgcagctcctgagggacaacctaaccctatggaccgctgacagcacaacggaggacagcatcgaggagggcaatgaggcctcgaagggtgatgctggtgagggtcagtagtctggtaaacctcgattgatggttcggcatgtttttgaagtctact

SEQ ID NO: 57 - DNA, 1686 bp, Zea mays
  Clone ID: TF_UC-ZMFLMO17248F03_FLI
cgaggagaggggaaccccggcccagggagagttgtggggaggggatcggcggcggaggagatggaggagcgggagaagctcgtgtgcctggccaagcttgccgagcaggcggagcggtacgacgataatgattatgaagagcaagcaaacctgtacagtgaggaaactgggaatcggtacaacgaggacccagcagattcttaccaggaagagcaggagaatgcattcagtgggggcataaaccaacaggacaacttgcaggtcaacaatgttgacgataacaaatggcctggatggcctggagagagtgttttccgcatactcgttccagctcagaaggttggagctatcattggccgcaaaggggagtttatcaagaagatgtgcgaggagactaaagcgcgcatcaaaatacttgatggcccacctggtgtaccagaaagagcagtaatgatttcagcaaaggatgaaccagatgcacctctctctccagctatggatggcttacttagagttcataaaagaataactgatagttcagatggtgaatctagtcaacctcaacgaagtgctggtaatataggaccaacacgacttctagtgccatcttcgcaagctggcagccttattggcaagcagggagcaactattaaatcaatacaagattcttcaaaatctattgtccgtattgttgagaatgtgcctcctgttgcactaaatgatgatagagttgtggagatacaaggcgagcctcttggtgtccaggaagcagtggaattaatatcgagtcacctgagaaaatttcttgttgaccgcagtgttctaccattgtttgaagcgcatatgaaaatgcatggtatgccgagggagcaaccagtgccacctccccagcattggggccctcctcaaacctggatccgccctccaaacattcctccaggtggtcctggttttggaggaaatccacagttcatgcatccaaggccgcaagacagttactatcctttctcctgatgtcccccatatggaaaagcagccgcactacggtatttctgcatacggccgggaggccccaccaagtggtgcttctgctacagggaatcaaccaccctctcatgcaggttctcaggtggctcatgacatgcacattccccttgcctacgctgatgctgtgattggggcagctggtgctagtatcagttatatccgtagacacagcggcgcaacagtaactattcaagagagcagaggtgcacccggagagatgaccgtggagataactgggactgcagcccaagttcaaactgcgcagcagctgatccagaatttcatggcagaagctgccccaccaccaccaggcccggcgccagcttccaaccctcccgcaccaccagttgatccaagctatggctcttacccaccaccatatggagcagctccttcttatggttcttccgcagctgctgggcctccgcagtacaatggtgggaactacggtggcccgacctaccctcccagctatggctattagtagacaagtgtagcataccaaggatttgcccccccccccccctctttttttccgaataacgacagtgttgggcttgacatccccctgcccctggttgggagtgcagtttttaaaaccacaatttttcaataccagtctgataattgctatgatat

SEQ ID NO: 58 - DNA, 269 bp, Zea mays
  unsure (1)..(269): unsure at all n locations
  Clone ID: TF_700552665H1
gtggcaagatcgacgctgaactgagcaatatctgctgatggaatcttgacagctgcattgactcccatctngtgcctntcttcgtactgctgctagaatcaaaggtcttctacctcacagatgaagggtgactatcacaggtatccttgcggaatttaagactggtgctgagaggaaggaatctgctgagagcaccatggtggcctatacagctgctcaggacattgctctcgctgagctggcacctacacatccgataaggctgggac

SEQ ID NO: 59 - DNA, 528 bp, Zea mays
  Clone ID: TF_LIB4758-050-R1-K1-E5
ttgggtacctcgaggccggccgggacctccatcaaactcttcgattcagctccagaggatcatctgcggaactcacgatggcgctgccggctgcggttgcggctacctcaaggcgacgacctgtcacgtcgcagcacagcttagcgtcgctccgatgtatggcggctgcgcatctgatgcggtaggagacggcgtacatgtgccaatctggcacaggatccaaaatgccaagaggagatggtgtagtgcatgcagcgcgtcgcgagctccccacgcaggacctgccgaagataggaaatgttcctgaagaagcgcgacatgatgttcatgacctacaagaacgggataccatcccggacggtgtcatggtggatcttctcatccatctaggagacataaaaggcatccacaaactacgtcttctgcgtgctgatcctgagatagcggtactagatcataaccgaggtctcacatatctgaaactcgattttcagcctgactgactcgctcctatcggcataatccgga

SEQ ID NO: 60 - DNA, 740 bp, Zea mays
  Clone ID: TF_LIB4742-030-R1-K1-A3
cattgggtacctcgaggccggccgggatttcgttctccgaatcacgacgtatctggtagctttgtgatccaacacaatgcagatatagaaaactgaactgtaagattaataagcagacctttcccgagatgaagatgtgtgacatggcggaacatgcgcctgagaagtgcacgagaggaactgagggaaatgggttgcaattcgatgcgaccaaggtcaccagagacacatgtgtgatctcgagagtgagcgtcactgcttgtgactgagccgcaatccctcactgctcgtgctgtgcatcacagacagactgccatgtaccagcgccgcacctgcctctatcgtcccactcatctcatccattcatccgaacgaggagggtcgaggccatgaagaacgtgtaatacttgtctagagactaccgctggcaatatctgaaactgacttaaccaagatctgtgattgtatactcaagcttctcaaatgtcactctttcgtcagtcttccactacatccacgagtgcgaagaccgttctatcttaagatgacaggtgactactacacatactttgctgatctacgactgcatctcattagaaagacgctgatctcaacacctatggctgatatacaacgctgcccaggaattgcttttctgagctatgctcaactcaccctattacgctttcactgacactctacttctgcttgatctactatgagattctcaactcacgcca

SEQ ID NO: 61 - DNA, 588 bp, Zea mays
  Clone ID: TF_LIB4979-021-A1-K1-G9
tttggaggatggctttgatgagggaatctccaaactatacagagctgggacaggactactacaaggacagaactctgatcatgcttttcctgcgtgacaactggaccctatggacttccaacaccaactacgatctccagacatcgagatcaaagaaccacctgctgcccccacagaatccggcccctagggacagtaagacgcatcctatctccccagctgatgaatgcctgctgatggctgctagattaccacgactgtgacgcccttgatttctgatagcttatcgtctagtacacctcgcggtgctctcttcgtcacgtggacggtgagagtgtgctgaagatgactgccattgtcattgccggtgtgttttaattacagcatacattctacgatgtcatcgtccgcatgctatgtgtacaactctcacaggtagatagaatcgatggctggatgcgtagcttatcatgctccacgcctgctgcttctttcatcgaacaaacatacctgcccttgttgcaccgatgttgtttacaatgacctatatttgactggaagaactcaacgaacgaaagctcctatgcg

SEQ ID NO: 62 - DNA, 362 bp, Zea mays
  unsure (1)..(362): unsure at all n locations
  Clone ID: TF_LIB143-057-Q1-E1-F11
caagcctctaatctgagtcgcattaacgtgaggaaaatgtgtacatggtgaagctcgctgaccangccgcgaggtacgatgagatggttgagttcatggacaatgtacccaaaactgttgactcggaggagctcactgtgcatgagcgaaacctcttgtctgttgcatacaggaacgtcattggagcccgccgcacctcatggcacatcatctcctccatcgagcagaaggaggatggccgaagcaattaggaccgagtaacactcatcaaggattaacgtggcaagattgagactgagctgaccaagatctgtgatggcatcctcaggctgcttgagagccatcttgtgccgtcttctact

SEQ ID NO: 63 - DNA, 272 bp, Zea mays
  Clone ID: TF_LIB3076-026-Q1-K1-B8
tttaaccttatcaatgaataccatgcgaagggcgaatctgaactgagcaatatctctgatggcatcctgaatctgcttgactcccacctagtgccttcttctactgctgcttaatcaaaagtcttctaccttaagattaatggtgactatcataggtatcttgctgaatttaatactgttcctgaaattaaggaatcttcttataactctattatttattactttgcttctcatgacattacccttacttatctattacctacccatcctat

SEQ ID NO: 64 - DNA, 352 bp, Zea mays
  Clone ID: TF_LIB3150-017-Q1-N1-B11
ctagagcgtgacttacgtgactatgatgtgtgatgtcgtcgtgaagctgcgggacacccatcttgtgccgggtttcactgctggcgtgtccaacgtcatgtatctcaagacgaatggtaattactctagataccgcgacgagtgcaagactggaccaggcataaaggtccttgatgataacatgctggtcgcatataatgatagcaatgacattgttcttgcgaaacttgggtgaccttaatttactataggatgaatgcccacttatctgttgagtgacctactatgagatcctgatgtaagctgaccgaacttgaagtcgtgaaaaagattgttgggacgacgccagctt

SEQ ID NO: 65 - DNA, 1235 bp, Zea mays
  Clone ID: TF_ZmC261_29
gtttgggacagcatgggacaaaagaaagaagttggttatagaaagcagaagtttcatggattcacggtaaactgaaactgtcgctacaacaattcttcttgtgatcgttgctccttgccaattcatcgatctgagatgcaaactgacatcatctatgagcactgggatattcttcccccctaagcaaattaaggacccagagactaagaagcctgaggactgggatgacaaggagtacattcctgaccctgaggacaagaagccagagggctatgatggtattcccaaggaaattactgaccctgatgctaagaagcctgaggaccgggacaatgaggaagatggtgaatggactacccatttgctcgtaccattcccaaccaaaatacaagggaccatggaaacaaaagaaaatcaagaactcgaactaccagggtaaatagaaggcccatatgattgacaacctagatttcaaggatgatccatatatttatgcttttgacagcctaaaatacattggcattgagatgtggcaggttaaatgaggcactttgtttgacaacaccatcatcactgatgatcttgcgttggccaagacttttgcagaggagacatggggcaagcacaaggagatattgtgttcttatgcttggagtgaagatggttgccactctgcattagcggtgtgctctttgcaaagccttggagctgcctctcctgcaaagtctgaacttgcagagatagtcccacaagagaaatcaccaaaagcttccattcaaccaatgccaccgagtccaaggtattctacctcaagatgaagggcgactaccacaggtgcatagaggaaggatgctgcggggagcaccatgaatccctacaaagctgctcaggtttcctctgactgttcaccattattggaagcagggcaggcagagagccttggaaccgaactcttggggatggtgcctagcagggaagaggagattaagttgaaagaatacagggaggatgttgtgtcgacttttgtagttgatgattatgtgatacttcagtttaagggctcaacttttaccggttcttggaagtcatttagtagccctaagatttcatcaacattcttagtagtaattgctatagtatcaaatgggattgtggtacgagttgctcgagtactaagtactaatgttgttgtacattgtgaagctaagtgggtaatatcaaaaggattaagattt

SEQ ID NO: 66 - DNA, 904 bp, Zea mays
  Clone ID: TF_ZmC2299_3
tgcctgccgtttccatctccatccagttctccgcacccacccacccacccactcctttccccaacccatggccgccgccgccgccggcacccgggaggagatggtctacatggccaagctagcggagcaggcggagcggtacgaggagatggtggagttcatggagaaggtcgcggccgccgccgagctcaccgtcgaggagcgcaacctgctctccgtcgcctacaagaacgtcatcggcgcgcgccgcgcctcctggcgcatcgtctcctccatcgagcacaaggaggagacgcggggcgcggcggccgtggacgccagggtcttctacctcaagatgaagggggactaccaccgctacctcgccgagttcaagaccggcgccgagcgcaaggacgccgcggactccacgctcgccgcctaccaggccgcgcaggacatcgccgtcaaggagctgccgcccacgcatcccatcaggctcggcctcgccctcaacttctccgtcttctactacgagatcctcagctcgccggaccgcgcctgctcgctggccaagcaggccttcgacgaagctatttcagagctggatagtcttggggaagagtcgtacaaggatagcaccctcatcatgcagcttcttcgtgacaacctcaccttgtggacttctgacatgcaggaggatggtggcgatgaaatgcgggatgcaaataagcctgacgaggagcagtagtagtcgtcatgccatgccatgccatgccatgcttgtacaaggaccattttcgtgtgtcctttccttcaatcgtcgacctttcgttttgttgttatactgctattgtggaaccctgttactgttactgttagtgtatcctattggcaataatcaaatgtggtatggttgactact

SEQ ID NO: 67 - DNA, 324 bp, Zea mays
  Clone ID: TF_jC-zmXLIB3526P040cf06b1
acgaagactgtatatgaggaagagctcactgttgaggagcgtaaccttctgtctggtgcatacaagaatgtgattggggctcgacgcgcttcatggcgcattggtaattccattgaacaaaaagaggagtcccttaagaacctattatcctgtggaccttatcaaggaatatagtggctagatcgaagcttaactgagcaatatctgtgatgagctcttgaaactgcttgactcccacctagagccttattgtaatgctgctgaatcaaacgtcttctacctcaagatgaaaggtgactatcacacgtctcttaccgaatttaa

SEQ ID NO: 68 - DNA, 213 bp, Zea mays
  Clone ID: TF_LIB3227-010-P1-K1-E12
ggcgtaaccagtgctttccctggaggaaaatgtttacttggcgaagctcgccgcgcaggcaaagaggttcgaggaaaagctcgagtttatggtgaatgctacgaaacctgtggactcgaaggacctcactgtgcaggaacgcaacctcttgtatgatgcatacacgaacgttattggggcccgccctgcctaatggcgcataatctcctccat

SEQ ID NO: 69 - DNA, 366 bp, Zea mays
  Clone ID: TF_LIB3227-010-P1-K1-E1
cccacgcgtccggatggtactacggcttaaagaggcgcaagtgctgcaagagggcggtgaagagcagacccaacccgaggaactactaccggtgctcggcggtgggatgcggcacgaagaagctcattgtgaggaacagtgaatacctgtgctacgtcttaacaacctactacggtatgcacaagcacgccaagtcgtgcgactgctacctatgcccgcctcctgctgcgcgcagcgcagatcactactcgtctcctactgcagaacgacgttggtgagccactatttacgcttgactggcgcatatgctaccgtaagctgatgatgcagttgaatgaggactgtcgcgctcttgcaatatcatta

SEQ ID NO: 70 - DNA, 655 bp, Zea mays
  Clone ID: TF_LIB4757-019-Q1-K1-A3
gatccaccgtctatccttccgtagcccatctgcaccccaccccacactcaactaccacaaccaccccatccactccctccagctactccttacaatggcgactgagcgtgagagcaagactttcctcgcccggctgtgcgaacaggctgagcgctacgatgagatggttacgtacatgaaggaagtcgctaaggtcgccggtgaactcaccggtgacgagcgcaaccttctgtccgtcgcctacaagaacgtcgttggtacccgacgcgcgtcgtggcgcatcatctcctcaatcgagcaaaaggaagagtccaagggcaccgagaagcacgttggcaccatccgtgactaccgccagaagatcgagaccgagctcgagcaggtttgccaggatgtcctaaacgtcctcgacgactccctcatccccaaggccgagtccggcgagtccaaggtcttctaccacaagatgaagggagactaccaccgttaccttgctgaatttgcttccggtgagaagcgcaaggttgccgccactgctgcacacgaggcctacaagacggccaccgatgttgcccagactgagctcacacccacgcaccccatccgtctcggacttgccctgaactttttggtcttttactacgagatcctgaac

SEQ ID NO: 71 - DNA, 334 bp, Zea mays
  unsure (1)..(334): unsure at all n locations
  Clone ID: TF_LIB4739-044-Q1-K1-D9
aaaccccccatctcgaacgccggagctcgacaaggtcgaccgacgacgcacgcggagatccggcgtactgcaaattttgaaaactgaactgtaagatggcatcagcagagctttcccgtgaggaaaatgtgtacatggcgaagctcgctgagcaggcggagaggtacgaggagatggttgagttcatggagaaggtagccaagactgttgaggggggggggctcactgtgnaggagcnaaacctcttgtctgttgcatacaagagcggaattggagcccgccgcgcgtcatggngcatcatcttcttcatcgggcgtanggtggatggccgagg

SEQ ID NO: 72 - DNA, 273 bp, Zea mays
  Clone ID: TF_700575123H1
gtcttctacctcaagatgaagggtgactaccacaggtaccttgctgagttcacttctggggcagagaggacggatgctgttgagatcaccatggatgcctacaaagctgctcaggacattgctctcgtagatttggctgtaaggcatcccatcagggttgtggtcgctcttaggttctcagtgctctacgacgtgattctggacttacctgatatcgtcttcatgcttgcaatacaggtcttctatgatgcgatccctgtggtaggcagtctg

SEQ ID NO: 73 - DNA, 323 bp, Zea mays
  Clone ID: TF_uC-zmflteosinte083a02b1
gcagttccccgaccacaccgttcctccgagcccaggagcagccccccgccaggaggaagattgatcttttaacaatatgtcgagggaggagaatgtttacatggccaagtgggctgctcaggctgaaaggtacgaggtgatggctgagtatatggagaaggtggctacgactgtagatgtggtagagctcactgtcgaggagcgtaaccttatgtatgtagcatacaagaatgtgattggggctcgacgcgcttcatggagcactgttccttgcatggaacaaattgaggagttccgtaggatcgaaaagcatgtgcacctta

SEQ ID NO: 74 - DNA, 277 bp, Zea mays
  Clone ID: TF_LIB3136-055-Q1-K1-A9
cccgaccacaccgttcctccgagcccaagagcagccccgcgccaggaggaagtttgttcttttaacaatatgtcgagggaggagaatgtttacatggccaacttggctgagcaggctgaaaggtatgaggagatggttgagtatatggagaaaggggcttaaactgtagatgtggaaaaacttactggtgaggaaccggaccttctgtctggtgcatacaaaaatgggaatggggcttgccgcgcttcatggggcattggttctttcattgaacaaa

SEQ ID NO: 75 - DNA, 596 bp, Zea mays
  Clone ID: TF_LIB4665-002-R1-N1-G12
cttttcttttttttttttttttttttttttttttttttttttttttttttttttttttttttttttttttttggacttcaaaactcaataaaacgctaaagcaacccctgacttgtttttaaaatccagggaataatcccagcccacacggacttaatgccaactaggggaaacacaaagcaagggggaactaattcgaaccctccccccctactaatataaaaaaagaagggggggaacgggaaatcagttccaatattagcccggcacagttttagtttcgacaggttaaagcatttaaaacaaggggctcaaacaatatgccctttcccaaaattattggccgtaaccagcctaacttttgggggtttttttgccctaataaacaccatcctccgggggggaaaaggtccaaagggtcaagttgcccctaaggagctgcatgatcaaagggctttttttgtatgacccctccccaagggggtttaactgggaaatagtttcataaaacccctgttttgcaaggttgaagctttgctggggagttcaaaatctcataataaaacactggagaagttaaaagcaagcccaaccct

SEQ ID NO: 76 - DNA, 844 bp, Zea mays
  unsure (1)..(844): unsure at all n locations
  Clone ID: TF_LIB4756-120-R1-K1-F6
cattgggaccctcgaggccggccggggccgctctctgaccaactccttcacctcgttttcttgtcctcaccacttcgccgtcttctgcaacccacgcttctgcaaacccaccccctctccacatctacttttctcttcacttcacaatgggttacgaagactccgtatacctagccaagctggccgagcaggccgagcgctatgaggagatggtcgagaacatgaaggccgttgcctccgcagaccaggaactctccgtcgaggagcgaaatctcctttctgttgcctacaagaacgtcatcggtgctcgccgcgcgtcctggagaatcgtcacctccattgagcagaaggaggagtccaagggcaacgaggcccaggttggtcttatcaaggagtaccgccagaagatcgaggccgagttggccaagatctgcgaggacattctcgagtgccttgatggccacttgatcccctctgctgagagcggcgagtccaaggtcttctaccacaagatgaagggtgactaccaccgctaccttgccgagttcgctgttggtgacaagcgcaagacctctgccgacaagtcgcttgaggcttacaaggccgccaccgaggttgccgcctccagcctggcccctactcaccccattcgcctcggacttgccctcaacttctccgttttctactacgagatcctcaactcgcccgaccaggcttgccaanttggccagcaggctttcgacgatgccattgctgagctcgacaccctgtctgaggagagctacaaggactctaccctcatcatgcagctcctcagggacaacctgaccctctggacatcgtc

SEQ ID NO: 77 - DNA, 658 bp, Zea mays
  Clone ID: TF_LIB4767-042-R1-K1-H10
cattgggtacctcgaggccggccgggagagcgcatacgacacccggagttgatacaggacgatcttccacgatctcgtcgatcttgcggactgcctgctctgattactgaactgctcgatgccatccgaccagctttcccgtgatgaaaacgagcacatgagcgaagctcgctgaccaggcgcaaaccgactacgatagggctagattcatggatcaacggagcctcgactgttgactcggaggagctcactgcgtacgatcgaaacctcttgtctgtcgcatacaataacgtcattggagcccgccgcacctcatggcgcatcatctcctccatcgagcagaaggaggaggggctaagccacgacgaccgagcaacactcatcaaggattatcgtggcaagattgacactgacctgaccaacatctgtgatggcatcctcaagctgcttgagacccatcttgtgccgtcttccactgcccccgagtccaagggcttctatctctagatgcatggtgcattactacacataccttgctgagttctagactggacctgagagaaaggacgccgctgacaacacgatggtggtatactacgctgcccaggacattgctctgagtgcaattgctccaactctccctattacggttggactg

SEQ ID NO: 78 - DNA, 265 bp, Zea mays
  Clone ID: TF_LIB3245-537-P1-K1-D7
cccacgcgtccggcacaaactcgtcttttccgctccacaggatcctgtgcgccggcgtaaccgtgtgaccgcccgtgccgccggccatcccgatccgccgacccgtaccagccccggtcgaagacatgtaaccgacggagcccacgcgggaggagagcgtgtacatggacaacctcgctgagcacgcggagcggtacgaggagatggttgagtacatggagcgcgtctagcgctacgccgggggctacggtggcggcgaccagtt

SEQ ID NO: 79 - DNA, 442 bp, Zea mays
  Clone ID: TF_LIB4171-051-R1-L1-B6
cgggcatgagccctaattcatacgactacgaaggcagcctcgtcaagcaaaattacacaaagaagaaaatacttgatgtatgaactttgtgtcagctatgtattcagtaatttatacgccgtcgcaccgcacgggcacataactattgataaattatgttggcaacaaaagcaatttggaattcattatttttgtggacatgcattaatgaaatcaacacagtatagaaagtgaagactaggaaaggtgcaccagaaactccagctgggtcatacctcaggaatctgaagatttgccgtactcaagccatgctgctccaatacccttggcggtttgacgaggctatctctcagttggatacacttggcgaggatttatacaaagatagcaccttaatcatgccagcttttgagggacaacttaacgcttatggtccgctgac

SEQ ID NO: 80 - DNA, 694 bp, Zea mays
  Clone ID: TF_LIB4738-097-Q1-K1-A9
atctattgatcgaacgaggagtcccgtaagaacgaagagcatgagaaccttatcaaggaataccgtgcgaagatcgaggctgaactgagcaatatctgtgatggcatcctgaagctgcttgactcccacctagagccttcttctactgctgctgaatcaaaggtcttctacctcaagatgaagggtgactatcacaggtatcttgcggaatttaagactggacctgagaggaaagaatctgctgacaccacgatgatggcctacaaggatgctcacgacattgcgctggatgagctggcacctacccatcccataaggcttgggcttgctcttaacttctcagtgttctattatgagattctgaactccccacacaaagattgcaaccttgcaaagcaagcgcttgatgagagctatctcccagctacacacccttgcagaggagtcataccaagatagcactctgatcatgcaactcctgagggacaacttgaccctttggacctctgacctcacggaggatggtgctgatgagggacaacaagccccgaaaggtgaggctggcgacgtacagaaaggcacagcaatcttgggagagcacatattgctcgagcccattgatttagatgctctatgctgacgaagctgaacctgtgccgcgctattattgtagctgatatcctgatccctcact

SEQ ID NO: 81 - DNA, 207 bp, Zea mays
  Clone ID: TF_LIB3069-008-Q1-K1-A8
accactcgtcctaagactgaacatttggttgagctcactgacgaggagcgtaacgtactggctgttgcatacaagaatgtgatcgctgctcgccgcgcttcatggcgcattgaaccttccattgaacaaaaggaggactcccataagaacaacaagcatgtgaaccttatcaaagaatatcgtgccaagatcgaagctttactgaac

SEQ ID NO: 82 - DNA, 636 bp, Zea mays
  Clone ID: TF_LIB3069-008-Q1-K1-A8.R2
acgactcgtgagaagactgagcatactgaagaggagagtgaccatgagcgtgacgtttacaataatgtatacgagaatgtgatgtgctgcttggcgcactgtatgttgcattgaatattacgttgaacacagggagaactaccagcataacaaacataatgtgaactttatcaaggaatatggtgctaagatgaacgctaaactgaacaatatctgggatcgtatcgacaaccagctagagtcccatctaacggcttcttatactgatgctgaatcacaggtcatgaacgtcaacattaacggtgattatgacaaatataatactgaatctaagactgatgcttataggaagaacactgttgagagctcaatggcggcctataacgttgctcaggatattgttgtgcctaaccatgcaactacgcatgcaataaggctgaaacttgctctgaattattaagagatttataatgagacagacaactccccacacaaggctaaccacctgtcaaatgaagctatctatgaatctaactgtcatttagacagcctatgcgaggatgtctatatggatatgcctctgctgatgcatctcctgacggataactacaacccttctgacatacgatctcactg

SEQ ID NO: 83 - DNA, 735 bp, Zea mays
  Clone ID: TF_LIB4742-110-Q1-K1-B10
tcgaggccggccggggccaccgtccctatccgcagctcccccgcgcccgagatcaaccccgcgccaggagcaaccttgctcttttatccatatgctcgacggacgagaatgtctacatggcccagctgtctgaccaggccgaaagcgtatgaagagatgattcagtatctgcataatcagcctgaaaactagtcatgatgcgtgaaggacctacacgtgttgcagcagacgtagacctcattcccatggctcatacaactagctgtagattagcgggcgtcgctcgatgctctcaccgacagcacttgtcatcttctagttagaacatacaacaggagtcccgtacgaaccaacagcatgtgcaccttatcacggaataccctgcgcaaatcgaggctgaactgcgcaatatctgcgctggcatcctgaagctgcttgactcccacctagagccttcttctactgctgctgaatcatagctcttctacctcaagatgaagggtgactatcacaggtatcttgcggaatttaagactggtcctgagaggaaggaatctgctgacagcaccatgatggcctacaacgctgctcaggacattgcgctggctgagctggcacctacccatccgataaggctcgcgcttgctcttaacttctcagggggccattatgagactctgaactccccccacaaactcgctaccttgcaaaacagcgccgtttgatgaagctatc

SEQ ID NO: 84 - DNA, 300 bp, Zea mays
  Clone ID: TF_LIB3159-007-Q1-K1-E7
acgctgacactttttcagtcacagaggtacgaggaaatggttgacttcatggacatcgtagcgggagctgttgactctgaagagctcactgtcaaggatcgcatccttctgtacgatgcatacaagaacgttattgtaaccattcgtgcctcatgacgcatcatttccttcatcgatcacatggaggaggatcatgccaatgttgaccatgtaacactcatcaataactacctcccaactattgaatctgacctcaacacatatctattataacatcctcaatctatatgaataatatct

SEQ ID NO: 85 - DNA, 328 bp, Zea mays
  Clone ID: TF_LIB3075-042-Q1-K1-C4
cagacgcgtacggaagccaggacatggaaataaaaccgtgatacctgcctactgatgcaagaaaaacaccgagataccacggtgctgaacggagtgatagacgtgctcgaataccaccttgttcaatgcaccgccaggggcaagtaccaggtcttataccttaaaatgaatgatgactaccacatggaccttgctgagttcaaaactagtgcaaagaggaaagatactttttacagcaccatgaatgcctacacaaatggtcacgacattggtcttggaaaaatgggtgtaaccacaccccatcaagcttggccttggtttcaactta

SEQ ID NO: 86 - DNA, 1353 bp, Zea mays
  Clone ID: TF_ZmC5000_11
gttctgttgaagatgcttctaaagcactggagtattgtagcactgatggaaggccttcgatgaaatgtttccctaaaagttgcatactacatcgctgaagcactacaatattgtaacactgagggaaggcctttgtatcatgacctaaattcatatagggccctctttgatgaggaggagcactaccttttgccagttgcttgcaagaatgtaattggaatccgatgtgcttcatggcgcatcgtatcctccattgagtatagggaagaaggttgtgtcaacatggactgtgccactctcatcgaggactaccataacaagattgaagttgaactcaacaagatctgtgttggaatcctcaagctcttttcccaccttcccccctcattaatagtttcaaagtccaaggtcttctacctcaagatgaagggtgattactatagttccttgcggagtttgaaacttgatctaggagaaaagatgcagccaagaataccatggtggcacgcaaagttgctcagatattgctttggagttggctcccctatcctattaggctttggctgatgcttaacctctcaactctcctgatcttgctcgtggtctccccaaacaggcaaagccaacgaatgaaagggactcactcgcagcaacaaccaaaaaattgacatggtggtaggaaaaagacaatggtcagcaacttactcggagcagaaaatttttaattgtggtacccgtggtgctgtggttggcaatgcagtgatgcttagtgaaatcataaactacgtgcagtccctacaatgacaagttgagtttgtgttcatgaaactggccaccgtgaatccccaggtggacttaaatagcctgcctaacgtcctccctaaagatgtacatcagtcttgtggcccgccacatttctcgctggagaccttaggcgctccgttgtcgtacctcagccagcctcaccatggaagccctcttggctgcatggacaaccagagttgtatgcacccacttgacacgacgttttgcttggcgataaatccgcagtatcatttcctcaacggtgttagcgatgcatcgtctcagctaatttgatgcttgtgtttgtggaaaccaagaggtggtgttgattcattggaaacatggttgtgtatgaatgagtttccagctacttctattgttggagatagaaaccaacatgtttggtttttgtttttattcgctttagaacaactcatttttgtacagaaagaggcatttagctataattgtttgttgtagtatgtttaccgcaggatagccggttccatgaaatacataaaaaattgatattgttgctgtatttggttt

SEQ ID NO: 87 - DNA, 424 bp, Zea mays
  Clone ID: TF_LIB3597-059-Q1-N6-A7
accttaaaaaacccagagcatattaccagagcacacggacttaatgccatctagcagattcacaaagcggtggggaattaattaagaacactaccagtctagttatataaaaaaagaagtttgggaaccggaacttagctgcaataatagcacggctcatattgagcttctacagacttgagcatctaaaacaatgggcttgaacactgtgcgctattccaagattactgcacgtcaacagaacttacctttccgggattttttgccctaatcactaccatcctacatgaggtcataagctcaaatggttaagttgtccctaatgggcctgtttatcagagggatatctttgtttgaatcctccccaagggattctaactcggacatagcttgatcaaacgcctgctttgcaacgatgcaagct

SEQ ID NO: 88 - DNA, 1773 bp, Zea mays
  Clone ID: TF_ZmC3397_8
cattgggtacctcgaggccggccgggccgcccttcacgcagaggggtccggtccgccgccctctcggcccatccgccgccggttcccgtccagccgcacgcgccttcttcctcccccggcgccttctcggtgaaccagacccgtccctcacccgtgcgactcccgcagcgcccgcccctccgtcacctccgcatcctccccgtccttgcggccatatccgtcgtctccgcatcctccttcctacgctctgtcggcgtggcctccccatcccggtgttctccgattttggggggcgtccctttgcccgctccggtctgctcctccagagtccggtccagcggagcgcactacgacacagatcggcagccgtccatccctttccagctctccagagcctccgccggcgcatccggcgactgatttgcagggcgtatgtgttggaaatgctcagctgctagtttttcctggtagatcatcaagtcttgagagcagttaaaacaaaccaatttttcctgcaagagctctacgtgctatggagacagcaaatacattttcctttggttcacttcaattttgacggagtgcttgaagatggctttgttgccgtcaagaagttatactcgtatattgcaattgaagacgaaccatttcatcgaaagtagaaaagggcaagcgacgagcacagcacagcacagcacaagcacgccttccgttttgggaaggcgaggagaggggaaccccggcccagggagagttgtggggaggggatcggcggcggaggagatggaggagcgggagaagctcgtgtgcctggccaagcttgccgagcaggcggagcggtacgacgatatggtggaattcatgaagaatcttgctaggatggacgtggatatgagtgctgaagaaaggcatttgttctcagttggtttcaagaacactattggagcaaagagggcatcatggagaatcatttgttcacatgagcaaaaggtcgcagctgatcgtcagactggtgtgatgatagatgcctataagaagaaagtagaagaggaactaaggaaggaaaggtgactactaccgttacttggctgaatttagcactggaactgaaaagaaagctgcctctgatcagtcacttatggcctatcagcatgccatggttgtcgcctccagtgagctctcacctgctcaccaaatccggcttggccttgccctcaatttgtcggtcttcttttatgagataatgaactctcatgagagagcttgccaagtggcaaaacaagcatttgatgaggctcttactgagataaattctggtgagggaggttacaaggatagcacacttatgatgcagcttctgaaggacaacttagcattgtggacatcagaactaactggaggtgaagcatccaagggtaacgacgatgtcgacatggagggttgatacattctccatgttttaaggaaacacagaaagcacgcaaaaatatccaggctgtgatgctagcgaacctgggtcctcaagttttttctgcatcggaactcagaggagccttgtgtatttttctgaagtttctgtccgtctcgggttttttttttgaggtctgtttgttcctctcttttggccatcgtttggtcctggagtcagtcactcactaccaagtgtttcagaggtctgaactggtgagcatctagatctgttgttgctttttttttcttcttctgtgcttcagaggcatctttgtacaccgatggaaaactgtttctcttatc

SEQ ID NO: 89 - DNA, 399 bp, Zea mays
  unsure (1)..(399): unsure at all n locations
  Clone ID: TF_LIB3076-006-Q1-K1-H5
acgcgttcgcgttattgtagcccgtcgtgcctcatgtctcatcatttcctccatcgagcanaaagagggggttttaggaagtgaggagggctttactctcatcaaggactaccgtggcatgattgaaactgagctcaccaagatctgtgatggcatcctcaagcttctttaatctcaccttgtgccgtcttccaccgatcctgagtccaaggtcttctatctcaagatgaagggtgactactacagataccttgctgagttcaagactggagcttagagaaaagacgctgctgagaacaccatggtgggttacaaggctgcccaatacattgatttggctgtgctttgttccaactcaccctactaggcttggactggcacttaactttctcagtgttt

SEQ ID NO: 90 - DNA, 256 bp, Zea mays
  Clone ID: TF_LIB3066-035-Q1-K1-A7.F24
aagggtgactatttcaggtatgttagcggaattgaagactggtcctgagaggaaggaatctgttgagagcacgatgatggcctacaaggctgctcaggacattgcgctgactgagctggcacctacccatccaataaggcttgggcttgctcttaacttgtcagtgtactattatgagatactgaactccccagacaaagcttgcaaccttgcaaagcatgcgttatgatgaaactgtatacgaggttaacaccct

SEQ ID NO: 91 - DNA, 565 bp, Zea mays
  Clone ID: TF_LIB4758-032-R1-K1-H2
accggccgagctggcggtgaccctgttccgccgagccgagccgtcccaccacatccctagcggcggtcgcagctatgtcgacgtagcagccgacgcgtgaggacagcgggaacatgggcaagctggcaaaccaggcgcgagcgctgacgaggtaggtggatcgagttcatgtgaacgagtggcgcgctccgccatgggaaacggcagaggggaggaactctcctaggaggagcgcaacctgctgaccatctcctacaataacgtcatcaggggccgcttggcctcgtggaggatcctgtcctccatctaacagaaggatgaggggcggggtaacgaggcacacgccgcctccatccgcacctaccgctccgagatcaaaatcgaagtcgaccacatctgtgacgggatcctcggcctgctcgactcccacgtcatcgcatccgacgacgctgacaagaccaaggtcttctacctcaagatgaagggggactaccgcaggtaccttggtgaaattaaatcgggtgaagagatgaaggatgctgcgtagagcaccatgaatggctac

SEQ ID NO: 92 - DNA, 320 bp, Zea mays
  unsure (1)..(320): unsure at all n locations
  Clone ID: TF_LIB4605-003-R1-N1-A4
ctaccttctatttgattgtctgtatctcgacacggacgacccgctgacgcgcgctaagctccggtgctctgccttttgtgtgaactgtactgtcctatggctctcccacagcttttctgtaaggaagatgtgtacatgaggacatctctgcttcgcnggctgcagaggtaccacgagatggttcacgtcttggagaaggtagccaagactgttgactcggtggagctctctgatgaggagcgaaacctcttgcacggtgcataccagaacgtcagtggagcccggctggcctcattgcgcatgatcttctccatccaaca

SEQ ID NO: 93 - DNA, 460 bp, Zea mays
  Clone ID: TF_LIB3632-045-Q6-K6-B10
ctccgcgcgctgcgccgctgcctccgccaacggacgacacgacgacacacgctggagatgccgcgtactgccgctcgtgaatactgagctcgcagatggcctcaggagagctcccccgcagaggaatatgtgtacatggacaacctcggtgagcaggcggagaggcacgaggagatggttctcctcatggataaggtagccactactgttgactctgaggagctcactgaggaggagcgaaacctcttgtctggtgcatacaggaacgtcattggagccagccgcgcctcatggcccataatctccttcatcgagcagaaagaggagggccgatgcaatgaggaccgagtaacactctttgaagatgttcgtggcaagattgagagttagctgacccagatctgtgatggcatccttaagctgcttgagacccatcttgagccgtcttccactgcccccg

SEQ ID NO: 94 - DNA, 387 bp, Zea mays
  unsure (1)..(387): unsure at all n locations
  Clone ID: TF_LIB4665-011-Q1-K1-H11
ccgggacacagcatccgcagttccccgacacaccgttcctccgagcccaggagcagccccgcgccaggaggaagtttgttcttttaacaatatgtcgagggaggagaatgtttacatggccaagttggctgagcaggctgaaaggtatgaggagatggttgagtatatggagaaggtggctaagactgtnnatgnggnagagnntattgtggtgggggggaggcttatattggtggtgtactggacgctcgatctggttccttgccgtgtttgatgtcgtaagtgtctcgcaggattctgacgtcttggctcctcttcatgccctggcctttagtggcgcggagagggggatgatgtgtgctgtgcgatatctttgggtgctgatcc

SEQ ID NO: 95 - DNA, 464 bp, Zea mays
  Clone ID: TF_LIB4701-005-R1-K1-G1
acgaggccatctggcaactggacaccctgagctgaggagtcctacaaggacagcactttgatcatgctgctccttcgcaatacattgaccctatggacttctgacatctcgcaggaccctgctgcatacattagggaggcacccaagctgcgacttgagtgacggccagtaaagccgcctttatgtgctctacaaactagatgctagagtttgctgctgtcgaatgacactatgcaatgcgatctggcacctgctttcttgggcgcgactcttgctatgactgtcaccactaaaatttggggtgctccccacatgagatgcttccgtacaaggcctcgctgacccacctcgcttgagacggggggcgctgcaacccggactggtagatatgcgaagccctttaaactgttgttacttgcattttaccttttccatcgctgtttattgcgaggggccctatatcg

SEQ ID NO: 96 - DNA, 464 bp, Zea mays
  Clone ID: TF_LIB3632-025-Q1-N6-H2
aacaaaaaaaagcgagggaaagagggaaaaggcaggggacaacagttaaagaggggttccaaaccaaaccagacggggctcaagggccccacgccaaaaacgagggggaacaccgaggccttgccagggagaatcctttacggggggcccccaaattttagggacaaaagtaaaaacacggttaaaagggtccaacccaaaaaaccaggttccaaaaaaaattgaataggggaattcgacagcagcaaacactagctactagtttttaggcacaaaaagccggtttaactgcccctaactcaagacccgttggggcccctccttaattttttaagaagggtcctccgaaagggaaaaggcccatagggccaagttataacaaaggagctgaataaaaaaagggctgcccttgtaggactccccgttaagggggtccagttccaaaagggcctaggaaaaagcct

SEQ ID NO: 97 - DNA, 2309 bp, Zea mays
  Clone ID: TF_ZmC19578_1
cattgggtacctcgaggccggccgggtctccacaaaccaagttccaccagacccacacgtttctttaccctaaccttttcgctgccgcggaagaacacagccaccgccgtttcttcgtcttcctcgcagcgccggcgcgccatctcggtacgaaggcgacggcggcggcgacggcggcgttcaggatcgggatctcagcgacgacgtcagaggcttcccatcccgacccccgccagtcgcctcgcgccctcgactccggactccggtcctccgcacaccggccggttaccctgcgtttgaacctgctatagaaatttataaaatggccgcggttgatgcgacaaccaaggagatggatgcactgcatgttggacaaaatgatgaaacaaaagagagactgattaaagaagacaaagctgcaaacagcaatcattctgttgttgcagctcagtccttgccaccagaggacgacgatgatgatgaagcacaagctgatggtccatctcaagatggagcagcagctgtaaagaagaaaaagaagaaaaacaaatccaaaaagaagaagggcccccttcaacagacagatcctccatcaatacctgttgatgagcttttcccctcaggagaatttccagagggcgaaatccaacaatacaaggatgacaatctgtggagaacaactagtgaggaaaagagggacctggaacgactgcaaaagccaatatacaactctgttcgccaagcagcagaagttcatagacaggtgcggaaatatatgaggagcatcataaaacctggaatgttaatggttgatctatgtgagacattggaaaacatggtccggaaacttatcaaggagaatggactgcaagctggcattgcttttccgactggatgctccttgaattgggttgcagctcactggactccaaatgcgggcgacaaaactgtgctacaatatgatgatgtgatgaagcttgattttggaacacatatagatggttacattgttgattgtgcatttactgttgcattcaatcctatgtttgatccattgcttcaagcaacgagagatgccacaaatactggaatcaaggaagctgggatagatgcacggcttggtgatgtcggtgctgcaatccaagaagttatggaatcctatgaggttgaaatcaatgggaaagttttccaagttaaaagtgttcggaacctcaatggacacagcatcgggccatatcaaatccatgctgggaaatcagttccaatagtgaaaggtggagaacaaacaaaaatggaggaaggggagttttatgccattgaaacttttggatctacgggaaagggatttgtcagggaggacttggaatgcagtcattacatgaagaactttgatgtcggacatgtgcctttaaggttagcaaaggccaagcaactgcttgggaccatcaaccacaacttcggaacgctcgccttttgccggcggtacttggaccgccttggtgagaccaagtacctcatggctctgaagaatctttgtgacaatggcatcgttcagccgtaccctcccctgtgcgatgtgagagggagctacgtctcacagtttgagcacacaatcttactccggccaacttgcaaagaggtcatttccagaggcgatgactactgattgcggctggaggaggctccttgtaccaggttgtgtgtgtggagcgccatccgtttatggatcacactcggataaatggtttggtcctccagagttcaggatgttgtatgagttttataataactcgctaaagattgtggatgtacaagtagcagtaatacgttttctgggaacatggacattgttaggctatttccagcggggatttcgtccgagtttcaatctcgattaaatgtgttgccacataagaaaatatgataatatggcaataatttaataagagagtgagttttattggaaaaaaaaaaaaagaaaaaaaaaaaaaaaaaagcggcccgaggtcatgatgatcgagcaacactcatcttggattatcatgacaagattgatactgagctgaccaagatctgtgatggtatcctcgagctgcttgagacccatcttgtgccgtcttccactgcccccgagtccaaggtcttctatctcaagatgaagggtgattactacagataccttgctgagttcaagactggagctgaaacaaaggacgccgctgagaacccgatggtggcatacaaggctgcccaggacattgctctggctgagcttgctccaactcaccctattagggttggactggcac

SEQ ID NO: 98 - DNA, 247 bp, Zea mays
  Clone ID: TF_700336508H1
cgccggagcacgacgcacgcagatccgcagagatcagtgacactgcaagtattgaaaactgcattgtaagatggcatcagcagagcttgtcccgtgatgaaaatgtgtacatggctgagctcgcagagcaggccgggatgtacgagcaaatggatgagttcatggataatgtacagagaactgttgaatctgaagaggtcactgtggatgaacgcaacctcctgtctgatggatacaagaacgttta

SEQ ID NO: 99 - DNA, 630 bp, Zea mays
  Clone ID: TF_LIB4977-003-R1-K1-F12
gagttccaccgctagcatccgcagtacccccgagccccagacgcaaccccgcgccaggagtaagtttgctcttttatcgatatggcgagggaggagaatgtctacatggccaagctggctgactaccgtcgaaaggtatcgaagagatggttgatcatatgcataatgtgcctaatactgtagatgtggaacagctcactgttgaggagcgtgacctctggtcgggcgcatacaaccaatgtgatcgggggtcgacgtgcttcatggacgcattgtgctccttctatctgagacagaactgacggagtccgcgtaacgaaccacagagcatcgacgaacctctatcaacggaataccgtgcgcagatcgaggctgaactgatcaatatccgcgatggcctcctgtaatgtgcttgactccctgctagtggcttcctctactggtgctgtccccaaggtcttctacctcaagatgaacgtcgactatcacagggatctcgcggaatccaccactgtgcctgacaggaaggaatctgctgacatcaccatgatggtctactacgctgctcacgacattgcgtcgactgagatgagacctacccatccgatatcgcttgcgattgctcctaac

SEQ ID NO: 100 - DNA, 828 bp, Zea mays
  unsure (1)..(828): unsure at all n locations
  Clone ID: TF_LIB4740-122-A1-K1-B7
gacaccttttctnccaacgccgcgagctcgactaggactaccgaccacgtccgctcgagatccgtgagtactagcagattttgataactgaactgtcggatggcagcagctcagctttcccgtgatgaaaatgcgcacatggggaaactcgccgagcacgcgcagaggtacgaggagatggttgatctcctgcataatgtacccaatactggtgactcggacgagctcgctgtgcaggagcgtaacctcctgtctgctgcataccacaacgtcattggagcccgccgcgcctcatggagcatcatctcctccatcgagcagaatgaggagggccgaggatatgaggaccgagcaacactcctcacggattatcgtggcaagattgagactgagctgaccaacatctgtgatggcatcctgcagtgtgcttgagacccttcttgtgccgtcttccactggccccgagctcaaggtcttctatctcgagatgaacggtgattactacagatacctcgctgagttcaagactgaagctgagagaaatgacgctgctgagaacactatggtggcatacaaggctgcccacgacattgctctggctgagcttgctccaactcaccctattaggcttggactggcacttaacttctcagtgttctactatgagattctgaactcacctgatcgcgcctgcagtcttgcaaagcaggcttttgacgaggccatctcggaactggacaccctgagcgaggagtcctacaaggacagcactttgatcatgcagctccttcgtgataacttgaccctatggacttctgacatctcgga

SEQ ID NO: 101 - DNA, 232 bp, Zea mays
  Clone ID: TF_700171261H1
atcgctggatctcgataaggacgaccgatgacgcacgctgagatccggcgtactgctaattttgataactgatctgttagatggcatcagctgagctttcccgttatgtaaatgtgtacttgtcgaactcgctgagcaggcggagaggtacgatgtgatggttgatttcatggagatggtagccaagactgttgactcggaggagctcactgtggaggagcgatacctcttg

SEQ ID NO: 102 - DNA, 856 bp, Zea mays
  unsure (1)..(856): unsure at all n locations
  Clone ID: TF_ZmC680455_1
tcgaggnnccggccgggaaaaaaaggaaaaaaaaaaaaccgttcaccaactatttttccttcaactgaaagcttcttctcagctgaatttcgttatttcccctttccttaacaacccttgaaatctaaaccgcacgacttcagtcgccaaacaccgccaaaatgggtcacgaagatgctgtctaccttgccaagctcgctgagcaggccgagcgatatgaggagatggttgagaacatgaagattgtcgccggtgaggaccgagatctcaccgtcgaggagcgaaaccttctctctgttgcctacaagaacgtcatcggcgcccgccgtgcctcctggcgcatagtcacctccatcgagcagaaggaggagtcaaagggcaactctagccaggttaccctcatcaaggagtaccgacagaagattgaggccgagcttgccaagatctgcgaagatatcctcgaggtccttgaccagcacctgatcccctctgccaagtctggcgagtccaaggttttctaccacaagatgaagggtgactaccaccgttacctcgccgagttcgccattggcgaccgtcgcaaggactctgccgacaagtccctcgaggcctacaaggctgctactgagttgccanaaaacccaagcttcctcccacccaccccaatccgccttggtctcgccctcaacttctccgttttctactacgagatcctcgacgctcctngaccagcttgccacctggctaagcaggccttcgatgatgccatcgctgagcttgacactctgagcgaggagagctacaaggactctacactgatcatgcaactgctccgagaccacctcactctctggac

SEQ ID NO: 103 - DNA, 446 bp, Zea mays
  unsure (1)..(446): unsure at all n locations
  Clone ID: TF_LIB3592-005-P1-K6-B2
ggnaaaactgtccatggtcgtagctcgctgagacagcggggagggacgggtgttggtcgagttcatggagatagttccaagatgttgactcggaggagctcatgtggagagcgaacctttgtctgttgcatacaaaaacgttattggagccctccgcgcctcatggcgcatcatctgctacatcgtgcatatagaggagggccgtggcaatgtggatccgctaacactcatcaaggattatcggggccagtattgagactgagctgaccaagatctgtgatggaatcctaatgctgtttgagaccactcttgagccagttctctatggctgcaaacgctaagccttctatataaggatggagggagatggctacatataccttgatgagttcaagactggggctgaaagaaaggacgccgattgaaaacaccatggtgaaattcaa

SEQ ID NO: 104 - DNA, 314 bp, Zea mays
  Clone ID: TF_700622808H1
tgatggcatcctcaagctgcttgagacccatcttgtaccgtcttaccccgcacccgagtccaaggtcttctatctcaggctgccgggtgattactacggataccttgctgagttcacgactggagctgagaaccaggacgccgctgagaccacgatggtggcatataaggctgcccaggacattgctctgctgagcttgctcgaactcaccctattaggcttggactggcacttgacttctcagtgttctactatgagattctgaactcacctgatcgcgcctgcagtcttgcatagcagcttttgacgaggcc

SEQ ID NO: 105 - DNA, 302 bp, Zea mays
  Clone ID: TF_LIB3075-002-Q1-K1-B12
atcctatcctaccacttctctaaccacacaccaactcttccctaacaactacagaatactcgcccaactttaataccacctcaacaccatcccacaactgtacacgaatcaaaatcttctacctcaacataaaaggtaactaccaccagtaccttgcttagatcaaatcttattcatacaccaaacattcttcatacagcaccatcaatccctacaaaaatgctcatgacatcgctctttcatactctactaccacccaccccattaagccttccccttctcttaacattctcaacttctac

SEQ ID NO: 106 - DNA, 648 bp, Zea mays
  Clone ID: TF_LIB4764-001-R1-M1-A2
ggccgcttttttttttttttttttctttggttttttggggtttttttttttttttttttttttttttttttttttttttttttttttggggggaaaagacttcaaaacccaaaaaaacgctaaaaaaaccccggacatgcttttaaaaaccagggaaaaaaaccagcccaaacggacttaggggggggggggggaaacaaaaaaaaagggggaacaaattcaaacactacccccctactaaaaaaaaaaaaaagggggggaacaggaaaacagctacaaaaaaaacacgggaaaatttaagctttgacaggaaaaaacatttaaaaaaaggggctcaaaaaaaaagccctctcccaaaaatactggcccttaatggccggcaccaacccaacctttgggggcttttttgcccctaaaaaaaccaacctccgggggggcaaaggcccaaaggggaaaggtggcccctaagagctgcatgaacaaagggcaatctttggaaaacccccccccaaggggggtaaaaggggaaaaaactttaaaaaacccccgttttgaaagggtgaaagctttgtctggggaggtcaaaacttcaataaaaaacattggaaagttaaaaaaaagcccaagccttaacgggaggggaggggg

SEQ ID NO: 107 - DNA, 537 bp, Zea mays
  Clone ID: TF_LIB4729-013-R1-K1-D2
aaaacgcgtcgcattcgctctcaaggatcctctgatgccaccgccaccgtgtgaccgaccgtgccgccggcgatccatatccggcgacccgtgccaggcccaatcgcaccatgtcacccccggagccgacgcggcaggagagcgtgaacatggccaaccttgcagagcaggcgcagcgaaacgaggagatggtcgagttcatggagcgcatgaagcgctacaccgcaggagccgcaagaagaagggcaagaatagcgtggagacctacaagatctacatcttcaaggcgctgaagcaggtgcacccggacattggcatctcctccaaggccatgtccatcatgaactccttcattaacgatatcttcgagaagctcgctgctgaggccgccaagctcgcgcgctataacaagaagcctaccatcacctcccgtgagatccagacctccgtgcgccttgtccttcccggggagctcgccaagcacgccgtctccgagggcaccaaggccgtcaccaagttcacctcggcctaggctgc

SEQ ID NO: 108 - DNA, 176 bp, Zea mays
  Clone ID: TF_LIB3137-033-Q1-K1-C6
aaatagctacatggcgaatctctcctaacaggcacagatgtactaggaaaatgatgacttcatggagaaggtaaccaaaactgttcactctgatgagctcactgtataagaacccaaccttctgtcttttgcatacaaaaacctcattggaaccctccgttcctcatgtcacatca

SEQ ID NO: 109 - DNA, 171 bp, Zea mays
  Clone ID: TF_LIB3150-039-Q1-N1-D12
ctctatcatacgcagataccccaacccctaggggtaaccacgcgcgaggagtgtgcttacttttttatccatattatctatatggctagagaagaaaatgtctacatcgccaatctagctgagcacgccgaaaggtctgaataaatggtcgaatacatgcaaaaaagactt

SEQ ID NO: 110 - DNA, 606 bp, Zea mays
  Clone ID: TF_LIB3689-247-Q1-N6-F5
aaatcttaatcccttttgatattacccacttagcttcacaatgtacaacaacgttagtactcgagcaactcgtaccacaatctcatttgatactatagcaattactaccaagaatgttgatgaaatcttagggctactaaatgacttccaagaaccggaaaaagttgagcccttaaactcaagtctcacataatcatcaactacaaaagtcgacacagcatcctccctgtattctttcaacttaatctcctcttccctgctaggcaccatctccaagagttcggttccaaggctctctgcctgtcctgtggtagtcgcccttcatcttgaggtagaagaccttggactcggcggcattggttgaatggaagcttttggtgatttctcttgtgggactatctctgcaagttcagactttgtaggagaggcagctccaaggctttgcaaagagcacaccgccgctgctcactgctgcttgcactttgtaggtcgttttccctgttgcccttcccctccagcagttcccttgttcttctttgtatcataatcatcatcatcctcgtcatcatcgtcttcatcatcgtcatcctcaccatccataacttc

SEQ ID NO: 111 - DNA, 1806 bp, Zea mays
  Clone ID: TF_ZmC3397_1
ccctccgaatttttatttttttattagcaagccccggtctttcttgctgccaaattgaagtttgtttgtggcatttttaaaatgggcgatgaggcttatacattcccatgttgggcaggatcagtcactatggccttcagcatatggtgtcgcctccaggagctctcacctgctcaccaaatccggctaattcggcacgaggagaaactgagccatccggtcccaaaagtagaaaagggcaagcgacgagcacagcacagcacagcacaagcacgccttccgttttgggaaggcgaggagaggggaaccccggcccagggagagttgtggggaggggatcggcggcggaggagatggaggagcgggagaagctcgtgtgcctggccaagcttgccgagcaggcggagcggtacgacgatatggtggaattcatgaagaatcttgctaggatggacgtggatatgagtgctgaagaaaggcatttgttctcagttggtttcaagaacactattggagcaaagagagcatcatggagaatcatttgttcacatgagcaaaaggtcgcagctgatcgtcagactggtgtgatgatagatgcctataagaagaaagtagaagaggaactaaggaaggtttgcaatgaagtattgtcagtcattgctattcactgccttcccttggccagtacgggtgaaaatatcgtattcttttataagatgaaaggtgactactaccgttacttggctgaatttagcactggaactgaaaagaaagctgcctctgatcagtcacttatggcctatcagcatgccatggttgtcgcctccagtgagctctcacctgctcaccaaatccggcttggccttgccctcaatttgtcggtcttcttttatgagataatgaactctcatgagagagcttgccaagtggcaaaacaagcatttgatgaggctcttactgagataaattctggtgagggagtttacaaggatagcacacttatgatgcagcttctgaaggacaacttagcattgtggacatcagaactaactggaggtgaagcatccaagggtaacgacgatgtcgacatggagggttgatacattctccatgttttaaggaaacacagaaagcacgcaaaaatatccaggctgtgatgctagcgaacctgggtcctcaagttttttctgcatcggaactcagaggagccttgtgtatttttctgaagtttctgtccgtctcgggttttttttttgaggtctgtttgttcctctcttttggccatcgtttggtcctggagtcagtcactcactaccaagtgtttcagaggtctgaactggtgagcatccagatctgttgttgctttttttttcttcttctgtgcttcagaggcatctttgtacaccgatggaaaactgtttctcttatcaaacgcatagactgtcagtgctgttactaatcatgttcggtgactgaagcgtctctgtaatgttgagatcgagcataaacttctccacgaaattatgtaactggtcggaagatgcttcgtcgatgcagcagttgcttccactaaaaaaaatattccccccccagcaccgtcgtaaaaataacttggccgtacgtgtattggctgctgcttctttcactttaccgtgactccgtgagtccgtgacccgcagcttcagcttctgagtaaaagataaaaaaaaaaaaaggtgacgacgctacaaaccgccccatctacaagcggccagggaggcgacgctaagccgacggcaacagcgacgccgcatgctctcgcgaccc

SEQ ID NO: 112 - DNA, 342 bp, Zea mays
  Clone ID: TF_LIB3117-032-P1-K1-E1
ttaacgcgttcgtgctggactcgcacctcgttccttctgacgacacgggggtgtcgaaggtgtttaccttaagatgaagggcgattatcacaggtacctggctggattcaagacgggagctgacaggaaggaggcggctgataattcgcttttagcgtataaatcagctcaggatattgcgatggcagatctggctcctactcatacaatttggctgtgattagcgcttaacttctttgtgttctattataagatcctgaactcgcctgatcgtgcttgtaacctaataaaacaggcttttgatgaggctatctttaatctgttttcttttatgcgaggagt

SEQ ID NO: 113 - DNA, 484 bp, Zea mays
  unsure (1)..(484): unsure at all n locations
  Clone ID: TF_LIB4668-011-R1-K1-A10
aaaacagccgccccgctagcatccgtagttcccccgggcccgtagacgcaaccccgcgcctggagcaagacggtccttttatcaatatcatgggtgtggcatgggaggagaatgtatacttggggaatcagaggacctgggccgggaggcttcaacagatggctgagcttatgctgaaggggagtgataactgtaaattgggaagagcccattgtgggggagcgtgncctctttatggtggcatgcgagaatgtaattggcgttcgtcgtgcttcgtggtgcattgtctcttctattgagacataaggtggagtcccgtgtgaacgatgcagctgtgaatccttatggagaaattccgtgcgaagatcgtggctgagctgggcaattttggtggtggttttctgaagctggttgacttctacttagggccttttttgatgctgctgggtcgttggtttttacctcgcgatgggatggtgtgttt

SEQ ID NO: 114 - DNA, 492 bp, Zea mays
  Clone ID: TF_LIB3606-053-Q1-N6-E11
aaggcccactgaccggggttaaaaaggttaaaatccaaccaccaccagttaaaggggtttccaaacaaaaccggaccaccctcaaacttcccccggggggggggggggggaatcccaaggttttccccggcagcttttaatttggggggcccccaaattttcccaacaaataataataaaacggttgttaaaagcgtgccccccaaaaaaccaggggccaaataaaattgcttagggtctttaaacagcaccaaacactaggtcctactttttaggccctaaaagccggttttattgcccctccttcaagtcgggcttgggcccctccctgattttttcccaaggggcctccgaaatgtcaaaagtccttagggtcaagttttaacaaaggacctgcataacaaaagggctgcccttgaaggactcctccttcagggggtccagttccaaaatggcctcttaaaaaccctgttttccaaaactgcaggccca

SEQ ID NO: 115 - DNA, 951 bp, Zea mays
  unsure (1)..(951): unsure at all n locations
  Clone ID: TF_ZmC7516_38
cccacgcgtccgcccacgcgtccgggtttccttcctcctccagtgctgtcatcgccgccgccgccgccccggtttccttcgtaagcccgtcgtcctccgtccgcgactctgcgcgagaagcgagagtatggacacccaagtgaagcttgctgttgtggtgaaggtgatgggaaggaccggctccaggggtcaggttacccaggtcagagtgaagttcttggatgaccagaaccgtctcatcatgaggaacgtcaagggaccggttcgcgagggagacatcctcacactgctcgagtctgagagggaggctaggaggctgcgttgaggcggaatagtgtcttggtagttttcgtatggagttggatgaccagaaccgtctcatcatgaggaacgtcaagggaccggttcgcgagggagacatcctcacactgctcgagtctgagagggaggctaggaggctgcgttgaggcgggatactgtcttggtagttttcgtatggagttggatgtcatctaattgtgctatgtttggcaaactttggtatgacctttaaaacacctgccttgtatgattatttgtgagcctggtggtaagattgcagtttggtttttaaaaaaaaaaaaaaaaaaaaaaaaaaagccgcaccccccattcgaacgccggagctcgacgaggacgaccgacgacgcacgcagagatccggcgtactgcaaattttgaaaactgaactgtaagatggcatcagcagagctttcccgtgaggaaaatgtgtacatggcgaagctcgccgagcaggcggagaggtacgaggagatggttgagttcatggagaaggtagccaagactgttgactcggaggagctcactgtggaggagcgaaacctcctgtctgttgcatacaagaacgtcattggagcccgncgcgcctcatggcgcatcatctccctcatc

SEQ ID NO: 116 - DNA, 487 bp, Zea mays
  Clone ID: TF_LIB3597-043-Q6-N6-F3
gttaaaaaagaagcgaggactttgaacgttcatgaaaccgctataccgagctcaggcacgcttgacacatactgcagaggagctgtaccaactcacacgcactaatttcaaaaccaagcgaccttaattcgaccagtaccaggctactaacaagaaaactgatgagagtggaaacaagaacagatacaataatgcctcggcccagattccacagcatacagcatataaaacattggacttcgaacaactttgctccccctgcgaagattactagacctcgcctgcatcacctttcggcgcatgtttaccctcttcagcgccattctccgagcggtccctggacccaagccacatgttattcttcaggagctgcatgaacatagggctatccttggatgactcctcaccactgctgactaactcagagagagcttaatcaaacgcctgttctgccacgttgcaagctttgtctggcgagttcagactc

SEQ ID NO: 117 - DNA, 293 bp, Zea mays
  unsure (1)..(293): unsure at all n locations
  Clone ID: TF_LIB3355-009-P1-K1-D8
gggggggggttctgntccncaattcccgggggggcgccacncgtccgagatattgttgaatatatccagaatgtggctattactgaanatatccaaaacggcacgggtgttgagcctaacgtggtgggggtcgcatacaggaatgtgattggggctcggcgggcttcatggcgcattggctcttctattgaacagaagggggaggcccgtaagaacgaataggatggtaaccttatcaagggataccgggcggagatcgaggcgtaactgagcaatatctgtgatggcattct

SEQ ID NO: 118 - DNA, 688 bp, Zea mays
  Clone ID: TF_LIB4740-105-A1-K1-H11
gcacatcctactcaaatggcgtagctctaggaggacgtccccccactcacccacacatccggcgcactgcaaattctaaagactcctactagccatatgccatcaacaaaatttttcccagaagaataggtctcctcggccacgctcgcctagcacacaaacatgcactaggagacgcgtgaaatcgtgtacacatcacgcactactgctgactcacctcagctcactgtgaaagagcgaaacctcctgtctgctgcatacaacacccccattgtagcccgccccacctcatggcctatcatctcctccttcaaaaacaacgaggaggcaccatgctctttttttctagtaacactcatcaaccgataatcttggcacagattgagactgacctgaccaagatctgtgatgtcatccatcgagctgcttgagacccatcttgcgccgtcttccactgctcccgagtccaaggacttctatctcaagatgaagggtgattactacagataccttgctgagttcaagactggagctgagagaaaggacgccgctgagaacacgatggtggcatacaaggctgtccaggacattgctctggctgagcttgctccaactcaccctattaggcttggactggcacttaacttctcagtgttctactatgagattctgaactcacctgatcgcg

SEQ ID NO: 119 - DNA, 393 bp, Zea mays
  unsure (1)..(393): unsure at all n locations
  Clone ID: TF_LIB4975-043-A1-K1-E3
ctcacaaacgcgtcgcatccgctccacaggatcctctgcgccaccgcaaccgtgtgaccgcccgtgccgccggcgatcccgatccgccgacccgtcccagccccgctcgcagccatgtcgccgtcggagccgacgcgggaggagagcgtgtacatggccaagcttgcggagcaggcggagcggtacgaggagatggtcgagttcatggagcgcgtcgcgcgctcgccgggggcgccggcgnngnnnannanntctcnnngnanganngnaancngntgnncgncgncnacaagaacgncancggcgcccgcagggccgcggggcggancancnccaccancgagcagaaggaggaaggccgcgggaacgaggcgcacgccgcagccagccgcg

SEQ ID NO: 120 - DNA, 606 bp, Zea mays
  Clone ID: TF_LIB4703-004-R1-M1-F4
cgcgaagtgagatgtatggtctatgtgtgacactggcaatctttttgaaatatgactttactgataatgtctcctccataacacatgcatgctgacatcataccactgtcgtacaatattttccttacctcttttagatttgactcctagactgttgcaggaaaggtgactactaccgttacttggctgaatttagcactggaactgaaaagaaagctgcctctgatcagtcacttatggcctatcaggtgctaaatcttccaaatgttgtacgtaggctcaaatgagccttttggtaaagcctatcccttcctgttaaaatgacaaacatttgctgcagcatgccatggttgtcgcctccagtgagctctcacctgctcaccaaatccggcttggccttgccctcaatttgtcggtcttcttttatgagataatgaactctcatgagaggtcactcatcttcaatgccttgtttctccctttttattgatgtttcaaattcatagatattcctatacaatcatatttcattttttgaaacgtgggctttcttgccaagtggtgactattttcaaataaacaattcacctgctgtagatgctttct

SEQ ID NO: 121 - DNA, 753 bp, Zea mays
  unsure (1)..(753): unsure at all n locations
  Clone ID: TF_ZmC2299_2
cctcgagtcctgccggggccgggactggcatccccctctggcctctaccctgcctgccgtttccatctccctccagttctccgcacccacccacgaacccacccacccagtcctttccccaacccacggcggccgtggacgccagggtcttctacctcaagatgaagggggactaccaccgctacctcgccgagttcaagaccggcgccgagcgcaaggacgccgcggactccacgctcgccgcctaccaggccgcgcaggacatcgccgtcaaggagctgccgcccacgcatcccatcaggctcggcctcgccctcaacttctccgtcttctactacgagatcctcagctcgccggaccgcgcctgctcgctggccaagcaggccttcgacgaagctatttcagagctggatagtcttggggaagagtcgtacaaggatagcaccctcatcatgcagcttcttcgtgacaacctcaccttgtggacttctgacatgcaggaggatggtggcgatgaaatgcgggatgcaaacaagcctgacgaggagcagtagtagtcgtcatgccatgccatgccatgcttgtacaaggaccattttcgtgtgtcctttccttcaatcgtcgacctttcgttttgttgttatactgctattgtggaaccctgttactgttactgttagtgtatcctattggcaataatcaaatgtggtatggttgactactgnaaataaaaaaaaaaaaaaaaaagcggcc

SEQ ID NO: 122 - DNA, 402 bp, Zea mays
  unsure (1)..(402): unsure at all n locations
  Clone ID: TF_LIB4740-080-R1-K1-A9
ccctcctccgcacatacgcgtcgcatccgctcccaggatcctctgcgccaccgcaaccgtgtgaccgcccgtgccgccggcgatcccgatccgccgacccgtcccagccccgctcgcagccatgtcgccgtcggagccgacgcgggggagcgcaacctgctgtccgtcgcctacaagaacgtcatcggcgcccgcagggcctcgtggcggatcatctcctccatcgagcagaaggaggaaggccgcgggaacgaggcgcacgccgcatccatccgcgcctaccgctccaagatcgaggccgagcttgcccgcatctgcgacggcatcctcgcgctcctcgactcccacctcgtcccatccgccgncggcgccgagnccaaggncttctacctcactatgaag

SEQ ID NO: 123 - DNA, 668 bp, Zea mays
  Clone ID: TF_LIB4666-010-Q1-K1-A7
acaccagatccgcagttccccgacacaccgttcctccgagcccaggagcagccccgcgccaggaggaagtttgttcttttaacaatatgtcgagggaggagaatgtttacatggccaagttggctgagcaggctgaaaggtatgaggagatggttgagtatatggagaaggtggctaaaactgtacatgagcaggacctctctgctggggggcgtacccatctcgtgtgtggttcaccatagacaccaacggcttcctgaacgtgcatggcgaggacaatactgcgtagcagcagaacaacatcaccgtcagcaccgacacgggcggcctgtgcagagaggaaaacgagggggtgggacacgacgcagtacaggtcgggggacgggacgctcagcacgaagggaagagcccaagacactagctggagaacataactccaccacactgcgctacacgatcaaggcacggtatgatcacgtccaagctgactgccgtcgaccagacgaagaactaggacgcgcccgactcggccatcagctgggctggacgccaaccagctccgcgaggcggaacgagttccgagacaagaatgaaggacctggaaagccttttgcaaccccatcatccccaatatgtacacagggcgcgggtgcccgcatggggaaggg

SEQ ID NO: 124 - DNA, 159 bp, Zea mays
  Clone ID: TF_LIB3279-037-P1-K1-D2
ggaggagctaattggggaggaccaaaacctcctgtttgtggaatacaaaaacgtaattggagccggccgcgcttaatggccaataatttcttcaatcaaccaaaaggaggagggccgaggcaatgaggaccgattaccactaataaaggataatcgggc

SEQ ID NO: 125 - DNA, 250 bp, Zea mays
  Clone ID: TF_LIB4667-011-R1-K1-E4
gccggaggccaccgctagatccgcagttccccgcgcccgaacgcaaccccgcgccagagaagtttgttctttatcgatattatcgatatggcagggaggagaatgtctacatgccaagctggctgagcaggccgaaaggtatgaagagatggttgagtatatggagaaggtggctaaaactgtagatgtggaagaactcactggtgaggagcggtgacctattttgggttccctgtctgatgtggtgggg

SEQ ID NO: 126 - DNA, 303 bp, Zea mays
  unsure (1)..(303): unsure at all n locations
  Clone ID: TF_LIB4740-011-R1-K1-C5
cggccaccgcaaccgtgtgaccgcccgtgccgccggcgatcccgatccgccgacccgtcccagccccgctcgcagccatgtcgccgtcggagccgacgcgggaggagagcgtgtacatggccaagcttgcggagcaggcggagcggtacgaggagatggtcgagttcatggagcgcgtcgcgcgctacgccgggggcgccggcggcgggggcgggctctcggtggnggagcgcancctgctgtccgtcgccttctnnngccgtctcggcgcccgcngggcctcgtggcggttcctctcctccc

SEQ ID NO: 127 - DNA, 391 bp, Zea mays
  Clone ID: TF_LIB3279-053-P1-K1-D2
cccacgcgtccggaaggaatctgcagagagcacaatggtagcttataaggcagctcaggatattgcattggctgaactgccacctattcatcccataaggcttggacttgcacttaacttctcagttttctattacgagattcagaactctccagacaaagcttgcaatcttgccaaggaggtaggtgtacatttatctttctattgctgtactgggtttctgagttataactatcttcggtgttgttagtttgaatctgggctgaaagaaaaggtgcaaattgcatatggattgatctttgaaaactcaagcacagtgattttaccattttcaccgtagatattgtttgatccttctattgcttggtactcatatggactttactttcag

SEQ ID NO: 128 - DNA, 525 bp, Zea mays
  unsure (1)..(525): unsure at all n locations
  Clone ID: TF_LIB4729-017-R1-K1-B5
gtaccctncgaggnnccggccggggacgcacgccaccatagttcgagatgagcgaactcttactgcggactaccggctacatcagtgcggagattacgacacacgtgcgcccacctgcaccctggactgccggcgggaatgaggcgctgtttctggtcctgaacgcgggggcatggcgaaagttggtcaccttgcggctaagagccaggataacgttccggatctacctgagagctgccacgtgctgcgtgtctccacccgagcttgctgcgcatgagcgagtccttcgtcgtgggctaccggacacgcgctggtacgacctgcgcttcatggtgcattatactgctgcttcccgcagagggcggactctcgaggcactgatgaccgaccaacattcataaaggattatcgaggcaagattgagactgagctgaccaagatctgcgatgggatcctctagctgcttgagaccccatcttgtgccgtcttccactgccaccgacgccgggccttctatctcaagat

SEQ ID NO: 129 - DNA, 326 bp, Zea mays
  Clone ID: TF_LIB3236-088-P1-N1-C9
gctacagggcgtctacccaataaaccatcctccaaatcacatttcataatttcattaaacaccagcaaacactaggtactagcttctaagcatctaaacccccctttacttcctccttcttaagtcttacttgggcccctcccttattttttccgcagggtcctccgagatttcaaaagtccatagggtcaatttatcacaaaggagcttcattatcaaaggtctttccttttaagactccttttttagggtttccatttcccaaatggcctcttaaaaatcctttttttcaaaacttaacccccaatttgttttattttaaattt

SEQ ID NO: 130 - DNA, 683 bp, Zea mays
  unsure (1)..(683): unsure at all n locations
  Clone ID: TF_LIB4979-021-A1-K1-B8
agattcgttcgaatgccggagctcgtcgaggacgaccgacgacgcacgcagcagatcgcggagcactgcaaattctgtcccctgaactgtcccatggcagcaccagagttttcccgacgaagacaatgtgacatggcagaagctcgcccagaaggcggacaggtaccatgagatgtctgagagtcatgacagaaggtacccaggactgctgactcgaaggagctcactggggaggagcgaaacctcctgtctggtgcatacaagaacgccattggagcccgccgtgcctcatggcgcatcatctcctccatccagcagaaagaggaaggccgacgctatgacgaccgaccaacactcctctaggattatcgcgccaagactgaaactgagcctggnccgatctgtgatggcatcctcaagctgcttgacacccatcttgtgccgtcttccactgcccccgagacaacggtcttctatctctggatgacgggcgattactacacatacctcgctgagttcacgactggaggtgagagatcggactctgctgaaaacacgatgatgcgatacccggttgcccatgacattgctctaggtgagcttgctccaactcaccctattaggattggactgcgacttaacttctcaatgtgctactatgagactctgaacgtccctgatca

SEQ ID NO: 131 - DNA, 1069 bp, Zea mays
  Clone ID: TF_ZmC290_20
ccgctccacaggatcctctgcgccaccgcaaccgtgtgaccgcccgtgccgccggcgatcccgatccgccgacccgtcccagccccgctcgcagccatgtcgccgtcggagccgacgcgggaggagagcgtgtacatggccaagcttgcggagcaggcggagcggtacgaggagatggtcgagttcatggagcgcgtcgcgcgctacgccgagtccaaggtcttctacctcaagatgaagggtgactaccacaggtaccttgctgagttcaagtcaggtgcagagaggaaggatgctgcggagagcaccatgaatgcctacaaagctgctcaggatattgctcttgctgatctggctccaacccaccccatcaggctcgggcttgctctcaacttctcagtgttctactacgagatcctcaactcccctgaccgtgcttgcaaccttgcaaagcaggcctttgatgaggcaatctccgagctagacagcctgggagaggagtcctacaaggacagcactctgatcatgcagctcctgcgtgacaacttgaccttatggacttccgacaccaacgaggacggcggggatgagatcaaggaagcagctgctgcccccaaagaatccgcccccgagggccagtaagacggatccgatctcccgacctgatgcgtgtctgctgatgtcggggagtttaccaggactgtgccgttcttgatttctgatagcttatcttctagtacacctcgtgttgttctcttcgtcacggcgccggtgcgcgtgcgctgaagctgcctgccattgccattgcctttgccgctgtttttaattaagcacacactctagatgttatgcccgcatgctatgtttcgattctcaagttgataaatgatggctggatgctggttttcgtgctccaagcctgctgcttcttccagggaaaaaaagacctgcccttgttgcagcgttgttgtttagaatgacctatatttgactggtattctgttacggtggctttgcaaagctgtttgtttggtttaaaaaaaagaaaaaaaaaaaaaaaaaagcggcc

SEQ ID NO: 132 - DNA, 583 bp, Zea mays
  Clone ID: TF_LIB3960-019-Q1-K6-F10
ctagcatccgcagttcccccgcccggacagcaaccgcgagccaggagtgagtgggttcttttatctgatattatcgatatggctagggcaggagtaatgtctacatggcacaactggctgagcacgcctgaaggtgtgaagagatgggtgtagtatataggagaaggtggctaatactgtctatggggaagagctcactgttgaggagcgcaacctgttgtgggccgcatacaagaatgtgattggggctcgccgagcttcatggagcatagcctcttctattgaacagaaggaggagtcccgtttgaacgaatagcatgttaaccttatgcaaggaataccgtgcgaacatcgtagctgaactgatcaatatctgcgatggcatcctgatgctgggtgactcccacctactgccttcttctactgctggtgaatcaaacgtcttctacctcaagatgaagggcgactatcacaggtatcttgcggaattcaagactggtcctgacaggaatgaatgtgctgggagcacgatgatggactacatggctgctccagacattgcgctggctgagctggcacctac

SEQ ID NO: 133 - DNA, 1248 bp, Zea mays
  Clone ID: TF_ZmC3397_4
gcgacgagttctccatccgcccctctctctatcctcttcttcctctcctcgccctcaccttggccgcgtcgtctcgtttttagaaaaggaacccgtgcgctggcccccgttcgccgctctccccgccgtggggtccggtccgccgccctcccggtccatccgccgcccaaaccgccgccggttccagtccagcagcacgcgccttcttcctcccccggcgccttctcggtgaaccagacccgtccggccgtccctcacccgtgcgactcccgcagcgccggcccctccgtcacctccgcatcctccccgtccttgcggccatatccgtcgtctccgcatcctccttcctacgctctgtcggcgtggcctccccatcccggtgttctccgattttggggggcgtccctttgcccgctccggtctgctcctccagagtccggtccagcggagcgcactacgacacagatcggcagctgtccatcccttccagctctccagagcctccgccggcgcatccggcgactgatttgcagcatttgatgaggctcttactgagataaattctggtgagggagtttacaaggatagcacacttatgatgcagcttctgaaggacaacttggcactgtggacatcacaacaaactggaggtgatgcatccaagggtaacgatgtcgacatggagatgggcgatcgaggctgatacattctccatgtttgggcacgaacctaggtcctcaagttttttctgcatcggaactcagaagagccttggtgtattttttttctgaagtttctgtccctctcgggttttttttgggtgttttgttcctctcttttccgcatcatttggtaggctgtacagtcactgactaccggtcttctggtttttttgaactgggaactatctagtagccttgtgtattttttttttcgtttctgcccgtcggggggtttttttttatgaggtctgtttgttcctctcttttgaccatcgtttggtcctggagtcagtcactcactaccaagtgttacagaggtctgaactggtgagcatccatatatgttgatgctttttttgtaagaagtgttttctcttatcaacgcacccactgtcagtgctgttactaatcatgttcggtgactgaagcgtctctgtaatgtagagatcgtgcataaacttctcgccgaaattatgtccctgctgagtgtcggtatgatcttccaatgctgatgctgacatgtgtt

SEQ ID NO: 134 - DNA, 1872 bp, Zea mays
  Clone ID: TF_ZmC290_29
ttttttttttttttttttcaattaaaaataagctgtatatttatagatcttcacagtacatcagcattctcaacgtaaaatacaaacaccggaaacaatatctacactacgtacatcgttagactacagatgtatatgagattatattttaaaattattctgttctaatttaaatggcagaagcatgggggaagcttcacctcccatcacatcctcagattgtgaccgctcaagcctctccgcctcacgttccccgcccacacctcgttcacgcagcaaacaccatttccacccaaccagaactcctcacgtgttccaccgtccatccgcctcccagccataacgccgaccacacatactccctcccgcaccgaactccccggcgcgcgccacgttcctttggtcgccacgtcatcccactgacatgcgggccccgcacccgctgcccagggttcgcgtcctcctcaaatgcccccacccggccacccatcgcctcccccacctccgcacaaactcgtcgcttccgctccacaggatcctctgcgccacccacaaccgtgcgaccgtccgtgctgccggcgaccccgatccgccgacccgtcccgtcccaccacaccctaccgccgctcgcagctatgtcgccgtcggagccgacgcgggaggagagcgtgtacatggccaagctggcagagcaggcggagcggtacgaggagatggtcgagttcatggagcgcgtcgcgcgctccgccggcggcgccggcggaggggaggagctatccgtggaggagcgcaacctgctgtccgtcgcctacaagaacgtcatcggcgcccgcagggcctcgtggcggatcatctcctccatcgagcagaaggaggagggccgcgggaacgaggcgcacgccgcctccatccgcgcctaccgctccaagatcgagaccgagctcgcccgcatctgcgatggcatcctcgccctgctcgactcccacctcgtcccatccgccggcggcgccgagtccaaggtcttctacctcaagatgaagggtgactaccacaggtaccttgctgagttcaagtctggtgcagagaggaaggatgctgcggagagcaccatgaatgcctacaaagctgctcaggacattgctcttgcagatctggctccaacccaccccatcaggcttggcctcgctctcaacttctcagtgttctactacgagatcctgaactcccctgatcgcgcctgcaaccttgcaaaacaggccttcgatgaggcgatctctgagctagacagcctgggagaggagtcctacaaggacagcactctgatcatgcagctcctgcgcgacaacttgaccctatggacttccgacaccaacgaggatggcggcgacgagatcaaggatgctgctgccccgaaagaatccgcggagggtcagtaagatggattcagtctcacgacctgctgctgctgatgttgaggagtgaccagaaccagaaccgccgtcctcgattctgatagattatcttctagtataccttgtgttgttgctgttgttgtcgtcgtcgcgccggtgtatgcgatgaagctgccattgctgctgttttaattaagcattctagatgttataccgcatgctttgtttcggtttctatgtcgataaatggtggccggatgctggttttcgtgctccgagccggccaccaggaagaagacctgcctgcccttgtgggtgcagcgttgttagaatgacctacggtgtatttgactttgacaggcctgctgcctagtggactgatattctgttatgcgcaaagctatttggcttgatgtctcaaaaaaaaaaaaaaaaaaaaaaaaactcgagggggggcccg

SEQ ID NO: 135 - DNA, 193 bp, Zea mays
  Clone ID: TF_LIB3150-026-Q1-N1-F5
gcaggtacctcgcgcccgagacgcagccccgcgccaggagtaagtttgctcttttatccatattatcgatatggcgagggaggagaatgtctacatggccaagctggctgagcatgccctaaggtttgaagaggtggttgagtatatggatgaggcggcttcaacttgcaaatttgcgagacgcttacagatt

SEQ ID NO: 136 - DNA, 331 bp, Zea mays
  Clone ID: TF_LIB3159-019-Q1-K1-C2
gcaagatctatgcttacctgagcattttttcgagagggatcttgaagctacttgagggcggcctaatggcttcgtctactgctactaaatcagacgccttctacctcatgatgaagggcgactatcacaggtgtggctcatgcatttaatactggcagctgacaggaaggaatctgctgagagcacagtggtagcctatactgctgctcatgacattgctctctctgatccgtcacctacccatccgattaggctcggacttgctctgaatttttcagtgttctattatgagatcatgtactccccagacaaagcttgcaacctggcaaag

SEQ ID NO: 137 - DNA, 406 bp, Zea mays
  Clone ID: TF_LIB3061-001-Q1-K2-D4
ggcgcatcatctgctgcatcgagcagaacgaggagggtcgaggcaatgatgaccgcgtaacactcatcaaggactaccgtggcgagattgaaactgagctcaccacgatctgtgatggcatcctcaagcttctcgaatctcaccttgaagccgatttcaccgctcccgagtccaatgtctactatctcaagatgaatggcgactactacagatactacgatgagttcaagactgaagctgagagaaaggacgctactgagaacaccatggtggcatacatggctgcacacgacattgctcaggatgatcttgctgcaactcacgctattacgcttggactgacactcaacttgtcagtgatctactatgagattctcaactaaaccgatcgctcatgcaatcttgc

SEQ ID NO: 138 - DNA, 779 bp, Zea mays
  unsure (1)..(779): unsure at all n locations
  Clone ID: TF_LIB4744-110-B1-K1-G10
cattgggtacctcgaggccggccgggaaccccctttccacttgcttagatcagacaggacgaccagacaaggcacgcgtgtatcgcgcctcctgcactttcctgagaactcgcaaccgcctacatcgcatccctcgaggtttccctggctcacgaatgtctccacggcgtccctcgctgagcagccgcacacatacgaagagatggaagtaccgcctggacatagtgacagacactgtagactcggaggagcatcactggggatgcgctgaacctctctgagctgttagtctaccagcaacgttcctcgctatccccgccgcgcctctagacttctcatctcctccatccaccagaaagagcaggtgcaacacgatgaagtaccaagctgcactcatccgggattatcaagacacgattgacatctgcatctgaccaatatctcgagatggcgttcctcaagctcgctcgagacccatcttgaggcgacttcctctgcccccgagtcccaggacttctatctcatgatgaagggtgattactacttataccttgctgagatcaagactggagctgagagacaggacgccgctgagaacacgatgatggcatacaaagctgcccacgacattgctctggctgagcttgctccaactcagcctattaggcttggactggcacntaacttctcagcggtctactatgagattctgaactcacctgatcgcgcctgcagtcttgcaaagcaggcttctgacgaggacatctcggaactggaca

SEQ ID NO: 139 - DNA, 565 bp, Zea mays
  Clone ID: TF_LIB4172-011-Q1-L1-B7
acgcctgcaggatccggtccggaattcccgggtcgacccacgcgtccgggagactagaaggaggactccggatccggctcggcgctcgccctcgctcgccatggagaagaccgagctgatccagaaggccaagctggccgagcaggccgagcgctacgacgacatggccacctgcatgaaagccgtgacggagcagggcgccgagctgtccaacgaggagcgcaacctgctgtcggtggcctacaaaaacgtggtagggggccgcaggtccgcctggagggtcatctcgagcattgagcagaagaccgacacctctgacaagaagttgcagctgatcaaggactatcgggagaaagtggagtcggagctgaggtccatctgcaccacggtcctggaattggtggataagtgtttaatagccaatgcaactaatccagagagtaaggtcttctatctgaaaatgaagggagattatttgcggtatcttgctgaaggagcttgtggcgatgatcgaaaacgtacaatggaaaattggcgaggggcctaccaagaggcgtttggtgtg

SEQ ID NO: 140 - DNA, 728 bp, Zea mays
  Clone ID: TF_LIB4979-042-A1-K1-B4
ttcactcatccgcagttccccgacccaccgctcctccgagtcctgcacagccccgcgccatagaggaagtttgatctttgaacatatgtgcgagggacgagaatgtttacatggacaaggtggctgagcaggctgaacaggatgaggagatggctgagtatatgcctgaatgcggctaagactgcacatgtgcaacacctcactcgctcaagatcgaaaccttctgtctcgctgcatacaaaaatgtgactgcggctcgccgcgcttcatggcgcattgcttctctccattgaaccacaggaggagccccgcactaaccaacagcatgagaaccttatcaaggaatatcgcggcaagatcgaggctgaactgagcgatatctgtgatggcatcttgaagctgcttgactcccacctagagccttcttctactgctgctgaatcaaaggtcttctacctcaagatgaatggcgactatcacaggtatcttgcgacaatttaagactggtgctgagaggaaggaatctgctgagagcacaatggaggcctatcacgctgctcacgacattgctctggctgagctggcacctacccatccgataaggatgcgacttgctcttaatatttcagtgttcgattacgacagtctgaactccccatacaaagctggcaacctggcaaagcaagcgctggacgaagctatctctgagttatacaggcttggtgacg

SEQ ID NO: 141 - DNA, 306 bp, Zea mays
  unsure (1)..(306): unsure at all n locations
  Clone ID: TF_LIB3354-052-P1-K1-C9
atccgctccacaggatcctctgcgccaccgcaaccgtgtgaccgcccgtgccgccggcgatcccgatccgccgacccgtcccagccccgctcgcagccatgtcgccgtcggagccgacgcgggaggagagcgtgtacatggccaagcttgcggagcaggcggagcggtacgaggagatggtcgagttcatggagcgcgtcgcgcgctacgccgggggcgccngnngnggggacaaactatattgggaggaacgcaacctgctggacgacgcgtcatgtacttcattcgcgcccacagggcctgggg

SEQ ID NO: 142 - DNA, 399 bp, Zea mays
  Clone ID: TF_LIB3062-057-Q1-K1-B12
cacaaggaggagacgcggagcgcggcggtgcacgccgacgtcgccagggggtaccgtgcgcgcgtggaggccgagctctccgggatctgcgcggggatgctgcgcctcctagacgagcgcctcgtgcctgcggcggcggccgtggacgccagggtcttctacctcaagatgaaaggggactaccaccggtaccttgccgagttcaagaccggcgccgagcgcaaggacgccgcggactctacgctcgccgtctaccatgccgcgcaggacatatccgtcaaggagctgccgaccacgcatccgatcaggctcgggctagcactgaacttctccgtgttctactacgagatcctcagctagccggaccgcgcctgctcgatggccaagcatgccttagac

SEQ ID NO: 143 - DNA, 354 bp, Zea mays
  Clone ID: TF_LIB3066-020-Q1-K1-G3
gcgcagctacacttcatgctaaccacgatcaagcgccaggaatgaagacgctgttttatcggtaatatcgatctggccagggacgagaatgaacacatggccaagctcgatgaacaggcctaaaggtattaagaactggttgaaactatggtgaaggtggctaaaactgtatacgttggtagacctatctgatgaacagcgcaagctgttgacagacgtataccagaatgcgatcggagctctcacaacttgatacgccattgcgtcttacattgtacaaaatgaagagctgcttgccaacgaatagcctgtgaaccttatgaacgagttctgaacgatgatcgatgctgaact

SEQ ID NO: 144 - DNA, 251 bp, Zea mays
  Clone ID: TF_LIB3180-012-P2-M1-C12
agcttctgtcacgcgtccgggagaaggtggctaagactgtatatgtggaagagcggacgtgttgttgagcgtaaccttctgtctgttgcatacaagaatgtgattggggctcgtcgcgcttcatggcgcattagtttcttccattgtacaaaaggaggtgtcctgttagaacgttgagcatgtgtaccttatcaaggaatatcttggcatgatcgtagtttgtacctgtctatatatgatataggcaattt

SEQ ID NO: 145 - DNA, 159 bp, Zea mays
  Clone ID: TF_700618362H1
attcggctcgagccgcagttcacccgcgcccgagacgcaaccccgcgccaggagtaagcctgctctttcatcgatattatcgatatggcgccggaggagaatgtctacatggccaagctggctgagcaggccgaaaggtctgaagagatggttgagtat

SEQ ID NO: 146 - DNA, 569 bp, Zea mays
  unsure (1)..(569): unsure at all n locations
  Clone ID: TF_LIB4742-006-R1-K1-G4
ccctcgaggctggccgggtcccctcctccgcacaaacgcgtcgcatccgctccacaggatcctctgcgccaccgcaaccgtgtgaccgcccgtgccgccggcgatcccgatccgccgacccgtcccagccccgctcgcagccatgtcgccgtcggagccgacgcgggaggagagcgtgtacatggccaagcttgcggagcaggcggagcggtacgaggagatggtcgagttcatggagcgcgtcgcgcgctacgccgggggcgccggcggcggntaggttctctcgatactggagcgcaacctgttgtccgtggactactacaagcgtctgaagaacgcggaggtcctggtggaggatcatgtcctcatcgtgcttcagatagaaggccagcgcaaacnagggggcagaggagatgactgacaccttgcacctcgtggagcggagcagcggtagattcctgcgcaggttgcgactgcccgataacgccaagacggggcagatcatgggccgccatgggagaacgggcgtgcttacagtcactgtgcccaaagaggacgcccagaagcct

SEQ ID NO: 147 - DNA, 701 bp, Zea mays
  Clone ID: TF_LIB4729-103-Q1-K1-F4
ctcgagccggccgggaaactccgcacaaacgcgtcgcatccgctccacaggatcccctgcgccaccgcaaccgtgtgaccgcccgtgccgccggcgatcccgatccgccgacccgtcccagccccgctcgcagccatgtcgccgtcggagccgacgcgggaggagagcgtgtacatggccaagcttgcggagcaggcgtagcggtacgaggagatggtcgagttcatggagcgcgtcgcgcgctacgccgggggcgacgccgcagcagagctcgtgtggccacgctgcagtcgctcgcggcgttggcgccgggcgacgcgatcaccgcggcgcgcatcctggtgctcgccagcgacggcgagtacctgatggagatggggatcggcacgccgacgcggtactactcggtcatcctcgacaccggcagcgacctcatctggacgcagtgcgcgccgtgcctgctctgcgtcgaccagcccacgccctacttcgacccggcgcggtccgccacgtacaggtcgctcggctgcgcgtccccggcgtgcaacgcgctctactacccgctctgctaccagaaggtgtgcgtctaccagtacttctacggcgacagcgccagcaccgccggtgtcctcgccaacgagacgttcacgttcggtaccaacgaagacccgggtcgtcctgccggtcatctcgtttcgggt

SEQ ID NO: 148 - DNA, 1114 bp, Zea mays
  Clone ID: TF_ZmC787_5
atcgaggccggccgggactgcaagttttgaaaactgaactgtaagatggcatcagcagagctttcccgtgaggaaaatgtgtacatggcgaagctcgccgagcaggcagagaggtacgaggaaatggttgagttcatggagaaggtagcgaaaactgttgactcggagaagcttctcgaatctcaccttgtgccgtcttccaccgctcccgagtccaaggtcttctatctcaagatgaagggtgactactacagataccttgctgagttcaagactggagctgagagaaaggacgctgctgagaacaccatggtggcatacaaggctgcccaggacattgctttggctgagcttgctccaactcaccctattaggcttggactggcactcaacttctcagtgttctactatgagattctcaactcacccgatcgcgcctgcagtcttgcaaagcaggcttttgacgaggccatctcggaactggacaccctgagcgaggagtcctacaaggacagcactttgatcatgcagctccttcgtgataacttgaccctatggacttctgacatctcggaggaccctgcggaagagatcagggaggcgcccaagcacgactcgagcgaggggcagtaaagccggctttacgtgcctagaagctagtacctagtgtttgctgctgtctaatgacactatgcaatgtgatctggaccctggtttcttgggtgcgacgcttgtagcagccgtgttatgattatttgtcgggaaaatttgggggctccccatatgagatgctgccgggcaagacctcggcatcccacctcgtttcaggcgggggacgctggagcgtggtccggttgtgttgggaagccccttaaactgttgtcgcttgcattttaaccttttcatcgccgttcagtggtcctaaatctatggctcgtctcagtggtctagtatatgttttcttggttctctcttgattcctcacacggtgagtgggaccgttcgcatttgtctgtcccatcccatcttaacggtgaatgtgttttgtttggtgtctcgttctgatgtgaatttgcagcatctcgatttcatcttcaataagatagtattgtat

SEQ ID NO: 149 - DNA, 259 bp, Zea mays
  Clone ID: TF_LIB3180-017-P2-M1-F3
gttggattctcctacagctgcagatatgcgtcacactggaaaggttgtaaactgaactgtaagatgggatgagcagatctttaccgtgaggaaaaatggtacatgccgatgcttgccgagcaggcatagatgtaccacgaaatggcagcttttatggagaaggcttcgaaaactgttgacatggctgagctcactgaggatgaccgcaacctacagtctgatgcatacaagaacgtcattggagcaccttctgcctgat

SEQ ID NO: 150 - DNA, 552 bp, Zea mays
  Clone ID: TF_LIB3069-008-Q1-K1-A8-TGA
cacgcttgtagtcgcagcaccgtacccgccttgccactataaatatatgggaacaaaacccatcctcatggactaatggtgacccaaagcaatgggggtctaattctaccactaccctcctacttacactaaaaaataaatgaatggtgactaaatccgctcaataataataccggccaccgttttaagcccacagcatataaaacattggggctcagaacaactttgcacccccctcccaagataactgcccctcgcctgcgttttcttttagagcatctttgacctcatcaaaaccatcctccttgaggggggtatgtgccaaaggccaagatatacctcatgagatgcatgatcaaagagcttttcttgtatgactccccacccagggtgtttaactccaagatagatccatcaaacgcccgattttccctgctgaaagctttttgtggggagctcagaatatcctattagatcactgggaaaatatcagcatgttccaccactatctgatggggaggagccctctcaaaccgatcaatgtcctcagca

SEQ ID NO: 151 - DNA, 212 bp, Zea mays
  Clone ID: TF_LIB189-013-Q1-E1-G10
gtcgaccgacgcgtccgggaaatgatcgagtacatggataaggtcacgaaaacggttgccacggaggagcacacggtggaggaccccatcgacgagtccgttgcctagacgatcgtcattggaaccctccgtgcatcatggcgtatcacatcgtccatcgagccgacggacgagggtcaaggcgatgatgaccgtattacagacattatgga

SEQ ID NO: 152 - DNA, 528 bp, Zea mays
  Clone ID: TF_LIB4764-052-R1-K1-H2
cctcgaggccggccggggaatacgccctagcgcattgtgccactcgatgtccagatcgagacgaccagagtccgccgcgcccgtgaaacaccgactgccgaactcccgatagacctctatttcttgatccacatcaacatgtcctgggaggacaatgcctacttgcacaagttggatgcccaagtagaacggcacgaggacaatggttgaccacatggagaacgtggctaagaccgtctatgtggaagagctcaccgttgacgagcacaacctcttatctgttgactaccacaacgtaattggggaccgccgtgcctcatggagcattatctcctccatctagcataaggaggactcccgtaacaatgaggaacctgttattcagatcaaggagtaccgtggcaagattggggctgaaatgagcaacatttgtgatggcatcctgaaggtgatcgactctcaccttgtgacttcctccactggtgcagaagcgaaggtggtttacctcctgatgaaaggagattatcc

SEQ ID NO: 153 - DNA, 249 bp, Zea mays
  Clone ID: TF_LIB3059-008-Q1-K1-C8
gcctgcagttccggtccggaattgccgggtcgactcactctttcgctagcattcgcagtttcccctctccttgatacgcatcttttttctaggagtaagtttgttcttttattgatatggcgaggtaggagaatgtctacatggccatgctggcatatttgtccgaaaggtatgaatagatggttgagtatatggagaatgtgtctaatactgtatatgtggaagtgctcactgttgaggagcgtaact

SEQ ID NO: 154 - DNA, 411 bp, Zea mays
  Clone ID: TF_LIB3206-083-P1-N1-C10
tcgcgggagccccaatcaccgccacctcaggcaagcccccgaatcccccgggcgcgcagcacaaccttgccgtcattcgattttggcgcgcgttgcgagccgggatggggttgcagcagtccaaagaggaactgctgtaccagcaggtcaactacggcaacgtcgacgggattcgcacgctccgggggcaaggcgctggtctcgagtggattgacaaggaagggaagacgcccctgatgcttgcctgtatgcgcccggatctgttcgacgtggccaaggtgctgatcgagttgggagctaatgtgaatgcctacaggcctgggtcacactgtgggacagcattgcaccatgctgccaagaaaggacttcagcagactgtccatttactactctcacatggaggtatatgat

SEQ ID NO: 155 - DNA, 639 bp, Zea mays
  Clone ID: TF_LIB4740-081-R1-K1-E4
atccccgctgccctcggcgctgcgtctggacccggcacctacctcccccctccccacctcgccgccggcgggtggagtcgggctggagcagccgctctcctctgttacccccctaaccccctataaagaaaaagaaaaaaaacagagagagagcgagcgaccggcggctcggcagccatggggcacggcgtcagctgcgcccgcaccggcgacgagcacgactacttccgcgcggcgcaggtcggggacctcgaggccctggacgcgctcctcgacgccgacccctctctcgcccgccgcgccacgctctacgaccgcctctccgcgctccacatcgccgccgcaaatggccgccccgaggtgctgtcaatggtcttggatcacggggtgccgccggacgtggtgaatcggcacaagcaggtgcggtgcgggatcccgtccccatcgacgctttttttctttctttcttcctttctttccatcctttgccgctcgcaaggatctctcgtgggctacccgcttcaaaaatctcacctatttttttcttaccctcttcaatcaaatcaacaaggtaaaaaatctcatctttctaccggcttactatgcttgtttttttctgtccagacgccgctgatgctc

SEQ ID NO: 156 - DNA, 681 bp, Zea mays
  Clone ID: TF_ZmC1188865_1
ctcggagccgaccctagccaggttgatgaagcgatgggcttgccctctttccattgcttctgtaatgcggtgcagtggtactttagtccgaatgaatggtggaccaagcagcagtttcccaagctgttgccgctcttcctcgccagtcctaagatagatgtcaaccagcaggataagaatggctggacgcccctgatgcacgcggcagcatgcggctggggagagatggccgaggcgctcctgaaggacaagcgcgtggacgtcactatcaagtccaaacgggatgaaaccgctcggtccctcgctgtgcgcagcgacgtcatgtggcttgccgccgccatcgaaaagagggagaaggaggcatccggcgcttcgccccaacccaacacagccactaatgcgggaagtgatctcagtgcacttcgagaagagctcgaggcgaccaagaagctgtgcgcctatctggccaggattgtgcaatctttggatgaagtgaaggacaaagagaatacagtaggcaatatccgggagttggcagccgcactccgcgtggatttctagtcactttgctcgatgtcccactgaatgaataagtgaaagggtccccgtactccttcattgttttctcagtgcactacaatgcgaactcagtttgtaaacggaaaaaaaaaaaaaaaaaaa

SEQ ID NO: 157 - DNA, 474 bp, Zea mays
  Clone ID: TF_uC-zmroteosinte086c03a1
taatctgataacagatgggagtgatttttcagttacaccagcaaacaatcaatgtgtggtgttgacatggtgtggaaacaaagagctgcatcttatgttatctttacaaccgatcaacacatggcacaaatctggatattaatattttcagtataataccacttgtctaattaacatgaaatatacaacttacatcactgcaggtgttagggtcagctccagcttctagtaggagtctgattacttcaatacttctactaggagtctgattacttcaatacttgcgctccctacggcaacatgtaatggggttgctccaccagctctcatatttgggtttgcacctgcctggattagaatcttcaagcatggaaaggaagaacctacaatgacggcaaacaacaatggcgtgatatcatcattggtttcagtaattggctcagactatgttgagctgatctttggggccctttg

SEQ ID NO: 158 - DNA, 949 bp, Zea mays
  Clone ID: TF_ZmC1339_1
cggctcgaggctggtaaaaggcaatctggaaaagatgctactggaaaagttgcacactcagcaggttcttctctacggcgctataatgaagcagcactgaaaaaggtgttgaatttgatgcttgttgacttttatgtgtgcagtaaaagcaaatgtctcagcttattttttaggtgtctttcgtttttgtttgccttattgcaggaagttcaagaattaattgtttcatggaagtcatactttgagacatgtgtttgtgccttcatttatgctccatctaggaaccgccagatgctcttcgacggggagaagactcagtcagtaattcagtcttgtgatgttcgtccagttccattgactgttcatcgccccaccatgaaggaagcgaaacgggtatattgtaacctaacacaactctactatgagatggaatgttcaaccacagatgaaacactacctgatgctggaagtgtgaaaaatgttgaacaaggtcaaggaaaaaagaatgaagtgactgcagaccctggggaatctatttctgacttgtctgcccgtttggaattgttgaataagaatgaagcagcaaccataccatcatcaaagaacgaaacaacacctcttcatgaggcagcaaagtgtggcaatgctcagctgaccctggagttacttgagcagggtttggatccttgcgtaaaagatgcaagaggaaagacatcttattcgctggcttcagataaggaagttaggaatacattcagaagatttatggcgctcaatcttgacaaatgggactggcatgctgcagatgtgcctagtgcactaacaaaagaaatggaagaatcacaagctgcaaaacaagcagacaaggacgccaaaaggaaagcacgtgcaaaggaattgaagaaattaaaaaaaaaaaaaaaaaagggcggccggctcgcgatctagg

SEQ ID NO: 159 - DNA, 456 bp, Zea mays
  Clone ID: TF_LIB3115-030-P1-K1-C7
cccacacccgtccggaaggggcacctgaggatttaggtaagtttttggcaccggggggggaagtcaacatgggggatcctgaaggtggaactccgttgaattgggttgttgaccggggccatttaagtgttgtgggggttttggcaaaactaaatgcggccctgattgccaaggccaccgaagggcaaacggaactccactccgctgttgttggggaaagagaaaacatttaaaaattgctggtgaagcatcatgcctcctttaaaatcagggatgaggttgggaccacggaacaggacttgtgccttccaagttgtgttttattgaaccggccaaattgacatccaaaatgctccttatcattagcgtgcctttaagttgtgcccgaccttggccaatggtgtttttatttatgggggacatatggtgtgccttgtgtgaatggccgttcttggt

SEQ ID NO: 160 - DNA, 1698 bp, Zea mays
  Clone ID: TF_ZmC503_2
cggacgcgtgggattaaatatcttttatggaagaaaaatatatatgcttatattcttttcttatgcagttaaccagaacttccagattgcaagtacaatctctggcatctcatgcatgttacccctgaatggctaaacaatcactcctctggacttcttgtcaataacatctgcatatttggtattgaattcatcaaagttgtcgctatcaaagccatcttgcatcctaaactactttcaattccttggagattatgctccatatgttatagcataggagcgagatgacgctatcgatctggatgaatggcgagctcaacgatctagagtcaaatctggtggggaagaagactggtcggtcgttacctgcgacaatgctggctgcagagctgatcgtgccaccagcacaagagatcaaggagttctttgccatcaccgaagcgtctaggacaaatgtttcgcttccacaaatgtttcgcttccaagtaagactctattgcccagattgtgacgaattgcttgacactagaggaagaaatttccttcatactgctattgagcataagaaatggaaagttgtctggcgtttctctggtactgcagatcttggaaggatggcaaatgtcatggattcagaaggcaacacacctctgcatcttgcaatcaagaatgcagaccagatgatagtgagccttcttatggcaacaaatagtgtgttgccgaatatagtgaacaaccagggcctcaccgccttagatcttgctgtactggcaactgacaaaggcataagttatacaatggtcatcatactccgctgtttggcatggactggagctgtccttagtcctcgtcgccttgatcatttcatcgatgattttggcattggcaaaacttcaggaaacgagctcaagaaattcaccaacattgcacagaaaaagcatggaattgtatttattttttaattaggctgaaggaaattataacaaacaaatgcatcgaaacatgattatttaaacaaagtttcttatgtatgcttgttgagtgttgacactgtttttattagattcatatgctaactttggtacaattcttctcactgttgagtccatttataattgtacctcagtccccaggttcatgtggtttatttgcatgctgattttcaaaacatcgagttggcttgatatttgcacccttttttccctctaacattgtttgtgtcatcttaatagaaatggattattaactttaatcagcggttgccttattatgcttcaatcttatttgttcaatttcacttatggtcctgcttcacctgcagatcgtggaaagtttatgaagttttgttggggttctggatgcataagatagtggtgtatgtgatttgcccatagtttctgcagcctcattgttttccatttgggatgaataaagcttcatgctcatggatagggctgatacatcaggttttgttagtggtggtatacattacatgaatatccatgtgtattttcattttgtgtatactatgtgcttcctcggtggtgaagttgtaaagctggagttctgatctctgttggttggattaagtatctggtctctagacaacatatcgtggtggtgaaacaactaaattaaaataacaaaatttatgtatggataggatcacaaatgtattaagaaaccttttctcataac

SEQ ID NO: 161 - DNA, 682 bp, Zea mays
  Clone ID: TF_LIB4829-021-R1-N1-F4
ccggccggggtttcccctctttcattcttattcttttttatacttcattcagcgttttatttcatcaaagcctttccctttgtactcgatctatactctcttttcttttgttcttttacagccaatctcgggtttttcgcgacggcaccatatgatcttgatccaatcgcaaccgtcatgaccagtcatcctccaccatgattgaaccatctatccgtgtccgtcgggcaatccacgccaacgatgcgacccttctgcgccgaatcctcaagacacaccccagctatctcctaaaccccgattcatccccttccggcctatccaactcgaatatgcacctggcagcttcactaggtcaccacgaagtctgcgcagtactgttaaaactcggccacgaggatccatgtcctgctctcaatgaaagccaccaaactgcattgatgctcgccgcagctggtgggcataccgaagtcgtccaaattctctgcgagcacgacaaaacatgcattcttcgtcgcgacgttcgaggccgcgatgccgtcatggaggccagtcttggaggacacgataccatactacaactcctccttaccctacgttcccggtgggctttatgatgcagtccgccgcgcagatgttgaaggggatacagcactgcattttgcgagtggaacggaaacct

SEQ ID NO: 162 - DNA, 2682 bp, Zea mays
  Clone ID: TF_ZmC912_1
acggcgcttccgtcttgttcacttttcaagctcccacgtcgccccatgggccatggcaaggctgcttcgggtgtccctcgctctctctctcgctttccctctctagacttcaatacttttcccctgtccgtgggcaagcccatcatgacgtgagggagggggaggcgatgcccagtctactctagcctgggtcttgagagagaggggagacgagggtgggagtaatacaacagagccaagccgagggaggagagagggagagagagggggagcagggaacccaaagagacaaggcaaggaagcagagagaaactccaagattgggggcgactggtaagcaaggggaggagtagaggcggcgtttgttctccttcgattccctagtcttcctggagggcgacgaagggagatttcgccgggcgcggacggacgccgcgatggccggtgtcgacgccgccaggtacgcgcacagcccagcacaccacgctgtggcggcccgggaccacgccgcgctgcgccgcgtgctggacgcgctcccgcgggcgcgccggcccgaggagatccggacggaagcggactccgtcgccgaggaggcccgcgccgaggccgtctcggcggtcatcgaccgccgcgacgtgcccgggcgggagacgccgctccacctcgccgtgcgcctctgtgaccccacggcggccgagatgctcatggcggccggcgccgactggagcctgcagaacgagcagggttggagcgccctccaggaggccatctgcacgcgcgaggaggccctggcgcgcgtcatcgtgcgccactaccagcccctcgcctgggccaagtggtgccgccgactgccccgcgtcgtcgccgccatgcgccggatgcgggacttctacatggagatcaccttccattttgagagctccgtcatcccattcatttcccgcatcgcgccctccgacacctacagggtctggaagcgtggctccaacctccgcgccgacatgaccctcgctggtttcgatggcttcaagatccaacgctccgaccagaccatactcttcctcggggaagggtcggaggatggcaaggtgccgccgggttcactgtgcatgatcaaccacaaggacaaggagattatgaacgcgctggagggggcaggcaccccagcctcagatgcagaagtccagcaggaggtcgctgcaatgtcacagaccaacatcttccgtccggggattgacgtcacccaagcgctgttgctcccacagctcacttggcggcggcaggaacggacagaggcggttggcccgtggaaggccaaggtgtatgaaatgaatcatgtggtggtcagtgtcaagtcaaggagggtcccgggggcgatgacggatgaagaattcttttcatcttgcaatgacaatgatatagagagtgaggggtttgatgatgttctgacagaggaggagaagaagcagttggaggctgcgctaaaaatggattctccggatgccggtggggaagaccaatctgactcatttgctggccctcgacatagttgctttgagccaagggagagggaggtacccattgaggacatgagtgtttctggaaatggggagggtaagcatgacaagaaaggttggttcagtaattggggaaagagaagtcaggttagcaagtcagagggggtgaagaagatggcatctccaaggaactcgctctgtgtagatgacaaggtgagtgacctcgtcattgaatcgccctcaaatgtacaaacaagaccgggaaggcattcggtagatgtagtcagaccagatgacaacagaaggatcagggaaagggatagtaggagacatgttgcttctgcagagaatgggcataggcgcaaagaaggttccaaagaaagtgagtacaaaaaaggcctaaggcctgttctctggctctctccaaatttccctcttcggactgaggagctgctgccattgcttgatattcttgcaaacaaagtgaaggcaattcgtcgtttgagggatctacttacaacaaaactccctccaggcacatttcctgtcaaggtcgctattccagtcgtgcctacaatcagagtgcttgtgacattcacaaaatttgaagagctacagccgctagatgagttcaccacaccaccctcaagtcctgacaacagcaagagcccagcagtgcagccttcttcaagttcctggattcagtggatcaaggcgccctacctccagaacttgtcgacggcacctggcccaagcagccgcgtggaggacatccaggacccattcgccattccttccaattacgtgtggacaacacctgaagagaagaaaaagaagacacaagaaaacaagaacaagtcgaagaaaggcaggagcggcgcatagatagtacgtaggtgatagcattggtgggggggggggggagttaaagttatgctgtgagtgggtgaaaagggctatactcttcaggatctaacaggagggatgattggaagatttggagatttcggctgctctgacgtcgaatattgagaagcgaccgcttgtcttctttcattgtgataacagatctgctgtcaacattctttcgtttaacccatcgtttgggtcctgattatcattgcaatctactgtattggtagattttgaggtgtggcgccttctg

SEQ ID NO: 163 - DNA, 3106 bp, Zea mays
  Clone ID: TF_ZmC489_1
tgattattgataggaagaggaactaacgcttcaaaagcacgaaaccagaagcgctcattagatgatgcagttttgggaataacgcacatcattgtggatgaaatccatgaaagggataggttttctgatttcatgctgactattctaagagacttgttgcctttgtatcctcatcttcgtatggtactcatgagtgcaacaattgatgctgagcgtttttcgcaatatttcaatggatgttcggtcatacaagtccctggttttacctatcctgtcaaatctttctatttggaggacgtgctttctattctgcagtctgcagagcagaacacagaagtctacaattaccagcattcagagactggtataactcctttaatggtttttgctatgaagggtcagcttggggacgtctgtatgcttttatcttttggtgtggattgttcagcacaggatcatgatggaaaatccgcattagattgggcacaacaagagaatcaacaagaggtctgtgaagtaataaagaaacatatggagtgtagttcagaaaaatcaactgaagataacgagctgcttaacaagtacttggcatctattaatccagagcacattgatactctgctaattgaacggctgcttcgaaaaatttgtgtggattccaatgaaggagccatcttggtattccttcctggctgggaagatatcagtcaaacacgtgaaagattatttgcttctccattctttcaggattcatcaagatttcttgtgttgtctcttcattctatgatcccgtcctcagagcagaaaaaggttttcaaacgtccaccagtgggggttcgtaaaattattctctcaactaatattgcagagactgctgtgacaattgatgatgttgtgtttgtcatagatagtgggagaatgaaagagaaaagttatgatccatacaataatgtgtccacacttcatgcttcttgggtttcaaaagccagtgcaagacaacgcgaagggcgtgctggccgatgtcagccaggaacttgctatcatctttactcaaggtttagagcttcatccttgccagactaccaaattcctgaaataaaaagaatgcccattgaggaactttgtttgcaggtcaaactgcttgattcaaactgcagaatagcagactttctgaagaaaaccttggaccctccaatcccagaaactgtaagaaatgctattgctgtgcttcaggatcttggtgctttaacacaagacgaacaactaacagaattaggagaaaagctgggttccctgccagtccatccatccaccaccaagatgctcctgtttgctatattaatgaactgcctggatccagcattgacattggcatgtgcagctgattatagagatccatttgtccttccagtagcgcctgatgagaggaaaagggcagctgcagcgaaagttgagcttgcttcgttgtatggtgggttcagcgaccaacttgctgttgtcgcggcatttgactgctggaggcatgccaaagatagaggccaagattctcaattttgtgcgaagtactttgtctcttcaaacatcatgaatatgctatcaagcatgaggaaacaacttcagaatgaactgtctcaaagagggtttgtccctgcagatgcatctgcctgcagcttaaactctaaagatccaggtatcatgcgtgctgttcttatggctggtgcttacccaatggtagggaaaatgctccctcctcgcaaaaatgctagaaaatcagttctggaaacagcgagtggtgccaaagttcgtctgcacccacactcctgcaactttaacctatctttcagtaaatcttctgggaatccactgctgatatacgatgagatcactcgaggtgatggtggaatgtatataaaaaattcttcagttgttgggtcatatcctttgcttctaatagctgcagaaatggttgttgctccacctgatgatgatagtgatgaagatgaggaagattctagtgaggatgaagctgaggaaagcacattggtacagcacaaagaagagattatgtcttcacctgacagcattgtttcagttgttgttgatcggtggctccggtttgacgctacggctctggatgttgctcaaatatactgcttaagagaacgtctagcatctgctattcttttcaaagtgaaacatccacaagatgttctacctcctgcgcttggagcgtcaatgtatgccatcacatgcatcctttcattcgatggtttgccttctatggttccacctaatgacctttcagcaaaccgaggttcaggccaggatttagcagaagctagcaagttctctcagggaagaagagcgggttatattccacctagtggttttctgatgtccttgttagctgataggacccataatgcaccttctttccagaactcatctaaccatccaggaggtggttcagcgcatactcggccatccagggctcctgttggtaggtttgatcgatctcggcgacctttccgcaattctggacctgggagttcagcaccacgttctttcaaaaggcagcgcgacgctccacggtgagcagggcataaaggcagccttttgcatgccagccatttcggatgtgctttgtcaacggtgcctagtctaagaaaaggacgtgctatagaatcacaagctttgctgtgttccgttgtagaaatgaagggaaaagaattatagcactgcatcggattcctttgtcgaagagtttttgtaggtatgcccctgagtgttttgtgtactttgctcagccgagctcatttgcaccgtagacctcagaggtgcctgtaatcttttggatggagttcggatgttaaaaagaagtgggatagaaaagcgaagacctgttatctgctcaaatgatgagccccataattgacggtatcactggaccatagatgaactttgtgctgtagtgccatagacaatatggtgtgacgggcgagtggaatttgccctgcatcgcaagcgttaaattttgtccttgtatgtacgtacttagtaaacttagtaataaccctttctttgaatttagttttatagtgagtcc

SEQ ID NO: 164 - DNA, 2658 bp, Zea mays
  Clone ID: TF_ZmC16049_1
ccggccgggaaaaaaaaaaataaaaaaaaaaaaaaaaaaaaaaaaaaaaaaaaaaaaaaaaaaaaaaaaaaaaaaaacccacgcgtccgcttccctcccctccgactccggccaacccgcccctccctcccaccgctcgtccgcccctcgcccgcaccaccggcgccggcaccggcgccggagcgcgacccggaggagcgtccgcacccgcgccgcgccagatctggccccgcccgcagctcccatgcccctccctccccagacccgcctgacctagccacgaccggccggccggacccgccccaccccccgccatggatgacgtgtccaagtatgcgcacagcccggcgcacctcgccgtcctgcggcgcgaccacgcggcgctgcgtcgactggtggcggccctcccgcgcctgccgcgcgccggggaggtggccaccgaggaggagtccgtcgcgggggaggccgtggcggacgcggtctcggccgtcatcgaccgccgcgacgtgccgcggagggagaccccgctccacctcgccgtgcgcctccgggaccccgtcgccgccgacatcctcatgtcggccggcgccgactggtcgctgcagaacgccgacggctggtccgcgctccaggaggccgtctgcacgcgcgaggaggccatcgccaccatcatcgcgcgccactaccagccgctcgcctgggccaagtggtgccgccgcctcccgcgcatcctcgcctccatctcccgcatccgcgacttctacatggagatctccttccacttcgagtcctccgtcatccccttcatcggccgcatcgcgccctccgacacctaccgcatctggaagcgcggcgccgcgctccgggccgacatgacactcgcggggttcgacggcttccgcatccagcgctccgaccagacgttcctcttcctcggggacggcgccaggcctgaggacgccgggggcaaggagctgcacccgggctcgctaatagtgctggcgcacaaggataaggagattacggatgcgctggagggggcgggcgtgcagcccacagagtctgaggtggcgcatgaggtagcgctcatgtccaagaccaacatgtaccgtccggggatcgacgtcacgcaggcagagctcgtgccgcacttgaattggcgccgccaggagaggacagaagccgtcgggcaatggaaagccaaggtgtatgacatgttgaatgtcctggtcaccgtgaagtctaggcgcgtgcctggggcgatgacagacgaggagctgtttgccatggatggggaggagaagaatgggaggggcgcagagcttgatgctgagttagacgaagtgttgacagccgaggagaggaagcaacttgattctgcgcttaggatggggaacaacgaagaggaatctgaggagaggggcgacgaaggtgatgctggtgctgatcatacggatgcgagtggcgtgaccaaagataagaagggatggtttggttggggcgccaagaaaggtgccaagggcgatgacaagccatcaaaggtggggagtaaggatgaaacaagtgacccagggaagcaaaaggagaagggcagtgggaagaagaaaaagggtggctcatctgctgagtctgtaaaacatgagagcgagtacaagaaggggttaagaccagtgttgtggttgacaccggatttccctctgaagacagatgaactcatccctctgcttgatgtcctagcaaacaaagtgaaggctatcaggaggcttagggaactcttgacaaccaaacttcctacaggcacatttccagtcaagatcgccatccctattgttccaacgatacgagtcatcatcacattcacaaagtttgaagaactacagcctctagacgagtttgccaccccaccttcaagcccgacacagtttcaagacgcgaaagccaaagaaccagaaggatcaggctcatggtattcatgggtaaagggtggccgaggtacgcagtccggtgacagtggtgatgggcggaactggaaagacgaggttgatccgttccacataccgtcggactacacctgggtcgatgccaccgagaagaagcggaggatgaaggcaaagaaagccaagagcaggcggaccacagcccgaaaacagtcctcgaagaacacttcttcggaaggaggccaccgccccatgatggatggcttcgaggagtaaaccgcgttctcacaagcatagtaagttgtatttgcattcttaaaatgttagttgttgatggcagctgcacgccagaggcagattgattgatgttgtgcctggagcaccccctcccttggcgtggcaatgaatcggagtcgaatctccttgagaacgtacaggatggcttatacccaccccactaatctgtaattcagccagcgctatttttttttgcccccctccgtgtttcatcttgctggatgtatcatgtatgtttgacagatgatgacgatgatacgaccctgttgttgaaaaaaaaatgtgtttgaggggactgtagtgttccctccccctgttgtaatggaagatttaccaatatgcagaagatttaccaatatgcagcgattttctcgcaaagaggaagctccaatgcacatgcttgtttgttcgcaaaaaaaaaaaa

SEQ ID NO: 165 - DNA, 2575 bp, Zea mays
  Clone ID: TF_ZmC16049_2
gacccggaggagcctccgcacccccgccgcgccagatctggccccgcccgcagcccccatgctccagatccgcctggcctagccacgaccggccgtccgctccccgcgcccccgcgtgccatggacgacgtgtccaggtacgcgcacagcccggcgcacctggccgtcctgcggcgcgaccacgcggcgctgcggcggctggtcgccgcgctcccgcgcctgccgcgcgccggggaggtggcgaccgaggaggagtccatcgcgggggaggccgtggcggacgccgtctcggccgtcgtcgaccgccgcgacgtgccgcggagggagaccccgctacacctcgccgtgcgcctccgggaccccgtcgccgccgacgtcctcatgtccgccggcgccgactggtcgctgcagaacgccgacggctggtccgcgctccaggaggccgtctgcacccgcgaggaggccatcgccaccatcatcgcgcgccactaccagccgctcgcctgggccaagtggtgccgccgcctcccgcgcatcctcgcctccatctcccgcatccgcgacttctacatggagatcaccttccacttcgagtcctccgtcatccccttcatcagccgcatcgcgccctccgacacctaccgcatctggaagcgcggcgccgcgctccgggccgacatgacactcgcggggttcgacggcttccgcatccagcgctccgaccagacgttcctcttcctcggggacggcgccaggcctgaggacgccgggggcaaggagctgcacccgggctcgctcatagtgctggcgcacaaggacaaggagatcacggatgcgctggagggggcgggcgtgcagcccaccgagtccgaggtggcgcatgaggtggcgttgatgtccaagaccaacatgtaccgtccggggattgacgtcacgcaggcggagctcgtgccacacttgaattggcgccgccaggagagggcagaagccgttgggcaatggaaagccaaggtgtatgacatgttgaatgtcctcgtcacagtgaagtctcggcgcgtacctggggcgatgacggacgaggagctgtttgccatggatggggaggagaagaacgggaggggcgcggagcttgatgctgagttagacgaagtgttgacagccgaggagaggaagcagcttgattctgcgcttaggatggggaacaatgaagaggaatctgagcagaggtgcgacgaaggtgacactggtgctggtcatatggatgagcatgccgccgccaaagataagaagggatggttcggttggggtggcaagaaaggtgccaagggcgatgacaagccatcaaagatggggagtaaggatgaaacgagtgacccagggaagcaaaaggagaagggcagcgggaagaagaagaagggtggctcacctgctgagtctctaaaacatgaaagcgagtacaagaaggggttaagaccagtgttgtgcacgagctgacaccggatttccctctgaagacagatgaactcatccctctgcttgatgtcctagcaaacaaagtcaaggctgtaaggaggcttagggaactcttgacaaccaaacttcctacaggcacatttccagtcaagattgccatccctattgttccaacgatacgagtcatcgtcacattcacaaagttcgaagaactacagcctctagatgagtttgccaccccaccttccagcccgacacagtttcaagacgcgaaaaccaaagaatcagaaggatcaggctcatggtattcatgggtaaagggtggccgaggcacgcagtccagcgacagcggtgatagccggagctggaaagatgaggtggatccgttccacataccgtcggactacacctgggttgatgccaccgagaagaagcggaggatgaaggcaaagaaagccaagagcaggcggggcccagcccgaaaacagtcctcgaagaacactgcggaaggagcccaccgcccaatgatggatggcttcgaggagtaaaccatgctctcaccggcgttgtaagttgcctctgcattcattcttaagatgttagttgttgatggcagcttcacgcccgaggcagattgaaagttgtgccttggagcaccccccgtggtgttggtgtggcaatggatcggagtcgaatctcattgagaacgtacagatggcttataccccactaatctgtaattcagtcagcgctatttttgtccccacctccgattttcatcttgctggatgtatgcttgacagatgatgatacggccctgttgttgttgttgttgttgaaaaagatgtgttgaggggactgtagtgttcctctcccccctgttgtatggaagattaccaatatgcagcgattttctcgcaaagaggaagctcaatgcacatgcttgtttgttcacattcctttttctgctctgagtttctgctgatgcatgtgtaacgacagtgtaatttgatgtttgtccacgctttaaaaaaaaaaaaaaagggcggcctcgagccgaattccgagcttaggctttaatctaaaatatcttctattgttt

SEQ ID NO: 166 - DNA, 1988 bp, Zea mays
  Clone ID: TF_ZmC119_1824
ggtcatatacttgcactttataataggtgcagctcttcattcttagatatagtacacgagaaggtcccaactgcggctcaccacagacctaaaaggttaaaacagctaaaccaaatatatacacgaaccatttgcactctcccaattgcctcttctcatgcaagagtaattactgttacaccttcctacagggcatatatcttcttctcatgatcagagaaggcttccagatctgaaaaaccatcatggagtgaccaggagaaggacttgctgccgcttgccctcttgatgcggcgctgtctgtcttcgccaaacttgaaccgtgggcgcaacaacagataggctaggaacaggagggttccaatcatgatcggacctccgatggctgatactgtgaaggccatccaggcatgctgcgggccaactacaacatatgccagtgagataaaagccgcacctgtgctaaggcatgcggtccacatgagcttatttacgatcttgataacttgcttctgggcaccagtttcccaggcaaccaaggtgatctgcacgacgaccaccgcgagggaaatgaagagagcagttgcattcagaaggcagaagacacgaaaaccagtaagcttggctatttgagcctcaccaatgtctcccccgctattcacatcttggaagtattgacctggcaaattgaatatggcaacgaaggcaatggaggcaatcagggttgctaccatggtgactgaattgatggtgttctgaatagcttctctatgcagtttctgcaattctttgcgaatcccagtcactcgtttattggtcttagcattctcgctaagctgtgcctgaacattgtgcttgatatcactcacagttctcctcagttctgatgcctcatcaattttccccacatttctggcattctttgcaccagcctctgtcaaccactctattatttccgttttagactcaccataaggaactttgtcagccaaatccatagctgtttcattttgaatattgatagcattaatttcaagtgattcgtagctaagaagaagctgtaccatctggggcctccatttccgtgtagctatgtgcaaagcagtatttcccttcttgtcccgcacattgagggctagtttggcaaccaaggttaattaacccggagataaattccactccatgtaggattcatctttgcaacttcaacaatgcattctcggcaggtaagctatgaaagtttcaacttttttatatcacagtcccaacaaaaattcctgacaactgtaatccattctaggactagtagatttagagtcacatgctcatagcacctcacacctgccaatcaaaccaaacgaattgaagcttacaacagagaaaacaacccattgaatcctacagtaaagtaaagagtgagggtccctctcgtcccaaatctgcagacacgtaaacaacccattgaatcctacagtagcaatgcaaacaaagagatgcctgaatcgtatatcctataataacactcttgctaggtttcacactcatcttctgttaatagaagaagcgtgtggtgcagccgtgcagggatctggaagcaagtaaagtacaaaagagaaagacgaagcagatctgatccgaatttggtgacgccatggtgcaggatggcgacagaagggggatcctagctagaggcggaggccgccaaggcgaggttgtccggcagggcgtcatcggtccacacccggtcgtccgtgtccttggttcacacgcagtgcaagcggctaggagcagcgccagaagtggcaaggcggatagatcaaacatcaagcagtgcccccgcgtggatttgtggggagaaggtgtcagcagtagcacgcaggtggggaagggagcggtcgagcaaagggtgggtgtcaccagcagcaacacaaggttgctggtgatgatgtcccgcggaaggcgatcggtggaggggccgcggcaatgag

SEQ ID NO: 167 - DNA, 392 bp, Zea mays
  Clone ID: TF_ZmC145468_1
cccacgcgtacgcctgcctccacatcgcctgcatctatggccacgagaggttctgcagggacgtcctggcgctgacgacgaacagccagcagtctccggcggcggcgcctcttctcgtgaccatcaacgcggatggcgagacgccgctgctcgccgccgtggccagcggccacgtctccgtggccttgtttatcctcgggcgctgtcgggaggagcggctgagcgaggcgatcctgacgcaggacaagcgcgggttcaacgcgctgcaccacgccatccgcaacgggcaccgggggctcgccctccagctggtcgacgcggagcccggcctgtcgaaagccgtgaacaaacacgacgagtcgcccttgttcatcgcggtgatgaggaactac

SEQ ID NO: 168 - DNA, 489 bp, Zea mays
  Clone ID: TF_ZM4878.C14.o1.fg
gtggccgggcgaaagcgcaccgccacggcggccgtggccggggacggcgtcgtggagaggacggtggagaccactacttcactcgctgctgtgaaagcctggcaggggtttcgcccggttcgccaacgtcagcgacgaccacagcgccacggcgctacacctcgccgccatatgcaaggccgccccgactacgtgcaggttccccggcagcacatcattgcatctggccgctcgcagtggggacctagattgcatccggaaaatgctcgcctagggtgtggatcatctctagagggactcaacaggccactcaccgactcacaggccagtgacgcggagctgtgctgcatctgcttcgagcaagcgtgcacgatcgaggtgcaggactacgggcaccagatgtgtgcggcgtgcacgctggcgctgtgctgccacagtaagtcgtacccagcgacgctgacgccgccgtcactagactgcccgttctaa

SEQ ID NO: 169 - DNA, 2598 bp, Zea mays
  Clone ID: TF_ZmC912_2
gagtgggagtaatacaacagagccaaaccgagggaggagagagagggccagagaacacaaagaggcaaggcaaggaagcagggacagactccaagattgggggcgactggtaggcaagaaaggaagctcttctttttcgagtatcactgggcgattgatttccgccgccatcctttccgctcaattcttagctgccgcagataagagcgaggagcagaggcgctgttttctctctccgattccctcagcttcctgtggcgtggtggggtgtgtggcgacgaagggaggctcgccggggcgcggacggacgcccgcgatggccggcgtcgacgttgccaggcacgcgcacagcccggcgcaccacgccgtggcggcgcgggaccacgtcgcgctgcgccgcgtgctggaagcgctcccgccggcccgccggcccgaggagatccggacggaggcggactccgtcgccgaggaggcccgcgccgaggccgtctcggcggtcatcgaccgccgcgacgtgccagggcgggagacgccgctccacctcgccgtgcgcctttgtgacgccacggcgaccgagatgctcatggcggccggcgccgactggagcctgcagaacgagcagggctggagcgcactgcaggaggccatctgcgcgcgcgaggaggctctggcgcgcgtcatcgtgcgccactaccagcccctcgcctgggccaagtggtgccgccgcctgccccgcgtcgtcgccgccatgcgccggatgcgggacttctacatggagatcaccttccacttcgagagctctgtcatcccattcatttcccgcgtcgccccctccgacacctacagggtatggaagcgcggcgccaacctccgcgccgacatgaccctcgccggtttcgatggcttcaagatccaacgctccgaccagaccatactcttcctcggggaagggtcggaggatggaaaggtgccgcctggttcactgtgcatgatcaaccacaaggacaaggagattatgaacgcgctcgagggggcaggcgccccggcctcggaggcagaggtccagcaggaggtcgctgcaatgtcacagaccaacatcttccgtccggggatcgacgtcacccaagcggtgctgctcccacagctcacatggcggcggcaggaacggacagaggccgttggcccgtggaaggccaaggtgtatgacatgaatcatgtgctggtcagtgtcaagtcaaggagggtcccgggagcgatgacggatgaggaattcttctcatctagcaacgacaatgatacagagagcgaggggtttgacgatgttctgacagaggaggagaagaaacagctggaggctgcgctaaaaatggattctccggatgccggtggagaagaccagtcggactcatttgctggccctcgacatagttgctttgagccaagggagagggagatacccatcgagggcatgagtgtttctggaaatgtggagagtaagcatgacaagaaaggttggttcagtaattggggaaagagagctcaagttagcaagccagaaagggtgaagaagatggcacctccaaggagctcgctctgtgtagatgagaaggtgagtgacctcctctttgaatcaccctcaaatgcacaaacaagaccaggaaggcattcagtagatgtagtcagagcagatgacaacagaaggatcagggaaagggatagtaggaggtatgttccttctgcagagaatgggcataggcgcaaagaaggttccaaagaaagtgagtataaaaaaggcctaaggccggttctctggctctctccaaatttccctctgcggactgaggaactgctgccgttgcttgatattcttgcaaacaaggtgaaggcaattcgtcgtttgagggatctacttacaacaaaactccctccagatacatttcctgtcaaggttgccatcccagtcgtgcctacgatcagagtgcttgtgacattcacgaaattcgaggagctacagccgctagaggagttcggcacaccaccttcaagccctgacaaaagcaagagcccagcagtgcagcctccttcgagctcctggattcaatggatcaaggcgccttattaccgccaaatgaacttgtttacggcgccaggcccgagcagccgcgtggaggacatccaccaccaggacccgttcgccatcccttcggattacgtgtggaccccacccgaggagaagaaaaagaagacccaggaaaacaagaacaggtccaagaaaggcaggaacgggtgatagagcattggtgggatgggatctaacaggagggacgagtggaagggaaggtttggagatttcggctgtgctggtctgagtctgacgtcgaatattgggaagcgaccgcttgtcttcttttttatttgtgttaacggatttgctgccaacattctttcgtttaacccaaatcgtttcggtcccgattactgttgcaatctgttggtagattttcaaatgtggtggcttctataaaaacaaaaaagcaaaaaaaaaaaaaaaaaaaaaaaaaaaaaaaaaaaaaaaaactcgaggggaggccccggtac

SEQ ID NO: 170 - DNA, 709 bp, Zea mays
  unsure (1)..(709): unsure at all n locations
  Clone ID: TF_ZmC605702_1
ggccgggntaagcggcggngggtggctaaccgcgatggcgcctctgtttgccgagtcgcttagggcaagaaacaacagaggggagaggggcctacacgaggcagtgaggcgaggcaacacggaagctgtcgagtccctgatctggatggatgagaatgtggatggcggcaggaccagcagaaccccatcgctggtgcagagagtagactatcaaggtgtctctcccctctacttggctaccactctacgccgtggtgacatcgtggggattcttacgcacccctcccaaaatcactactcaccatccttctctgggcctggaggaaagaccgccatgcatgccgccgttcttgccaagggagatgccaaagtgctaacgaagaagctcctcgagtggacgaccagcaagaattacccgggaggtgcacgggatcttatatgtatgggtgacaaatcagggagcactcctctccaccttttggcctcagagggaggcgcatctgtcgcagagctactgctctctcctgatgcgagagaactgtcgtgggcacgccgcttactctcaaagatatgtccatgtacatcaccagctgggaatgccgcctccgccgacgacgatgacgacgacacgagagaggggggctcttgtactgctgctgcgctgaagaagactccaatggctggtttcccatacatgtcgctgcggcga

SEQ ID NO: 171 - DNA, 259 bp, Zea mays
  Clone ID: TF_700102367H1
ctagaccaaacaactgaaaaagggaacacctgcctccacatcgccgctctctgcggccaccagaacttctgcagcgaggtcctggcgcaggagtcgcgtctccatcgtcccggcccgtcgtctctgctctccaccaccaacgacgacggcgagacgccgctgctcgtcgccgtgaagagcggccgtgtctctctgggccttcatctgctcgaccagcactactcgaggcacgagttgctggtggagcatcttcttaagc

SEQ ID NO: 172 - DNA, 794 bp, Zea mays
  unsure (1)..(794): unsure at all n locations
  Clone ID: TF_ZmC176290_1
aattcggcacgagggcccactctcgccaccgtgtggtccagacgtccagtcctctaaccgaaccaggaagcaccacaccaggcagcggaagctcgcgctgggatcggctaccaacaataatatcgttcctcgcctccctcacctctgaacgagaacgcgaacgcgccctgtgatcactaccccacagcatgtgctcaggacctcgcaagccgtccacaccccctctgccggcggcgacggccaaggactcctcggcgatggcggtgctgctggagctggcggcggcggacgacgtcgtggggttcaggcgcgccgtggagggcgacaaagccccagccttggacgacgcgggtcactggtacggcccgtccgccgcggccgccggccgcctccgcctgcgcctcgaggcgcgcactccggccatggtggccgcgctctacggcagcacggcggtgctggcgtacgtgctgtccgccgcgccggcggaggccgcgcgcgcctcgcccacggacggcgccacgccgctccacctcgccgcggccggcggcgcgccgggcgccgtcgcggccgcgcacctgctcctggccgctggcgcgtccgccgacgcgctcgctttctcgggcctccgcgccggcgacctcctcccgcgcgccaacgccgncgccgacagggaccgcgcgctccgcgtgctcctcaagtcccccgcggcgtcgccgtcgtcctcgcccaagaagtccgcctcgccgncaccgccgacggcgggagctgcggcgccggagccgaagaaggagtac

SEQ ID NO: 173 - DNA, 204 bp, Zea mays
  Clone ID: TF_701171021H1
cagcaaaaatctcacctatttttttcttaccctcttcaatcaaatcaacaaggtaaaaaatctcatctctctaccggcttgctatgcttgtttttctctgtccagacgccgctgatgctcgcggcgatgcacggcaagaccgactgcgtgctgaagctcctgcaggccggcgccaatgtgagcggaaatctcctcctcctcttc

SEQ ID NO: 174 - DNA, 819 bp, Zea mays
  unsure (1)..(819): unsure at all n locations
  Clone ID: TF_LIB4829-068-R1-N1-B10
ccggccggcaaactgaaattacaactcaaactttccaacaaacacacgtgaacagacaagaaaaaaaagatgtctttacaggacgaagaactcggacagcagctttatttgcaaatgcgacaacgacaacaaattgcactgagagcgcagcaaatggccgcatcgcaacgacaacaggcagtaaaccagatgggaggtcaaatggggaacacaatgaaccagatgaacgcaacgacgattcaccaaatgggcagtcctttcgacgatattccagtgcaggcgcccgaggataacaacatcctttaccagagaaatgtgtcaccggaagtcgcctctttcttctctgcctgcaaagccggcgacatgtccaccatccagtcaatcgttacctctcaacctcgctcgccagtcttccttcatcgaggtctaatcaacgccttggaaagcggaaatgtcgacgtcgcacgatacctacttcaatccggagcacccatctcacgacaaacaccaggaattgttctcaaagctccagctgaccggcaaatcgccctcttcgaagctctcgccgaacacggttggactgtcaatacaccatcctactacggcgaggttcttctcacacgactcatcaggtccaacaacgaacatctcatcgactggttcctcgcgcaaggcgcaaaccccaacctgggccgccagcacgatcaacgcgaccgtctaggcggaccagacacaaactcttgccaggcgctagaactggcagcctcgcatggcagtgtcaacttggtgcagaagcttctanatgccggcgctgaaatc

SEQ ID NO: 175 - DNA, 1107 bp, Zea mays
  Clone ID: TF_ZmC885_2
ctgaaggaaaagtgcctctatgggaggctttatgtgaaaagcacaatgcagtgatagagctgttagtagagagtggtgcagagctatcatctggagacacggccttgtatgcttgcatcgctgttgaggaaaatgatgctgagttgttgctggaacacggagctgacgtcgacaagcaggacagtaatggctggtcgccaagagatctagctgatcagcaaggccatgatgacattcaggctctcttcaaatcacgaaaagcacacaggaagcatgcctcaaatggcagagtggcacctatgctgatagggagattcaacagtgagccctcgatgccagatatgagccatgaaaacgccagagtacgcagcgaagttgttccgcagaagctcctccgaaagagggtgagtttccagaattctcttttcggcgtcatctcttcgtcccacgcccaccaggacaccggccgtctgctctcgaaaggcctcgctggaacagagggtccaaattgccgtcacgactccctcatcagggtgacaatcagctgccccgagaagggggggaacgccgcagggaagctcgtgcgcctaccgcggtcgatggccgagcttctcgaactaggtgcaaagaagttcggcatcaagcctggcaaggtcctgacagttgggggtgctgagattgatgaggtggagcttatcagagacggtgatcatattcttctcgtcagtgatgaatgggtgccagatgttgagcaaattaggccttaacaataagtgagccagctgtggtgctcttattgcaatttgacatgatatggggaaacatgcccctgtgaccctgtgtgcatcagtgcatgtcccccatttaaactgaagtgtagcttatgatggttttgaagctgtaggatgtatccagcttggaaatgaatttgtagtcagctggtctgtatgtagtttcgtcatctctttccatgggaagggattcacaaaatgtaattacatgatttcttttttttcctgtctttagatcaagctttctctggaagtgagaaatattcgtgagtcatgaattttgagatattgatcctatcagttcattttagttgct

SEQ ID NO: 176 - DNA, 1049 bp, Zea mays
  unsure (1)..(1049): unsure at all n locations
  Clone ID: TF_ZmC353_2
gcacgagtgaaactgacacatctctagctccctttaacatgtggagattcagaaatctcggtgtatttgccatggagcgggagtggtgtgccgtgatcaaaatgctgttagatttcttatttattggccttgttgatgtgggatctcggtctgcagaagagatggtgctttcagaaaatctgttgcatgctgctgtacggaggaagtctgttaacatggttagatttctgctgagatacaaaccaaataaaaactcgaagggaactgcacaggcatacttatttagacctgatgctctgggcccttcaaagattacccccctccatatagcagctgccactagtgatgcagaggatgtgttggacgcgcttacccatgatcctggactgattggaattagtgcttggagcaatgcacgggacgaaacaggttttaccccagaagactatgctcggcagagaggcaatggcgcttacctgaatctggtccaaaagaagattgataagcatcttggcgaaggccacgttgtcctcggtgttccgagcagtatatgccctgtaataaccgatggcgttaagcctggcgatgttagcctcgagatatgcagggcaatgtctgcatcagtgccaggttgcctcctctgcagccgtcaggcacggatgcatccaagttctacggcaaggaccttcctttataggccagcaatgttaactgtgatgggagtcgctgtggtttgtgtctgcgtgggcatactcctccacacctttcccagggtttatgccgcgcccacattcagatgggagctgctggagcgtggacccatgtaaattttaggatgaaataaacctagcagttttgtaacttgagagctctagcgcaaaggaacataattaccgtgtgaagaagttcctttgcatttgcagcaagatccggttgctgttgtaagcttatatatcgtcaatatcaactatatttacagcctaacatgcttcgattccattcaacctctttattgcaccatttgtttcttccttgcggttaaanngagg

SEQ ID NO: 177 - DNA, 331 bp, Zea mays
  Clone ID: TF_jC-zmX700157144b1
gacccccgcgcgggccccggcccggaatcccgggggcgacaccacgcgcgcgttctcgctccacatggggaagcaggaggcggagctgacactgcggggcaacagcgccgcctcctatggcgaactgaccagctgtaaagcctgatccgggcagtggctgatggcaaagacaccggctacaacgaccgttccgctctgcatttcgcgggttgctgaaggtacgagggcgtcgcgcaggttctgataaaccaaggcgtggacatggaccataccgaccagttatggaacacgccattgctggaggcggcgaagcaagggcaccaacgggggg

SEQ ID NO: 178 - DNA, 297 bp, Zea mays
  Clone ID: TF_700614359H1
ggaaatacccccctacaccttgcctgtgagcagggctgcctggccagcgtgggagtcctgactcagtcctgcaccaccccgcacctccactccatcctgaaggctaccaactacaatggccacacgtgtctacacttagcctctatccatggctacctgggcatcgtggagcttttggtgtccttgggtgctgatgtcaatgctcaggagccctgtaatggccggactgcccttcacctcgcagtggacctgcaaaatcctgacctggtgtcactcctgttgaagtgtggggctgat

SEQ ID NO: 179 - DNA, 507 bp, Zea mays
  Clone ID: TF_LIB4171-014-R1-L1-H4
aattcggcacgaggtttctccttgttttgggtcaccatcgactgcgcatgcagacggcgctgatgcaggcgtgccggttcggccactgggaggtggttcagacgctgctgctgttcagatgcaacgtgagtagctagctagcgccatcccttgttttcccagcgcagtgcaagtgcaaccgaccgacgggcgatggtggttatctgtttcgattcaaggtgtccaaggcggacagcctgagcggcaggacggcgctgcacgtggcggcggcgggcggccacgtcaggtgcgcgcgcctgctgctcgcgggcgccggcagcggcaggagcaagctcgtgaaccgggcggccagcggcggcggcggcggcgtgacggcgctgcacctggcggcgctgcacgggcacgccgactgcgtgcacctgctggtggacgagcgcgccgacgtcgccgcgcgcacgctgccctgcgccgcgccgtccatggcgtgcggcggcgccgggagcgcgc

SEQ ID NO: 180 - DNA, 1445 bp, Zea mays
  Clone ID: TF_ZmC17166_2
ggggtactcttgcggccgtccggattacattcattgggtacctcgaggccggccgggccggggacttcgacacgggccctaccagtttcggagtgccccagtctcccacccccagctccaccaagtcaccgcaccgccgcatctaggtcaccgcctcgccggcgtttcgccatggccggggactggcaggacctgggccaagcggcggccataggcctcctcttcgccttcctgctcgccaagctcatctccaccgtgatcgccttcaaggaggacaacctccgcatcacgcgctcccctccgtcctcccccacagccgccgccccagctcccgcgacgtctcccctcccctcccaacacgacgccgcaatcggaagcggcagtgacagcgattgggagggcgtggagagcaccgagctggacgaggagttcagcgccgcctccgccttcgtcgcggcctccgccgcctccggcaccagcgtccccgaggaggcgcagctgcgcctctacggcctctacaagatcgccaccgagggaccatgcaccgggccgcagccgtccgcgctcaagctcaaggcccgtgccaaatggaatgcttggcataagctgggtgctatgcctacggaagaagctatgcaagaatacatcacaattgttcaggagctattccctaactgggatgcaggtacaagtgcgaaaaggaaagatgaagaaagcattacttctgcatcagcttcgaaggggcccatgggacctgtgtttagcagtttgatgtatgaggaagacgaagggaatgattcagaacttgctgacatccatgttttagcgagggaaggagcaactgaggatatagtgaagtttctggcagcgggtgtgggaagtcaacatgagagatactgaaggtagaagtccgttgcactgggctgttgatcgtggccatcttagtgctgtcgaggttcttgcaaatgcaaatgcagatctgaatgctaaggacaatgaagggcaaacggcactccactatgctgctgtttgtgaaagagaagacattgcagagttgcttgtcaagcatcatgctgatcttcggatcacggacgaggacgggaacacggcacatgacttgtgcccttcgagagctggtcttttatgaaccaggcaaactgataacacgaatatacggatatgcttgaaggtgtcatctgccaagaaacatgctagctgtatcctaaagcccatacggcacatatggtgtatcttagtgtcatgtgtgacgtgtgggaaatcaggcaggttgtttgcgtacgtggtgccctctctgaaatcagatgagttgttttatcgtcctcatcgaaccagttgtcaaaggatagtattagtgttgggaagatacatgtattgctttaatcaaaagaatcatgctggacaccaaaaaaaaaaaaaaagcggcc

SEQ ID NO: 181 - DNA, 576 bp, Zea mays
  Clone ID: TF_ZmC2253_1
attggttgagcttttagtggaacaaggagcggcggttaatatgcaaaatttcgttggagagacggcactctttattgcttcttctttgggattaaatttgatttgcctcttcttgcttgagaatggaggtgacacaagaatatctaccttagaaggatcatcacctcttcacgctgcatcagcatgtggtcatctttctgtcattaaatcccttgtttcacatggtgcctttgtgaattctacggacgaagaaggagatacgcctcttcattatgctgttagagaagggaagaaagaagcagttggattacttgttcaattaggtgctcaattgatcaagaatgaggatttggaatctccattggatttggccgaagaattcgatgagacttggatggttgatttgctttcaaatcatttcccttcccttagatctgactccgaacatggcttctgtttctaaaaaaaatacgtttatataatgaggagagggggaacacgagttgtccgaaaggagtcctcgttgtgtagctttcagcaattcactattagctatattaaagttttccttcactc

SEQ ID NO: 182 - DNA, 1404 bp, Zea mays
  Clone ID: TF_ZmC54251_2
ccgggctgtacgtcgccgccgagaagggccacgcggaggtcgtgcgcgagatcctaaggtctgtggcgtgcagacggccggcatcaaggccagcaatagtttcgacgcgttccacatcgccgccaagcagggccaccttgaagttctgaaggagatgctgcaggctcttcctgctcttgctatgacaacaaattctgtaaacgctacggccctggacaccgccgcgattcagggccatgttgacatcgtcaatctcctgctggaaaccgatgctagcctcgccaggatcacgaggaacaacgggaaaacggttttacactcagcagcaagaatgggccacgtggaagttgtaagatcgttgctgaataaggatcccaggattggtttgaggacagacaagaaggggcaaactgcgctgcatatggcttcgaaagcgcagaatgctgagatcgtggtcgagttgttgaagccagatgtctcggtcatccatatcgaagacaacaaggggaacaggcccttgcatgttgctactcggaaggggaatatcattatagtgcagactctgttatcagttgaggggatcgatgtcaatgcagttaacaggtctggagagactgcatttgccattgccgagaaaatggacagtgtagaactcgtgaacatcctgaaagaggctggtggagaagccgcaaagcagcacaagtacatcctccgaattcggcgaagcagctgaaggaaacagtcagcgatatcagacacgacgtccagtcccagttcaagcaaacacgtcagaccaagatgcaagtcaaccagatcaagaagaggctggagaagctccacatcggcgggctgaacaacgccatcaactccaacaccgtcgtcgcggtgctcatcgccacggtcgccttcgccgccatattcacggtcccgggaaacttcgtggaggagctgagccaggcgcctccgggcatgtccctggggcaggcgtacgtggcgagcaacccggcgttcatcgtcttcctggtcttcgacgcgctggccctcttcatctcgctcgcggtggtcgtggtgcagacctcgctgatcgtggtggagcggggggcgaagaagcggatggtgttcgtgatgaacaagctcatgtggctggcgtgcctcttcatctcggtggccttcatcgcgctgacctacgtggtggtggggcgcgacgactggtggctggcctggtgcaccatgggcatcggcgccgcgatcatgctcaccaccctcggctccatgtgctactgcatcgtcgcgcacaggcagtgctttgtttcgccagaggctgctccatggcatgcggcaccacatcagtcttcttcaaccaaagggactggaggccctcccggccggcctcgaggtacccaa

SEQ ID NO: 183 - DNA, 1047 bp, Zea mays
  Clone ID: TF_ZmC36749_1
gcactaacctaacccaggaattctgtttctcgtatcacactttccatcggagaaccaaagcttagcttatgagatgttagtcacaatggttaaataaacccaacaagggcaaaattctagcagggtcaaatctgattctgtagagagcccctttgtttacacaccagaacaagctttaacacctcgactcagcacagtttctcgtatcacactttccatcgtctttgagcagagcaccagatcatccttcgagcattgccttggctgcatcgatgagtgcaggtctgaagctgttcgatgctcggccaagggcagtgtagccttccttgtcctcgacatcaacatcagcaccatgtctaattagcagaagagcaacccctttgttctcacatataacagcatgcgtaagaggtgtttgtcctgtcttgtcaacagcatcaacttcagcaccttcctcaatgaggaattcacacagctccgcgtttccagtgcttgcagctctatgcaaaggtgtgcagccaaacttgtctttcttgttgacattagcaccatgggctattagtttttcagctatgttaagcctccctttactcgcagcataatgaagagcagttcgaccaccatcagtaaccaggttaacatcagcacctcgctcaagcaggatgtcgacgatttgagagttgccggagctcgcggcggagtggatcggcgcccacccctcctcgtcctgcgcattcagcacgctagccgcggcgtcaccaccgcactgggcaagcgcgagcaccacctggggatgcccggcagcggcggcgacgtggaggagggagcggccgtcctcgttgcgcagggagaggtcggcgggggcgagggaggcgaacgcggcggcgtcgccggactcagcggcgcggaagagctccttctctgacggtcgcctctcctcgccgccggcttcgtcgacgtccatcgctgcagccatccggactccggaggtactcgtacttcgagttgtggctagagactagagttgacgcgtctttccccggccgg

SEQ ID NO: 184 - DNA, 787 bp, Zea mays
  Clone ID: TF_LIB4756-028-Q1-K1-G7
cggaccgaggctagccccagtgactgcgtctcctgcgtccgaatacggacaaatacggatatccagcacgcccgaaagccggccaccgtcagacaagcgcagcaaagccagccagcccaccatggcgctaccgccgccaaccattgacctgttgctcaacctcatcgacacccgcccgcagtccatcctcacgtcgctggcgcagcatccacaggtgtcctcggcgcgtgatgctcatggctactctctggtccatgctgccgcctcctacaaccaactcgccgtgctgcgcgacctgattcaaaaattcaatgccgacgtcaacattctagacgaggacggcgagacgcccctcttcgcagccgaaaaaatcgaagtcgcaaaatgcctggtcgaggagctgggtgcagacactagcatacgcaatggcgatggtcaaacggccgaagacaagattggcgaggaagaaggcgaggcacacggagtataccagtacctgaggagtcggagaactggttctgagccaataccagcgggtcttgtagaaactgagagtgtacaccccccgccaccattacccggtggtgtcaaggtcaatatgggcactatggaagaagatgccgctgaggcaccagatccggagatacggcggcggattgaagagttggcggcgagagacgactacaactctgaggaggtgcagagtcaactgagggagctggtgcaagacgttgtcagtggcattggaggtgaggatggaggaagaagcgtaaagagaagggtcgac

SEQ ID NO: 185 - DNA, 680 bp, Zea mays
  Clone ID: TF_LIB5117-063-A1-PF1-D9
acttttcaccacctcattctgcgccccaccccagtccaccaccgccgaacctctctccatctccgcggggctctccggcgcaccccctcgtgcctcggggaccccgatccgccgcccacaccacgatcgtttcatccatcacacccctctcccggacgcccctgctcgtgactcgcgcctgagcgaaagggaacaccagctagcttggcagctcgcttgatggaggaggagctgagtcagatggagcccggcgcgaaggtgacgctgcagcggcaggcgtcgtcggggtccctgacgcagggcccgtcgggggagctccggcggcagacgtcgctggagtcgtccccccgctcggggcgcggcgggaaccggcacctgttcgggcggcagtcgtccatggaccccaaccggcggcgcggccggagccagagccccgtgggctcccaggccgaccaggacctcgccgtgccggacaacctcgactccaccatgcagctgctcttcctcgcctgccagggcgacgcgcccggcgtcgaggcactgctccgcggcggcgtcgacgtcaacagcatcaacctcgacggccgcaccgcgctgcacgtcgccgcctgcgagggccaccgcgaggtcgtcagcgtgctgctcgactgggaggccaacatcgacgcccgcgaccgatg

SEQ ID NO: 186 - DNA, 2653 bp, Zea mays
  Clone ID: TF_LIB3689-243-D10_FLI
gcggcgaggcatgcatggcggcgacgacggctaaaccatagcgagacagctcggggtcacggtgttggaacctgtcgtgcgcgcgtgtcgcagatgtgcattgcagatgttcgttcaccagcgaacctgcagctgccgaatctacagagaccataggtgagcaacgacgtagggaaatagggctggcgggggcacgtgggtaacttggtcctggagcattggagaaggagcataccacaaggaaaccaacacggtcagtcaaaaccaaatctagataatcatcatgctacttctatgttttatgtctgtttttgtctgctatgaagtgttcatgcaagtgttatcaagtgttcatccatgccaagatggttactaagcgaacacacgcaacatgagtggtctccatctgatcttgcttcattttgatttattatctctgaggagtgtgtgagttttaatggctttgacggagaaggctattaattggccccttttttggagtgactgtagcaaccacttctaattcattttctaccgcgacaactggcgttgcaaggaatttatttcactagtatgcaacagatggccatgccatcgttcgccataacctcacctccgtcgcatggcactaccttatgggcgcctcatgcttgtcgtcctcaaagactgcacaagagacacgtgcgcagccaagtccgggcagtggcacaagcacagctgcagtaccagaagctaggggactcagacctcctcatcagtgaggtcactcttggaacgatgacttttggcgagcaaaacacggagaaggaagcacatgacattatcgcttattctttcgatcaagtgatcggatatacttctccattttcccttttggcctttagtacccagttccaatgaacaaggaaactcaagggagaactgatctttatattggcaggtggatgcaatcaaaaccacgagacaagggttatgttgtgtaccttgtctgtgtgaggcgtggtggtaggaagaggcctttgcccaagtgtattatctatggctagcccaagcaccagggtatcacccaactcaagttctagaggtacaagaggtctctcgctgatgagagagctagacgcaagcttggtggactgagggttcttaactcctactgggtgaacgaggtggagctgctatttatggagaggagcgttgatagccattgtcctgggatggtagtccgcatggctgaacgagcactctgccatcaataaactcattagcaaggtggtttggagagcctgtaagggctgctattctgcaaaccgaggcttttcttacaaatgcaaaaggatatccttgtttatcaaagcgccatcagagtctgctaactggattttttaaacattctgttcaggtgataatatatggaagatcaaatcacaatgttttcccagtatctgaatgagtgctctcaggtgatgagagctacgcagaagattcccgtgttcgacatgcattaactccttaccttgaatacattgcgtacctatatcagaagatggatccgcttcctgagcaggaacgcattgagattaattacagggactttttgcagtctcctctgcagcctctaatggacaatttggaagctcaaacttatgagacatttgagaaggatgttgtgaagtacactcagccggagaattttcaaagtaaaatgttcggtgaacaggatgcagaaaaagttaaaagctgcaacgataaggcaaaaaaaatgttcccaaaggtgccctcaaagatcagcttcaacatagttctgagccaattactgaaaacaatgatgatatcacgcaattgttgtttgccgtcattgtaggttcttcctttccatgcttgaagattctaatccagacaggtgcaaacccaaatatgagagctggtggagcaaccccattacatgttgccgtagggagcgcaagtattgaagtaatcagactcctactagaagctggagctgaccctaacacctgcagtgatgatggactaaagccaatacaggttgctgctttgagaaataaccgtgaagttgtggaacttcttttagcattaactatcccatttctaagtgtgtcaaattagagttttgatggaatcacagaatacatgttgtctaaagctgctgtgggagagtcacaagtaaatgaagttacatctctaaattcagccagtttagccggaccacaatctgctggggtgtcatatagcgcaaaaaagagattcgatggaagctaatttgagaggtcatgatgcctataaaaatgaaaattacattggagcggtggatgcttacacacaggccattgacttggattctagcaatgccacactctggtcaaacagaagtctttgctggttgctgcttgggatggctgaaactgccttggaggatgcaaagcaatctcgaacattgagacaagattcagtgatagcttgctacagggaagggatgctgttgaggagggaatgaagtcgcaagccaaacctaaccagtcttccaccgcagccaggagtcttttcgacccaaatttgatgtgatgatgatgtgacaaatgattgagtgttttgcaccagaatccaaaacagttgcaacacaatttgttttttaggg

SEQ ID NO: 187 - DNA, 2631 bp, Zea mays
  Clone ID: TF_ZmC14231_3
gcggcgaggcatgcatggcggcgtcgacggctaaactctagcgaggcctctcggggtcacggtgttggagcctgtcgagcgcgcgtgtcgcagatgtgcattgcagatgttcgttcaccagcgaacctgcagctgccgaatctacagagaccataggtgagcaacgacgtagggaaatagggctggcgggggcacgtgggtaacttggtcctggagcattggagaaggagcataccacaaggaaaccaacacggtcagtcaaaaccaaatccagataatcatcatgctacttctatgttttatgtctgtttttgtctgctatgaagtgttcatgcaagtgttatcaagtgttcatccatgccaagatggttactaagcgaacacacgcaacatgagtggtctccatctgatcttgcttcattttgatttattatctctgaggagtgtgtgagttttaatggctttgacggagaaggctattaattggccccttttttggagtgactgtagcaaccacttctaattcattttctaccgcgacaactggcgttgcaaggaatttatttcactagtatgaacagatggccatgccatcgttcgccataacctcacctccgtcgcatggcactaccttatgggcgcctcatgcttgtcgtcctcaaagactgcacaagagacacgtgcgcagccaagtccgggcagtggcacaagcacagctgcagtaccagaagctaggggactcagacctcctcatcagtgaggtcactcttggaacgatgacttttggcgagcaaaacacggagaaggaagcacatgacattatcgcttattctttcgatcaagtacccagttccaatgaacaaggaaactcaagggagaactgatctttatattggcaggtggatgcaatcaaaaccacgagacaaggtggagctgctatttatggagaggagcgttgatagccattgtcctgggatggtagtccgcatggctgaacgagcactctgccatcaataaactcattagcaaggtggtttggagagcctgtaagggctgctattctgcaaaccgaggcttttcttacaaatgcaaaaggatatccttgtttatcaaagcgccatcagagtctgctaactggattttttaaacattctgttcaggtgataatatatggaagatcaaatcacaatgttttcccagtatctgaatgagtgctctcaggtgatgagagctacgcagaagattcccgtgttcgacatgcattaactccttaccttgaatacattgcgtacctatatcagaagatggatccgcttcctgagcaggaacgcattgagattaattacagggactttttgcagtctcctctgcagcctctaatggacaatttggaagctcaaacttatgagacatttgagaaggatgttgtgaagtacactcaggacagccggagaattttcaaagtaaaatgttcggtgaacaggatgcagaaaaagttaaaagctgcaacgataaggcaaaaaaaatgttcccaaaggtgccctcaaagatcagcttcaacatagttctgagccaattactgaaaacaatgatgatatcacgcaattgttgtttgccgtcattgtaggttcttcctttccatgcttgaagattctaatccagacaggtgcaaacccaaatatgagagctggtggagcaaccccattacatgttgccgtagggagcgcaagtattgaagtaatcagactcctactagaagctggagctgaccctaacacctgcagtgatgatggactaaagccaatacaggttgctgctttgagaaataaccgtgaagttgtggaacttcttttagcattaactatcccatttctaagtgtgtcaaattagagttttgatggaatcacagaatacatgttgtctaaagctgctgtgggagagtcacaagtaaatgaagttacatctctaaattcagccagtttagccggaccacaatctgctggggtgtcatatagcgcaaaaaagagattcgatggaagctaatttgagaggtcatgatgcctataaaaatgaaaattacattggagcggtggatgcttacacacaggccattgacttggattctagcaatgccacactctggtcaaacagaagtctttgctggttgctgcttgggatggctgaaactgccttggaggatgcaaagcaatctcgaacattgagacaagattcagtgatagcttgctacagggaagggatgctgttgaggagggaatgaagtcgcaagccaaacctaaccagtcttccaccgcagccaggagtcttttcgacccaaatttgatgtgatgatgatgtgacaaatgattgagtgttttgcaccagaatccaaaacagttgcaacacaatttgttttttagggaaagtgctaaactgtaatttgataaattgtgatgttttgccacgtttgatgatataggtctggggcttcacgaccagtaggttaagcgcataggatagatgcactgtttggtgctggtttatcatatctactaatagcgaaatatctctgcaccatgagctctcgaacctggttccaaaggacgcgtgggtggatcttgagcttgatctccc

SEQ ID NO: 188 - DNA, 2785 bp, Zea mays
  Clone ID: TF_ZmC6144_2
tgggaccctcgaggccggccggtttcagtccaacggttctaaaaaaaaaattcaaggtttgtcttcggtgttgcagacgtgttcttcccacgcatgcttttaatctttttaaaatctccatttgcgtaagctcagtctgcagtttacaaatgctttgagtcctgcgctcctgtcctgctgttcttgtctagcagtaaacaagtcatttcctttgttgtcacatggtggctcgccgagtgctggtgcacacattctctcctcgttccaccttgctgctgctgctgcagttcttggcacggccttgtattgtatgaatatgattgtatcacatgccatgtgactatgtgagtagctgaccacggctcactgcgaggcgcacaggtacagcagcgcaggcgcagcggcagcccgccgctggatctctcccgaggctccggcgatggagcggtcctgctacttcccgctgcggtgggagagcacgggcgaccagtggtggtacgcgtcgccgatagactgggcggcggccgacggccactacgacatcgtccgccagctgctgcacctcgaccccaacctgctcatcaagctcacctccctccgccggatccgccgcctcgaggcgctgtgggacgacgacgcccgcttcgccgacgcggcccggaaccgcgcgtccgtcgctcgcagcctgctgctggagtgcgagtgcaggaaccaccgccccgccgcccccggcgccggggagaacacgctgctccgggccgggtacggcggctgggtgctctacgcggcggcgtcggccggggacgccgcgttcgtgcgggagctgctggagagggacccgctgctcgtgttcggcgagggcgagtacggcgtcacggacatgttctacgcggcagccaggggcgggagcgcggacgtgttcaggctgctgctcgaccacgccatgtcgccgaggtgctcgacgagttgccggaacggcgaagccagcgccaggcgcagctccgtgttccggcttgagatgatgagccgggccgtccacgccgcggcgaggggcgggagcgtggagatgctcagggagctgctcgaggagtccagcgtgtcgacgtatctcgacatccgtggatccaccgtgctgcatgccgccgctgggagagggcagctgcaggttgtcaagtaccttgtggcctctttcgacataatcaattcgactgataatcacgggaacacagcgctgcatgtagcggcctaccgagggcaccaacctgtcgtggaagccttggttgctgcgtctccatcaaccttgtcagttgtcaacaacgccggtgacacgtttctccactcggcagttacaggattcaggaccccaggattccgacggctcgaccgccagttggagctgatgaggtacctcatacgcgagagaaccgcggatatccagaagatcatcaacctgagaaacgacgcgggccttacagctcttcacctggctgtggttggctgcgcacacccggatctcgtcgagctactgatggccaccccgtccatcgacctgaacgctgaagacgctaatggcatgaccgcgctggcgctgctgaagcagcagctgcgctcagcgacgtccgaccggctcatcaagcagatcgtctctgccggaggggtcttgaactccagcatcctgagaacccggtcagccatcgcttctcagatcaagatgcagggcgggatcgcgagcagccccggcaccactttcaaggtatcggatgcggagatattcctgttctccggcatgggagcggcggagtctctgaggccaagctcctgctccagcaacgggaaggatgatgaccctactcacgcagacgcagactgcgccgagaaccgtggatcgtcggagaagaggctgagctccgcgagccgggccaaagaccgcctcaagatgatgctgagatggcctcgccacaaggacaagacgcccaagaagtcagaggacagcagcccgctggggtcgatcagcaggctgaacgagcacggggccgagacccctgctccgctgaggcagaagtttaccaagacgacggcgctcaacggcaagcggaccctagcggtgaagagctccaccccgagctcctcatccaccaagaagaagctcaacacgaagctcatccacggcatcatggaggccatgccacagctggcgccatctacggcgcggtccgcgtccccgacggacactttcctgaggtcctcggtatcgtccacgccgcagccgctggcgaagctgaaggacatctgcctcgacgacgagatctccatggtgacgccgcccgccggcaggctgaaggatagtgacgacgccatggaggacccctcgtgctccaacaactcgtccatggacgacggctgtggcgccgggacggcagagagcgcggcccggaagcacgggtgcggcaacgggaggctcatcaacatctgctttggcgcgcagggcctcaccgtggaggactcggcgagcgggcagcagacgagcaagatgttcaagcagcagtgcctcagggtgtcctgattgacggcgtggtgtctcgactacaacagcgtggtgtgattggtttggtgtctcgcgtgcagctatgtgtgcttgtttgctttgctccttgcacagccagcggtgaactggtgatccaatgaacttgtgcttgtgttaactgtgacgttgacgaatccacagctctttaacttcctcagtgtcaggtcgtgcattcttcaaacaaatccccgttgatcaatc

SEQ ID NO: 189 - DNA, 751 bp, Zea mays
  unsure (1)..(751): unsure at all n locations
  Clone ID: TF_ZmC621414_1
attcggctcgagcaagagcagcacgcatctttcttgtgattgattttaaaagcagcagacagaagagccttaactctcttcttccccaccggaaaccaccacccacctcccctcctcgatgggccacgtcctcagctgcagccgcgacggcgctgacttgttccgcgcggtgcagcacggcgacctggacgccctcctcgccgtcgacccggagctcgcccgccgcgccaccaccatatacgaccgtctgtccctgctccacatcgccgccgccaatggccagctgcaggtgctctccatgttgttgttcgatgacggtggcgccggcgggaacgtggacgtgctgaaccggaagaagcagaccccgttgatgctggcggccatgcacggcaggacggactgcgtgctcagcctgctagacgccggagcaaatatcctcatgttcgactcggtacacgcgcggacatgcctccaccacgcggcctactacggccatgcccactgcctccaagccatcctctcggccgccaagaccacgccggtggccgactcatggggcttcgcgcgcttcgtgaacgtgagggacgagcacggcgccacgccgctgcacctggcggcaaggcaggggcggncgcagtgcgtccgccacctgctccacgccggcgccatcgtctccgccccaacagcctcctacggcttccccggcagcacggcgttgcacctggctgcacgccgcggcaaactggactgc

SEQ ID NO: 190 - DNA, 1860 bp, Zea mays
  Clone ID: TF_ZmC35644_1
cattgggaccctcgaggccggccggggttttctaacgcaagcagcagtgacgccgcgctacccgaccaaaatccgccgccggtgcccagaactcgacgggaaaaccggggctttggtcgccggacgccggctgcctcgagatgctcgtgtgggcggccaccgcgtcaccacccagcactccatccgccgtgccatttgctcctccccaccgcgccgccgctccccgccctccaccgcctctctgccgctcgctcccggggctgctgtgcgcgggcctcatccctccgccgcgcgccgccgcttctgacggcgacgtcttctgggaggagccagacgacggctccgggagcgactacgaggacgacggcccggagcaaaggagggccttgcgtttcccatcttcctcgccgtcctccaggctcgaggcgtcggcgcagcaagaacaggacctccggagagagatcgagcttctcctaacgcctgaagaaaaggctactttggaccagcatgagacccctgacgtcactagaatatcatcacccaagtggcacccacttcatagctacgcgttggcactgcagatacccctcatggacaagcttctggacagcggtgttgacatcaacttagttgatagagatggcttcacctctcttcacaaggctgtcatagggaaaaaagaggctgtcattagccatctcctaagaaaaggggcaaatccccatgttagagatagggatggagccacaccattacattatgctgttcaagctggtgccctgcaaaccgtgaagttactgattaagtacaaggttgatgtcaatgttgccgataatgatggatggacaccactccatttagccatacagagtaggaatagagatatagctaaggtcttgcttgtcaatggtgcggataagacaagaagaaccaaggatgggaggactgcgctggatctaagtctatgctttggaagggatttcaagtcatatgatcttgcaaagcttgtcaagcttattccagcaaacagaggtgcgtgatttcgctctgccatgaatctgagggaaagaaagtccaaaagttagccaatgcagcagcctcatacgacccatgcatagcttatgaagaagggtccaggagccgcgtgccgccgtgccagtcatcattcattttttttttcttgaccgccaactcaaacgatctgacagattgctctacaattgtgccgttagatttcagtgtccatggtctgtagcctgttcgccgtgactcgaaaaatgatgatgtacatgcaacagtcctccagctgttgtgttcagttgttttgttcaatataggccagggccaccaaaacaagatctgaattgtgacagttagaacccttcaaaagaggactgcgctggatcgaagtctaggctttggaagggatttcaagtcatatgatcttgcaaagcttgtcaagcttattccagcaaatagaggagcgtgatttcgctctgccatgaatctgagggaaagaaagtccaaaatatacgacccatgcatagcttatgaagaagggtccaggagccgcgtgccgccgtgccgatcatcattcctccgttttcttcgccgccaactcgtatttcttgaccgtcagctcaaacaatctgacagattgctctacaattgcgccgttagatttcattgtccatggtctgtagcctgttcgacgtgactcgaaaaatgaacctatggatgtacatgcaacagtcttccagctgttgtgtgcatttgttttgttcaatatgggcctgggccaccaaaacaagatctgaattgtaactgttattatctgaattgtaactgttattaaccttc

SEQ ID NO: 191 - DNA, 630 bp, Zea mays
  unsure (1)..(630): unsure at all n locations
  Clone ID: TF_ZmC5306_3
acaccccttcatcactgcattctgaaaggaagacatcggcatgcanagcttctcctctccagaggtgctgattcacaagccatggatcgagatggtaggacagcattacagtatgcaatcaatggcggaacaagtgacgaagacattcttgcgttattacaggatcatagtagataatcttgcaaccaataccttcagtaaatcgaggcactcttggtgtggtcgactcaactaacaaggcaccagccccgccaggccccagcttgtcgtgcagacaatcctaaatttatggcatgaaagcaacctatgtacatgtcgttatagggcttcagtatcatgacgcgcctgttgtttcttcccccaccttgtgcttgtttaggataagtcatccatatttagtcatctggcaaacggtttggttttgtttgctgcaggtgatgcatagtaagcctgtaaatggagttatttctctttattttctagtcatcttccgtcacgaagtagatttggcattctgatgaaagatgattgtacatatcgagatgtgtgatgttggggacttgttctcaaatgctatgaattaagaacgaggcaacataaaatgttaaatgattttgtccttcgtccgtg

SEQ ID NO: 192 - DNA, 725 bp, Zea mays
  unsure (1)..(725): unsure at all n locations
  Clone ID: TF_ZmC154413_1
aattcggcacgagggccgaggctcggcagagcttgtggaagcgcctgtggcttaccaagagaatgtagatatattagataaggatgaagacccacctatagtatttgctttggctgctggctctccacgatgtgttcgtgcacttgtaggcaggtctgctagtatcaattctaggcttagagaaggcctgggtcctactcttgcccatgtctgtgctcatcatggtcaaccagagtgcatgcaagagctgctgatggctggagctgatcccaacgcagtagatggtgaaggtgaatctgtcctgcatattgccgtggccaggagatatactgattgtgctattgctatacttgaaaatggaggctgcagatcgatgggcatatcaaattctcaacataaaacgccattgcatttatgtgttgagacatggaacacagctgtggtaagaagatgggttgaagttgcatctctagaggatatagcagaagcaattgatgtacccagccctgttggtacagctttatgcatggcagcagctcttaaaaaggagcacgagaaagagggtcgagaggtagtaagaatattgcttgctgctggtgctgatcctacagcacaagatgatccacactgtagaactgcattacatactgcagncatgatcaatgacgtggagcttgntaagattatactggaaagcagagtcgatgttaatataagaaatgctc

SEQ ID NO: 193 - DNA, 2223 bp, Zea mays
  unsure (1)..(2223): unsure at all n locations
  Clone ID: TF_ZmC11952_1
cccgggtcgnacccacgncgtccgcgnaccattgcctcgaggccggccgggccgtccccgacccgaagcaccacgcattaaaatctgccccctcctgccactgccagcgaccaatccaatccctacctgcccgggaaccacccgtcgggctcctcccgccctcctcgccgcatctgcatgcggcggggatctccgggctcgctccgtcaccggagccccaatcaccgccacctcatccaagcccccgaatcccccgggcgcgcgcagcacaaccttgccgcgatcgcgcgcgggaaccgccgctgattgggtcgtgaaagctcgattttgggcgattttgattcggagaacccgccgtcattcgattttggcgcgcgttgcgagccgggatggggttgcagcagtccaaagaggaactgctgtaccagcaggtcaactacggcaacgtcgacgggattcgcacgctccgggggcaaggcgctggtctcgagtggattgacaaggaagggaagacgcccctgatgcttgcctgtatgcgtcccgatctgttcgacgtggccaaggtgctgatcgagttgggagctaatgtgaatgcctacaggcctgggtcacactgtgggacagcattgcaccatgctgccaagaaaggacttcagcagactgtccatttactactctcacatggagctaatccgttcataccaaacgatgattgcaatactgccctcgaattggcaagagaaaagggtcatgtgaatgttgtacgtgccatagagggacgactttgtcttttttgcggatggatgagagagaactatgctcctgcttttttggatgcaattgctccacagttcatgacaagaaaaattttgggcttgttgttttaccccgtgaagtgcgaactccaaccaggcctcttaagttagagatagctatatatcctgaattacaggcttctaaaccacgttctgtacttaaactatggaaatgtcaaattgagcaaccaaagcttaatcaggctgacccttccattatcatttttgacaaaggaacaaagactagatacaagatcttaccggcctatgaaggtgacaaacagcagcttcaatggttttataatgcatgttgtggcatggcacaggttttgaacacggctccagtagcaccagcaaatctccctatgccaaatccagcaccggcaatttcatctgtggcgccttcagaacaatctgcacccagcaaggaggatgttgaattagcaatggctatcaatgcctccattcaatcagctattgcagagggagtatcagtgcccaatgttcaaccaaatgcatccacccccaacaacaatggctgggctgcccctccaagtaattctcacaacggatggggaccaccagccactcctgcaccatcaaagacgagcggtcagtcccaggtccgggtagacgccccaagcagcagcacttacaatggatgggatgtgcccggaacaagctctagtcaaagttcatcgaaaccccaccaaacccaaaccaaccctcctccagtcttgattccacaggaagcacttcaggctctcccaaccccaaccgcgccaccatttgctgaagaaaccttctacaacggtcctgttcactatccatccatagactctacgcctgtcgatgtaaccatgccggctaccactggaggcggtagtacaacagtcatcgcaacggcagcacctacagaacagttagaaaatgaagctgatgcaagtgacagcggcaaaactccctctggtacttgcgttatatgtctggatgcccctgtggaaggcgcctgcatcccgtgcggccacatggctggttgcatgtcctgtttgaaggacatagaatccaagaagtggggatgccctatctgccgtgccacgattaaccaggttgttcgcctctatgctgtttgaggagttgaaacggtgggttcagaaagttggcaatggattggagggttctcgcaacaaatgttgatgggaacgtctctatctcaaaattgtgcaattatgctattttgcacttcgtactgcactacaaatatgacttccgtgtaatgtatgtgggctgacgcctttatgtacataggtagtactatacaagacaattttataaaaatctgggtattgttgcaagttgcaactcacgttcaaagttgcacgataaaaaaaaaagcggccacccccga

SEQ ID NO: 194 - DNA, 619 bp, Zea mays
  Clone ID: TF_ZmC16578_2
ggccggccgggagccccaggaggtacagtcccgttccagtcagagcgcagccagttcccccggcccctcccccctcccgctcgccggcggcgatggggcacggcgcgagctgcagccgcccaagcgaggaggtggacttcttcggcgcggcgcagtgcggggacacggcccgcctcgccgccgctcttcgctcccgccccaccttgctcgcccgcaccacgctcttcgaccgcctctccgcgctccacatcgccgccgcacacggccacctccaggtggtctccctagcattagatctttgcgtgcaccccgacgtcgttaaccgccacaagcagacggcattgatgctcgcggcgatgcacgggaagaccgactgcgtccggcggcttctcgacgccggcgccaatatcgtgatgttcgattcctcgcatcggcggacgtgcctgcactacgcggcctactacgggcacgcggactgcctccggaccatcctctcggcggccaagtccgcgccggtgtcggaatcctggttggcctttccgtcgccccggagacaccgccgtctcgccgccgccgctctttggccccttgctaatgcgttctcagctgtggaggtgca

SEQ ID NO: 195 - DNA, 1067 bp, Zea mays
  Clone ID: TF_ZmC1087_1
cattgggtacctcgaggccggccggggggccggttcaaagtccgttgctgtcgcagctacgtaccggaagcgctagaacaacgcgaccgccgccgccgccgccgacgactcagctactcgcctggtgatgggcgtcgaactggcgcaaccgaccgccgccgcggctgcggtgaccaccgctgagcaggctcaggatctcatcgacgccgctaggtacgacgacttggaggacgtcgtcgccctgttctccgctggtgtctcgctggactccacagattcgcaaggccgcacagctcttcacatggcttctgccaatggtcaccttgctgtggtggaatacttgattcaaaatggagcgaatgttaatgccaccaacatggagaagaacacaccactccactgggcatgccttaatggacgtatagaggtaatcagggctttgatctcagcgggggctagcgtgagtgctctgaacagccacgagaaaacgccaatggacgaagcggtgaccacaggcaagatggacgtgatcgacgcgatcggtgcggcagtagctcaagccgagctcgacgccgttactgtctcctaaaaggacctgatgagtacctggagctttgaatgacttgcagccttgttcttatctcccagcggttctgtctgtatcactcgcgaacctggatcccccgacgggccagtatccgggcaatatctatactgacggcaatcgcctgttagtgtcattggcacgaggacccgacctgtcgttgtaaaccagatgtgcagatgtcaaagatcaggattttctcctacaaaaaaaatagggccgttgcttgttctcccaggcaaccttcgttttagctttgggttcccttggctccctttgaatgacttgcagccttgttctcatctcccagcgtttctttctttatcactcgcaaacctggatcccccgactggccagtatccgggcaattacggcaaacgaagtagcagcgaaacgggatccgcacctccaccctctgtgtttttttttcttgttaaaaaaaaaaaaaggcaaccttcgtttc

SEQ ID NO: 196 - DNA, 886 bp, Zea mays
  Clone ID: TF_ZmC586314_1
atttcccgccctttttaccccccgcacattccagaagcttcttccctgccaccaccaccgccggcggcggcgaggatgggtacccgcgcccttccgctcccttgccaactcgagctcctcctcggcgaagaccgcggccggtggccgccggaggccaggttcatcgaggccgcccacctcggcgacgtccgccgcatcaaggagattgcgaaggagctggacgtgcgtgggcacgggatcccggtgacggtggccagcacgagctacatgggcatgaacgcactccacgccgccggcggccgcggcaggctgcccgcgtaccagtacctcgtcgaggaggtcaagatggacatcaacaagcccgacacctcccaggattattcacccgtggagcatgccgttacctatggcaaccttcctgccgtcaggtacctgcttgatcatggcgccgatctgcatcaacaacgttcaggaaacatcactcttcttcattcagctgcagctcgtgggcactctgaaatagtaaagtatcttctctctagaggagtggatattgatgcacaatcaattatagggacaccactcgcttttgctgctcagaaaggacatgctactgttgtgaagatacttttgcagcacaatgcagatcccaacaagggtactcttattcttggacctttagacatggcgttacacaaatctaatgtgtcttgtgcgaagctattgattcagggtggagctaatgtgagtggtgctggtccttgttataatcccttggtaacggctgcagagaagggcttaactgaagctatcaagtgcttgttagaagctggtgcaaatccaaatgttcttttgacaggtttggtagattgccaatagaattggc

SEQ ID NO: 197 - DNA, 815 bp, Zea mays
  Clone ID: TF_LIB4756-001-QB-K6-H8
gtcggccgggactactgcctcgacatcttatcgcagccttttgggcgccgccgtgaacaacagcatcgccctcttcaccgccctggggcctgtcaccttgtttccgttagcacttccgaaataccccgccaaacaagtcgacgaaacattcgcgcgtgtgccgtgtgcttgtgtgctgtgcccgacctgtcagccacccgcccttgtccagtcactgcaagcatccacgggattccttcaccatggctgaccaccacgacggagcctctcctcgagaacttgttctcgaagcctgccgacgcaacaacaccgagctcctcgaggaaacactggccgacctgaatgccgctgccaaaaagtcggacaagaagcctgccgactatgtcgcagacatactgaacaacgcgcgcgatggactcggcaacggctgccttcacattgctgccacctacggaagtttcgaggtcatcgacatgctgctcgaccaagaaggcctcgagattgacgaaatcgaccgcatggaacaggacacgcccctccacaaagccgtacgctacgtcaactcgctcgaaaaagacgtctggccccatggtcaatccattgtcgccatgctcctagacgcaggatgcgatcccagaatacggaataaggcgaagctcaagcccgtcgagctggttgacccacgaaacacggagctgaagagcatgctgcaaaagggcgagtttgccatccaggctggtggagacatcgtcgaggatgacgatgacggccatgcaggcagtgggagtgagagccgatgtagcaacaacattacg

SEQ ID NO: 198 - DNA, 363 bp, Zea mays
  Clone ID: TF_uC-zmrob73012e01b1
ttcgactgcgcatgcagacggcgctgatgggggcgtgtcggatcggccactgggaggtggctcagacgctgctgctgttcagatgcacacgtgtacaaggtggacagcctgagcggtaggacggtgctgcacgtggcggcggcgggcggccacgtcaggtgcgcgcgcctgctgctcgcgggcgccggcagcggcaggagcaagctcgggaaccgggcggccagcggcggaggcggcggtgtgacggctctgcacctggcggcgctgcacgggcactcctgctgagtgcacctgctggtggactagcgcgccttcgttgtctcgcgcacgctgtcctgtgccgtgccgaccatggcgttcgtc

SEQ ID NO: 199 - DNA, 4723 bp, Zea mays
  Clone ID: TF_ZmC6921_1
cttcatatagaggcactgcgatgcattttttatgtatttttaggcaacatgaaccttggacacatatttcatgttcttttttgcccttactaatattgtttacctggggatcaaatagaggcactgtgatgcattttaaatgtatttttaggcaacatgaaccttggacacatatttcatgttcttttttgcccttactaatattattttctccttagaagcagcctctccgcatttgtggggggatgcttgcctcggtttattccttccccagaccccactcatgtgggagctctggcactgggtctgcacttttatggtctataacaaagtcctctgaatgatgctaaagagagagtgaggtgcgtttgcgtttggaagcagtgccttcggccggggtcccaggacgtatgcctcgcccggagatcccgtacccgaccctcccctgataaacaaacgcaagcgtcagggagggagggagggacagagagaggtagagagggccggggcgaagggggcaaagatgcgttcttgaggagcctgtgcaggggaggtccaatccagaggccgccattccttttcttttccccccaacctctgcaggctcttcagatccagcaatccggcttgtttcttttgctggttgatttatactctatagtggttctctacttagcatcaagtcttggcatggcaatggcctcgtagctcgcggctctctaataggaataattttactcaaaatgaagctatagcgtcatgctatcttaggttgtttggacagttccttaggatactgaaactgtattagataatcaagatagtcttcattcaaacatttctccccagagctatacaattctaattacaaccgaactgtacttcccattaagaacaacaccaactgtaacgtgacgtatgcgactgagtccagatagcgtatggaagctcacctgttggcctgctatttcagatactgtgtgtgttcctgaaacttcatggagacttccatatctccaccaggcacatcaaagcagtcagctgtccgcaaaccttctcctggaggctctcttaaggatctgtgccttgtttccaaacaagggtcaatagctgaagtagaatctgctttggccttgttgaaaaaaagtggtgggaacattgatggtagaaatgcatttggtcttagtgccctccaccttgcaacatggagaaatcatctacccattgtgaggcgactcctagatgctggcgctgatccagatgcaagggatggagaatctggctggagtagcctgcatagagcacttcattttggtcacctatgtattgctggtgttcttttacagtttggtgcttccctcgctttggaggacactaagggccgtacacctgttgaccttatctcctgtccagtatcacaggccaatggagattttccagatgcagttgcaacggaagtcttcagttggggaagtgggacaaattatcagctgggaactggcaacgcccacatacaaaaactaccatgcaaagtagaagctttgcatggatcatatatcaaaacagttgctgcatcaaagtttcacagtgtagcagttagttctaatggtgaactatacacatggggatttggtcgaggtggtcgtcttggtcatccagatattcacagtggacagacaactgctgtgattacccctcgccaggtgacagtaggattaggccgtaaacgagttaatgctgtggctgcagccaaacatcatactgtgattgctacagagctgggggaattgtttacctggggatcaaatagagagggtcagcttgggtacccttctgttgatacccaaccaacaccaaggcgtgttggttcgctcaagcaaaggataatttcagtagctgctgcaaacaagcactccgctgcagttgctgatactggcgaagtattcacctggggttgcaataaggagggccaactaggatatggcacttcaaactcagcatcaaactgtatcccaagaatggtggagtacttgaaaggaaaagtacttagaggtgtttctgcagcaaagtatcatacaatagtgttaggagctgatggagaggtgttcacttggggccatcgccttgtcaccccacggcgtgtcgtagtagctcgatgccttaagaagggtggaaatacaaatctgaagtttcatcgtatggaacgacttcaagtgatttcagtggctgctggaacaacgcacaatactgctttaacagctgatggtgctcttttctactgggtttcatcagatcctgatctaaaatgccagcagatattttcaatgtgtggaaggaatattgtgaacatctcggctggaaagtactggaccgctgtggctacatcaactggtgatgttttcatgtgggatgcaaagaaacgtaaggacgaaacgccaattttcactcgggtgcatggtgttaagcgagcaacatttgtttgtgttggtgaaacgcacatgcttgtgctctcaagtatataccatcctgagtatccacccaagcctaaaagccaaggcttaaaatccatgttagaatggaacggtggaactcctccgctgggtgaagatatcctgtttgatgaggtatgaagcaacagtggtttatcaggaagcagtggtgaaatgagcaaaggtaggcctagcagcactagcggcggcgagaagcggccttggcgaatagtgactgatggcacacacacaccccctttaggctcacgctgattccttggaagctaaggagctcaagaagcattgtgaggatttagctattcgcaacctcgattacattttcacagtgggagcttcttcaattatgaatgcttcttctgaaattcttgtgaacttagagaaattgctagatgagaaatcctcagagccttggagtcagcaccgtcttcccacaatgacagctacctatcctgctgtcattgacagtgatgtagaggaagatgaagcaagagaattccccaagacccgtaaatgtgggaaatctgcatcaaggccatctgcgatgtctagtgatgacagcttccttcagaaagactgcaccgctgaacaagccgtctctaagcagatcagagcacttcgcaagaagctgcaacagattgagattctcgaggctaaacaacttgcaggtcatcagcttgacagtcagcaggtagcgaagctcgagtctagggctgcccttgaaggtgaacttgctgaacttggcattccctcagagatatactcaacttcctctgcttgtccagcagaaggtaggacaaacagaaaacctgaggtttctaagaaacagaagagaaagaacaagcagtcaacacagaccccgtcagtgaaaaatgagcctgggcaacaaatccccattacggaacttcaagttctacaagtcaatgtctctgctgaaaagggaggcgtatgccgctgatccaattaaacctatggaggctgccgcgttcagcaacacaaaggacaccgcttctccaccggagaagaaaccttcccaaccaactccatcaaagaagaagaacagaaaaggcggcctgtcgctgttcctgagcggcgctctcgacgacaccccaaaaccaagcctccctgcccccgctgtgcctgccacaccgaagcccgaaggacccgcctggggcggcgtgaagataaccaagggacccgcttcgcttcgagacatccagaccgagcagagcagaacaaacgagcccgcgtcggccaaggcgaaggaccgccacgagaactcgccggacagcgccggccgcgcgacaaggctctcctcgttcattcccgacgcgcgttccagcccagtagccgtcgtggcgcctgctcgcgcagcggcggcgccgccttcttccgaaggtgacaggagcacgccgccgtggtcgtcctctgccacctcgcccaacgtgtcgcagccttcgctcagggacatacaacagatgcagcagaagaggcaccatggcggcgtctcccacagccccaaaacccagacatcgggcttctctataccgccccacagcggagcgccagaggccgctggcggtggcggcgtgaaggacaacgtgcccaaccggtggttcaggccggagaccgacgccccgtcctccatccgctccatccagatcgaggagcaggctatgaaggacttcaggcgcttctacagcagcgtgaggatcgtcaagccgcaggtctagtagcactggcggcggcggcggtggcggccttggcggagagtgactgatggcacaacaaccccctttaggctcaccctcccatttgacactggctcgttgtacattcgagtgtacagttggttctgttcgccataggttccttgagctgaacaataaacaaacaccctttgctgctgttgctgctgctttcgcagtgagtggtctcgtttagttgtaacagaagattgtacaggccatgtgagatcaccaccccccggctttggcttaacagtttaacttgagccaatgcttcttttttttttttttggcgccaaaatgtctttggttgttccaagcagaggtcataaaaactgtgtggtgcgtctgcacccaggtacccaaaaaaaaaaaaaaaaaaaaaaaaaaaatttttagcttcgatcggacatgatctcactttggggctgtagcctagtgcttctatatgctctcgatctgcttgac

SEQ ID NO: 200 - DNA, 708 bp, Zea mays
  Clone ID: TF_LIB5116-047-A1-PF1-F2
ctctccgtctgcgtcgaccggaaacggcggggcagttcccgactgcgactgtcctcttctctctcctccgcgaccgctctctcttgaccggagtcagagtctcgagtgcagccgactcgccgtcttctccgcttgcccgtgccgccatggatggggtttcgacggagcctcgccacccgctcctgcaggccgttctggacggcgacctccgcctcctcaaagagatggcgggcgtcgtggcggcggacgtcggcgtctgggcgcgcgcgctgactgtggcggtcatggaagggcggctggacatctgtaggtgcctcgtcgaggaccacggcgtcgatgtcaaccagcgcaccttcacaggtgacactcctttggccatctctgcgacttatgggacgcctgccatcacgagatatcttctggatcgtggtgctgatccaactttagccggtgccctgtggccacctcttcatgctgctgcaagttttggacaatgtgaaatagtggaactgctgctttcaactggaattgatgtggatcatttcgattctgagtatgggaccgcattgcatgttgccgctactaatgctcaagatggttcaatgaatattttgttgcagcatcgtgcagatcctaataaggtttaccgccttgatagtaccccgttaaggctggccatgatttctgaatcgctggaatgtgtgaagc

SEQ ID NO: 201 - DNA, 1915 bp, Zea mays
  unsure (1)..(1915): unsure at all n locations
  Clone ID: TF_ZmC127800_1
aattccgactgttattccaagttccactcgcaaaccccctcgattcgtccatccctcgcacgcgctggccgcccgccccccatctccacttctcctcgccgctctcctgaatccttcgcccgaaagcctccgaccgcagaaccttagcgttgccgtccacctccatggaatcgaagcctcacgcgccggcgtctgggctggcaacgccgcggttcaggctgggtaaacagtcgtcgctggcgcccgagcgcggcggcgagggcggtggtgcggggtcggcagatgggtcggccgaggcgaacggcgtcatgagcttccagctcatgtacctggcccacgagggcagcgcggaggggatccgcgagctcctcgacggcggcgtcgaccccaatttccgcgactccgacggccgcacggcgctgcacatcgccgcctgcgagggccacgccgaggtcgtcgagctgctgctccagagcggcgcggaggccgccgtggaggaccagtggggcagcacgcctttggcggatgcaatgcattatcagaatcatgatgtgatcaagatctttgagaagcatggctccaagcataagattgctccgatgcatgtgaacaatgttcgtgaagttcctgaatatgagattgacccggctgagcttgatttcagtaatggcaatgatttatccaagggcacatttagaaaagcaacatggaggggcattccggttgctgttaagaagctggacgatgatctaattgcggacggcagcaaagtgcaggcattcagagacgagcttgatgtgctgcaacttatacgtcatccaaatgttgtgcaatttttgggcgctgtgacacaaagcaatccaatgatgattgtcatggaatttatgcgcaagggtgacttgcgcactcacttgagtaagaaaggagctctgccaccatcatatgctgtgaagttagctcttgatattgcaagaggaatgaattacttgcatgagcataaacctcaggctatcatccatcgtgatcttgagccttctaacatattgagggatgacactggacatctgaaggtggcagattttgatttgtgtaagatgctaaaatggagaagaaaagttagagaagataaagcagttacttctccaggcaatgcttgtaaatatgtggctccagaagtcctgcgaaatgaagagtatgataccaaagtggatgtcttctcattcgctctgatacttcaggagatgattgaaggatgccttccttattatgataagaaaaatgatgaaattgagaaggcacataattctaaagaaaggcctccttttcgagctcctccaaagcattatgcacatgggttaagagagttgattgaacagtgctggagcgaaaattctgcagacaggcctgattttagagtaattatcaaccggctgtctgctatccaaaatgagatagctcacagaaaccgttggaaggcgagacctctcaagtgtttcctgagcatcgaaggaatgtggaagaaagatcgcaatgagggcagcaccacccgttcatcacgctcatcgcgatcctatttttaaccaccagcacaagctattgatttcaatcgcaagatcatattggtgattgctagaaaatatactcaaatgtatatcatattttcgttttctaaaactatgaaaaaaaatggttctgcaactggttgattctcagctgatcatagttttgattgtatatcaggcatgccccttggccccaacccctgctttggcattcccctgggttgggacaatatggataatgctaacttaattatatttatataataatgtgttttgatgttnaaaaaaaaaaaaaaaaaaaaaaaaaaaaaaaaaaaaaaaaaaaaaaaaaaggggnnnnnnnannnnnnnaa

SEQ ID NO: 202 - DNA, 1329 bp, Zea mays
  Clone ID: TF_ZmC9440_1
ccgaaacaataaatttcactgtgggactgatggaacggcgtcccagaggctggggcggaggcggaaggggagcactgagcaggcgttggcgttgcgagaaagaagatcatcctctgcatagggccgcaaggtcttgtgatgcggcaacaatggagtcggtgtgtgagaccaaacctgtcgccatcaattcaagaggtcgcttctcacgcacaccattccacctagaagcatgagctgggcctggcaaaaataagagatttacctgaccgattggcgagactgatgggacggcgtcacagcggcggcggcggcggaagaggaagagggcgagggcgagggcgtgggcgagatgaggaagaagatcttcctctgcacaaggccgcaaggtctggtgatgcggcagcagtggagtcggtgtgcgagtccaaccctctcgccgtcaattcaagggatcgcctctcacgcacaccactccacctggctgcatgggctgggcatgttgatgttgtgagatgtctttgcaagcacaaagctgatgtgggagctgcagcaatggacgacactgcagcacttcattttgcttcccagaaaggccatgtagaagtggcccgtgagctgctggcatctggggcctctgtgaaagccaagaaccggaaaggcttcacggcgctgcactttgctgctcagaattctcacctggatcttgtgaagtaccttgtgaagaaaggtgttgacgtcacagcaaagaccaaaggtggtcagacagctctacatgtcgctgaggatgatgaagtgcgtgcgttcctgaaggagtgcgagcaatccttgaagaagggtgcagagctaccatcggagaaggatgattctgctgagaaagagggcgatagcaagtcttcaggtgaggttatgaaagatgaggaggatgcagagcagggcgagaagaggaaaagcgaattggttggtgcgtcgagtttgtcaggagtaaaaaaagccaaagtttctcttggtcatctagtttgtgaaaatgacatggacgaggaagaggagtgatttcgagcagccttgaccttgaggatgcaatagaagtgcacttagatggttccacttccacctgcacctgtgtgttttgttatgctagtcttagtctgtacggcgatcttgaatgtaaagacaagtacaaagttgaatgtcagttctcatgtgttgcatgaatgaaaattctaagggcttgtttggtaggacaaaagatccctataaaaaaaaaaaaaaaaaaagcggatttgtagctcctccccatgagcccccccaatttctataaatcggtttttt

SEQ ID NO: 203 - DNA, 2625 bp, Zea mays
  Clone ID: TF_ZmC19180_1
gaactatcgagattgggaacctcgaggccggccgggagtgagcttccaggccggggagagggactggccggcggaccgccgatggaaaactttggaggctcctaacttccaagataccaactagctcccagcctcccaccgtcttctttccacccttggctgatgctagggagatgggatttttggagctctaagacaaatagttctgctccttgcgccctgcgtgttcttgatctggcctctaagtttgttggctgttttctcgtgtttgaggtgatatctcgattctaaaaagctaccagatttcttctccctgtttgtatggacaaatttgggaatgaaccctagtctgtgtgcaaagcagccaaattggtgttcttgcggatcaaagctaaagctgcagcagttggtgaggatacaagagatgcagggagaaacaagagaagggcttgttagattctgcagagacactcttattggttgatattttttccatcaactccggccagatttgcggaacctcgcaattttaggagccatttgatcttggacatggagaagcaacccagcgtgcgacatggtgccctagagaaactgaagagcttccgggggatggagaagcagagaagcttcaagttcttgtccatggagaagcagcagagcttcaaaaggaacaaggacagccctgggaagcggggtgacaccgcgctccacctcgcggcgagagctggcagtgtcgcacatgttcagaagatccttgcggagtgtgatccagaactggtggtggagttagctggccgcacgaatcaagacggcgagactgcgttgtatgtgtctgctgagaaagggcatgttgaggttgtgtgtgagattttgaaggcttcggatgtgcagtcagccgggatcaaggccagtaacagcttcgatgcattccatattgcggcaaagcagggccatttggatgtcttgaaggagctgttacatgccttcccctcactagcaatgacaacaaattctgtaaatgccacagctttggacactgctgcaactcagggccacattgacattgttaatcttctgctagaaacagatgcaagccttgctaggattgcaaaaaataatggaaagacagttttgcattcagcagcaagaatgggtcatgtggaggtggtcactgcactgttaaataaggacccggggcttggtttcagaacagataagaagggacaaacagctctacacatggcttcaaaaggccaaaatgcagaaattctgcttgagttgttgaagcctgatgtctcagttatccatgtggaggacagcaaggggaatagaccattgcatgttgcaactcggaagggaaacaccattatggttcagaccctaatatcagttgaggggattgaaatcaatgcggttaatagagctggagagactgcttttgctattgcagataaacaaggtaatgaagagctcgtcaacatcctgagagaggtcggtggaggaactgcaaaagagcaagtaaatcctcctaatccagcaaagcagcttaagcagacagtcagcgatatcaggcatgatgttcaatcacagatgaagcaaacacgccagaccaagatgcaattccaaaaaatcaagaagaggattcagaagctccacattggtgggctaaacaatgccatcaactccaacactgttgttgcggtgcttattgccaccgttgcctttgctgccatattccaactccccggtaattttctggaggacatgactcaagcacctgacccagacatgaccttggggcaagcattgatagccagtgatccagcctttataatcttcttggttttcgacgctttggctctctttatctcgcttgctgtcgtagtagtccagacatctctaattgttgttgaacagaaggccaagaagaagatggtctttgtgataaacaagttgatgtggctcgcatgcctctgcatctcggcagccttcatagcgctaacctacgttgtcgtgggtcgagacgacgagtggctggcctggtgtactatggcaattggcactgttaccatggtggccactgtcggttccatgtgctactgcgttgtcgctcacaggatggaagagaagagcatgaggaagatcaggaggacctccatgagccagtcatggtccatatcaattgactcggaagcagagctgatgaacagtgagtacaagaagatgtatgccctttaggatgatgtccgtgcttgtcggctgagtcttgtatatattggtacccatttgcctgagaccagtccatggcattgagtgggattgactcaatcagaactatattttgtcctagaacatggcacctgtatgtaactgtagtcttgcagcctccagacatgaacctaggggtgaagtctaggtgataggtgtagtcacttttttgttggcaaaatacaaatattgccaagcatgatgtccctgtatcatgttttttgtgggtgtggatggcagtgaaaaatcaaaatcattagattgtatctgtatagtagaatagtatggaataagttgtctttatgtcaaaaaaaaaaaaaaaaaaaaaaaaaaaaaaccttatcgcgtgttttt

SEQ ID NO: 204 - DNA, 1768 bp, Zea mays
  Clone ID: TF_ZmC2241_1
ttgggaccctcgaggccggccgggccactcttcttctgccttcccgactctacctgacttcgcccgctctgagaaattcactctcaccaccaccgcgccgcctccactccccccaccccccggtctgaaacccaagcttccgcttctctcatggccgacgccaccgccgccctctcagctcggagcaaggtgcaggctttcctggaggctgcgcgcgccggcgacctccaatccctcaagaacctcgtcgcggcgctcgacgaggacggcacgggcgccgcctccgtcgccgccgccgtgcgcgacgccaacaagcgcaccgccctccacttcgcggcgatcggatgtcgcaccgacgtctgtgaattcctcatcggcgagctcggcctccctgtcgacccaaaggacgatgatggcgaaactccgctcatccatgcgacacgccagggccatctggacactgtcaagtatcttctcgaccatggagctgatccttcgctggccaccagcctaggagccacagcgctacaccatgctgcaggcatagggaacacggaactcatgaagcttctcctctccaagggagttgacgtcgagtcagaaagtgatgctggcactccccttgtgtgggctgctggtcatggcaaccaggatgctgtcaaacttctgcttcaacacaatgctaagttggagagctagtcgctggctaccgacatgtttgagtgcttcaagctaactgcatatgtttctctctcatgattgcaaccaaatactgaaaacgatgatggtgtcacagcattgttatctgctgttgctgcaggttccctcccatgcttggaggtcctaattgaggctggtgcaaacccaaatgtcaaggctggtggagcaaccccattgcatattgctgcagatagtggaaatatagaagtcatcaaatgtttgcttaaagctggagctgacccaaatacctgtgatgatgatgaattgaagccagttcaggttgctgcttggagaaataaccgtgaagctgttgaacttcttttaccgttaacatccccaattccaggtgtttcaaactggaacgtagatgggattatagaacacatgctccctaaagagtatgaggaaaagtctcaactgaaggaagcggcatctctgaaatcaggcctaacacaaactattgaggtgtcatctgaagcaaaaaagaggtccttggaagccaaatcaagaggtgatgatgccttcagaagaaaggactaccttgtagcggtggatgcttatacgcaggctacagagttggacccaactgatgcaacagtgctctcaaacagaagcctgtgctggctgcgggcagggcaagctgagcgtgctctggaggacgccaaagcatgccgtgcattgagaccagattgggcgaaagcctgctacagggaaggtgcggcgcatcgtctgttacagaggtttgaggaagccgcaaacgccttctatgagggggtgcagcttgagccggagaacacggagctcgtcaacgcattcagggaggccatcgaagccgggaggaagttccatggcgtcaacacgccaaactcaacacaatgagactttgctgtttggttggataggtagatgatgaagcggatggacatgaacgttgtcttagttggaagttggtgagatgatgaatgagatgataatgaaatttgaaagagcgaatttgcagatttattttgtgttttgtgattgttttcttaaacttgttttcttgcgt

SEQ ID NO: 205 - DNA, 1558 bp, Zea mays
  Clone ID: TF_ZmC32119_4
tgagaaacaggtgaaagaaaagctatattactggcttatccataagatacatgatgatggaaaaggtccaaatgtcctaggcaaggaaggacaaggtgccattcatttagtagccgcacttggttatgattgggctatcaaaccaatagttgcggcaggagtaaatataaacttcagggatattcgtggatggactgcgcttcactgggctgcatgttgtggaagggagcggacagttggtgccctgatagcaagcggagctgcatctggtgctttaacagatccaacgcagcagtatccatctggaagaactcctgctgatttagcatcagaaaatggtcacaaaggcattgctggttttcttgcagagtctgctttgacaagtcacctctcagctcttacattaaaagagtcgccaagtggcaatgtggaagaaatatgtggattaacagcagctgaaggttttgcagcatcaagttcttcccagcttgcttgtgttaattctcaggaagagtccttaaaagattcacttggtgcagttcgtaaatcaactcaagcagcagccagaatatttcaagcttttagggtggaatcattccacattcggctcgagattgaatatggagatgatgattgtggattgtctgatgaacgcacactttcacttgtttcccttagaaacccgaaatctggacacggtgattcacattctgctgctgttcgtattcaaaacaagttcagaggatggaaaggaagaaaagagtttatgcttatccggcagaaaattgtgaagatacaggcccatgtacgtggacatcaggtaaggaaaaactatcggaaggtagtctggtctgttggcatcgtggagaaagtcatactgaggtggaggagaaagggaaggggtctgcgaggtttccaacctgagaaacaacttgaaggtccatcatggcagatccaacctgcaaaggctgaggctgaggatgaatatgacttcttgaggatggcaggaaacaggctacaggcaggttggatagagcactggctcgtgtgcgttccatgaatcagtatcctgaagcaagagaccagttccgcaggctgcaagcctgtgtcaacagcctacgagagtcccaggcgatgcaggacaggatgatggctgattcacctggccccgatgggggtgatttcatgactgaattggaggagctatgccgggatgatggcgatgcccccatgtcgactatttcttgacatggagctttctatagatcagttaggcagtgacatgttctttcccagactagatgtaaattgttgttactaaatggtctctactccccgttgaaccccataatataatgatatatagcagctaatacatgggcttctccagattatgataattgatcagtataatttgtggaattattatattttaaagccaattaaggtttaacataataaaagtaagcgaaatccaattgattcaggtaaaaaaaaaaaaaaaaaaaaaaaaaaaaaaaaaaaaaagaaaagaaaaaaaaaaaaaaaaaaagcggcc

SEQ ID NO: 206 - DNA, 663 bp, Zea mays
  Clone ID: TF_LIB4171-023-R1-L1-H6
tattcggcacgagggctgaaacattcatgtccaccagctgaactagtttttgcatgcgcccctggccctctcatacctttcttgtactgacattagcttgaaagaaacgatcactgttcgatcagcagtttgcgaggcatggatggcgagggagagaggcgcatggtggatagcgagggacagatacacatggatccggcgttgtacatggcggcgacgcaggggaaagtgtcgatcctgaagcagctggcggatccggaggaacccagtgtcctcagcgccacgacgccccagctgaacacggcgctccacctcgccgcggtgcacggccacgccgagttcgctggcgaggtcctgggcatgaacgaggagctgctcgtcacccggaacggcgacggcgacaccccgctgcacctggcggccaaggcgggcaagctggaggtggccaggctgcttgtcaaccgcgccatagcgtggccggaggacaagaagagccctctcatcatgaccaacaaggcgggcaacaccgcgctgcacgaggcggtgcagtaccgcaagggcgccttgggcggtggtcctgctagacgccgaccccagcccgcggcacgacctcaacgagcagatggagtccccgctgcacatgggccgccgcgagggcctcgt

SEQ ID NO: 207 - DNA, 679 bp, Zea mays
  unsure (1)..(679): unsure at all n locations
  Clone ID: TF_LIB4704-004-R1-K1-A6
aaaaaaaaaaactcctctccccacntttccccatttttaccgcacatctctccttcctcggcgtctcgcacaccccagcaccttcgtctcccctcccctcccctcccctcccccaacaatcggaaccggatagaaagttcggcttcctcccggacgactcggcgcaagttcttccgacccgaggagcccctgttatgaacggcatgccgatctctgcgtcctctgcggcaagcgtcgacagtggcgcggtggcggccggcacacccatgaagaatgcaacggcggcggacgctctcgccgagatggcgagacatcttaccgtcgacacggaagacaccttcgcgggcctgctggagctcgccgctgacgacgacgcagaggggctgcgcctcgcgctggagcgcgcgccacctgccgccgcggacgaggctggcctctggtacggccgccggaaggtcctggagcaccgcaccccgctgatggtcgctgccacctatgggagccttgccgcgctccgcctgctagtgtccatctcgtatgtggacgtcaaccgccgctcgggcacggacggcaccactgccctccactgcgccgnctctggtggctcacggacggctgttgagtccgtcaagctgcttctgggagctggggcagacgctaacaccatggatgacgctgg

SEQ ID NO: 208 - DNA, 1192 bp, Zea mays
  Clone ID: TF_ZmC19180_3
aacctaataataagtgagcttccggtcggggagagggaccgccggtggaaaactttggaggcgcccaacttccaagatacccactagctcccagcctcccaccttgccctttccacccttcgctgatgctaggatgatgggatttttggagcgctaagacaatttgaggtgatatctcggttctaaaaatctgccagatttcttctccccgtttgtatggacaaatttgggaacgaaccctagtctgtgtgtggagcagccaaagtggcgtttatgcggagcaaagctaaagcggcagcagttggtgaggatacaggagaagatacagaagggcttgttagattctgtaaagacactcttattagctgataccttttccatcaactggggccggtttttcggaagtacgcccctcttggattaaagcctctcaatttcaggattcggcacaagcacaataccatcaagtgaacaagagccatttggtcttgggcatggagaagcaatccagcacccggcatggtgccctagagaaattgaagagcttccgggggatagagaagcagagaagcttcaagttcttgtccatggagaagcagcagagcttcaaaaggaacaaggacagcccggggaagcggggtgacaccgcactccaccttgcggcgagggctggcagtgttgcacatgtccagaggatccttgcggagtgtgatccagagctgctggtggagttagctgcccgccagaatcaggacggtgagactgctttgtatgtgtctgctgagaagggccatgtcgaagttgtgtgtgagattttgaaggcttctgatgtgcagtcagccgggatcaaggccagtaacagcttcgatgcattccatattgcggcaaagcagggccatttggctttggacactgctgcaactcagggccacgttgacattgttaatcttctgctagaaacagatgcaagccttgctaggattgcaagaaataatggcaagacagttttgcattcagcagcaagaatgggccatgtggaggtggtcactgcactgttaaataaggacccggggattgggtttagaacagataagaagggacaaacagctctacacatggcttcgaaaggccaaaatgcagaaattctgcttggagttgtgaagcctgatatctcagttatccatgtggagga

SEQ ID NO: 209 - DNA, 553 bp, Zea mays
  Clone ID: TF_LIB5116-069-A1-PF1-E4
cccacattcacgagttgagccgctgacactcgctcctcccactccctgtcctcctctccactccgacgaaaccctaccacctcgctccagtcccaccccgccgccatggtgcgccctcgccacgtattcgcctacgctgatgggacgccacaactggagctcctctgcgcggcgaccacgggcgacctcgctcacctcgagcgaatggtgaggaaactcgatggtggtcgcggccgccttgcggaggcggtggaagccgtcaaggatcacggcgctggggcactgcacctggccgcctcgggccaaaatttggaggtgtgcgagtatctggtcgaggatgtcggggtgaatgtggatgccgttgacgaagcaggaagaacacctctggtttgggcaattattgttaaaggtgggcaagtggatattgttaagtatcttcttgatcatggtgccaatccagataatgccgacagaacagggattactcctcttcacgaggccgtggaacgagggcactgtgaagtagtagaactcttgctctctagaggtcctt

SEQ ID NO: 210 - DNA, 2731 bp, Zea mays
  Clone ID: TF_ZmC13193_1
acatccttgagcatggagcagacataaatgctgtggatcacactggacaaacagcacttcactggagtgctgtacgtggtcatattcaagttgctgaactacttctgaaagaaggagctaaggtggatgctactgatttatacgggtatcaggccacgcatgttgcagcacagtatggtcagactgcattcatttaccacattgttgcaaaatggaatgctgatccagatatccctgataatgatggaaggagccctttacactgggctgcttataagggatttgcagactccatacggcttcttttgtttttggatgcttataggggacggcaagacaaagaaggttgtactccattacattgggctgctattcgggggaatcttgaggcatgcactgtcttagttcaggttggcaaaaaggatgatttgatggtgaaagacaaaactggcttaactccagcacagcttgctgccgataagaatcatcggcaagttgcatttttcctcgacaatgctagaagggtacacggcaaaggatgtggtgcgaacaccagatttgggaaattgtcaaaattagggctcgctcctcttctttggtgcaccattattggcatggttattacatacacacactctgttatatcaggacaatatgccatgactacgaaagcaccatttgggaaattcgcatggtcaggagtttttcttgcaactgctggcttggtcatgttctataaatgtagcaggaaagatccaggttacatcaacataaatgcaaggggctcgcaaaatcaaagggatgatgaaccgttgctgaagatggagttagaaaatcctgcacttctttctggcaactggtcacaactttgtataacctgcaaaatagtcagacctgttcgttcaaaacattgttctacatgtgatcgctgcgtggagcagtttgaccaccactgcccttgggtatctaattgcataggaaagaagaacaaatgggaattcttcatgttcctcactctagaagtttttgcaatgatcattactggctctgctgccattataagaattgtaagggatccaaattctccatcatcctttggtgcttggattcattattctgcgtttcagcatcctggggtggtttcatttctcgcattggattgttttcttttttttggtgttgcagttcttacagttgttcaagcatcacagatagcaaggaacattacaacaaatgagatggcaaactccatgagatatgcatacctcagaggcccaggtggcagattcaggaatccgtatgatcatgggattcgcaagaactgctctgacttcttgttaaatggatacaatgaggacactgaacggctagagcagacattgcccactgatgaggaaatgggaatgatacagatgacaagtgcagtttcgcagcagaacggtgacaatcatttacatcatggtaatggcactgaccatagttgcgctgtttcacaagcaaactcaaaacctcatagccaagtgggttcgtctcagtgttgtgaccacagtaagaggactgataggacaccgttgggcctaggattgggccttggacgaaacagtgcgtcccggcagtatgttcggtctcttatcccattgtgatccatcatttggcgatcatgtgtttgtttgactgtagattggatttgttcacttattctgttatacgtgctcttgacatggttcaccatggctgggcagggttaacgttgttgtgccatgagctccggaatactaagatatatctggtgttgtagtttagcgttgaactcagagaagttgaaggtaacgacctggtttgcgagtatcagctgatcagcagtctggaatcagagagcttgtgcagaaaatgtaagagttatggactcatggcagatgcagtagcatgagatgtcttcagaattgttgtgtacatcaggttctgtggtacccctattgtttagcgtgatacgagtttgggaaaaaaaagtagtcgtaaattgagaaaattgtaaattgattagtaagctcactgcaacactagctgttttcctagttttcattcatttttgggtctggttattgttatgaaccacggaaagaattttcggttttcgggtatgggtacctcagttatatttggtctggttatggtacttactggtggtgcatgtttgtgtgagtgcttagagtttaggctatggccatcagatcatgtatatgactatatgactgtgtaaaacactgttttttatctgattgtgtaaaacagtgtttttgtatcgtacactattgttttatagattgttattaagttttcttagtgcttcgtttttaaaaatccttccccatagatcaatgaagccccaacgaagcaacctttgtaacgttgtcacagtgactctatgtagggagaatgtgttgttcaagctgctgagtcatgatgataacattgtccctgtgacctttgtaaatcttgtatgtaatctttgagggtgatgaatgtaatatcgtacggattgtccgattgcttatgaatatatgctcgatgctgttccctgttgattgagtttgcatccacgctttggctttcaagcaagcccaatatgcacatgtaatgtacatcatgtatctctttgttaatatattagatgaatcttgatgttgtttcacccaccagcatggtatgacagggcggccgctcgcgatct

SEQ ID NO: 211 - DNA, 929 bp, Zea mays
  Clone ID: TF_ZmC10492_3
ccccccgggaaaacgccgctgcacgtcgccgccgagatggtgtgcccggacatggtcgccgtgctgctagaccaccacgccgaccccaacgtgcgcaccgtggagggcgtgacgccgctggacatcctccgcacgctcacctccgacttcctgttcaagggcgccgtgccggggctggcgcacgtggagcccaacaagctccggctctgcctcgagctggtgcagtcggcggccatggtcatgtcccgcgaggacgcgcacacggcggtcaaccccgcggccgcgcccatgtacggcgagccttccggaggcggcgccgtgtacagcgcgagcggcaccagctcgagcatggtgaacctcagcctggacaacaggatggtgtatctgaacctagggatggacgcgcagttcggcaagatggacgacggcggcgacggtgatgacggcgggggcagagggcaagggggcccgccttctttgttctccccgcatggctaccattgacacaagctggccggagcggctgctgctctacgactatctctccttgtaagctttagaactatttaattacatgttgttattcatatccccatttacaggagatgatgatgatggagataatccgttgccctctaaaaaaaaaaaaaaaaaaaaaaaaaaactcgagacacgctctcactctctctctctctatctatatatatatatatctatatatatatatatatagagagagagagagagagagagagagagagagagagagagagagagagagagagagagagagatcatgcatgcaaagtgatgcatcacaagagcttgggtcgatctttattggtgagttgtctagtctattggtggaggtgttgtttttggaaattgtaagaggtgttaagaggtaaaaaaatgtttttttggttggt

SEQ ID NO: 212 - DNA, 681 bp, Zea mays
  unsure (1)..(681): unsure at all n locations
  Clone ID: TF_LIB4171-052-R1-L1-H12
aattcggcacgagggtccaccccaccaggcaccagtccaccaccgacgcccgcacgcacgaggcacacgatggcctcgctggaggcggcggagacatcaccgccgtctacgcccaccaccagcgcgtccccctgcccgaccccgcgcccgctggctaccgcaccgccgaccatgggtgcggcgcttctccgcgccgcgcgcagcggcgacgagaggcagctcgtgaaagcgcttctggcggaccctgcggccccagaccttgagaccgccgccacagccggagggaacacgctcctccacgtggcggccgcgggcgggcacgtggacctcgcgttgctcctcctccgccgcgccccgcgcctcctcacggcgcgtaacgcggcgctcgacaccccgctccacctcgccgcacgcgcgggggcgcacaaggtcgtcgcgctcctcgccgcctcctcgtcctcgtcatcgtcctcaccagcttgctccctgcgcgccctgacccgggccacgaaccggcgcggggagacggcgctgcacgacgccgtgcggngcggccacgaggccgcggcgcgtgcgctggccaccgcggaccctggtctcggggggatgtgcggcggcgctgggagacgccgttttacatgcgtcggcggctgggtcctggnggatgctgcgcatgctctt

SEQ ID NO: 213 - DNA, 1387 bp, Zea mays
  Clone ID: TF_ZmC10492_1
cccacgactccgggcctttatatgctgcatgtgtgcttttgcaatgcgccgctgcttggtagttaccaaagcagctggccggcatggtggagaaggcgtcgatcgaggacgtgatgaaggtgctgatggcgtcgcggaagcaggacctgcaccagctgtggaccacgtgctcccacctcgtggccaagtccgggctgccgccggaggtgctcgccaagcacctccccatggacgtcgtgtccaagatcgacgagctccgcctcaagtcctcgctgtcccgccgctcgccgttcctcgcgcaccaccaccacccggcaccggggggcggcatggaggcctcgtccgcggccgacatcgacgaccaccacaagatccggcgcatgcggcgcgcgctcgactcctccgacgtggagctcgtgaagctcatggtgatgggcgaggggctgaacctggacgaggcgctggcgctgcactacgccgtggagaactgcagccgggaggtggtgaaggcgctgctggagctgggcgccgccgacgtgaaccacaccgcgggccccgccgggaagacgccgctccacgtggccgccgagatggtgtgccccgacatggtcgccgtgcttctcgaccaccacgccgaccccaacgtgcgcaccgtcgagggcgtgacgccgctggacatcctccgcacgctcacctccgacctcctcttcaagggcgccgtgccggggctcgcgcacatcgagcccaacaagctccggctctgcctcgagctcgtgcagtcggcggccatggtcatgtcccgcgaggacgcgcacacggcggtcaacgccgcgcccatgtacggcgagccttccggcggcggcggctgcggcgtgtacagtgcgagcggcaccagcagcacgagcttggtgaacctgaacctggacaacaggatggtgtacctgaacctagggatggacgcgcagttcggcaagatgggcgacggcgatgacggcgggggcagggggccgtcttctttgttctccccgcatggctaccattgacaagatggagcggccggctgctgctctactatctccttgtaagcttagaactaattaattacatgttgttaatcatatccacattacaggagatgaagaagatgatgattggaaagatggcgagacgatcctttaattttttgcactctatctatatatcatcatgtgactcttttagcagctagagacgattagagagagacagagagatcatgcatgcaaagtgatgcatcacaagagcttgggtcgatctttattggtgagttgtctagtctattgatggaggtgttgttttggaaattgtaagaggtgctaagaggtaaaaaaatgtttttttggttggt

SEQ ID NO: 214 - DNA, 1578 bp, Zea mays
  Clone ID: TF_ZmC12227_1
cattgggtccctcggggaaacccgggcatcctcctctcaagcctcgacgcagcacggcgcgccggcgcgggacgacggcatgacgccgccgtccatcttccaccaccatcgctgcctcgtctccctcccctccgcttccccgacctggacctcgtcccgtcgtctcatccatcaactcgcaaaacccacagtcctgtccctacatctgcgtccagtcttatcctcttccttcgcggttgccgccgtcggcgacgacgaggatgtcgtagtcggggattgcctcgtgttcgacgacgacgctttcgaggaaccggacctggacctcccctcgtccccgtggccgtcggctagcgcctcacgccacggccggaggtcggaggcaggcgagagcgacagcctggtgccggagaggtggaggcatgccgaggaggagatcaacctgacgaagaaggataagcgccgcatcgcgcacgggctgcggttcgggagccgcctcgagcggcgggcgcccccagctgttgctgctcctgatgaattccgcgcgtaccgcaaggggatgctgagcgctgagcgtgagcatgtttctcatgtataccgggggccgctggagaggactcctccgccggaagtgaaggaacatccaccgccggagccggagcctgggacgcgtgtggccccgaggaatccgaggatggggatgggcgttggcacccttgacgacattgatgagtttttcagaagtagggaatatgttcaggatgagatggaggacagcaagagtcctaagggccgtcagaagttgttctcaaatgaggagaagattcttctgaacaagcgagtgcctgatctggaaacagctacttctagtaaatggcttccacttcacacccttgctgcatctggtgatttctatctattgaatagccttttaaaacataacgtggacataaatgcgcttgataaggatggcttaccagcgatccacaaagcaattctttcaaagaaggctgctattatcaattatcttttaaggaactcagcaaatccattcatccaagataaagatggtgcgactctaatgcattatgcggtccaaacagcatgtagtcagaccataaagacacttttactgtacaatgttgacatcaaccgtccagatgattatggatggacacctttgcatcttgcggtacaaacacagaggactgacattgtgaagctgcttttaataaagggcgctgatagaactattagaacccaagatggattgaccccgttggagttgtgcctccggttgggtcatgatgtgcggacgtatgagcttatcaaactacttaaaagtttccgaggacaaaagcagcatgatttagtttagcaactggagggtgtgtgaccctctttgaaccagtgaggttaaccagtgtggtggccttctgggaggccagttttcaatgtaccattaatgattcatggaatcgctcctggtttgagataggtacatgccaacttcattgtatttgtatcatttatatatttcattggcctaaaccattggttgcaggaaatagtttaccccta

SEQ ID NO: 215 - DNA, 535 bp, Zea mays
  Clone ID: TF_LIB3958-013-Q1-N6-A12
gatggtggacaccctcgctctgctcatatgggatagtagagattctcaacagtatatatgctgcccctattacaaccggtcgcaggcccaatgattacaacaccagtcactgttgtgaatacgacaagaactgcgacgaggcccagcttgcggcgtagatggttggcccggtggtgtaacaatccccccgttgcgccgcagcttgaccccaaagagacgaacctgggaactcttggcaaagacgctcctcctcttcccacatagccatggagaccggccatccggaccacttgacgagcacctgatagcgtgggcgggtgccatgggagagtaaccgccgacgacgtaacaccttgcccatttttgctttcaacatttgccccatggtccatgagaataagagcaatttcagtttggttaaacaaagcagccaaatgcagcaaagtaaatccttgtttgtcgcagtagttagaatccactccctgtgtaagaagtttctttacacccttaacatccccgcctttaattgcttctc

SEQ ID NO: 216 - DNA, 285 bp, Zea mays
  Clone ID: TF_700344979H1
gcgctgcacagggctgccgcccgaggacacctgcttgccgtccagttgctggtcacccagggggccgaggtggatacgcgggacaccctgggcctcacacccctgcatcacgcctctcgggaaggccacgtggaggttgccggctgcctgctggacaggggtgcccaggtggatgctaccggctggctccgctagacccccctacacctggctgcagagcgagggcctgcggcgtaccgtggggcttctgctgagccgaggggccagccccaccctgcggacgca

SEQ ID NO: 217 - DNA, 796 bp, Zea mays
  Clone ID: TF_LIB5116-012-A1-PF1-A2
accctgcccctgtctcccgcggcgggggatctcatcccggccatcctctgcctcggagaccaccggatttccctatttggtttgatcatctttcagagtttttttgtgctatactttccttaattttcttcctggccgcggtccagtccaatccccatccacaaccgcagcccctcgctcttcgccgccgtggggattcccggcttgtcccccctagccggcgatcttccgtgctgcggctagttgggatttccttgctgtatcctcagctggagcaacccctaccgaaaccctctgttttgggcaagggaaccgctctcccacttcattccccaaatttgcaccgtccggcgagtccaaatggggatgcagcaatccaaggaggagctgctgtaccagcaggtgaactacggcaacatcgaggggattcggaacctccgggcgcagggcgcaggcgttgagtggattgacaaggaagggaagacgcccctgatggtcgccagcatgcgccctgatctgctgaatgtggctaaagctttgatcgaactgggtgcaaatgtgaatgcatatcggcctggatcacacgctgggactgcattgcaccatgctgccaaaaaaggacttgatccgactgtccatttacttctctcacatggagctaacccattcataacagatgatgactgcaataccgcacttgacctggctagagaaaagggtcatgtgaacgttgtaagggccatagagggacggatttctcttttttctggatggatgagggagaaatatggccctg

SEQ ID NO: 218 - DNA, 2927 bp, Zea mays
  Clone ID: TF_ZmC119_1900
cacaaatcaccaatttttatacacataatcacatagatatacaaatttaattagtattgcacaatgatagatccacatcacataaaccatcaacaagcaccacaacaaaatcattcacaaaacctacacatgttattatgttttgcacatatttacaaacactttacaaaatcattcacaaaagtactaacgcttcaagtgattcgcaaaagccttcattgagcaactcaacaggattttccatagatctttctctgcagcttttgccgcttcattgagcaactcaacaggattttccagataacttatgtattcagaagagagacgtggagaaatgtttatatccagctgaacatctttgtatggtactgggactaggcaaaactgatcaacacgagcaagtagttcagaataggaattatcttcttgaccatgtaagatgcatctcgcaatactgagaagtggtcaactctactgatgcaaccatcaggctcctgttattccagatcccatcgttattagtcgttcaggagaacgaataatgatcttccgtcgctatcagcccacgcgccgttttcttctgccgtccagagccgttcttctctcttcaaggttcttctctctcccgtcaagcctcttccttccatctcattttcttcaatctccatttccctcccctgctagtctcctcccctgctgcccggagatctgctgcccgtggtcccgcgccaaagcaggtggcggcggcgctgcacctccttctctccaaactccgcgtcttctcccttgctgctcgcggccccgcgccaaagcaggtggcggcggcgctgcgaccacaaccctagtccgcgccaaagcaggtggcttgtcgttgttgtagctggaaatgaagatgaagcaccaagccgtgaacttgtcgttgctgcaaatgaagatgaacacacgactgctactacgccacctgttttttgctcccagaaatgtgagcttgtgtgatagcttgtgaaactgctacctgtgtattgctcccagaaatgtgagcttgtgtaatagcttgtcaaactgctacctgtgtattgctccattgaaatgtgagcttgtgaactagcttgtgaactaaattgtggtacctgggaactaaattgtgaactagcttgtgaactgaaatgtgagctgcgaattttgttctgggatggcagtttattgctcccagattttgttctacctgttcaacctgtttattgctcccagattttgtgaactaaattgtgctcccagattttgtgaactaaattgtgctacctgttcactgggaaaatgagtttgttcccagatttttgtgttcagcgaatggacagtgaaatggacagcgaatgatatgggagcaataaactctggtagccaaaggcagattttgttcccagatttttgtgttcccagattttgttcccagattttgttcccggactctggtagccaatgacagtgaaaatgaaatgtgttcccagatttttgttcactgtccggaatactgcttcactgtccagaaacaacagcagcgaatggcagattcagcgaatggcagattcaagaacggcgcgattctctctgtacaaagactgggtgcgtctagtgcgggtaacggatgtgagacagcgtctgtttcagtgtaataaacatcatccttccctggtaatagaggattcatgtccattttagagtgtagtatcttctctggtttttcataatgtcgaatccctcgcctacgcctccgtttcgtcgaagccacgtctgcggtgtttcataatcccaaaattctcccatttccatgtagctatgtgcaaagcagtatttcccttcttgtcccgcacattgagaatggaaacatcagccatcagtaactcttccactacatctgtgttcttgcctttcacagccatgtgaagtgcagtttgtcccttcctatccttgatcggaacaattcctggatccctctctatgagtgccttgacaatacgatggtatccaatccttgcagcagtatgtagggatgtcttcccgttttttcgcacaatccttatgcagctatcatcagtgtccagtatagcatttaccacatccaagtgatccttgacaatatacaagtcacaaccccaggagagaagtgtacaggattccttgcttaagtgttatggtaggaacctcttctcgtcttctgttttgtctgacttgtcttccttcttctcttgctgtttaagaagagaaataaggaaaccttcatatttccacatacatatattactagactagtcaagattcgtaaatacaggatagcagttcatgtgaactgggttttgttgctttgggcatatttcattttcaccaaaccagtgtatccagaccacaaatgggtacacaacaatttgactcaatacctgctttgtataaggtatttgtgtgctctcaccaaggaatgttctactatttccattccataagatcaattgtgcttgtggaacataaagaactccatatgctatcctaaacagcaggggcagagctcagaaatcagatacttagacacaacaaccatggatacctataacttaaagtgacgaatagaaatactttaactagattttagagttactaatctagattatcgggcatagcacatcgactaaatcaagcaccacaccacttaatttaacaagtagagccttatcaaataacatagagttttgacaagtccacaatttttaaatctaaagacctaaaacactaatggatgatacttgctgattttaaatactaatcgacttccgttgtttaaaaaaaacttgttgtttatgacaagatttggtcaaacttaaaaactaaaacttgtttcgaagaccatgcacagtcaaataagtgtttttgaaaac

SEQ ID NO: 219 - DNA, 2891 bp, Zea mays
  Clone ID: TF_ZmC9687_1
cggacacgtgggctgaaagctgctaaggttggagatatgaatgttataaagatgctcctgatgggtaatgttgatgtcaatgaagccgactctgaaggaaacacagcacttcactggtgccttagtggtgcttcatgtaccaaggaaccaaggattgtgtggcttctgctcaagaatggcgcaagagttttccaggggaacaaattagggctcacaccagtacacagcgctgcagctaagggcaattacaaagctcttcagtcacttctgcttcatgcccaagattgtgttgatatacctaccaagaccaaagaaacgccattattttttgcagtgaagaatggttctgtggattgtgcaaaacttcttttgcgtttcggggctgataccaaagcccggaacctgagaaagcaaagacctattgatgtggcaacatcccaggacatgcgtttcatccttagctctgcaaatgtgttactattttcagggaaccataactcacctcaaaagaatcgtgtgatgagaaaggaaatttacaaagagcttggtgatgaatttgacgattttgacaaggattcctgtgatgaaagctacactgggcttaagacatcagtagggcaacgtgatttctgctccagtaatctttctgcacaagggcctaagagtaagagccaatatgttccaaaacaagcacaaggttcaaagtttgtgcctcggaataatcattggccgaagcatgattacactcgcaaaatttttgttggaggactcccaccttcagtagactcagaataccttattgaattcttcaatgctgagtttggtcctgtggaggaagcagtagtcatcggcataccaattggcaaccgagttcagtcccgaggttttggctttgtaaaatttgagagagaagaggatatgataagtgcaaaggaagctcatcatgtttacatgcttgggaagagagtggaggtaaaggatgctgttgctagagcatacttgcctttagaagaccaaagatatacttctttgaggcaattcatcaaggagcggccaaagatccacagggtgctggatggtgaactgactgaggaacacaacatccagaagcggcgaccattgccagaaaagtgtcttccatcctggttcgccggattcaggaagtggttacctggatttcttgaagatgaaacagcacgacttagaggagagaggtatccgttgagctccctgaagggtgatttcagagcgacttgcaggatggagcttgatcacaccgcacttggttatcctaagctaagtgactttatccgctccctccctggcatctgcagaatgtgtgtagttcctgttggaagtggacctgcaacgcacatggtcctccttccaccgctctcacgaccgaagtatgtacccctgctagagccttgttcctttgatcatgacgagcttgcagaatcagtatcagatcagcactccccacgatcaccacttaacactaacatcgcggatgactccccacgtaacactgacagccagcagggtgatgatgcatgcagtgagaccaatgttcagatccagcaagttgatgatgcatgcagtgagacttgtgttcagagtcagcatgactatgggaaaagccagcaggatggaagttcctccgacaatggtagcttactggacgatattcctgccagtactacaaagcttgatctgattgagtctgtaacttcagtaaagcctgctttgattgaacctgtacttccaagaaagcctgatctaattgactctgtacctccaagcaagcctgatttggttgagtgtgtacctccaaggcccaaattgattgagtccgggtttcttcctcaaaagaatgaatccgggcctgtacagaagcctaatttgcttggttttggaccttcaagaaatcttgagttgattgagtccaggccttcagcatgcttcattgatagtccttttgaaaggacagcagttactcctagcagctgcgaaggtgaaatgagattctctttcttccagtctcagtgggacaagtacctggcaccatatcccaggagtgactcctgcatcatatgtcgatcttgtgaagctgggatgcaacttgttccctgctttcataagatatgtgttgcgtgcatgatgaggtgcaatgtcagagcatgtatggtttgtggcacttctgtaagtggagttaagtcatcccctgcagtggatgcgacatacagatacatgggactcaccgagcgtgttttagatctgagatgccagttgatggtggtctgccgtggagctgaggcaatagtcagatgctcaccatgtatgcacaccatcgcttgccggggttgcttccttgcctcagtgacactactgaaatcctgcaccacctgtggctgcatggttgaacacttcaagatcgtttgacaagacttatctcccaatacacagtagtattactaagcaatctaaggtatagaataaagcaagcagtcctacgatctgaaggggagatctgattactctcgttcggttttgccacacttgtgggatgcgctaacaggctattttggtagtggtataggcaccctcgctcttgtgagcctgaggtgctctcttttgctccctttctgttcttccgtagaaacactttttcagtatcagacatgctcgatttatatgctattgctatttctgcttctatgagcttgttatggtatggcactagcaagttctcggtaatcttccatgtaaaacccctcatctctgttatatggcactttttctatgtaaacctgtgtaagtactactagtatcaaaaatggatcttttatgcatcaaaaaaaaaaaaaaaaaaactcgagagtacttctaga

SEQ ID NO: 220 - DNA, 1649 bp, Zea mays
  Clone ID: TF_ZmC16077_1
ttgggtacctcgaggcgggccgggatttttttccaacaatcagtcagtcacaagaaaggaacaacatgaaagtgatctccatgttggaaacctaaaaacaagggagagaaaaaaaaaactcgcatcgcgtccttggttcctcgcattagccacccactggattttcttgccaacgagcttcgactacaccaacgccgcttcgtcccagtgcttgctaatcatcggctcctcttaattgcagcaaccaccacgcttcgtgttttcagatcaaagaagtgggggaacaacacagatttggagcggcacgccagcaatacggaccgggggtgacctgaggcgtggagatttttggccgctgcctgcatctccacgtcgcggtcccaatcaagatcattatttctttctccttccttgtccccgcccaaatcgcaaggcttcgttgcgaatcgcccttggcgtggccccaggattcgacgccccagcgccctcgctggaatcgtgggcgctgtggaggaggactcgaggcggccgtcgcgcttgtctcgtctctcatcaatctcactctctctctggtctctctctttttttaactgcggggattcgccctgatttagaggagcgagttgctggtctcggcgccgtctagctcgtcccggaccgacgatttggggcagggcaggtccaaaggcagcagcatcatggaagattgagaaaatttggaggcatctactacaaggttttcctgtgtgccctcaagacagggcgctgtgccgtgtgggcctcctcttgggcatccatggggttcctcagccttgtgggcaactcctttgggtgctctgcttccggtgagcgtcttgtctcagctgcccgcgacggcgacctgcaggaggcacgcgcactcctccaatacaaccctcgccttgcccggtactccacgttcggcggccggaactcaccgctgcactatgccgcggcgcaaggccaccatgagattgtctctctgttgcttgaatccggtgttgagatcaaccttaggaattacagggggcagactgctttgatgcaagcatgccaatatggccactgggaggttgttcaaacactgatacttttcaatgcaaatgtgcacaggacagattatctgaacggtggaactgctctccattttgctgcactgcatggtcatgcccgatgcctccgtcttgtgcttgcagattatgttccaagcgtaccgaatttctgcaccctggtgaatcataagtcatctgaagaagattcagctgctgattttgatcatgagtatgcaggatagctagcatgttttctctgtactagtttattttagtgcacaaatcatgtgatagtatgtctttgttaccagtgctttggtcaagatggtgaatcagaaggcggatggaggtttaaccccacttcatatggcagcattaaacgggcatgtagagtgcgtgcaattgttgctggacttaggggcatctgtttctgaggtcactattgaggatggaacaactatagacttaataggtatcacttttgcctttttggtcgcatactcttgttgtaagtgcttaaccttggtgagaactttgtagtaagcaaatcaacaccaacctatatgattctttgtcttg

SEQ ID NO: 221 - DNA, 1629 bp, Zea mays
  Clone ID: TF_ZmC30397_1
ccggccgggtgctgatcggcagggccagtttgctgaaaacttgataaagggaaacgcatacagactggcttctaaataaagttggtatgggtggcaagggacccagtgtgttagatgatgaagggcagggcgtgcttcacttagcagctgcacttggatatgattgggctataaggccaacacttgctgctggcgtgaatattaatttcagagatattcatggctggactgcactccattgggctgccttttgtggccgagagagtactgtagttgcgcttattgcactgggagcagctcctggagctttgacagacccaactcccgatttccctggaagtacaccagcagatcttgcatcttctaatggtcaaaagggaatatctggtttcttggcagagtgttctctgaccagtcatcttcaggtccttaatctgaaggaagctaatatggctcaaatatctggtctacctggtattggagatgttaccgagagagattcactgcagcctccaagtggagattcattgggtcctgttcgaaatgctactcaagctgctgcgcggatatatcaagttttcagggtgcaatccttccagagaaagcaagcggctcaatatgaggataaaggtggcatgtctgatgagcgtgctctctcactcctttctgtcaagccacccaagtcagggcagcttgatcctctgcactctgctgcaactcgcatacaaaataagttcagaggatggaaggggagaaaggaatttcttcttattaggcagcgaattgtgaagatccaggctcatgtgcgaggtcaccaagtgaggaagcattatcggaaaatagtttggtctgttgggatcgtggagaaagttatattgcgttggaggcgtagaggggctgggttacgtgggtttcggtctcaagaaggatcagtggagagcagtagtggcggaacaagtagcagttcgatccaaaataagtcttctggagatgattacgattttctgcaagaaggacgaaaacagactgaagaacggctccagaaagctcttgcaagagtgaagtccatggctcagtacccggaagcaagagatcagtaccagaggattttcactgtcgtgtcaaaaatgcaggagtctcaggctatgcaagaaaagatgccggaggagtcagcagagatggacatgagtgaattcaaggaactgtgggatgacgatgcacctatcccgggttatttttagtgtggaaacctgttttgttggatttatttctctgtagattgctccgtttgtcttgagtgctactgaattgatggcacaaatggctgataacccaaagtagcgttgctggtgcatgatctgacatgtttggatttggacttaggtgtggtatttcttttgccttatgtacagtagaatattatctacatttgaaggagccttgtatttactgtgtgaaatcggtgtaaagagtttgatatcagagatcttacccagacttaacggttgcatgttactgcagtgcagcagttaggagtttgaggctttttgcacggaaaaaaaaaaaaaaaaaaaaaaaaaaaaaaaaaaaaaaaaaaaaagggcgccgcttaaggatcagctacgacgc

SEQ ID NO: 222 - DNA, 563 bp, Zea mays
  unsure (1)..(563): unsure at all n locations
  Clone ID: TF_LIB4073-023-Q1-K1-E8
gnaaatcgttaaattcctggtagagttaggttgcgacgtgaatgctcaggactcggacggctggacgccgctgcactgcgccgcgtcctgcaacaacctagctatggtgcgcttcctcgtcgataatggcgcgtgtatattcgcaaccacgctgtctgaccacgagacggcggccgagaagtgcgaagaggacgaggagggcttcgacggctgctccgagtatctttacagtgtacaagaaaaactaggcataatgaacagcggccttgtctacgcggtgttctcgtacacggcggcgcggagcgacgagctgacgttcgagacgggcgggcgcctgcacgtgctgcgcaagggcgacgacagcgagcgcgagtggtggtggtgccgcgacgacgccggcaacgagggatatgtgcctaggaacttgcttgggttatatccacgagtaaccacacagcaagattaagtcttgaatttatgacctgattaatttgtaaatatctattagttacttttattttgtatgtatttatatcactaaaagtaacgacgctgtatacaat

SEQ ID NO: 223 - DNA, 2986 bp, Zea mays
  Clone ID: TF_ZmC13638_1
cggtcccagctgctgttttttcttcgtcgaatccccgtccgcgagctgcagcgcaccacagtcccaaactcctgatcgatcctagctgctaggctggagcaggaattgaagcaggcagctagctagctagcattgcgtgatgaagaagaacaactcgagcattgagagcacgggcggcggcgtcggcggctccggcggcacggtgtcgggatccggctccggctccttcaacctccggaacctgtccaaggtcatcctcccgccgctcggcgggccgtccggcggccaaagccagtcgcatggcgggtcggacaagtgggtcgtctcgccgctcgactccagatacaggtggtgggatacgttcatggtggtcctggtggcgtactcggcgtgggtgtacccgttcgaggtggccttcatgaacgcgtcccccaagggcgggctggaggtggcggacatcgtcgtggacctcttcttcgccgtcgacatagtgctcaccttcttcgttgcctacatcgacggcaggacccagctcctcgtccgtgacaggaagaagataacactcaggtacctatcgacgttcttcatcatggacgtggcatcgacgatcccgttccagggccttgcctacctcatcaccggcgaggtcagggaaaacgccgtgtacagtatgctgggcgtcctacgcctttggcgtctgcgaagggtcaagcagttcttcaccaggctcgagaaggacatccgcttcagctacttctggatccgcagcgcgcgtctcgtcgcggtgaccttgttcctggtccactgcgccgggtgcctgtactacctgatcgccgaccggtacccggaccggcagaagacgtggatcggcgcggtgatccccaacttccggcaggccagcctgcggatccgctacatctcttccatctactggtccatcaccaccatgaccaccgtcggctacggcgacctgcacgcccagaacaacgtcgagatgatcttcaacattttctacatgctcttcaacctcgggctcaccgcctacctcatcggcaacatgaccaacctcgtcgtcgagggcacccgccgcaccatggagtttaggaacagcatcagggcggcgtcgagcttcgtgggccggaaccacctgcctccgcggctgaagcagcagatcctggcctacatgtgcctcaagttcagggcggagagcctgaaccagcagcagctcatggaccagctgcccaagtccatctgcaagagcatctgcgagcacctcttcgtgccggtcgtcaaggacgtctacctcttcaggggggtctcaagagaaatgctcctgtccctggtcaccaagatgaaaccggagtacatcccgcccaaggaggacgtgatagtgcagaacgaggccccggacgacgtgtacgtcgtcgtctccggcgaggtggaggtcatactgttcgacggcatctacgagcaggtgcaggccacgctgggggcgcgggacatcttcggcgaggtgagcgcgctgagcgaccgggcgcaggccttcacgttccggacgaggactctcagccagctgctgcggctgaagcaggctacgctcaaggaggccatgcagagcaggcccgaagacagcgtcgtcgtcatcaagaacttcctcaagcatcaggtcgagatgcatggcatgaaggtcgaggacttgctgggagacaacaccggcgagcacgacgacgacgcgaatgtgctgacggtcgccgcgatgggaaacagcggcttactcgaggacctcctcagggcaggcaaggccgccgacgtcggtgacgccaagggcagaacagcattgcacatcgcggcgtccaaggggtacgaggactgcgtgctggtgctactcaagcacgcgtgcaatgtgaacatcagggacgcgcagggcaacacggcgatgtggaacgccatcgcggcggggcaccacaagatcttcaacctcctgtaccaattcgggcgcgcgtcgaacccgcgcgccggcggagacgtgatgtgcctcgcggcgcgccgcggccacctcggcgcgctccaggagctcctcaagctcggcctggacgtggactcggaggaccacgacggcgccaccgcgctgcgcgtcgcgatggccgagggccacgcggatgcggccaggttcctgatcttgaacggggccagcgtggacaaggcgagcctcgacgacgacgacggctcaggttcaggctccggctctggcgccgcgcggctagcaatgtcgcccaccgagctgcgcgagctgctgcagaagcgggagctcggccactcgataacgatccacgactcgccagcggtggtcccgaacggcggctcgtcggggcacagccgtccaggcagattacagagcacaagttcggacagccagcgctggcctcgggtgagcgtatacaagggccaccctttcctcagaaaccgcacctctgaagctggcaagctgatcaacctaccaggcaccatggaagaattcaaagtcatcgtcggtgagaaactgaaagttgacgcggagaaggcgttgatcgtgagcgacgaaggagcggagatcgactcgatcgacgtgatccgggacaacgacaagctgttcatggtcaccgaagaagatctgaggcggctggcatcaatggactggctgtcgtgcgagtgatttggttcctcccaagataattggaggctaaatatagaatacagtacaagagtattgtgcttctactatgtctaggattgatagattgatgacaactactgagtggcatgagctctatccagcgactaatttgcatgcaatgtgtaccatgagatcggaccactgtccgttattaatgcagggtcattcttcttgtaaattcaaaaaaaaaaatcataggccctcatattgggtacacacagacggttcaaagatgtagttcaacaagctaaaaaaaaaaaaaaaaaagcggcc

SEQ ID NO: 224 - DNA, 1397 bp, Zea mays
  Clone ID: TF_ZmC35644_2
ccacgcgtccggctacgcgttggcactgcagatacccctcatggacaagcttctgaacagcggtgttgacgtcaacttagttgatagagtaagttacgtgcttatgattttcattcttcttttgtatcagaataaccccatctgcgaaggtatagttaactacataagtgttgctgatagagatggcttcacctctcttcacaaggctgtcatagggaaaaaagaggctgtcattagccatctcctaagaaaaggggcaaatccccatgttagagatagggatggagccacaccattacattatgctgttcaagctggtgccctgcaaaccgtgaagttactgattaagtacaaggttgatgtcaatgttgccgataatgatggatggacaccactccatttagccatacagagtaggaatagagatatagctaaggtcttgcttgtcaatggtgcggataagacaagaagaaccaaggatgggaggactgcgctggatctaagtctatgctttggaagggatttcaagtcatatgatcttgcaaagcttgtcaagcttattccagcaaacagaggtgcgtgatttcgctctgccatgaatctgagggaaagaaagtccaaaagttagccaatgcagcagcctcatacgacccatgcatagcttatgaagaagggtccaggagccgcgtgccgccgtgccggtcatcattcatttttttttcttgaccgccaactcaaacgatctgacagattgctctacaattgcgccgttagatttcagtgtccatggtctgtagcctgttcgacgtgactcgaaaaatgaacctatggatgtacatgcaacagtcttccggctgttgtgttcatttgttttgttcaaaaaaaaaaaaaaaaaaaaaaaaaaaaaaaaaaaaaagctcgggacctcgtgctctaagtctatgctttggaagggatttcaagtcatatgatcttgcaaagcttgtcaagcttattccagcaaatagaggagcatgatttcgctctgccatgaatctgagggaaagaaagtccaaaagttagccaatgcagcagccttatacgacccatgcatagcttatgaagaagggtccaggagccgcgtgccgccgtgccggtcatcattcattttttttcttggccgccaactcgaacgatctgacagattgctctacaattgcgccgttagatttcagtgtcatggtctgtagcctgttcgacgtgactccaaccaccccacctatggatgtacatgcaacagtcctaaagctgttgtgttcatttgttttgttcaatatgggccagggccaccaaaacaagatctgaattgtaactgttattaaccttcagcatatgtgtacacattatttttgatgtaa

SEQ ID NO: 225 - DNA, 1992 bp, Zea mays
  unsure (1)..(1992): unsure at all n locations
  Clone ID: TF_ZmC16578_1
tccgcccggaaaaaaaaaaaaaaaaaaaaaaaaaaaacccgtcccggccggccgccggccgggagcgctggactcccccctgctctctcccagtcccaggacagtcccgtcagcagccacttccccggcccctcccgctcctgctcgccggaggccgggccggcggcgatggggcacggcgctagctgcggccgaccaagcgaggaggtagacttcttcggcgcggcgcagtccggggacatggcccgcctcgccgccgctcttcgctcccgccccaccttgctcagccgcaccacgctcttcgaccgcctctccgcgctccacatcgccgccgcacacggccacctccaggtggtctccctggcattggatctttgcgtgcaccccgacgtcgttaaccgccacaagcagacggcgttgatgctctcggcgatgcacgggaagaccgactgcgtccgccggctgctcgacgccggcgccaatatcgtgatgttcgattcctcgcacgggcggacgtgcctgcactacgcggcgtactacgggcacgcggactgcctccggaccatcctctcggcggcggccaagtccgcgccggtctcggaatcctgggggttcgcgcgcttcgtgaacgtgcgggacgacaccggagcgacgccgctgcacctcgcggcgaggcagggctggcggcgctgcgtccacgtcctactcgagaacggcgccatcgtgtctgcttccagtggcgccttcggattcccgggcagcacgccgctgcatttggccgcgcgcggcggcaacctggactgcgtccggcaactgctgtcctggggcgccgaccgcctccagcgagactccgtcgggagaattccgtatgaggtcgccgcgaagcgagggcacgtcgcgtgcgcggcgctgctgaacccgtcatccgcggagccccttgtctggccgtccgctctcaagttcatcagcgagctggaacccgatgccaaatctttgctcgaagcagccctgatggaggccaacagagagagggagaggaggatcctgaaaggcgccaagaatgcattgccctcgccatcgcaccccgatgacggcgctcatgacaccgccatagctgaggctagcgacgcggaggtgtgcagcatctgcttcgagcaggcgtgcagcatcgaggtccgggagtgcgggcaccagatgtgctcggcgtgcacgctggcgctgtgctgccacgccaagcccaacccggcgacgcagtcccagccgctgccgacctgcccgttctgccgcggcggcatcgcccggctggtggtggccacgcggacgagggccggcgacgacgaggagcggtgcaagctggagtctcccaggcactgccggtcccgccggtccatgaacctcagcggcgacgcgggcagcaccagcaccctcatgggcagcatcgcctcctccatcggcaagatgggccgccggcgaacagagagcagcgagcaggtcgacgacaagccgtagcaaaatcattgtttcctttcatgcatccatccatgcgtaatccacatgaaatcggtgcgtatgataatcctgcaatgtcggcgtcgaacaaggcagcttttgtagattattttttggcaagtgagctattcacctgtgtaggttcattcaagagagagtctgtgcgctgacgtgctgtctaggctagatccgatcagcgatgatccgaataagcagctcgtccttgcctgtcagcccccatgcggccatgctccccgtggtccgtggatggagttcttgaaaggttgctgagaaaacatgcctgattcgcagaggcctggcccggcatggcaatgagaaacggtacaaatccatgaggctgattcatatatgatttgcccgaataggggcagcgccgctcaggttttggccagttgccgctctcagaatttagtcccaatcacatcttgattctggttctgaattnnnnaaaanaaaaanaaa

SEQ ID NO: 226 - DNA, 771 bp, Zea mays
  Clone ID: TF_ZmC3009_1
gacgtcgtcaaggcgctgctggagctcggcgccgccgacgtcaactgccgcgccggccccacggggaagaccgcgctgcacctggccgtcgagatggtgtcccccgacatggtgtccgtgctcctcgaccaccacgccgaccccagcgcccggacgctggacggcgtcaccccgctcgacgtgctccgcggcctcacctccgagttcctcttcaggggcgccgtgccggggctcacgcacatcgagcccaacaagctgaggctctgccttgagctcgtgcagtccgcggtgatggtgaccacgcgcgacgacgacgccggggcagggggaggaggaagcgatgccgccgacgacagcttggtgagcctcaccatgaactccacgctcatgtaccagggccaggagatagcgggggcgatggccggcgaggccaggaaagggagcggcggcggccgagggagcccgtccaacttgtacttccccactgccttcccataataagtatttagtttccttcatcaagcaagcaatgccttttgttttcatacatatatgcatccatccatccaaagatgatggatcttcaatttcgttgtattagatttttaatctgcattgtgatgtgaggatgcatgatggtggtgtggctagctagatactaatgcaagaatttcatggtatttgatgtggattaattgttccatgcatcttagtacatgtaaatgatccgtctattggtctgggcagcaactgttttactttactttgttc

SEQ ID NO: 227 - DNA, 1767 bp, Zea mays
  Clone ID: TF_ZmC26105_1
gtcgccgccctgcccaaggcggcctgcctctgcgtcgacgaggacgcctgcgcgcacgtcggctgccgccccgccgtcgccttcatggcgcaggtcctcttcgccgcgtccaccttcgacgtcgccgagctcaccaatctcttccagcggcggctccttgatgtccttgataaggttgaagtggacaacctcccattggtcttatctgttgccaacttatgcagcaaatcttgtgtgaaactgcttgagaggtgccttgatgtagtagttcggtcaaaccttgatatgatttctcttgaaaaaaagttgcctccagatgttgagaaagaaattgttgatgcaagggtaagccttggattagtttcaccggaagacaagggcttccctaacatacatgtaagaagaatacacagagcactggattctgatgacgtggagctagtccggatgctactcaaggaaggaaaaactaatctcgatgatgcatatgcattacactatgccgtcgaacattgcgactcaaagatcacaacagaacttctggatctcgcgcttgcagatgtcaatcataggaacccaagaggttatacggtccttcacattgctgctatgaggagggaacctaaaatcattgtctctcttttgaccaagggagctcggccatcagacctcacatttgatgacagaaaagcagtgcagatctccaaacgacttacaaagcatggggattactttgggcctactgaggacggaaagccttctcctaaagatagattatgtattgaggtactagagcaagctgaaagaagggacccgcaacttggagaagcatcagtttctcttgcgatagaaggagactctgcgcgtgggaggctactctaccttgaaaaccgagttgctctagcaagaatactgtttcctatggaggcaagggtagcaatggacattgctcaagtcgatggaacactggaattcacccttgtttctagtgtgaatctgcctgccgagatacaacggacagttgacctgaacgatactcctttcacaatgaaggaagaacacctggctcggatgagagccctatccaagacagtggaagtcgggaagcgtttcttcccgcggtgttcgaaggtacttgacacgatcatggacgacgaagccgagatggcttccctcgggcgagacacatccgcggagaagaagaggaggttccatgacctgcaagacctggtccagaaggcattcagcgaggacaaggaggagaacgacaggtccgcggcgcggtcaccttcctcctcgtcgacgacgacgacgtcgatcggggccgtccggcctcggaggtgaaagggaaaacatgcatgggttctgtttccgtcccgccattttggtagccgatgcggtggccacatagagaccgtaatcatgctcacttttgctggcgtatagcattaatgcagaacacgtatactaactaactatataatatacgagtaggtgtagatcggtactggaggttgtaatggcagtagcgaaacatagtgcattctggcgggcgtgtgtgtcgagcaggtagctggctgctcttgattgtaatggcgttttgagcagctaactaggatccctcttcacttcactcgaaaagggtctggcatggcttgtggaattgtggtgtgctggatagtgtcaggttcagtgtcgcaaaccctgaagaaatgcaaacatgtagtgttgccctatctaccaaaagccaaggggaagtgtttgtcc

SEQ ID NO: 228 - DNA, 830 bp, Zea mays
  unsure (1)..(830): unsure at all n locations
  Clone ID: TF_LIB4980-056-A1-K1-B8
aggccggccgggccgggttccaaaatggggtcgccacgaaggaaaaattcagtctcgtctcgccttcaatttcccatccatttctcccttccccgacccgaaccaccacgtattaaaatctgccccctcctgccactgccagcgaccaatccaatccctacctgcccgggaaccacccgtcgggctcctcccgccctcctcgccgcatctgcatgcggcggggatctccgggttcgctccgtcaccggagccccaatcaccgccacctcatccaagcccccgaatcccccgggcgcgcgcagcacaaccttgccgcgatcgcgcgcgggaaccgccgctgattgggtcgtgaaagctcgattttgggcgattttgattcggagaacccgccgtcattcgattttggcgcgcgttgcgagccgggatggggttgcagcagtccaaagaggaactgctgtaccagcaggtcaactacggcaacgtcgacgggattcggacgctccgggggcaaggcgctggtctcgagtggatagacaaggaagggaagacgcccctgatgcttgcctgtatgcgtcccgatctgttcgacgtggccaaggtgctgatcgagttgggagctaatgtgaatgcctacaggcctgggtcacactgtgggacagcattgcaccatgctgccaaganaggacttcagcagactgtccatttactactctcacatggagctaatccgtccataccnaacgatgattgcaatactgccctcgaattggcaagagaaaagggtcatgtgaatggtgtacgtgccatagagggacgactttgtctttttt

SEQ ID NO: 229 - DNA, 493 bp, Zea mays
  Clone ID: TF_LIB4729-023-R1-K1-C10
ccctcgcaggccttccgggtgagcaagaaatggagcaatcggaaggaagcgctagaacaacccgaccgccgccgccgccgcctcagctactcgcctggtgatgggcgtcgaactggcgcaaccgaccgccgccgcggctgcggtgaccaccgctgagcaggctcaggatctcatcgacgccgctaggtatgacgacttggaggacgtcgtcgccctgttctccgctggtgtctcgctggactccacagattcgcaaggccgcacagctcttcacatggcttctgccaatggtcaccttgctatggtggaatacttgattcaaaatggagcgaatgttaatgccaccaacatggagaagaacacaccactccactgggcatgccttaatggacgtatagaggtaatcagggctttgatctcagcgggggctagcgtgagtgctctgaacagccacgagaaaacgccaatggacgaagcggtgaccacaggcaag

SEQ ID NO: 230 - DNA, 788 bp, Zea mays
  Clone ID: TF_LIB4764-089-A1-K1-G1
gggtacctcgaggccggccgggagacaaagtgtggcaattggagtaactcgcctggtgatgggcgtcgaactggcgcaaccgaccgccgccgcggctgcggtgaccaccgctgagcaggctcaggatctcatcgacgccgctaggtatgacgacttggaggacgtcgtcgccctgttctccgctggtgtctcgctggactccacagattcgcaaggccgcacagctcttcacatggcttctgccaatggtcaccttgctatggtggaatacttgattcaaaatggagcgaatgttaatgccaccaacatggagaagaacacaccactccactgggcatgccttaatggacgtatagaggtaatcagggctttgatctcagcgggggccagcgtgagtgctctgaacagccacgagaaaacgccaatggacgaagcggtgaccacaggcaagatgcacgtgatcgacgcgatcggtgcggcagtagctcaagccgagctcgacggcgttactgtctcctaaaaggacctgatgagtacctggagctttgaatgacttgcagccttgttcttatctcacagcggttctgtctgtatcactcgcgaaacctgaatcccccgacgggccagtatccgggcaatatctatactgacggcaatcgcctgttagtgtcattggcacgaggacccgacctgtcgttgtaaaccagatgtgcagatgtcaaagatcaggattttctcctacaaatgttgtagggcccgttgcttgttctccctggccaccttcgttt

SEQ ID NO: 231 - DNA, 2639 bp, Zea mays
  Clone ID: TF_ZmC6144_1
ccggaaccaaaacccccggtcgacccagcgtccgacgacatggcacctttgcaccacgctactgccctgcctactactagtactgtctctttgaaccactttggtggcctaatcccgggcccctctgatgatggcttatgagccccagctttgcgcttgcaggcactgcacggtctggttcttgttcctgagcagttgagctgcgcacaccgacttcttttgcacaaggtacagcagcgcaggcgcagcggcagcccgccgctggatctctcccgaggctccggcgatggagcggtcctgctacttcccgctgcggtgggagagcacgggcgaccagtggtggtacgcgtcgccgatagactgggcggcggccgacggccactacgacatcgtccgccagctgctgcacctcgaccccaacctgctcatcaagctcacctccctccgccggatccgccgcctcgaggcgctgtgggacgacgacgcccgcttcgccgacgcggcccggaaccgcgcgtccgtcgcccgcagcctgctgctggagtgcgagtgcaggaaccaccgccccggcgccggggagaacacgctgctccgggccgggtacggcggctgggtgctctacgcggcggcgtcggccggggacgccgcgttcgtgcgggagctgctggagagggacccgctgctcgtgttcggcgagggcgagtacggcgtcacggacatgttctacgcggcagccaggggcgggagcgcggacgtgttcaggctgctgctcgaccacgccatgtcgccgaggtgctcgacgagttgccggaacggcgaagccagcgccaggcgcagctccgtgttccggcttgagatgatgagccgggccgtccacgccgcggcgaggggcgggagcgtggagatgctcagggagctgctcgacgagtccagcgtgtcgacgtatctcgacatccgtggatccaccgtgctgcatgccgccgctgggagagggcagctgcaggttgtcaagtaccttgtggcctctttcgacataatcaattcgactgataatcacgggaacacagcgctgcatgtagcggcctaccgagggcaccaacctgtcgtggaagccttggttgctgcgtctccatcaaccttgtcagttgtcaacaacgccggtgacacgtttctccactcggcagttacaggattcaggaccccaggattccgacggctcgaccgccagttggagctgatgaggtacctcatacgcgagagaaccgcggatatccagaagatcatcaacctgagaaacgacgcgggccttacagctcttcacctggctgtggttggctgcgcacacccggatctcgtcgagctactgatggccaccccgtccatcgacctgaacgctgaagacgctaatggcatgaccgcgctggcgctgctgaagcagcagctgcgctcagcgacgtccgaccggctcatcaagcagatcgtctctgccggaggggtcttgaactccagcatcctgagaacccggtcagccatcgcttctcagatcaagatgcagggcgggatcgcgagcagccccggcaccactttcaaggtatcggatgcggagatattcctgttctccggcatgggagcggcggagtctctgaggccaagctcctgctccagcaacgggaaggatgatgaccctactcacgcagacgcagactgcgccgagaaccgtggatcgtcggagaagaggctgagctccgcgagccgggccaaagaccgcctcaagatgatgctgagatggcctcgccacaaggacaagacgcccaagaagtcagaggacagcagcccgctggggtcgatcagcaggctgaacgagcacggggccgagacccctgctccgctgaggcagaagtttaccaagacgacggcgctcaacggcaagcggaccctagcggtgaagagctccaccccgagctcctcatccaccaagaagaagctcaacacgaagctcatccacggcatcatggaggccatgccacagctggcgccatctacggcgcggtccgcgtccccgacggacactttcctgaggtcctcggtatcgtccacgccgcagccgctggcgaagctgaaggacatctgcctcgacgacgagatctccatggtgacgccgcccgccggcaggctgaaggatagtgacgacgccatggaggacccctcgtgctccaacaactcgtccatggacgacggctgtggcgccgggacggcagagagcgcggcccggaagcacgggtgcggcaacgggaggctcatcaacatctgctttggcgcgcagggcctcaccgtggaggactcggcgagcgggcagcagacgagcaagatgttcaagcagcagtgcctcagggtgtcctgattgacggcgtggtgtctcgactacaacagcgtggtgtgattggtttggtgtctcgcgtgcagctatgtgtgcttgtttgctttgctccttgcacagccagcggtgaactggtgatccaatgaacttgtgcttgtgttaactgtgacgttgacgaatccacagctctttaacttcctcaaaaaaaaaaaaaaaaaaaaaaaaaaaaaaaaaaaaaaaaaaaaaaaaaaaaaaaaaaaaa

SEQ ID NO: 232 - DNA, 1403 bp, Zea mays
  Clone ID: TF_ZmC1084_1
attgggtccctcgaggccggccggagcgatggagctaccgatgcagtcagtctccagcttgctgctcgccggtccttcgcctagctcgccggaagccgcggagacgacgccgccaccgatgcagccgctacaatgtcaacatgagcgattggtgggcaacatgtgcccttctctctatctcgccgtctacagagggcggatagcggacgtcacggcgctgcttctggaacaacccgccgttgcaatagattgtcaagccactaccacgccgggtattaagggcactgctattatgcacggacagtgcgacatacttgagttgacagcggagaggaacaccgctctacatgtggctgcggagcaagggcaccacgagctgatccgggagctctacttcaggttctcagaccagggcctcctcaatcgcctgaactcggcgctggacacgccgctgcattccgcggcgagggcagggcacgtcagggcagtcgctgttctcttcgagctggcgagggatcgtggcgtgaacattctgggatgcaaaaatgaggcaggggacacggccctgcacctggcggcgaggcacgggcacggtgcagcggtggaggtcctgatctcggcggcggcagaaccggcggccgagctgaacaacgccggcgtgtcgcctctgtacctggcagtaatcagcggctcggtgcaagcagtcagagcgattaccacgtgcaaggacgcatcatcgctggggccaggcgcacagaatgctctgcacgctgccgtcttccagagctcagaaatggttcacctgctattggaatggaggccagctctggccgaccaagtcgacagcggcggcagcagcccgctccatttcgcttcgtccgacggcgaccgcacaatcgtgaaggcgatcctgcgtgcctcaccaccaagcacagtttacaagaaggactcggacggcctgtcggcccttcacgtcgcggcgcggatgggacatcgccgcgtcgtgaaggacatgctacggagctatcccgacgccgccgagctccgcgacggtaacggcggtaccttcgtccacgcagcagccagggagaggcgctcctcggtggtgtcgctcgctatcagcaactccatgctgcgcggcgtcctggacgcgcaggacagggacgggaacacgccgctccacctcgcggtggcggtgggatcgaccggcgacgtggaggccctgctacgggagggcaaggtgcgtgccgacgttctgaacaacgacggtcacacggcgttggatctcgccgccagatcgaacgccggtttcttcgccacgatcaacctggtggtggcgttagtcgccttcggggcacggctccggccgcagaggcaggaccgcctggagcagtggggcggcc

SEQ ID NO: 233 - DNA, 729 bp, Zea mays
  Clone ID: TF_LIB5116-067-A1-PF1-D8
cagaaaaaacttaccatcttattatgtaataagtaccttcatattgcttcttttatgaaggagattgtgaaatgatagaactgttgcttgcaaagggagcttatgtagacccgatagctgaggagattgggacaccactgcatcttgctactaaggaacaacaagtcggtgctatgaagactttattggagcataatgcagattgcaacaagacgtacatgagctatggactttatcctatgacacccctcttccaggctgtaaatgtatcatcactacaatgcgtgaagctcctggttgaggctggcgctgttatcaacccagattgtattgaaactgtttcacttgattctgcaatgggaaatgacagctcaacagagtgcttaaatttcttactgaaggctggtgccaagcgtaatgcctctaatgatgctgctgtccacgccagcgccagaggacgagtcgctggcaccgctcggcgatctggcagaggacgaggacgtgaccaggggccgcgacaacaacaggagcagcacgttgcctgtggggaagaggtcgaggtcaaagtcaatcctaaggtgcttattggatagttattcagtcagttttatcatctttagggcctatttagtttgtggctgcagtttgccacatcttaggtagccaagtttggcctagcacgccaaacttctcttcagcaggactcaaatctcagttactatctttata

SEQ ID NO: 234 - DNA, 2096 bp, Zea mays
  Clone ID: TF_ZmC13193_2
gtgcttataggggacggcaagacaaagaaggttgtactcctttacactgggctgctattcgggggaaccttgaggcatgcactgtgctagttcaggttggcaaaaaggatgatttgatggtgaaagacaaaactggcttaactccagcacagcttgctgccgataagaatcatcggcaaattgcgtttttcctcgacaacgctagaagggtacatgacagaggatgtggtgcgaacaccagatttgggaaattgtcaaaattaggccttgcaccttttctttggtgcaccattattggcatgcttattacatacgtacactctgttatattaggacaatatgtcatgactatgacagcaccatttgggatgttcgcatggtcaggagtttttcttgcaactgctgggttggtcatgttctataaatgtagcaggaaagatccgggttacatcagcataaatacaaggggctcgcaaaatcaaagggacgatgaaccactgctgaagatggagttagaaaatcctgcgcttctttttggcaactggtcacaactttgtataacctgcaaaatagtcagacctgttcgttcgaaacattgttctacatgtgatcgttgcgtggagcagtttgatcaccattgcccttgggtatctaattgcataggaaagaagaacaaatgggaattcttcatgttcctcaccttagaagtttttgcaatgatcattactggctctgctgccattataagacttgtaagggatccagattctccatcatcttttggtgcttggattcattattctgcgtttcagcatcctggggttgtttcatttctcgcattggattgtttccttttctttggagttgcagttcttacagtttctcaagcatcacagatagcaaggaacattacaacaaatgagatggcaaattccatgagatatgcatatctcagaggcccaggtggcagattcaggaacccgtatgatcatgggattcgcaagaactgctctgacttcttgttaaatggatacaatgaggacactgaacggctagaccagacattgcacactgatgaggagatgggaatgatacagatgacaagagcggtttcgcagaatggtgacaatcatttacatcatggtaatggcacggaacatagttgcgctgattcacaggcaagcccaaaacctcatagccaagtgggttcgcctcagtgttgtgatcacagtaagaggactgataggacactgttgggcctaggtttgggccttgggcgaaacagtgcatcccggcagtatgttcggtctcttatcccattgtgatctatcatttggatatcatgtgttcgtttcagtgtagattggatttgttcactgctccggccccatcttttatacgtgcccttgacatggttcaccatgtaccattggctggtcagggacattgttgggccattagcacaggaatactgagatatatctagtgtttgtagttttggggtgaactcagagaagttgaaggtaacgacttggcttgcgaatatcagctgatctgcactcgggaaatatcagagagcttgtgcagaaaaggtaacagttatgggcttatggcagatgcagtagcatgagatgtcttcataattgttgtgtacatcaggttcagtggtcttgggggcctccttcttctgaaggtcttaaaaacacggttaaccatttattttcagtatgttattaagtattacaggagcttcgttactagaaaaacttcgacatagatcaatgaaagcacgacgaagcaagctttgttacgttgtcacagtaagtcgatgtagggagaatgtgttgttcaagctgctgagtgcaaatgataatattgtccctgtgacatttgtaaatcttgtatgtaatctttgagggtatgaatgtaatatcgtacgaattgtacgattgcttataaatagatgaacaatactgttcacactgaattgagattgcattcacgctttcgctttcaagcaagccgaatatacaaatgtaatgtacatcatgtatctctttgttaatatatgagatgtatcttgatgttgtttggcc

SEQ ID NO: 235 - DNA, 2727 bp, Zea mays
  unsure (1)..(2727): unsure at all n locations
  Clone ID: TF_ZmC12604_6
cctcgagggcctggccgggaaaaaaaaaaaaaaaaaaaaaaaaaaaaaaaaaaagaaaggattccacgctgccctcggcgctgcgcctggccccggcacctacctcccccctccccacctcgccgccggcgggtggagtcgggctggagcagccgctctcctctgttaccccctaaccccctataaagaaaaagaaaaaaacagagagagagcgagcgaccggcggctcggcagccatggggcacggcgtcagctgcgcccgcaccggtgacgagcacgactacttccgcgcggcgcaggtcggggacctcgaggccctggaagcgctcctcgacgctgacccctcccttgcccgccgcgccacgctctacgaccgcctctccgcgctccacatcgccgccgcgaatggccgcctcgaggtgctgtcaatggtcttggatcacggggtgccgccggacgtggtgaatcggcacaagcagacgccgctgatgctcgcggcgatgcacggcaagaccgactgcgtgctgaagctcctgcaggccggcgccaatatcctcatgttcgactcccagcacgggcggacctgcctgcaccacgcgtcctacttcggccacgtcggctgcctgcaggccatcctcacggcggcgcggaccacgccggtggccaactcatggtttcctggtagcacgtcgctgcacctcgccgctcgcagcgggagcctggattgcacccggaagctgctcgcctggggagcggatcgtctccggagggatgttgccaggaggatcccttacgccgtggcgctgaagcgcaaccacgaggcgtgcgcggcgctgctgaacccgtcggcggcggagcccatggtgtggccgtccccgttcaagttcatcagcgagctggagccggaggccaaggcgctccttgaagcggcgctgacggaagccaacagggagagggaggagaagatcctcaggggcaccaagcactctccgcatcctcccacctgggaccacgcgagcgacgccgccgacgccgacgccatcgacgacgcgtcctcagatgtatgctttgtgaccgctgacaaatgtgggacctgatgcatcatcgcccattttgcgctcacttgacttcactcacagcccagcgccagcgacgcggagctgtgctgcatctgcttcgagcaggcgtccaccatcaaagtgcagnactccgggcaccaaatgtgcccggcgtgcacactggcnctgtnctcccacagcaacccaaacccgacaactctnacgccgccgtcnccggcctgcccgttctgccgcggcagcatctcgaggctgctggtggcccgggcgagcccccaccccgatgacggcgacggcgtggacaagcccgagcacgacctgtgatcggcatttgatgctgtgcgtggctgagcagacagcagagcacgaccattttaaaagctgaagcaggcattgccactggctttccaagatgagagacatcacatccaagcgtgattatctactacttgtaatgcatcctcttcttctcccccatgtctggtctatttttgggcatgcagctgcgcgatacggttgagctgagcttgagccaccgatgtgcactggactccgaaggaggcattgcatgttgtaggacagcacagcagcaacagtggtaccggtcggcaggcaggcaggcaggctccgtgagcggtgctccggccatggccgtccggaggtggcagccagccaatggtccgtgaccgtgatgcacgcaggagcggtgcatggagcgaggctcagagcagccgcagttattgtgtgccagtgtcgtacaagcgctgctcacaccacaggcagcagatgcatgccgtcactgaccagctgctttcctgcaagatcttctcgggagctatggtcggtcaggcatgctgcaaaagcttgaccccttgccaggaaggaagcagagataacccatccctacctccctcgacgtcgacgagatggctatccgtttggacatgaccaagagtaatgctcccagtttcgagcccaacgccgccattactccgacatcacccaagccttacctccgctccaagcgtgtagcccggctacaggctcaaaccctccaggcctccaccagcaaaatcgtgatgcttttctaaaatagccaaatatttaccagcaaaataaacataaacaatcaagattaccttcgagcaggcgtgcagcatcgaggtgcaggactgcgggcaccagatgtgcgcggcgtgcacactggcgctgtgctgccacagcaagccgaacccggcgacgctgacgccgccgtcgccggcctgcccgttttgccgcggcagcatctcgaggctgctggtggcccgggcgagccccgacgccgatgacgacgacaaggccgccgccgcctggtccccgcagctcgtccggcggcggtcgcccaacctcaaatgggcggcggcgacggcgtggacaagcccgagcccgacctgtgatcggcatttgatgctgggggtggctgagcagacagcagagcccgcccattttaaaagctgaagcaggcattgcccctggctttccaagatgagagacatcccatccaagggggattatttactggagtacttgtaaggcatcctctttttctccccaaaaaaaaaaaaaaaaaaaaaaaaaaaaaaaaaaaaaaaaaaaaaaactcgagaagggg

SEQ ID NO: 236 - DNA, 1950 bp, Zea mays
  Clone ID: TF_ZmC4298_1
gggaaaagaactcaggaagtggttatttcgagcattctccgcggcttgcacagcatcaccggacaagcatgatgaaacctgacaagccaattgacttgcttaggaaggtggctggcaataattgctgtgctgattgtggtgcttcggagcctgattgggcatccctgaaccttggaattcttttatgcatagagtgttcgggggtacacagaaatatgggtgtgcatatatctaaggtaagatccctgacgcttgatgtcagggtttgggagcaatctgtaatcaatctctttcagtcaataggcaacacttttgccaattctgtctgggaagaaatgttaccttcatcaagctgtgttgaccatggtgatatttcaagggctgttggattagaaaacatgttgtttggttttgttcccaagtagcctaataaatcccgttagggcattgttcttttagtcccctggaggggcggcttgctagtattcatggcgtacacatgtcgcaaaaggaagttgctgttttgaaaggcgtccgccctcttttgggagaaatttattcatgccaagtatgctgagaaggatttcgtgcggaaacatggtatggatgggattcaacttgcagaacagatgtgggacaatgtaagttcgaacaacaagaagggggtgtacagcttgatcgtggggtcaaatgccgacgtagatttttcctatggtcatacatcattcaattcggctttgactctggcgaaaagctctcctcctacaagagcaatcagcctctcacatctaacggaagctctagatgttttgaccgcaatccactcgacacagggataatcggggattctatttgtcccgcccgtctagccgggcgcacattggcgccgtactgcaagagcagctcaaccatgcccaggtccgcggcgcggcatgctagatggagcaaagataatccttcaacagattcaagagggcggacgccgcttcatcacagcatcatgaaagggcgacatgtgtacgccaagctactgctttccaggggcgccgattctcaagccgcggatcgagatggtaggacagcgttacagtatgcaatcgacagcggaaccatagaggacgaagagatccttgttttgctagaggacccaagtagataaatcacgtaggtgtagtagtccaagtctcgagttcctgccgtcctgcggtggtgcattgtggctgccttttgcagtcacctggcacacacagggtccgaggatgccttgctagtattcagtctctgcctttgtggcaagaggaagttatagtttttctaggtctgtctgcggttttggtcgcgcttagggtaaaagtggcctgtttgtcgtggatgcagtttgcaagttgttggtttgcctttgtttgcagatgtcgcagtgtacacttgggaagtggctgccattgttgcgactgatgtacatatagcgatgtctgatacaggttatttatgcaagaatttagatcggtgaaacagaatccccggtacaacccttctcgagtggattgcggtcaaaacatctagagcttccgttagatggagaggctgattgctcttgtaggaggagagcttttctcagagtcaaagccgaattgaatgatgtatgaccataggaaaaatttacgtcggcatttgaccccgcgatcaagctgtacacccccttcttgttgttcgaactctacattgtcccacatctgttctgcaagttgaatcccatccatgttatgtttccgcgcgaaatccttctcagcatacttggcatgaataaatttctccttcgctgcaatagaatcagactgtttaggcttccttgggtgcaaatgccatggcacatgttttgataatccaccagccctgcagaaagtagaccttgcaagtggcaataaaaggaccatccattctacagcatct

SEQ ID NO: 237 - DNA, 2164 bp, Zea mays
  Clone ID: TF_ZmC2014_1
cacgattcgtgcccgccggccatcaggtccgcggtcgagctcatgtacgcggcgtgtaccttcaagatccccgagctcacctcgctcttccaggcgaacctggtggcttgaagtctatgaattgaaatggaatcattattcattaggctgctcaacatttgaatattacatttatggctgtatagtttatcaatcagtttaacatcaattgagctttgctttgtctttacggaaggcaaatggttaacatggtcttcttctacagcggcggcttcttaattttgtagacaagactctagtggaggatgttattcctattctggaagttgcttcccactcagggctgactcaagtgatcgacaaatgtattcaaaggattgctagatcagatctcgacgatatatctttggataaggagctccctccagaagcagttgatgagataaaaaatttgcgcaagaagtcacaaactgctgatggtgatacgttcatttcggaccctgtgcatgagaaaagagtcagaagaatccacagggcacttgactctgatgatgttgagcttgtgaagttgcttcttaatgagtccgacatcacattagatgatgccaacgcattacactatgctgcttcttactgtgatcctaaagttgtctcagagctgttagatttggcaatggctaacttaaatttgaagaatagccgtgggtacacagcactccacttggctgctatgaggagagaaccagctataatcatgtgtctccttaacaaaggggcaaatgtgtcacaactgacagctgatggcaggagcgcaattggtatttgtcggaggttaacaagagcaaaagactacaatacaaagatggagcagggtcaagaatcaaataaagataggctgtgtatagatattctagagagggagatgatgcggaatcctatggcggtggaagatgccgtcacctcgcctttgttggcagatgatcttcacatgaagcttctctacctggaaaacagagttgcatttgctagattgttctttcctgctgaagccaaggtcgccatgcaaatcgcacaagcagacaccacagaagaattcggcggtatagttgcagttgcagcaagcacttctggtaaactgagggaggtggaccttaatgagacgccagtgacacaaaacaaaaggctccgttcaagggtagatgcactgatgaaaacagtggagctgggccgtcggtacttcccgaactgctcgcaggtgctggacaagttcctggaggacgatctgccggaaggtctggaccagttctacctccagaggggcacagccgatgagcagaaggtgaagaggatgcgcttctgcgagctgaaagaggacgtgctgaaggcgtttagcaaggacaaggcggagggcagcgtgttctcgggcctgtcctcgtcgtcgtcgtgctcgccgccccagaagtatgcccagaggtgatcaaggcaccagtttttgccgtatagtttgttatcatggtcttcgagacttggacccggacagcatatagggacatgtacacctgtgtatgtatagtgcttacaattggcgtaagtagaactatatgtatggaacataaggaaacatggcaggaacaccgtgcaaaaagatgaaaagatggccgaagtgctctatgcgagtgcccacctgattcgatggccctattcaacggcgccctgtcagcatgctgcatgcccactgagaccttcggttgcatagggataggaggagatttctgttcaattttggctagcaagtgatataggggtgtttaggactgtttcactttatgaaaatcaacttagctcataaacacttttaacttcaataacttaggtcctgtttggagtggctgtatttttctagtcccaagaaaataatgtggtatctgagaataccatggtctagaaaccaaaatgtgtttggcagactcttttaaaccatggtatttaaaatcttggttttgacaagaccacattatttctgggtatagaatactgtcagccgagttcggctcggctcggtgcggctcgttgactgaacgagctcgactcggctcgtccattccacgagctggtgaaagaggctcggctcggctcgaccttagctcgcgagccatattcttgt

SEQ ID NO: 238 - DNA, 1525 bp, Zea mays
  Clone ID: TF_ZmC2014_3
tcgagccggcgggtccttcagaccccgagctccctcgctcttccagcgccggcttcttaattttgtagacaagactctagtggaggatgttattcctattctggaagttgcttcccactcagggctgactgaagtgatcgacaaatgtattcaaaggattgctagatcagatctcgacgatatatctttggataaggagctccctccagaagcagttgatgagataaaaaatttgcgcaagaattcacaaactgctgatggtgatacgttcatttcggaccctgtgcatgagaaaagagtcagaagaatccacagggcacttgactctgatgatgttgagcttgtgaagttgcttcttaatgagtccgacatcacattagatgatgccaacgcattacactatgctgcttcttactgtgatcctaaagttgtctcagagctgttagatttggcaatggctaacttaaatttgaagaatagccgtgggtacacagcactccacttggctgctatgaggagagaaccagctataatcatgtgtctccttaacaaaggggcaaatgtgtcacaactgacagctgatggcaggagcgcaattggtatttgtcggaggttaacaagagcaaaagactacaatacaaagatggagcagggtcaagaatcaaataaagataggttgtgtatagatattctagagagggagatgatgcggaatcctatggcggtggaagatgccgtcacctcgcctttgttggcagatgatcttcacatgaagcttctctacctgggaaacagagtgcatttgctagattgttctttcctgctgaagccaaggtcgccatgcaaatcgcacaagcagacaccacggaagaattcggcggtatagttgcagttgcagcaagcacttctggtaaactgagggaggtagaccttaatgagacgccagtgacacaaaacaaaaggctccgttcaagggtagatgcactgatgaaaacagtggagctgggccgtcggtacttcccgaactgctcgcaggtgctggacaagttcctggaggacgatctgccggaaggtctggaccagttctacctccagaggggcacagccgatgagcagaaggtgaagaggatgcgcttctgcgagctgaaagaggacgtgctgaaggcgtttagcaaggacaaggcggagggcagcgtgttctcgggcctgtcctcgtcgtcgtcgtgctcgccgccccagaagtatgcccagaggtgatcaaggcaccagtttttgccgtatagtttgttatcatggtcttcgagacttggacccggacagcatatagggacatgtacacctgtgtatgtatagtgcttacaattggcgtaagtagaactatatgtatggaacataaggaaacatggcaggaacaccgtgcaaaaagatgaaaagatggccgaagtgctctatgcgagtgcccacctgattcgatggccctatccaaaaaaaaaaaaaaaaagcggcagcttctatagttcaccta

SEQ ID NO: 239 - DNA, 2260 bp, Zea mays
  Clone ID: TF_ZmC1587_1
ctgtgcggcgctcaggcgccggccgggaaccaagcaaaaactacacgtcttgcccaaacccaaagccgaagcccctttcccctcccccgcttgccctcttctgccattttgtcgaacacctcccccgatcgcgcgactccggccatggcggaaaactccgacgcggctgcggccgtaactgcgcggctactggagcttgcggccgacaacgactccacggcgctcggggacctcctcgcggtacacccgtcgcttgccgacgagcccgcgccgtggtactccccggcgcgcggcgcggagcctatgaccccgctcatggtcgcggcggcgtacgggtccgtggcctgcatcgatgtcctactctcgccgccccacctgaccgatcccaaccgcgcctcaccgtcgtccctctccaccgcgctccacctcgcagccgccggcggcgcctccgctgcgccggctgcggtatcccgtctcctagctgctggcgccgaccccacgctgctcgaccatctccatcgccggccgtccgacctcgtcgccctcccacccaactcgctcccgcttaagaaccacctcctctccctcctcggagggcgcaaggagtggccgccggatccctccctccccgacatcaagaacggtgcctacgcctccgacgacttccgtatgtactccttcaaggtgcgcgcgtgctcgcgcgcctactcccacgactggacggagtgccccttcgtccatcccggcgagaacgcgcggcggcgggacccgcgcaagtaccactacagctgcgtgccctgcccggagttcaagaagggggctggatgccggaggggcgacatgtgcgagtacgcgcacggcgtgttcgagagctggctccacccggcgcagtacaggacgcggctgtgcaaggacggcctcgcctgcgcgcggcgcgtctgcttcttcgcgcacacgcctgaggagctccgtccactgtacgtgtcgtctgcggggtcgcgcagcgcgatgggaatggggctgccgtcgccgggtgcgtcgttcacgccgccgctctcgccttctggcgggggaagcggtgtggccggcgcgtggccgcagcccaacgtgcccgcgctgtgcctccccgggagcgcggggaaccttcagctgagccggctgcgcactttgatgagcgcgcgcagcatggcagtggacgagctgctcgcctcggcggattacgacgggctcgtcgggtcgccagcctctctgcggtcggcgaggggaaagacgctcgtgccgtccaatcttgacgatctgttctcggcggagatggcgggcgccgcggcatctcactcgcctcggtacgcagaccagggcggctctgctttctcgccgacgcgtaaggccgccatgctgaaccagttccagcagcagcagagcttgctgtctcctcgggccacggttgtccctgagccggtgtctccgatgagctccaggttgctctcggcccttgcgcaacgggagaagatgcagcagcaaacgctgagaagtatgagctctcgtgacctgggctccggcgcctccgtcctggttggctcaccggttacctctagctggtccaaatggggaatccccccgagcacaccagattggggtgctgacgccgaggagcttggccgcctcaagcgatcctcgtcctttgagctccggagtggtgccaacggtgatgagccggacctctcatgggtcaatacccttgtgaaggagccaacgccggagaagccatccatcaacgggacagccgcaaaggagtctattgcttctttgagccaggctgcaagtcatgagggtatcggcggtgaggacgacactgccggggtcatcggtggctggcttgaacagctccagctggatgagatggtagtctagaacaaacacaaacataaatcaaataagaaaggtgccattttttccctgtgatccaccatttgcttcaccaacttactacatctaccaaccttcataccttgctggtaattactggtgatacattcttttggagttggttagtgtaggtgttgagatttccatcaccatttagggtccaccacaagtgagaaattaaggaatggaaacctagccaattttatggaatttccacatcccatgcttcatgtgaaggagcagtagggtgacttgtcgttgcttcaaactcttctaaggcctgcaatggtattgtactacgtaggattgtgtctgatgtaaaatccaatggtcc

SEQ ID NO: 240 - DNA, 2218 bp, Zea mays
  Clone ID: TF_ZmC11259_1
acggattctattaccatgcaagaccagttctcagggctctcaaataacggagttggctatccatgggcattttgaacccttctccagagaagatacaacaatttccttaggacagacaaacaagtttaccattcgtgaggtctctccagaatgggcattttcctatgagatcaccaaggtcatcattacgggagattttctgtctgatccatcgaatttgtgttgggctgtgatgtttggtgacaatgaggtacccgttgaaatagttcagccaggtgttctccgctgtcacacaccactgcacagcaatgggaatctcagaatctgcattacttcgggaaacagagaagtttgtagtgaattcaaagactttgagttccgctcaaaaccaacctcttctagtttcacagacattgcaccatcttctagacatctgaaatccagtgaagagttattacttcttgcaaaatttgctagaatgcttttgtctgggaatggaaaccgtgaagttccagatggtgatccccaatctggacagtgtccaaaacttaagacgaacgaagagctctgggataggttgattaacgaacttaaagtagggtgtgaaaatccattaagctcggttgattggattgtggagcaactgctgaaaagtaatctacaacagtggttatcagtgaagctcagaggattcaatggaacggattttttatccaagcaagagcagggtattatacacttaatctctgccctaggctatgagtgggcattgtctccagttctcagtgctggtgttggtctaaattttcgtgattcaaatggatggactgctcttcattgggctgcttattttggaagggaaaagatggttgctgcacttcttgctgctggtgcatcggcaacagcagttactgatcccactgcacaagacccagtgggtaaaacagcagctttcctggcttctgaacgagggcatacgggacttgcaggttatctttctgaagtgtcgctaactagctatcttgcatcactcactatagaagaaagtgatgtctcaaaaggatcagctgaagttgaagcagagagagctgtggaaggcatatctcagaggaatgcccaacggcatggtggcacagaagatgagctatcaatgaaggattctttggcggcagtgaggaatgcagctcaagcagcagctcgcatccagaatgctttccgtgccttctctttcaggaagagacagcagaagactgctcgacttagggatgtgtatggaatgacccaagaggatatagatgaacttgcagctgcatcaaggttgtaccaccaagctcatgcttcaagtggtcagttttatgatagagcagctgtttcgattcagaagaaatacaaaggatggaaaggtcgcaaacattttctcaacatgagaagaaatgcagttaaaatacaggctcatgtaagaggccatcaagtgagaaagaaatacagaacaattgtaagcactgtcagtgtgctagagaaagtaatacttcggtggcgccggaaaggtcatggcctacgtggcttccgagctgagcagcaaccaatggtcgaagcaatagaggaagatgatgaggaagacgacgatttcgatgatgatgaagcagtcaaggtcttccgtcggcagaaggtcgatcaagctgtaaaagaggctgtgtcaagggtgctgtccatggtagactctaccgaagcgaggatgcaatatcgacgaatgcttgaggagtttcgccaggcaactgcagaattggaaggatcaaatgaagtgacatcaatatttgacagtgacttagagttattagggatcaacaatttcatgtaaagagcatttcggtttcaagatctgagcaatgacataaattaagtatctacggaatgggtttcacctgctactaactaggacctgataatggtcgtcagtttatacagtgtttacgaaatggaaagtagattattgctgctatgatgtattgccactctatatttaggtgtattttcccagtggcagttcaatgaacactacattgtggtgtttgtaacttttaataccccgtttggatgtagatattagagtacaaaattgaaaattagaatcagctttccaaaaaaaaaaaaaaaaaaaaaaaaaaaaaaaaaaaaaaaaaaaaaactcgaaaaggggaaaaatttatgtaaaatcctt

SEQ ID NO: 241 - DNA, 824 bp, Zea mays
  unsure (1)..(824): unsure at all n locations
  Clone ID: TF_LIB4765-073-R1-K2-C9
cattgggtacctcgaggccggccgggtactactgatagtgacactgaccgtgttgtctcatcactagctagtatcatgcctgcttccgttctctatacttcttttatatacacacaaaaaaaaactggactactgatatgtgttcatagatatcgtgaaggtacttctggaccatgatccatcccttgggaaaacgtttggccaatcgaatgtgactcctctcataactgcggcgatcagaggccacatcgaggtggtgaacctactgctggagcgagtttctgggttggtcgagttatcaaaagcgaacggaaagaatgccctgcacttcgctgcccggcaggggcatgtggaaatcgtggaggctttgctacatgccgatacccagcttgctcggaggactgacaagaaaggccagaccgctctacacatggcagtaaaaggaactagccctgaagtcgttcaagcgcttgtgaacgccgatccggccatagtcatgctgcctgacagaaacggcaacctagctttgcacgttgcaaccagaaagaaaagatcagagattgtaaatgtgcttctgctccttccggatatgaacgtgaatgcgttgaccagngatcggaagaccgcgttcgacatagccgagggccttcccctgtcagaggagtctcaagaaatcaaggagtgcctgtcccgtgccggtgcggtcagagcaaacgatctgaaccagcctcgggacgagctgaggaaaacagtgacagagataaagaaggacgtgcatacccagctggagcaggcgaggaaaccaacaagaacgtgtacggcat

SEQ ID NO: 242 - DNA, 829 bp, Zea mays
  Clone ID: TF_ZmC49809_1
cggacgcgtgggtgacggtggactcctccaacaccacggcgctgaacacggcggcgacgcaggggcacatggacgtggtgaggctcctgctggaggtggacgggagcctggcgctgatcgcgcgcagcaacggcaagacggcgctgcactcggcggcgcgcaacggccacgtggaggtggtgcgcgcgctgctggaggcggagcccagcatcgcgctgcgcacggacaagaagggccagaccgcgctgcacatggccgccaagggcaccaggctggacctcgtcgacgcgctcctggccgccgagccggcgctgctcaaccagacggacagcaagggcaacaccgcgctgcacatcgcggcgcgcaaggcgcggcacgagatcatcaggcggctggtcacgatgcccgacacggacgtcagggcgatcaaccggtcccgcgagaccccgctggacacggcggagaagatgggcaacacggacgcggcggaactcttggcggagcacggcgtgcagtcggcgcgcgccatcagccccggcggcggcggcgggggcggcaacaagcaggcgcgcgagctgaagcagcaggtgagcgacatcaagcacgaggtgcactcgcagctggagcagacgcggcagacgcgcgtgcgcatgcagggcatcgccaagcgcatcaacaagctgcacgaggaagggctcaacaacgccatcaactccacgacggtggtggccgtgctgatcgccacggtggcgttcgcggccatcttcacggtgcccggggagtacgtgcaggacccgggcagcctggcgcccgggcacgatctgggcga

SEQ ID NO: 243 - DNA, 1844 bp, Zea mays
  unsure (1)..(1844): unsure at all n locations
  Clone ID: TF_ZmC2160_1
cgggacgtaccgaaccgtctacagtccaccgtattgttctaatttgaaatgggcgtggggggggtgcttctaaaatgcttcccatgggatgctgtctacaggggttgtgggagtaaagaagaagtaagatacctgctgtggattcgcttgacacgggttaccaagggcacagaattcttctggggtgtagagaaggacatacgtatgaggggggggcttcactangatagtgaanctcatagttgtggagctctactgtgcgcacacaggagcctgtgtcttctattacctgggtacaacgcttcctgaatcaatggaaggatacacgtggattgggagtctgcagttgggggactacaagtgggcacatttcagggggatcgatcttgccaagcgctatataacatgcggtatacttcgccattgtgaccatgggaacaggtggttacggtgacattcatgctgtgaacatcaggggaatgatattcatcatgatctacggttcctttgacatgattctaggagcttacctgattgggaacatgactgccggcatcgggaaattcggctcgagtttagacaagatgaaggaggtgatcaggtacatgaacagaaacaaacttgggaaggaaataagggagcagatcaagggacacctgaggttgcagtatgagagcagctacaccgaagcatccgtccttcaggatatcccgatttctatccgtgcaaagatttctcaaacgctgtataagccatatatcgaaagcattccactgttcaagggatgttccgcagagttcattcaacagattgtgatcaggttgcaagaggagttcttcctaccaggagaagttatattggagcagggaagtgcagtcgatcagctgtacttcgtctgccacggtgcactggaaggtgtaggcatcggtgaagatgggcaagaggagactctgctaatgctggagccagagagctccttcggcgagatctcaatcctctgcaacatcccgcagccctacacggtccgcgtctgcgagctctgccggctcctgcgtctcgacaagcagtccttcaccaatatcctggagatctacttcgtcgacgggaggaggatcctgagcaatctctccgagagcgagtatggcggacgggtgaagcagctggaatcggacatcacgttccacatcgggaagcaggaggcggagctcacactgcgggtcaacagcgccgccttctatggcgacctgcaccagctgaaaagcctgatccgggcaggtgctgatcccaagaacaccgactacgacgaccgctcccctctgcatctcgcggcttccagagggtacgaggacgtcgtgcagttcctcatcaacgaaggcgtcgacatcgaccttaccgaccagttcgggaacacgccgttgctggaggcggtgaagcaggggcacgaacgggtggcagcgctgctgttcgccaagggtgcgaagctgagcctcaagaacgccggcagccacctgtgcacggcggttgccaagggggactcggacttcatccggcgcgccctggcctacggcgccgacccaaactgcagggactacgaccaccgcacgccgctccacatcgccgccgccgagggcctctacctcatcgccaagatgctcgtcgaggccggcgccagcgtgttcaccacggacagatggggcaccactccgctcgacgaagcgcgcaagtgcggcggccgctctagaggagcgctgctggaggaggcgcgggccagcgagctgtccatgttcccggagcgcggcgaggaagtcagggacaaggtgcacccgcgacggtgctcggtgttc

SEQ ID NO: 244 - DNA, 471 bp, Zea mays
  Clone ID: TF_LIB3069-022-Q1-K1-C8-3Aa
cgctgcaactaaaggccataacgagatcgtcggattgttgctcgagaacggagctgatgtgaattccttaaattattgcggccagacagcattgatgcaagcttgtagatacggacattgggaagttgtgcaaactcttctgctttttcgatgcaatgttacaagagctgattatttatctggaagaacagcgcttcatttcgctgctgtgaatggtcacgccaggtgtattagacttgtcttggctgattttttacctagggataaacttaactctctttctgaaactggtgttgtcactgcaaagaacaaatctgagcaaagcgcattgtctaaatttgtgaataaagcggctgatggggggataaacagctattcacaaggctggcttggatggattatttgattgtgtgcagcttttgcttgatcttgaggccaatgttttcgatgggacattttattttggaacat

SEQ ID NO: 245 - DNA, 1000 bp, Zea mays
  Clone ID: TF_ZmC1087_2
aaaaaaaaaaaaaagaaaaaaaaaaatgatgatgctgaccgaaggggaaacagcggccggggggaagcgctagacaacgcgaccgccgccgcctcagctactcgcctggtgatgggcgtcgaactggcgcaaccgaccgccgccgcggctgcggtgaccaccgctgagcaggctcaggatctcatcgacgccgctaggtacgacgacttggaggacgtcgtcgccctgttctccgctggtgtctcgctggactccacagattcgcaaggccgcacagctcttcacatggcttctgccaatggtcaccttgctgtggtggaatacttgattcaaaatggagcgaatgttaacgccaccaacatggagaagaacacaccactccactgggcatgccttaatggacgtatagaggtaatcagggctttgatctcagcgggggctagcgtgagtgctctgaacagccacgagaaaacgccaatggacgaagcggtgaccacaggcaagatgcacgtgatcgacgcgatcggtgcggcagtagctcaagccgagctcgacggcgttactgtctcctaaaaggacctgatgagtacctggagctttgaatgacttgcagccttgttcttatctcacagcggttctgtctgtatcactcgcgaacctgaatcccccgacgggccagtatccgggcaatatctatactgacggcaatcgcctgttagtgtcattggcacgaggacccgacctgtcgttgtaaaccagatgtgcagatgtcaaagatcaggattttctcctacaaatgttgtagggccgttgcttgttctccctggcaaccttcgttttccaaattcagcgaaatgggacccgcacctccaccctctgtttttttcttctccaaattcagcttttgttgcctttaaaattggaatgcaatgtcgtgtccttgtttgagggttgtttttattgatgaaacgctgcaatcaaggattctctccacttggtt

SEQ ID NO: 246 - DNA, 849 bp, Zea mays
  unsure (1)..(849): unsure at all n locations
  Clone ID: TF_ZmC518296_1
gtagtcagaagccaaaattggattctttttcgatttctagggtttgctcatcctcatccccatcccctccgccgtcgccttccccgcctccgaccaaattcgtggtttttgattgctttccggacggaagatatgatccccaactccttcgacaccttcctctgatctcatctgtccccggatccagccaccaaaagaagccatactatggtgcgccgccgcccgtcaccgccgtcttcctcctcctcctcctcctcgtcgccgatgctccacaagaacctccgcgcgctcggccctggcctcaatccgtttgcccccttcggcatgggcaactactcccgctaatccctattccccccctccctcatcccctctgctcaatttctgatttgcttttctccggacccgatttgcttctcccccccttctcgttcttgattggattggattggattggattgctcctctctctgcttgcttggtcggcttcgtttggatctgcttgcgagattaggcaagggggccatggtgcagctccgcagctcgctcagcatgacccgggcgcgtacccgcagcgactcggacgacgccgacgaccgcggctggagccagctccacgtcgccgcccgcaagggcaacctcaaggaggtgagacgtctcctgaatgaaggcatgaatgtcaatgcacccacatggggaccaaagtctcctggcgctactccgctgcaccttgctgcccagggcgggcatgtgaaaatcatggatgaactantngnagcgcggtgcaaacattgatgcccgaaacaaaggagcttgcggctggactcccctgcacatttgctgcaagga

SEQ ID NO: 247 - DNA, 1635 bp, Zea mays
  unsure (1)..(1635): unsure at all n locations
  Clone ID: TF_ZmC9395_1
acatcggccgcgacgccctcgtgcccgtcctcggctatctctacaccggccgcctcaagcccccggcgcaggacgccaccgtctgcatggacgacgcgtgcggccacgggacttgccgcccggccatagatttcgtcgtcgagtccatgtacgcggcgtctggcttccagatctcggagcttgcctccctcttccagcgtcgcctctctgacttcgtttgcgaagcgctggacgaggacgtggtgccgattattcatgtcgcttccacctgcgatctccaggacctgctcaatctgtgtattcagagggtcgcagtctccgctctcgatagccgctacctggacaaggagcttccggctgacatatacaacaagatcaaggagatccgccgccaaccagagaacgccattattctggaccctgagcatgacaagagggtcaggaacatcctcaaggccttggattccgacgacgtcgatctcgtcggcttgctgttgaaggaatcgacggtgaccttggacgatgcattcgcgatacactatgctgcagcctactgtgagcccaaggtgtttgcagagctgctcaaactggactctgctaacgtgaacctgaagaacagcggtgggtatacgccgctgcacatagcttgcatgaggagagagccggacatcattctttcgctggtggagaggggagcctgtgtgctggagaggaccctggatgggcgcgatgctcttactatctgcaagagactgacaagagagaaagactgcaataggaagttggacaagtacgaggagaaaagtaaggcttacttgtgtatcgacattttggagcaagaactcaagaggaaatccttcgttttggaccccatctctatctctatagaggagtcgattgccacgcctttgctggtcgataattttcacatgaggctcataaacttggaaaacagagttgcgtttgctcggatattcttcccttctgaagccaagcttgtcatgcgcatcgcacaagccgattcaacccaagagtttgccggcatcaccaacttcagcagactcaaggaagttgatctaaacgaaaccccaacgatgcagaataggaggcttcgcgaacgccttgatgccttaacaaagacagttgagctagggagacgatacttcccacactgttcggacgttctggataagttcctcaacgaagaatccactgatccgatcttccttgagactgggaccccggaggatcagcaagtcaagaggatgcgtttctctgagctcagagaggacgtgcgcaaggcgttcacgaaagataaggcagcagtggctgcaatagcttcctcggcgtcctcgtcttcgtctccgaggtgcagacgacccaataggaaatcacggtgatgtcagtctgttcaggacacctgcactgggttgtgtgtgttttgacatgtaacactgtttcagtagataatgctgattgtcagatttgctgccgctctacagaagattaagcgaccgtctgtttcaagaattattcagacagttacttgtgattctttcaagcagcagttacaaaaaaaaaaaaaaaaaaaaaaaaaaaaaaaaaaaaaaaaaaaaaaaaaaaaaaaannnnnna

SEQ ID NO: 248 - DNA, 691 bp, Zea mays
  Clone ID: TF_ZmC119_798
gcagctcttgccaagggattataagatccaaaacccaatcaccattagctccagcttgaaccagaagtttcaaacaaggcacagaagagtgttttaatgccatgcttaatggtgtaactttatcattcaaacgctcgttgggatctgcaccgtgctccaataaaatcttcacgatactaggatatcctctaaaggtagcaataatcagtggggtcaagacacttgattccacatcaacacgaactcctttagaaagcaagaatttggctatttcaggacgcccgctctctgcagctgaatgcaaaagactcattcctttatgctgatgatgaagatcagcgccgtgatcaacaagaaaccgcagggctggaaggttcccatatagcacggcatgcatgacgggagtgaagcctcgcatggtgtcagccttgttgacgtcgattttgagatcctcgaccagatactggagagcaggcatgcagccactgtcacaagtggcgtggagggcgtacatgccgaggaagtgggtgttggccaaggtgtcctgaagcccttttccctcaatgtcaatgatctttgcgatctccttgaggcggcggatgtcgccgtagtaggcggccacgaggaggcccgctgcgggaggccagttgtcccgagctttccgaggacgagattcccggccggctcgagg

SEQ ID NO: 249 - DNA, 485 bp, Zea mays
  Clone ID: TF_ZmC1239_2
tttcgcggacgcgtgggctcgcgcggcgagctcctcgagctcgctccccgttccaagctagctagaaaatggccgcggcggaagcagcctcctccgcgccggcgccgtggagctgctgctcgacatgggcgccgacgccaacgcccggaccaggcgcggcgccacgccgctccagatggcggaggccatggggtacgaggccatcgctcagctcctgtgcgcgagaggtgcggaggtggccgccgcgtcggcgttgtgcgccgcgtcgtcgtcttcatcgtccatatcgtgcgcctgatttgctgccggttatcggttgggagagactgttggacggacacgaaggcttgtttgtttccgctgctgctcctgctgtgcgtgagccgagagatgcctacagccgccgtggctggctttaaagtaagaagaagcgaacccgttcgaaattgtactgtactggatagggggtttggtctgctttgttg

SEQ ID NO: 250 - DNA, 1049 bp, Zea mays
  Clone ID: TF_ZmC36749_2
aaccaaatccaaattcaagtttgaattcaaaaagatgagatgtatgagatgcacctggctttgttccttaaagccgggtgtgacagtcaccgatctgttagctgatagcctgatacgccatcatgaacagacataaaagaaagagagaagggagaaccaaagcttagcttatgagatgttagtcacaatggttaaataaacccaacaagggcaaaattctagcagggtcaaatctgattctgtagagcccctttgtttacacaccagaacaagctttaacacctcgactcagcacagtttctcgtatcacactttccatcgtctttgagcagagcaccagatcatccttcgagcattgccttggctgcatcgatgagtgcaggtctgaagctgttcgatgctcggccaagggcagtgtagccttccttgtcctcgacatcaacatcagcaccatgtctaattagcagaagagcagcccctttgttctcacatataacagcatgcgtaagaggtgtttgtcctgtcttgtcaacagcatcaacttcagcaccttcctcaatgaggaattcacacagctccgcgtttccagtgcttgcagctctatgcaaaggtgtgcagccaaacttgtctttcttgttgacattagcaccatgggctattagtttttcagctatgttaagcctccctcgctcaagcaggatgtcgacgatttgagagttgccggagctcgcggcggagtggatcggcgcccacccctcctcgtcctgcgcattcagcacgctagccgcggcgtcaccaccgcactgggcaagcgcgagcaccacctggggatgcccggcagcggcggcgacgtggaggagggagcggccgtcctcgttgcgcagggagaggtcggcgggggcgagggaggcgaacgcggcggcgtcgccggactcagcggcgcggaagagctccttctctgacggtcgcctctcctcgccgccggcttcgtcgacgtccatcgctgcagccatccggactccggaggtactcgtacttcgagttcgaga

SEQ ID NO: 251 - DNA, 2157 bp, Zea mays
  Clone ID: TF_ZmC853_1
gagacagtgaaggtgcctgatggttctaatgttctgactaatgaacagctggatgcttatgtagtgaacccttcactttctcaagaccaactattcagcattctcgatgtttcaccaagttgtgcatatattggtacaaatacaaaggtttcagttactggtacattcttggtgaataaagaacatgtggaaagtcacaggtggtcatgtatgtttggggatgttgaagtaccagctgaggttttgaccgatggcaccctacgctgctatgcaccagcacaccaatcaggaagagttccattttatgtgacctgttcaaacagggtggcttgtagtgaagtgcgagaatttgagtatcgtgattctgaagctcattacatggagacttctcgttcccaagccaatggtgtaaatgaaatgcatctacacattcgtcttgagaagctactcactttggggccagatgaccatcaaatgcttgttataagcagtggtaatgagaaatatgagataatgaatgctataaattccttaatgcttgatgggaaatggtcaaatcaagaatcttctgtcaaggaagtagtttccactgctagggtccaaagtttaaagaaactggtgaaagagaagctgcatcaatggctcatctgcaaagtaaacgatgatggaaagggtcccaatgttctgtgcaaggaaggacagggtgtgattcatttagtagcagcactgggttatgattgggctataagaccgataatgattgctggtgtcaatgtgaacttccgggatgctcatggatggactgcactccactgggctgcatctttgggaagagagcggacagttagtgtcctcatagcaaatggagctgcagcaggagcactaactgatccaacttctgagttcccttctggaagaagtccagctgatttagcttcagtaaatggacacaaggggattgctggttttctcgcagaatctgctttgacaagccatctgtcagcacttactattagggaatcaaatgatagcactgtagaagcgtgtgggctaccatttgctgaagatctcactggcattgattctgtccatctcgctggagagggtcctgatgctgaatcacttgaaggttctttaagtgccgtgcggaaatccactcaagctgcagctcgtatatttcaagccttcagggtggagtcattccacagaaagaaagtcgtggaatacggagatgacacctgtggattatctgatgaatgcacactttcacttgtttctcttaaaaatgtcaaaccaggacaacatgatacacatctgcattctgctgctgttcgcatacagaacaagtttcgcggatggaagggaagaaaggaatttatgatcattcgccagagaattgtcaagctacaggctcatgtacgaggacatcaagtgaggaagaactatcggaaggtagtctggtcagtcggtatcgtcgagaaagtcatactgagatggaggagaaagaggcctgggttacgcgggtttcggccccagaaacaactagaaggtccatcgcaaatccaacctgcaaaggctgaagacgaatacgatttcttgcacgacggcagaaggcaggccgaagccaggctacagagagcacttgcccgggtgcactctatgtcacagtacccagaagcgagagagcagtaccacaggcttacaacctgcgttgctgaaatgaaacagtccagggtatgctttcgaagcttgctgcaggacgtgttttattttccctcggggtttgatcatgatttgatgctggctactttggaacagatgatgcaggatgagatgctaagccaggcggctggtggtgcggacgatttcatggctggactggaggacttgatctgcatagatgatgccccgccccgatgtctgccattcggtgaagctgagcctttttacatcagataggcagggaggcggtttccttgctccccttttgtcagactagccctgtaaatattcttcagctagttgttcaccccgactgtttactcgctttctgctagtgtacaactataacatagtttcaatgcactgattatcggtagaataatcgcctcttatttgatatatagtttatattaattcaacgtattttatggtttt

SEQ ID NO: 252 - DNA, 942 bp, Zea mays
  Clone ID: TF_ZmC2138_1
accgcggcgcacttcgccgcggggctggggtccgaggagtgcctgcgcgcgctcggcgcggctggagcggacgtgggccgtcgggagcgcgcggggggcgggctcacgccgctacacatggcggtcgggtacggccgcgcgggcgccgtgcgcgcgctgctggagctgggcgccgacccggaggcccccgacgggcagggccgcacgccgctggagctggtccaggaggtgctcgccagggcgcccaagggcaacccggcgacgttccagcttcggcaggggctggaggcggcgcagaaggagctggagaaggccgtgtacgagtgggccgaggtggagaaggtgatcgacggccgcggcgaaggcaagtggcgggagtacctggtggagtggcgcgacggcggcgagagggagtgggtgaaggcggcgtgggtggcggaggacctggtgagcgacttcgaggccgggctggagtacgccgtggccgaggccgtgctcgacaagaggcaggcggcgacagcgacggcggaaggggaggacagctgggagtaccttgtcaaatgggtcgacattgaggaggccacgtgggagcccgccgagaacgtggacaccgagctcgtgcagaagttcgagcagcagcagtcggggtctgcaggcggtgattgatggcggcagcactgcgccaccgtcgccgcaggtgatagagattacttgatgaaggtgattgcgttttattcgtcgggtattcaaagcactgcccgggttgtattttaggatgaaacttttgtgagtatcatattttcaccggaattgcagtttcagccttcccgcttggaaactttttattcgtcgggtattcaaagcactgcccgggttgtattttaggatgaaacttttgtgagtatcatattttcactcaaaaaaaaaaaaaaaaaagcggcc

SEQ ID NO: 253 - DNA, 1994 bp, Zea mays
  Clone ID: TF_ZmC16856_1
ggccagcagctagctaggcaggtagctcttgccaacgccccggccggccggcacctcacattttgtagcgtgatcgcgcgccgccgccacgcctccccatgcaagctactccgatcctagctactggctagctagttgcaactactcgagctaccagctagctaactggccagcagcaggtagtctgctcagggtcggagggtcggccggcgcggcggcggggcgcgcgcgcgcgggaaggcgggaaggcgggaacgcatgggcaacgccctggggtgcgcggggctcggcgagcggctggcggccagcgcgaggaacggcgacgcggcggaggtgcgccgcctgctggaggaaaacccggggctcgcgcgctgcgccgccgtcggcagcagcctcaactcgccgctccacctcgccgccgccaaaggccaccacgaggtgagcaacgacgacgacgattggtaatcgtttatttgagtcacgcgtcatgcgttttcgtccttgcaaagctggtctgccgcctcgtctacagtggcacgcgcaattaatcacctggacagtgacacaaaatctactactaccggcttccggcacacgtattattttccgggggattttcagaggatcgccgcgttgctgctggagaacggagcagaggtgaatgctaggaacctttccggcgagacggcgttgatgcaggcgtgccggttcggccactgggaggtggttcagacgctgctggttttcggatgcaacgtgtccaaggtggacagcctgagcggccagacggcgctgcacctggcggcagcgggaggccacgccacgtgcgtgcgcctgctgctggccggcgccggcgccggcaggaacaagctcgtgaacagggcggccagcggcggcgtgacggcgctgcacctggcggcgctgcacgggcacgcggactgcgtgcacctgctggtggacgagcgcgccgacgtcgccgcgccgacgctgccctgcacggcggcccccatggcggccatcggcgccgggagcgcgccgctgcactacgccgccgcgggcggcgaggtcaggtgctgccagatcctcgtggcgcgcggggccgacagggccgccgccaactgcaacgggtaagggatgatatgggatcctcttttgttttctggtccgtcgaccgctccatgtcgttacgtgtcctcttctgctaggcaggtggatcccggtggacgtggccaggacgtggggctgccagtggctggagcacgtcctgtcccccgagtctcacctgcgcatccccaggttcccgccctccgcctacctctcgtcgccgctcgccagcgcgctcgccctcgcaagggactgccgcctgcttctcaacacggcgcagctggacagcggcggcgccgacgcctgcgcggtctgcctggaaagaccctgtgacgtcgcagccgaagtgtgcgggcacgagctgtgcgccaagtgcgcgctggacctgtgctcggtggtcaagtcctacgacgtgcccgggatcgccggcaccatcccctgcccgctgtgccggagcgccatcgcctcgttcaggatgcgggccgcggcggacgagtccgagcctgacgtgaacgacgccggcggtggccgccgcggtgccggcgatcgccaggcggcggcgtccagcccggagaagaaacggagcacggactcggaacaggatgtcgtcctccccttctactgcgcgcctctcgccgtcccgtcttgaccggccggcgatgcaggcagcctgcatttgctggacgcagaggagctactgcctactgcatcatcagtggaaacgtaaaatgtgcatacacagcagaggcagacagattgtttgctgatgcttgccgacggcattgctggattttattttttttttattatggttctgcacatggcactagctggtgtaatgtaacatgttggtttattgtggaaagaaaggaggaacattcttttgctgt

SEQ ID NO: 254 - DNA, 1129 bp, Zea mays
  Clone ID: TF_ZmC1087_4
ccggaccgccattcccgggctcagctactcgcctggtgatgggggtcgactggcgcaaccgagcgccggcgcggctgcggtgaccaccgctgagcaggctcaggatctcatcgacgccgctaggtacgacgacttggaggacgtcgtcgccctgttctccgctggtgtctcgctggactccacagattcgcaaggccgcacagctcttgagagtgggttctgccaatggtcaccttgctgtggtggaatacttgattcaaaatggagcggtataaagctaccttttcttgtacaataatttaacatgtcggacaagattagatgtcatcgtttcataatttcaactacttctaggccctgtcgcaatatgttttttttccttatcagagaaaggacaatccgatttctattggaagtcaattgaggtccttttcattttgattggactaccagctatgaaaaagatccactaatcaatctaacctgaatagaaatatctctactacagacagtcagacaccatgcaagttaaccacaagcaaagcctgaaccctttgaagtttcattttgttttttttggactagtctcataagttcggtttgtgactgcataacttcaaattcagaatgttaatgccaccaacatggagaagaacacaccactccagtgggcatgccttaatggacgtatagaggtaatcagggctttgatctcagcgggggctagcgtgagtgctctgaacagccacgagaaaacgccaatggacgaagcggtgaccacaggcaagatggacgtgatcgacgcgatcggtgcggcagtagctcaagccgagctcaacgccgttactgtctcctaaaaggacctgatgagtacctggagctttgaatgacttgcagccttgttcttatctcccagcggttctgtctgtatcactcgcgaacctgaatcccccgacggcccagtatccgggcaatatctatactgacggcaatcgcctgttagtgtcattggcttgaggacatcacccgacctgtcgttgtaaaccagatgtgcagatgtcaaagatcaggattttctcctacaaatgttgtagggccaaaaaaaaaaaaaaaaaaggcccctagggcc

SEQ ID NO: 255 - DNA, 1092 bp, Zea mays
  Clone ID: TF_ZmC4298_2
aatatgggtgtgcatatatctaaggtaagatccctgacgcttgatgtcagggtttgggagcaatctgtaatcaatctctttcagtcaataggcaacacttttgccaattctgtctgggaagaaatgttaccttcatcaagctgtgttgaccatggtgatatttcaagggctgatggattagaaaacatgtcgcatggctttgcacccaagaagcctaaacaatctgattctattgcagtgaaggagaaatttattcatgccaagtatgctgagaaggatttcgtgcggaaacataacatggatgggattcaacttgcagaacagatgtgggacaatgtaagttcgaacaacaagaagggggtgtacagcttgatcgtggggtcaaatgccgacgtaaatttttcctatggtcatacatcattcaattcggctttgactctgggaaaagctctcctcctacaagagcaatcagcctctccatctaacggaagctctagatgttttgaccgcaatccactcgagaagggttgtaccggggattctgtttctcctgccagcacaagcgcccgtacagacgggccggacgattatgttgaaggattatctttgctccatctagcatgccgcgccgcggacctgggcatggttgagctgctcttgcagtacggcgccaatgtaaactccacagattcaagagggcggacgccgcttcatcacagcatcatgaaagggcgacatgtgtacgcccaagctactgctttccaggggcgccgatctcaagccgcggatcgagatggtaggacagcgttacagtatgcaatcgacagcggaaccatagaggacgaagagatccttgttttgctagaggacccaagtagataaatcacgtaggtgtagtagtccaagtctcgagttcctgccgtcctgcggtggtgcattgtggctgccttttgcagtcacctggcacacacagggtccgaggatgccttgctagtattcagtctctgcctttgtggcaagaggaagttatagtttttctaggtctgtctgcggttttggtcgcgcttagggtaaaagtggcctgtttgtcgt

SEQ ID NO: 256 - DNA, 2163 bp, Zea mays
  Clone ID: TF_ZmC37480_1
aacggccgcttttttttttcaagaactctagcaaatgtgctggagtgaattatcacaaaagcaagacgtataatggttgtacgtagcggtactgccaaggaaaaaacatcaaataaagaaaaaaaaacaaatggtgcctgcaatccacctggatttatagtcaggtgaaattattatcagcatttacaaccttattcgtactcgcgtccgtccatacaaatcaaacctaataaagcacaatgccgttttcgcccaactaaaacccagccaaatacacaccacagaagaagcctaacggcagttggcagactgactacgagcgtcagatgttcctagaatgtacgtcatccgcaagctacgcctgttccttcggatatacaaagaactagaagaactagccaaccccctacaaggaacaacaagtcacttcagatcttgaatctatgcccgtcttaactactttcgaccgaactccaccttggcctcctcatgagcaaccttcatcctccggtactcctgctgcgcccgatgagaacggaacaaagcttggacacgtaccactgatctattgaacctgtcctcggcttgttgccgaccaacctggtagtagtcctcctctgcagtgcttgctgcttctgcgtctgtggccattgctactggcattccagttgcaatgccacgcaggccttttctcttcttcctccaccgcaagatagctttttccactactccaacggaccataataccttgcggtactgccttctcacttggtgacctctgtatgcagcttgtattttgatagcttgtcttcgcatgttcatgaagttcctcctaatctgccatgttcggaaatgactctgtattcttgcagcagctctcatcattttctttctgttgtagttccggtatgcgtgctgaatcctcatagcagcaactattgcagatgcatcattctcgggattggccaactgaattgcttttgtttgaagcttaagagttcgctccctgagtgcggcttgtatgttgctagcagcatcagcagcattgcggtaggctgctaaagattctcgtaagcacaattcttgttcactaaggttttcaaattccttggtattccgttttagtgactctgtccttgatgttgatcgcttacccttggacagtgacatagcctcaaaatgagcagtcagccctttctcagaaagatatgcagctaagccatgataaccttgtccagcagccagatcaccagcagtttgtccaccagggacatcatgagtaggatctgtaaccaagcttggatttgctccagcagacaaaagagcagcaaccattttttcccttccacagtatgcggcccaatgcaaagctgtccaaccagaagaatcacggaaatccaaggagaatcctgacaaagaaaataagtgaatggcccaagtatagcccaagcaagaacacagatggataggcccttgtcctagatcatcgcggccagtcgacttgtggccttcaattaatttttcaacaagccactcttgcaatctattacgcagtactagttcaagcaatccctcagtggccggaacataagtgcctttagaatcagtaacaaattttgacagatccatccattccttctctgtcgatgctgataagagattggaaaccttgcttccttctacaagtaacttgggtgctatctttttcttgtttgtggtgaacaacaatcgagctagtctcatctgcatctgaagctttgacttttggggctcatcctcagccaagttttgactgtcaggcaccatacgatagtgaaaactcaaaacctcactgattggtgttttcccatccaaagtcaaataaagattgactcgtccaggagcatgtggtctagcaatgaaacggtaaacgccagtttgaacaatatttgcatcaacacactggtcaccaatgacacagaagagattggtcccagccagatgtctgtagttctcatggaaacatccaaccacaaggacctttgtgtcctcagtacaataagcccattctgaggatatctcagtgatctgaaagggtatttcgccagtcacctgttcagtggggagtatgcccgagcttggaatatcatctaaactaatatcatcatccaagtatttcccccg

SEQ ID NO: 257 - DNA, 1690 bp, Zea mays
  Clone ID: TF_ZmC805_1
ccacgcgtccggccattaactctgcaacctattctcttcctcgcgaaaccgcttccttcgattcattccccctctcccctctccaagacccaaaaccctaacccctacgacccccgtgaccgccgccgccgtcgatgcctgcgctctccgacgtcgcgcttcaggctgccatcgccggcaacctccgcctcctgaagctggtggcgagcaagatgaatctgcgcgaagcgaaggacgccgctgggcggaacgcgctccacctggccgcggagatgggccgtcttgaggtttgcaggttcctggtggaggaatcgggcttcgaggtgaacttcgcctgcgccgaaggcgggtcgccggtccactgcgccgcggccgggggcagcgagagcgtcttgggctaccttctcgaccacggtggcgaccctgtgatgccggactccatgggctccactccactgcatgatgcggcagaggaagggcattgtgcggctgtgaggatgctgctgtccaagggtgtcgatgtggatccacacggctgtcgtgggacgccgctgcacttggcctgctccaatgaccgggatcaggttgttaggatcctgctggaacatggcgcagatcccaacaaagttgtcggtcatgtcctcccaccactcatgatggcatactgtggcggttctttgagatgcatgaagctactgattgaggctggtgcggatgtgaacttgattgctccttctggagtaattttggctcaggcagtttgtgatgggtcaactgagattgtcaagtttttgctagaggttggagctgatcctaacattcctgatgaggatgggaaaatcccgatcatgtacccagcatttaatgggcatcgggagcttgttgaaattctatttcctaagacaagaccagtttcatctttgccagactggagcgttgatgggattattagaagtatgaaagatctgtttttcaagcctcaggatgcagctgtggtggaaaaaaagatagctgatgcgaagtcacaagggaaggaagctttcgcaaggggagagtaccctgcagcagtatacttctataccatggtactagagaacgaccttgatgctactgcgtttgccaaccggagcctgtgctggttgcggctgagggagggggccaaggctctgttagatgctcaacagtgcaaaatgatacggcctcgttggtcgaaggcatggtatcgcgagggcgcggctctcagcttgctgaaggactaccaaggggcagtcaacgcgttcacggaagcattgaaactggatcctgcaagtttagagatcaagaaagccttaagggaggccaccgattccctggcgaacgttggccgctccggagaacagaacccatgagctgctgctgcatccatgtgctttatctcacgttaagaatcctctaacactatgtggctcagcctcatattatatgttgatatatgtcgccttaacgcactgctggagatactagtttcgatctcagcctatatgttttgctccttcgggatgcagcctaagatacatgtggcaaccaagtgaggttgggcagggtagcatatctatggactggttgaactattatatgtatctggatatctaagtgcacctgttgctcctagtaaagttgcagttctaatgaaaaaaaaaaaaaaaaaaaa

SEQ ID NO: 258 - DNA, 1977 bp, Zea mays
  Clone ID: TF_ZmC5707_4
ccctcccctcatcaagggttttcctcctctcctctcctagccttcgccgcttcaccgctgctgccttccctccctcgcaagcctcctccgcgtcgccgccgcccgcccgcccggatccgccatggcttccgacccgaacaaagattccaaatcggaggggctgtctgaggcaaaaaagggggcttccccaacagctggtgcaggccttcccagtccttttgatttttccaacatgagcagcttgctcaatgatccatctataagggagatggctgagcaaatcgccagcgaccctgtattcaaccagatggctgagcagcttcagaaaagtgcgcagggtgcaggggaacagggtgttccaaatttggatcctcaagcatacatggaaaccatgacacaagttatgcagaatcctcagtttatgtcaatggcggagcgtcttgggaatactcttatgcaggatcctgcaatgtccagtatgcttgagaacttgactagtccagctcacaaagagcagcttgaagagcgaatggcccgtatcaaggatgatccgtctttgaagccaattcttgatgagatagagcgtggtggtccatctgcaatggtgaagtactggaatgaccctgagattcttcaaaagattggccaggctatgtcattgaacttcccagtagatgctgctacttccactgtactatctggacctcaagaaactgatgaagaaggcgaggatgatgatgagtccattgtccataacaccgccagtgtcggtgatgcacagggtctgaagaaagcattagatggtggagcaaacaaggatgaagaagatgccgagggaagacgggctttacattttgcatgtggctatggtgaggtaagtgaatctgttaaactttgttaaacggaaatggattacacaacatgcagctaatgtgaatatcctgatgcagcaggacgtccaccatttgttatgtttttttgtcactactatttgtatgttccatgactaaaaatattgtttggttgaaaatttatttttaccaggtcttcttgttgctgctcaattctattaatctgtgttatgcaatttcttcatttaaacaaatattttattgcaaggaatttgctgcattttttaatcctttgttgtggtatttctgtgttgttgtatagttgtagatatatgtagtgttctgatttagtggccagtgccacatgtggttatatcgtgacatactgacatgtctaatagaattaggtttcaatgttctttcgggttttgtctccactagaatgactaaattcaacgttatctagtcaagtctatcacaatcctcctttacttagtgtttgggacctgctatgttaacataggtggagttaattaggtttcaatgtgtgatcacaaatacagtcgagagcatgcggtgtagtgatgcgtctgtttgtttatttgcatatttagatatctatattagtggcaactaattgagtggtgttctgtatatttagttgaagtgtgcagaaattctccttgaggcgggggccgcagttgatgccctagataagaacaagaacactccgttgcactatgctgctgggtatggtcggaaggaatgtgtggatcttctgttgaagtatggtgctgctgtcacgctccagaatctggacgggaaaacccccatcgaggttgccaaactcaacagtcaagatgaggttctcaagttgctagagaaggacgctttcctatagagaagagaaccgccgaataaagtgtatcaagccgtcaaactattggttttgcattggtttatttatctcggtctggtatggttgtctgtagcttgtgaatttgatgttcttttcatagcgaatgccgtttttgaaccagtacttgtgtaagaagtacctaggcttgttcttgtcctccatatatgaatctttcacacttgtcaagaattgattacagttattttc

SEQ ID NO: 259 - DNA, 972 bp, Zea mays
  Clone ID: TF_ZmC1239_1
aggggggactgcggggagctgaggcggctggggcccgaggcgctggccgcgcgtgaccgcgaggggaggacggtcctgcacgcggtcgccgcggccggcgaggccgaggcggtggcggtgctggtggacatgggcgccgacacgtcggcggtcgacgcgcgcgggaggactccgctggacgtcgcgcgcgacaagggataccaagaagtggtggacgtcctggaacggtgggagctggtgatgacggcggcgaggcgaggcgacctcgggagcctcgagtccctgctcagcaagcgcgccggcgtccgcgggcgcgaccagtacggcctcacggcgctgcacctggccgcgatcaagggacacggcgacgcgatcgcgctgctcgccgggccgggatgcatggacgtcgagtgcgaggacgtggaagggcacaggccgctccacctcgccgtcgagggaggccacgcggaggccgtggagctgctgctcgacatgggcgccgacgccaacgcccggaccaggcgcggcgccacgccgctccagatggcggaggccatggggtacgaggccatcgctcagctcctgtgcgcgagaggtgcggaggtggccgccgcgtcggcgttgtgcgccgcgtcgtcgtcttcatcgtccatatcgtgcgcctgatttgctgccggttatcggttgggagagactgttggacggacacgaaggcttgtttgtttccgctgctgctcctgctgtgcgtgagccgagagatgcctacagccgccgtggctggctttaaagtaagaagaagcgaacccgtccgaaattgtactgtactgtatagtggtttgttctgctttgttgggagagtagctcattgttgagacggtcgattgctatacgcggcgtgctggtggaaaaaaaacattcgctatgcaattgcagtgctttacatgttcctcaaaaaaaaaaaaaaaagggcgg

SEQ ID NO: 260 - DNA, 796 bp, Zea mays
  unsure (1)..(796): unsure at all n locations
  Clone ID: TF_ZmC791614_1
gaccccgttccaccctctccctcgcgtcgcctcgaaggaagcgcggctgatcccgctccaagcctccaaccctagcttccccgctccccaccttcctccgtccggggctcatggcggagatcgaggtggtatccgaaggcggcaggcgggacgaggacgaggagcggcggcggcagcagcagcaaggcgcgggggagccggaccccgtggtggacgtgtactctgcggcggcgtatggggacctggagcggctccgcggtttcgtggagcaggggggagccgccaccgcgctcagggagcccgacggcaacggctaccacgcgctccagtgggccgcgctcaacgactacccccacgtcgcgctctacatcgtcgagcacggtggcgacgttaatgcgacggaccacgcgcggcagacggcgctgcactgggcggccgtgcgtgggtccacttccgtggctgacgtgctgatggagcacggagcgagggtcgaggccgccgacgtcaatggcttccgggcagtccacgttgcatctcagtatggccaaacagcattcttgcatcacatcatctcaaagtacggtgcagattttgatgctttggacattgatgggaggagcgctttgcactgggctgcctacaaaggaaatgcagatacaatcagattactgctatttatggatgctaatcaagtaaggcaagacaaaaatggttgtacccctttacattgggctgccataagaggaaatttggaggtttgcacagttcttgtacatactggtactaangaagagct

SEQ ID NO: 261 - DNA, 648 bp, Zea mays
  unsure (1)..(648): unsure at all n locations
  Clone ID: TF_LIB4740-025-R1-K1-G6
ggtggtaccctncnagtccggccgggttttgcctgttacgagattggaggttgaccccactgattattgctacctttagaggatatcctagtatcgtgaagattttattggagcacggtgcagatgctggagctaatgtgaatggttttggatcttataatcccttggcaagagctgcagagaaaggtttgactgaagctatcaagtgcttgttggaagctggtgcaaatccaaacgttcctgacacatttggcaggctgccaatagaattggctgctgagtatggtacatgggaagatgttgaacttctattccctgtcacttccaaaattccaacagtggcagattggagtgttaatggagtaattagtcatgtacacatggaagtcacgcaactagagactagcgtgaggtcacgagtcatctgaaaagcaagctggtacctagaatctcaagtcccaggtcaagaacaagaacaggtaccacaggatgaggcgcgtggaggatgatgtgacgtgttcgtgagaggtctaggccgtcgtctcccagtcaactttgggttgctggaccgttgtctccttataatgtaattatttatttattttgtacataactcctattatatagtaaagatgtgacattcgatcc

SEQ ID NO: 262 - DNA, 927 bp, Zea mays
  unsure (1)..(927): unsure at all n locations
  Clone ID: TF_LIB4748-002-R1-M1-F5
ggccgtcgcactttcgcgcttcatccagcggagtggtgccccatctgtcggtggtgaacacgctggcgccggcctcgacaagcatcttggcgatgaggtacaggccctcggcggcggcgatgtggagcggtgtgcggtggtcgtagtccctgcagtttgggtcggcgccgtaggccagggtgcgccgaatgaagtccgagtcccccttggcgactgccgtgcacaggtggctgccggcgttcttgaggctcagcttggcgcccttggcgaagagcagcgctgccacccgttcttgcccctgcttcactgcctccagcaacggcgtgttcccaaattggtctggtgaatcgagaacaccaacatgacatgatcagagtggtagcaatagtcctagaaaggaaacaggaagacagcagggatgtcatgacaatggcagtggatcgcgtgtggcggcgtaccggtaaggtccatgtcgacgccttcgttgacgaggaattgcacgacgtcctcgtaccctctggaagccgccagatgcagaggggagcggccgtcgtagtcggtgttcttgggatcagcccctgcccggatcaggcttttcagctggtgcaggtcgccgtagaaagcggcgctgttgacccgcagggtgagctccgcctcctgcttcccgatgtggagcgtgatgtccgattccagctgcttcacccgtccgccatactcgctctcggagagattgctcaggatcctcctgccgtcgacgaagtagatctccaggatgttggtgaaggactgcttgtcgagacgcaggagccggcagagctcacagacgcggaccgtgtagggctgcggnatgttgcagaggattgagatctcgccaaaggagctctctggctccagcattagcagagtctttttttgccgtcttcaccg

SEQ ID NO: 263 - DNA, 1608 bp, Zea mays
  Clone ID: TF_ZmC21063_1
tcggtcgctttccctcctcagcttcagccttcagctcctctcctctcctttcctctcctctgctctcctctccacagctgcagccagagccacccaccttatcgtcatcctcgctcgctcctcatcgccagcgcctcctcctcctcttcttccccaccgctgccgacatggctgcgcaagaggagaagaccgctgttgctgctgctgctgatgtcgccgcagaggagcctgcgccggcgccggagcagcagcctcagccggctggggcggcgcgcagggcagggccatcggcacccggcggggctccgcccaaccccttcgacttctccaccatgatgaaccttctcaatgaccctagcatcaaggagatggcggagcagatcgccaaggacccggcgttcacggagatggcggagcagctgcagaagacggtggtgtccccgcggcagcaacagcagcagcaggcgcggcagcagcagcagcagctggacccgcagaagtacgtggcgacgatgcagcagctgatgcagaacccgcagttcgtggccatggcggagcggctaggcagcgcgctgatgcaggaccccgccatgtccgccatgctggggggcctcaccaacccggcgcacaaggagcagctggaggcccgcgtcgcgcgcatgaaggaggaccccacgctcaagcccatcctcgacgagatcgagtccggcggccccgccgccatgatgaagtactggaacgaccctgaggctctgcagaagttcggccgcgcgatgggcgtcggcgtcggcccgtccggcgaggccggcggcgcagagcacgccgaggcggaggacgacgctggggaggaaggcgagtacgaggacgagtccatcgtccaccacaccgccagtgttggcgacgtcgagggcctcaagaaagcgctggagaacggcgcggacaaggacgaggaggactcggaagggcggcgtggcctccacttcgcgtgcggctatggcgagctccagtgcgcgcaggcgctcctggaggccggcgccgccgtggacgccgtcgacaagaacaagaacaccgcgctgcactacgccgccggatacggccgcaaggactgcgtcgcgctccttctcgagagcggcgccgccgtgacgctgcagaacctggacgggaagacgcccatcgacgtggccaagctcaacaaccaggatgacgtcctcaagctgctggagaagcacgccttcgtatagacgtcccacgccgccggccggcccgtcttgctcgtctgctcctgtcgccgccgctgccacgtcgcttgcctctgctactgctgccgccgccgccgccattaatgctttgttgatttctctcctggtctagacaacgcaggttccttcatcacttcactgttgagtatttgcattgggtgtgtatgtatcggattttgctttgcgtgatcacggtatcatatttatttatcggactcctcgttcatcaggaggttttcgtaatgaataaggaagaaatttccatttcaccgtccaaaaaaaaaaaaaaaaaactcgagactagttctctcctcgtgcaaaaaaaaaaaaaaaaaaaaaaccccaaccc

SEQ ID NO: 264 - DNA, 1887 bp, Zea mays
  Clone ID: TF_ZmC13122_1
tattttgcctgaagccctggtcccgtcctcttcagggcctcgccgtcgcctcctcttttttcccccctcgtcgacggctcctcctcacaggctcacagcctcacactcacgcggagagcgctcgcgcgggcgcacacgcggaggggacgttcacaggagggggagggaggagatgccggggagccagaacggggggccgaggcctcggccggtcaaagccgagaccatccacgatcttgcgcgcgccggcgacctcgccggcgtccagaggaagctgctggagaacccctccctcctcaatgacaaaaatcccgtgatgtgtcaaacaccacttcatgttgctgctggctacaataatacagaaatagtcaagttcttgcttaaccagcaaggtacagaaacagttgatctggaggcaaagaacatgtatggggagactcctctgcatatggcagtgaagaacagttcttgtggatcaacaaatctactccttgaacatggtgcacacatagaagccaaagccaataatggcatgacaccattgcatttagctgtctggcatgcaattcaagctggagacttcagcacagttagcgtgttactaagctacaaccctgattgctttgtgaaagatgatgaaggcaaaatgcccttaaatcatattccaggaggagctggtagtgagaagctgctgaaactcctcactcatcatatggaagagcaaagaaaacggaaagctctcatgtcatgcctcgaagggaaagcaatgtcagagtttgaagaggcaatgtcacaaattgttggattgcaggagctaaaaatgcaattgcgccgatgggcacggggaatgttttttgatgagaagcgacgggctatgggcttggggattgctaaaaggagagctccccatatggcatttcttggcaatccgggaactggcaaaactatggttgctcgaattcttggaaagctcctccacatggttggaattctccctactgacaaagtaactgaagttcagcgaactgatcttgttggagaatttgtggggcataccggaccaaagactaggaggaagatacatgatgcagagggaggtattctcttcgtggatgaagcttacaggttgataccaatgcaaaaatccgatgacaaggattatggtttagaagccttggaggagataatgtctgtaatggacagtggcaagatagttgtcgtatttgcggggtactgtgagccaatgaagcgagtcatcgcctcgaatgatggcttctgcaggcgggtcacgaaattcttctatttcgatgatttcagtacgacagaactagcagagatcctacatatgaagatgaagatcccaagtgactgtagcttgctttacgggtttaagctgcacccaagctgcagcattgaagccattggagagctgattgccagggagatcactgaagagcagaggaagcagatgaatggaggccttgtagacacgctgctcatcaatgcccgcgagaacctggattcgcggcttgatttcagctgcaacgatgccgatactatgatcacgatcacgttggaagacctggaggcagggcttcgtcagatttccagacaacgtcagctgcagtgacatgtaaatttaggagaattttttctcgatgatctcatgcttgtctccaagggcgaagttatggctgtatcgtctcatccaacgtttttggctattctgactgtctgttgtatgtagtcgttgctaaattgatgccgtccaacatatagcagtaaaatgcatgtggtatatacaattatacatcatgcccatgtttggtttcaatagtcttaggactaaactttagtcctagactaaactttaaaaaaaggaagacc

SEQ ID NO: 265 - DNA, 1854 bp, Zea mays
  Clone ID: TF_ZmC13122_2
cctcgaggccggccgggctatagatggtaaagtgaaaaaaaaaaaaaaaaaaaaaggctcacagcctcacactcgcgcggagagcgctcgcgcgggcgcacacgcggaggggacgttcacagggggggagggaggagatgccggggagccagaacggggggccgaggcctcggccggtcaaagccgagaccatccacgatcttgcgcgcgccggcgacctcgccggcgtccagaggaagctgctggagaacccctccctcctcaatgacaaaaatcccgatgtgtcaaacaccacttcatgttgctgctggctacaataatacagaaatagtcaagttcttgcttaaccagcaaggtacagaaacagttgatctggaggcaaagaacatgtatggggagactcctctgcatatggcagtgaagaacagttcttgtggatcaacaaatctactccttgaacatggtgcacacatagaagccaaagccaataatggcatgacaccattgcatttagctgtctggcatgcaattcaagctggagacttcagcacagttagcgtgttactaagctacaaccctgattgctttgtgaaagatgatgaaggcaaaatgcccttaaatcatattccaggaggagctggtagcgagaagctgctgaaactcctcactcatcatatggaagagcaaagaaaacggaaagctctcatgtcatgcctcgaagggaaagcaatgtcagagtttgaagaggcaatgtcacaaattgttggattgcaggagctaaaaatgcaattgcgccgatgggcacgaggaatgttttttgatgagaagcgacgggctatgggcttggggattgctaaaaggagagctccccatatggcatttcttggcaatccaggaactggcaaaactatggttgctcgaattcttggaaagctcctccacatggttggaattctccctactgacaaagtaactgaagttcagcgaactgatcttgttggagaatttgtggggcatactggaccaaagactaggaggaagatacatgatgcagagggaggtattctcttcgtggatgaagcttacaggttgataccaatgcaaaaatccgatgacaaggattatggtttagaagccttggaggagataatgtctgtaatggacagtggcaagatagttgtcgtatttgctgggtactgcgagccaatgaagcgagtcattgcctcgaatgatggcttctgcaggcgggtcacgaaattcttctatttcgatgatttcagtacgacagaactagcagagatcctacatatgaagatgaagagtccaagtgactgtagcttgctttacgggtttaagctgcacccaagctgcagcattgaagccattggagagctgattgccagggagatcactgaagagcagaggaagcagatgaatggaggccttgtagacacgctgctcatcaatgcccgcgagaacctggattcgcggcttgatttcagctgcaacgatgccgatactatgatcacgatcacgttggaagacctggaggcagggcttcgtcagatttccagacaacgtcacctgcagtgacatgtaaatttaggagaattttttctcgatgatctcatgcttgtctccaagggcgaagttatggctgtatcgtctcatccaacgtttttggctattctgactgtgttgtatctagtcgttgctatatagcagtaaaatgcatgtggtatatacaattatacatcatgccctaacattatttgacatctgtggaatagccagtaccacatacggatttcagtacgtgcataaaaaattcagatttgacggttgaagtgattg

SEQ ID NO: 266 - DNA, 1012 bp, Zea mays
  Clone ID: TF_ZmC23227_1
ttccgttttttttcttttttcacaagccagaccgccaggcgccagtagccattgagtccttgacccgaagtcccacagccgccgccaaaagggttcctcaccatcttgaacgctcgccggaccaatcccaagcagtcctcgcagcagatggcagttcccggcggccgcaacggactcagggacgaggacgacgacatggcccagcacgccgaggccttcggcggcgtctctgacgacgaggacgtgcccccccaccttcgcgccctcgccaacgccgcccagtccggcgacgtcaccgcccttgtggctgccctcgataatcatgatggcagtattgatgttccagttgaagatggtgatactttgctccatctggcatgcttatatggtcatcttccttgtgtgcagctattgctggaacgtggagctagcttggaatgccaagacgaagaaggtgctattcctcttcacgatgcttgtgctggaggcttcactgagctggtccaatatattctcaactttgctgccaacaaggatggttgcgtagtgagaatgctcaacactattgattctgaaggcgatacgccgctccatcatgctgctagaggagaacatttggatgttgtcaagcttcttctccaggctggggcgtcccccaagaaggagaacacttacgggcagacacccgctgatatggctgaccaagacaccgaagttcgaaccctgttgactgccaagcaaattgaggcaagcacacacatgagtgatgattaagcggcattggaatccttagttgcaactggtaatgttgagaaatagccgtaacatcttatctgccatccaaacttcatttgaactgaagtaatattgtaatcagactagtatggaggggttagcttagctacatgatcatgctccttttccttatcgctgcattatactaaagatgaagtggaacacccatcggtctttcttgttctttcgcggaaaatctgatgcttgatcaccgaac

SEQ ID NO: 267 - DNA, 1804 bp, Zea mays
  Clone ID: TF_ZmC13153_1
gcgcggggaccctcgagccgtgcgccagatcatcgccgagattgacgcccaaatgaccggcaccggcgaggagttcgacagcgacgtcgccgagatccgcgccgcgatagtgaacgaggccaacgagatggaggcgaccgcgctgctcatcgccgccgagaaggggtttcttgacatcgtcgtcgagctgctcaagcactccgacaaggacagcctcaccaggaagaacaagtccggattcgatgctctgcacgtcgctgcaaaggagggccacagagatatcgtgaaggtacttctggaccatgatccatcccttgggaaaacgtttggccaatcgaatgtgactcctctcataactgcggcgatcagaggccacatcgaggtggtgaacctactgctggagcgagtttctgggttggtcgagttatcaaaagcgaacggaaagaatgccttgcacttcgctgcccggcaggggcatgtggaaatcgtggaggctttgctacatgctgatacccagcttgctcggaggactgataagaaaggccagactgctctacacatggcagtaaaaggaactaaccctgaagtcgttcaagcgcttgtgaacgccgatccggccatagtcatgctacctgacagaaacggcaacctagctctgcatgttgcaaccagaaagaaaagatcagagattgtaaatgtgcttctgctccttccggatatgaacgtgaatgcgttgaccagggatcggaagaccgcgttcgacatagccgagggccttcccctatcagaggagtctcaagaaatcaaggagtgcttgtcccgcgctggcgcggtcagagcaaacgagctgaatcagcctcgggatgagctcagaaaaacagttacagagatcaagaaggacgtgcatacccagcttgagcaggcgagaaaaaccaacaagaatgtctacggcatcgcgaaggagctaaggaaactccacagggaaggcatcaacaacgcgacgaactcggtgaccgtcgtggcggtgctgttcgcgacggtggcgttcgcggcgatcttcacggtgcccggcggcaacgccaacgacggcgtggcggtggccgtgcacgcgacggccttcaaggtgttcttcatcttcaacgccgtcgcgctgttcacgtcgctggcggtggtggtggtccagataacgctggtccggggcgagaccaaggcggagcggcgggtggtggagatcatcaacaagctcatgtggctggcgtcggtgtgcacgacggtcgcgttcatctcgtcgtcctacatcgtggtggggcgccacttcaggtgggcggcgctcctggtgaccctgatcggcggggtgatcatggccggcgtgctcggcaccatgacgtactacgtggtgaagtccaagcgcacgcgcaagatcaggaagaaggtgaagtcgacgaggaggagcggctccagctcgtggcagcacaactcggagttctcggactcggagatcgaccgtatctacgccatatgaagccggcgcagtgcagctggttcctccagacagacagacccttttggcagcggcacgaaaaggtagacatggatcacgacccttgagatgctagtgggggctggttgactttgtacattccaataagctgggtgtaaaaactgccattccctttgttcgtgaatcggcgggaggcgacggttgtatactgctacagatagatttctcatcagattatatagtatggagtatactattattgtcgttgttatatatatgcagcatgtgctgtgctccttgtgc

SEQ ID NO: 268 - DNA, 775 bp, Zea mays
  unsure (1)..(775): unsure at all n locations
  Clone ID: TF_LIB4721-017-R1-K1-F5
cgggtgttgttccgatctgtgtcccctttgttgacaatatggttttgttcttcttaatcgtatgtttttacttcactagtaaaacattgcatttttaattctctttgggttagttttggtggatgacgattcttggtttttaatttggacagcatggtgccaatgtaaatgctatagaccacacaggccaaacagcacttcactggagtgctgtgcgtggccatgttcaagttgcagaattacttttgaaggaaggagctaaagtggatgccactgatttatatggatatcaggtcacccgtggcacttcctgttatcattgtatcttctattcgtccagtatattttcataatttctcctgatggttcacttcttctgatgcaaaatattaatggagtttattgggttgcacacagattaataaataatgcaccattatcactgtagatcttatattttctttctggctgtaatgatggtttggatgggataactaagatgtgtatatacaatggatttctgttcttctgctctgcaaattccgccattcttgcaatcacaccagcatgttatctagtgtcagatgagttattaatagggtatttggtttgagtaataagctagaccatcatcttctcactcctcactgnttttgtttggtttgtggaatggaatgagttgatccatcaccacctcattcctaatacttagttagttagtattaacatgaggaatgggatcatcccaccaaatttgaggaatgaactaatgata

SEQ ID NO: 269 - DNA, 817 bp, Zea mays
  Clone ID: TF_ZmC518296_2
agggattcgagttggatttctagggtttgctcatcctcatccccatcccctcctcgtcgccgtccgtcgccttccccacctccggtcgatcgaaatttgcgatttttgattgatttccggacggaagacatgatccccaactccgtcgacgccttcctctgatctcatccgtctccccccgaaaaaaccaacccagattcgacatactatggtgcgccgccgcccgtcttcctcctctacctcctcgtcgccgatgctccacaagaacctccgcgcgctcggccccggcctcaatccgtttgcccccttcggcatgggcaactactcccgctaatctcccccctcccctcccctatcctctgctcaatttctccccggatccgatttgcttcttccccccttctcgttcttgatttgattggattgctcctctctctgcttgattgcttggttggtttggatctgcttgcaagattggacaaggggccaccatggtgcagctccgcagctcgctcagcatgacccgggcgcgcgctcgcggcggtgactcggacgacgccgacgaccgcggctggaaccagctccacgtcgccgcccgcaagggcaacctcaaggaggtgagacgtctcctgaatgaagggatggatgtcaatgcacccgcatggggaccaaagtctcctggcgctactccgctgcaccttgctgctcagggcgggcatgtgaaaatcatggatgaactactggagcgcggtgcgaatatcgatgccccgacaaaaggagcttgtggctggactcccctgcacattgctgccaggaa

SEQ ID NO: 270 - DNA, 2368 bp, Zea mays
  unsure (1)..(2368): unsure at all n locations
  Clone ID: TF_ZmC12604_2
gggtacctcgaggccggccggggaaaaaaatccnnaaaaaaaaaaaaaaaaaaaaaaaaaaaaagggacacccccgggcccggccgggattcacgctgcctcggccggcacctacctcccccacttcgccgccggcgggtggagtcgggccggagcagccgctagctcgcctctgttaccccaaaaaagacaaaaaaaaataaagagagagtaccaagcaagccgccggcagctcgggcagccatggggcacggcgtcagctgcgctcgcacgggcgacgagcacaactacttccgcgcggcgcaggtcggggacctcgacgccctggacgcgctcctcgccgccgacccctccctcgcccgccgcgccacgctctacgaccgcctctccgcgctgcacatcaccgccgcgaatggccacctcgaggtgatgtccatgatcttggatcacggggtgccgccggacgccgtgaaccggcacaagcagacgccgctgatgctcgcggcgatgcacggcaagatcgactgcgcgcggaagctcctggaggccggcgccaatatcctgatgttcgactccctgcacgggcggacctgcctgcaccacgcgtcctacttcggccacgtcgactgcctgcgggccatcctcgcggcggcgcggaccacgccggtggccgactcatggggtttcgcccggttcgtcaacgtcagggacgaccgcggcgccacgccgctgcacctcgccgccaggcagggccgctccgcctgcgtgcaggtgctgctggagaacggcgccattgtctccgccctcaccggctcctacgggttccccggcagcacgtcgctgcatctggccgctcgaagcgggaacctggactgcatccggaaactgctcgcctggggcgcggatcgtctccagagggactcagcagggaggattccttacgccgtggcgctgaagcgcaaccacgcggcgtgcgcggcgctgctgaacccgtcggcggcggagcccatggtgtggccttccccgctcaagttcatcagcgagctggacccggaggcgaaggctctcctggaagcggcactgatggacgccaatagggagagggaggagaagatcctcaagggcatcaccaagtattcgcagccatcgcctacttcgccttgcgagcacgatgccattgacgaagcgtcctcggaggccagcgacgcggagctgtgctgcatctgcttcgagcaggcgtgcagcatcgaggtgcaggactgcgggcaccagatgtgcgcggcgtgcacgctggcgctgtgctgccacagcaagccgaacccggcgacgctgacgccgccgtcgccggcctgcccgttctgccgcggcagcatctcgaggctgctggtggcccgggcgagccccgacgccgatgacgacgacaaggccgccgccgcctcgtccccgcagctcgtccggcggcggtcgcacaacctcagatgggcggcggcgacggcgtggacaagcccgagcacgacctgtgatcggcatttgatgctgtgcgtggctgagcagacagcagagcacgaccattttaaaagctgaagcaggcattgccactggctttccaagatgagagacatcacatccaagcgtgattatctactggagtacttgtaatgcatcctcttcttctcccccatgtctggtctatttttgggcgtgctaggatggacctggccggcgcgatatggttgagctgagcttgagccaccgacatgtgtgtaaaactgtcggtcgagagaacacgcagagtggaaccggcgatgtgcagtggacttacttgtaaaaaaaaaaaaaaagggcggccgnnnnnnnnnnnnnnnnnnnnnnnnnnnnnnnnnnnnnnnnnnnnnnntccgtgagcggtgctccggccatggccgaaagaccggtggcagccagccaatggtccgtgnnccgtgatgcacgcaggagcggtgcatggagcaaggctcagagcagccgcagttattgtgtgccagtgtcgtccgagcgctgctcaccccacaggcagcagatgcatgccgtcactgaccagctgctgtcctgcaagatcttcactgtgctagagctatggtcggtcaggcatgctgcaaaagcttgaccccttgccaggaaggaaccagagatagccaatccctacctccctngacgtcgacgagatggctatccgtttggacatgaccaagagtaatgctcccagtttcgagcccaacgccgccattactccgacatcacccaagccttacctccgctccaagcgtgtagcccggctacaggctcaaaccctccaggcctccaccagcaaaatcgtgatgcttttcta

SEQ ID NO: 271 - DNA, 635 bp, Zea mays
  Clone ID: TF_ZmC36749_3
aacgaaactattctacgatggttcaaaaatcaatccttggtctagcacttctgtctgaagactgtaggagctgaccaatacagacgcacgcttttatttttacagctccgcgtttccagtgcttgcagctctatgcaaaggtgtgcagccaaacttgtctttcttgttgacattagcaccatgggctattagtttttcagctatgttaagcctccctttactcgcagcataatgaagagcagttcgaccaccatcagtaaccaggttaacatcagcacctcgctcaagcaggatgtcgacgatttgagagttgccggagctcgcggcggagtggatcggcgcccacccctcctcgtcctgcgcattcagcacgctagccgcggcgtcaccaccgcactgggcaagcgcgagcaccacctggggatgcccggcagcggcggcgacgtggaggagggagcggccgtcctcgttgcgcagggagaggtcggcgggggcgagggaggcgaacgcggcggcgtcgccggactcagcggcgcggaagagctccttctctgacggtcgcctctcctcgccgccggcttcgtcgacgtccatcgctgcagccatccggactccggagttactcgtactcgagg

SEQ ID NO: 272 - DNA, 855 bp, Zea mays
  Clone ID: TF_ZmC515903_1
atcaattcctcactccactcgccccgcccagccagatcttcctagaaccttcagcaaccctagggccccagcgagaggcctctgccgctgccgccgccatggcccccaaccccgccgcaatcgccctcctggctgccctcgacggcaatctccgcctcctcaagaaaatgtccaaaaagatggatttgcgggaaacaaaggaccccaaagggctcaacgcactccatttcgctgcaaataaggggtccctggagatttgcaagttcctgttggaggacgtgggggtcgatgtcaactcggtatcaagcgtaggtgcgacaccgatgttttatgctgcactcaagggaaatcttcaggttgccagatatcttctcgatcatggtagcgatccggcgaaacctagtgagaggggcttaacgccgctgcacaatgcagcagagcatgggcattgtgagattgtaagactgttgctgtccaaaggagttgacgtggatgttatcaattaccgagggacaccattacatatgactgctgcaaagggtcagcatcaggccatgaaaattctgctggagcatggtgctgatcccaacagagtagtcatcatatcttctcaccactaatgatggcatgctgtgggaactccttggaatgcatgaagctactgattgaggctggtgctgatgtgaatggtaatagtagctctggaccaactcctttaacgggggcagttgatgatggctcaactgaattcgtcaagttcttgctggaggctggagctgaccctaacattcctaacagcacggggatattccatcaagagagcagcagtccgtggtcagcgtgaacttgttgagc

SEQ ID NO: 273 - DNA, 691 bp, Zea mays
  Clone ID: TF_LIB4757-035-Q1-K1-C3
gtaggatttccaggagacagaaaccaaacggagacgcagagaaaccctttccacccagattcgttcggttcggttccgaccacgcgggagcgggggcgggcgcgggagagaggggggagatgagcgcggctgcagaggacgcggctgcggccgatgggggatccggaggcgggagcagcggcgcggggtcgtcggaagggggcgcgcggcgccggttcgacgacaagggcctcgtcgcccgcacctcgctcatcctgtggcacacgcaccagaacgacgtcggcgccgtgcggaagctgctggaggaggacgccgcgctcgtcaacgcccgggactacgacagccgcacgccgctccacgtcgccgcgctccacggctggcacgacgtcgccgagtgcctcgtcgccaacggcgccgacgtcaacgcccaggaccgctggcagaacacgccactagctgatgcggagggcgcaaagcggcagcccatgattgagctgctcaaggagcacggtggattgacatatgggaaaactggaagccattttgaaccaaagacgattccaccacctctaacaaataaggctgactgggagattaacccacttgaattggacttcacaaaagcaactgttatcggaaagggctctttcggtgaaatttctgaagcaaattggcgaggaacacctattgc

SEQ ID NO: 274 - DNA, 783 bp, Zea mays
  Clone ID: TF_ZmC34704_1
ggggcgcgtccgggatttccagagagacagaaacaaacggagacgcagagaaaccctttccacccagattcgttcggttcggttccgaccacgcgggagcgggggcgggcgcgggagagaggggggagatgagcgcggctgcggaggacgcggctgcggccgatgggggatccggaggcgggagcagcggcgcggggtcgtcggaagggggcgcgcggcgccggttcgacgacaagggcctcgtcgcccgcacctcgctcatcctgtggcacacgcaccagaacgacgtcggcgccgtgcggaagctgctggaggaggacgccgcgctcgtcaacgcccgggactacgacagccgcacgccgctccacgtcgccgcgctccacggctggcacgacgtcgccgagtgcctcgtcgccaacggcgccgacgtcaacgcccaggaccgctggcagaacacgccactagctgatgcggagggcgcaaagaggcagcccatgattgagctgctcaaggagcacggtggattgacatatgggaaaactggaagccattttgaaccaaagacgattccaccacctctaacaaataaggctgactggacccacttgaattggacttcacaaaagcaactgttatcggaaagggctctttcggtgaaattctgaaagcaaattggcgaggaacacctattgctgtcaagcgcattcttccatccttatctgatgacaggctggtgatccaagattttaagcatgaagtcaacttgctaataaagctgagaca

SEQ ID NO: 275 - DNA, 2059 bp, Zea mays
  unsure (1)..(2059): unsure at all n locations
  Clone ID: TF_ZmC139143_1
cctcgacggcggggggaaaccctttcacgccacggggccccaactgcgcctctcgcaatgtcgctcgagatccacgaggaggatggtggggcgtctggtgcacgtccggcgacgaaggtgatgtctgtttccgggagcgggaagcgggggcggtacgtgcggcaggtgacggggcggcacaacgacaccgacctccacgtggccgcgcggggcggggacgccgcggcgctgcggcgcgcgctgttggacgccgctgcggccgtggccgccacgggggaggcgccagaggacctcgaggcggcgcggcgtgcggtggccgcggagcccaacgaggccggggagaccccgctcgtcgccgcggcggagaggggccacctcggggtggttgtggagctgctccggcacctcgacgcggagggactggccgccaagaacaggtcgggctacgacgcgctgcacgtcgccgccagagaagggcgtcatgctgttgtgcaggaaatgttacatcatgataggatgcttgccaaaacatttggccctgcaaatactactccacttatatcagcagctatgagaggccatattgaagttgttgaacttttgctggaacaagatgactttggattggtggaaatggccagagataatggaaagaatgccttacattttgctgctcgacagggacatactggaatcgtcaaagcgctacttgagaaggatcctcagttagcaagaagaaatgacaagaaaggtcaaacagctcttcatatggccgtaaagggaacaagctgtgatgttcttagagccctagtggatgctgatccagcaattgtaatgctgccagataaaaatggcaacacggctttgcatgttgcaacaagaaaaaagagagcagagatagttagtgttcttttgcggctaccagatactcatgtcaatgcactaaccagagaccacaagactgcctttgatatagctgaagggttaccagtatgtgaggagtcttgcgaaattaaggatattttatctcaacatggtgcgctcagatccagggagctcaatcagccacgagatgagctacggaagacagtgacagagataaagaaagatgtccacacacagctggaacaaacaagaaaaaccaacaaaaatgttcatggcattgctaaagaactcaggaagttgcacagagaaggcatcaacaacgctacaaactctgtaactgttgttgctgtgctgttcgcaacagttgcttttgcagctatattcaccgtacctggtggaaatgacaataatggacttgcagttgttgtccagactacgtcctttaagatattcttcatcttcaatgctgtggctctatttacatcattggcagtggtcgtagttcaaataacagttgtcaggggagaaaccaagtctgagcgaagggttgttgaggtgatcaacaagcttatgtggatagcatcggtttgtactacaatatctttcattgcctcgtgctatattgtgctaggccgccatttccagtgggcagcaatattggtatctttgataggtggtgtcacaatggccggtgtacttggtactatgacatactatgtggtgaaatcaaagcgccaaaggaagattagaaaaaaggagaagatgtcaagaagaagtggctcaagttcttggtatgacaataccgagctctcagatactgaacttaatccagtatatgccttgtaaagagtgtttgtctcaggaatcgagtatgtactaacagatacaatagcttacattatttgttgattgttcaatttctccagttccagtaacaacaaaaccacacagaactttcccaaaaaaaaaaaaaaaaaagcggcctgaatttgatggnagcccatgtgctcaatctgttgtacatgtgagttacaattttttttttctttctgagagtcacttctgtgctttatcttcaggattgctcgtattgtaaagctcaagccaagggctgattttagatacttaatccttaaagtacttcaagtttatgtgcaaaaaaacccccccccgc

SEQ ID NO: 276 - DNA, 814 bp, Zea mays
  unsure (1)..(814): unsure at all n locations
  Clone ID: TF_LIB4828-028-A1-N1-C10
ccggccgggaatccaatccctacctgctcgggaaccacccgtcgggctcctcccgcccccctcgccgcatctgcatgcggcggggatctccgggctcgctccgtcaccggagccccaatcaccgccacctcatccaagcccccgaatcccccgggcgcgcagcacaaccttgccgcgatcgcgcgcgggaaccgccgctgattgggtcgtgaaagctcgattttgggcgattttgattcggagaacccgccgtcattcgattttggcgcgcgttgcgagccgggatggggttgcagcagtccaaagaggaactgctgtaccagcaggtcaactacggcaacgtcgacgggattcgcacgctccgggggcaaggcgctggtctcgagtggattgacaaggaagggaagacgcccctgatgcttgcctgtatgcgcccggatctgttcgacgtggccaaggtgctgatcgagttgggagctaatgtgaatgcctacaggcctgggtcacactgtgggacagcattgcaccatgctgccaagaaaggacttcagcagactgtccatttactactctcacatggagagggacggctttgtcttttttgtggatggatgagagagaactatgctcctgcttttttggatgcaattgctccacagttcatgacaagaaaaatttgngctgttgttttaccccgtgaagtgcgaactccaacccaggcctctaaagtagagatagctatatatccctgaatacaggcttctaaaccacgttctgtacttaaactatggaaatgtccaattgagcaaccaag

SEQ ID NO: 277 - DNA, 1852 bp, Zea mays
  Clone ID: TF_ZmC20337_1
tccgcggggctctccgtcgcactttctcgtgcctcggggaccccgatccgccaccgcgcgaccgatcgtcccggatgcacgggccgtacccgacggctgctgctgctgctgcttcttcttcggacgacatggcggcgaacggcatgaaggtggctctgcaccggcaggtctcggggggctcgatgaagcagaacgcggagctccggcgccaggcgtcgctcgagtccccgcggacggggcgggccaccagccggttcctgttcgggcggcagtcgtccatggacccgaaccggaggcgcggccggagccagagccccgtgcgcgcgccggaggacctgggcgtgccggacaacctggacgccaccatgcagctgctcttcttcgcgtgccagggcgacgcgctggggatcgagggcctgctgcgcagcggcgtcgacgtcaacagcatcaacctcgacggccgcaccgcgctgcacatcgccgcgtgcgagggccaccgcgacgtcgtcagggtgctgatcagctggaaggccaacatcgacgcgcgcgaccgctggggaagcacggcagtagctgatgccaagttctacggccactccagggtctacgatctcttgaaattccatggcgcaaaggttccgagaaccaagaggacgccaatgatggtgtcggccccagccgagataccggagtacgagctgaaccccggagaggtccagttccggcgaggctgtgacgttacaccgggtgtgtaccacatcgcgaaatggaatggcacaaaggtttccgtaaaaatacttgacagagacggttgctccgatcaagaagccgcaaactctttcaggcatgaattgactgtgctggagaaggtccgacaccctaacgtcgttcagttcgtcggagccgtcactcagagcatacctatgatgattgtgtctgaactccatgaagagaaagacttatcagtctgtatccagaagaaaggaaagttaaagcctcagaaggtgctaagatacggccttgatattgccaggggcatgacctacctccaccagtgcaagccggaccccatcatccactgcgacctaaagccaaaacatatcttcctggatagcggaggccagctgaagatcgcggggttcggagtgacaaggatgtccaaggtcgggaccgacaaggtgaggttgatctaccatggcgctctcgtcgacagcttcagctaccacaccgcgcctgagctgtacaggaacgacgcgttcgactcgagtgtggactcctactccttcggcttcatcctctacgagatggtcgaagggtcggtaagagcgccggaggattcagggcactcgatccggttcgagggactgcggccatccctcaagggcaggctcaagggctatcctcccgacttcaaagcgctggtggaggaatgctggcacccgcaagccatggcgcggccgacgttctcggagatcatcatccggctcgacaagatctacgcccacttcgacaagcatgggagctggaaggactcgctcaagctttggaaatgatcgatggcatggcctgcactgcacgccgccttctttgtgtacatacataccgcgctgcaaacgcgtctctttccggggaagattgagtactggttgtaccttgtaaaaggtggagactggagaatcatgtggcatggtgattgttttttttttttgctacgaattgtaacagattgtgagtaaaattgggcagaacaacacgtatacgtccccccccgcagtgtcaaaaaagaaagcacatttgctgttgttttttctgctggagtcgtacatacaaaagcaatactgtaagagatatc

SEQ ID NO: 278 - DNA, 1941 bp, Zea mays
  Clone ID: TF_ZmC14450_1
ttttcacgccggcggccgttattctcccaggccggagagacatggactcggaacccgatgtcgagcttcggggccttgacatcgacgtagaacttgacccggaggaccttcagccgtcggtgcccctcaaaaaggtccccggcggcgacctcttcgaggcggcgcgggccggggattgcgaccgcctcgccctcctcctcgacgccggcgccaacgtcaacgcgcgtgaccgttgggactccgtcgcgctctattacgcctgcctggcgggacacgccgaggccgcgcggatgttgctcgaggccggcgccgtctgcgccgagcgcaccttcgacggcgaccgttgccactacgcggccctcaacctgcgcttacgctggctgctcaagtcgttcgaggccaggccgccaccgctcgcgccgctccccaccgcgctgcgggcgacgttccttgcctgccctgccaaccgcaccgctttcctcgagatgctccaggggagcgccggcgccgaatccgccgccctcgccgcggccgccggatttggcccaaaggatgatccatcaagtgcttgccttttccctccagatatcacattctatgtggacagaaagcctgttgaagcgcatcgggtcatcctttgtgcccgatctcctttcttcgaaaagaagttcaagacagactggaaagacaggaaggaagtgagattttctaaccaaaagttgtattttggcgccttatacagcctcatccatttcttctattctgatagactcgaggtagctgttgacgacatggaaaatttggcgcgtgcatgcaaagtttgcaagtgcgaggagttgcaaaaagttttggataaagaagttgtgcatcagaagtatgcggagtacaagtcagcaagagaactggatatggacagctcacagaaacgattcatcttacaagcgcaatccttgcctgaggaagatcgccttccatcagccttgcagcgtattctgcagacttgtctagcaaactcaagagaaggttactgtagtgaggaatcaaatgagatgataaggaactcagaggatgatgatcttgcagatctttatattaaagtaggtgataaggttttccattgtcatcaggtgattttggcctcaaggtcagagtactttagagccaggctatctcgaactgttgattttcttgaaggtaactgtggctttgaagctgctcagaatgttccgcttcttgaggagcatgacataagtgcagaagcatttgaaaagatgctcgaatacatgtatactgataagctagagcatttggaccctggccaggctgaagaactatttgatgttgcatcaaggtacctgctgtttccccttaagcgggttgtagctgatatgctgctgccatatctcgaacatgtttcgcctgcagaactgtgccactggttgatgatgtcagacatatacggtgtcatgaaaataagggagtatatcttggatatcattgcttgcaactttgagatgtttgcagccacccgggagttccgggccttgctcttgactcttccaccaccatccggagatgactcactacggacaacacgtcccagtgcacctgggactggaggcaacaccgaccaaggcaacattcttgatgatttgcgtgagaagtggctagaagcagagggtgccgagctcgacgagagggatgagagtgcagctctgttcgacaagcgactggagatgcttatgctagttgcagagaaagaagccgatgatgaagacgcttgagtttcgaagagtacgtgtgctagggtagcattgtttttgcattcttcactgcgcagttgtttaggtttgtgagttacaagttcatcttttgttgtatgaacttcaaacagatcagttttgacccatcaagtatccagtgagcaagtatttatgaacg

SEQ ID NO: 279 - DNA, 757 bp, Zea mays
  Clone ID: TF_ZmC12604_4
tgggtaccctgggccggcgggcctccacgctgcctcggccggcacctacctcccccacttcgccgccggcgggtggagtcgggccggagcagccgctacctcgcctctgttacacccccccccccccccccaaaaaaagacaaaaaaaagaaagagtaccaagcaagccgccggcagctcggccagccatggggcacggcgtcagctgcgctcgcacgggcgacgagcacaactacttccgcgcggcgcaggtcggggacctcgacgccctggacgcgctcctcgccgccgacccctccctcgcccgccgcgccacgctttacgaccgcctctccgcgctgcacatcaccgccgcgaatggccacctcgaggtgatgtccatgatcttggatcacggggtgccgccggacgccgtgaaccggcacaagcagacgccgctgatgctcgcggcgatgcacggcaagatcgactgcgcgcggaagctcctgcaggccggcgccaatatcctgatgttcgactccctgcacgggcggacctgcctgcaccacgcgtcctacttcggccacgtcgactgcctgcgggccatcctcgcggcggcgcggaccacgccggtggccgactcatggggtttcgcccggttcgtcaacgtcagggacgaccgcggcgccacgccgctgcacctcgccgccaggaagggccgccccgcctgcgtgcaggtgctgctggaaaacggcgccattgtctccgccctccccgg

SEQ ID NO: 280 - DNA, 644 bp, Zea mays
  Clone ID: TF_ZmC36749_4
ggggggcatccgatgtcacggcacgttgattattcgtctccactccacaatggttaaataaacccaacaagggcaacgtaaagttaaaattctagcggggtcaaatctgattctgtagagagccccgttgtttacacaccagaacaagctttaacacctcgactcagcccggtttctcgtaccacactttccatcgtctttgagcagagcaccagatcatccttcgagcattgccttcgctgcatcgatcagtgcaggtctgaagctgttcgatgctcggccaagggcagggtagccttccttgtcctcaacatcaacatcagcaccatgtctaattagcagaagagcagcccctttattctcacatataacagcatgcgtaagaggtgtttgtcctgtcctgtcaacagcatcaacttcagcaccttcctcaatgaggaattcacacagctccgcgtttccagtgcttgcagctctatgcaaaggtgtgcagccaaactcgctcaagcaggatgtcgacgatttgagagttgccggagctcgcggcggagtggatcggcgcccacccctcctcgtcctgcgcattcagcacgctagccgcggcgtcaccaccgcactgggcaagcgcgagcaccacctgggga

SEQ ID NO: 281 - DNA, 1050 bp, Zea mays
  unsure (1)..(1050): unsure at all n locations
  Clone ID: TF_ZmC2241_2
ctctcttcttctgccttcccgactctacctgacttcgcccgctctgagaaattcactctcaccaccaccgcgccgcctccactccccccacacccccggtctgaaacccaagcttccgcttctctcatggccgacgccaccgccgccctctcagctcggagcaaggtgcaggctttcctggaggctgcgcgcgccggcgacctccaatccctcaagaacctcgtcgcggcgctcgacgaggacggcacgggcgccgcctccgtcgccgccgccgtgcgtgacgccaacaagcgcaccgccctccacttcgcggcgatcggatgtcgcaccgacgtctgtgaattcctcatcggcgagctcggcctccctgtcgacccaaaggacgatgatggcgaaactccgctcatccatgcgacacgccagggccatctggacactgtcaagtatcttctcgaccatggagctgatccttcgctggccaccagcctaggagccacagcgctacaccatgctgcaggcatagggaacacggaactcatgaagcttctcctctccaagggagttgacgtcgagtcagaaagtgatgctggcactccccttgtgtgggctgctggtcatggcaaccaggatgctgtcaaacttctgcttcaacacaatgctaagccaaatactgaaaacgatgatggtgtcacagcattgttatctgctgttgctgcaggttccctcccatgcttggaggtcctaattgaggctggtgcaaacccaaatgtcaaggctggtggagcaaccccattgcatattgctgcagatagtggaaatatagaagtcatcaaatgtttgcttaaagctggagctgacccaaatacctgtgatgatgatgaattgaagccagttcaggttgctgcttggagaaataaccatgaagctgttgaacttcttttaccgttaacatccncaattccaggtgtttcaaactggaacgtagatgggattatagaacacatgctccctaaagagtttgaggaaaagtctcaactgaaggaagcgaca

SEQ ID NO: 282 - DNA, 625 bp, Zea mays
  unsure (1)..(625): unsure at all n locations
  Clone ID: TF_ZmC12604_7
aagaaagacaggacagacagagagaggcggagaggagtgcgtgcgcgtcgataaaaagccgtaaagccgtcgccactctttccccattccacgctgcctcggccggcacctacctcccccacttcgccgccggcgggtggagtcgggccggagcagccgctagctcgcctctgttaccccaaaaaagacaaaaaaaaataaagagagagtaccaagcaagccgccggcagctcgggcagccatggggcacggcgtcagctgcgctcgcacgggcgacgagcacaactacttccgcgcggcgcaggtcggggacctcgacgccctggacgcgctcctcgccgccgacccctccctcgcccgccgcgccacgctctacgaccgcctctccgcgctgcacatcaacgccgcgaatggccacctcgaggtgatgtccatgatcttggatcacggggtgccgccggcagacgccgctgatgctcgcggcgatgcacggcaagatcgactgcgcgcggaagctcctggaggccggcgccaatatcctgatgttcgactccctgcacgggcggacctgcctgcaccacgcgtcctacttcggccacgtcgactgcctgcgggncatcctcgc

SEQ ID NO: 283 - DNA, 710 bp, Zea mays
  Clone ID: TF_LIB4766-003-R1-M1-C3
ggccgcttttttttttttttttttagaaactcatacctcaataaccatactcaaagaatcgaatactgtgattgcctataattgttgtacaaaccaacgatgtggtcatgtcgaccagtggaattttaaaacacagccaagcgcagcagtcccataagttatatcgtggtacagtaaaaggcatttgtcttcaggtgtagaaatcatgttctttccagaagctaaattaggtgggtacaatacaatgctatcaggtacaaacagctagttgccaaaggcctgtattgcaagtttgcaacatcacctcacaaatagtatgaataagtcttcatcagttatcgctccaagttccattcttctctccagagcagtcagacctccgccatctctaattgtcgttctcgcacccctcttcagcagatgcttggtgagctcatcatttttcttttggacacaatgatgcaatggtgttcggccatggaaatcctgcatattaatatccgcgccaaaaagtagaagaagctccaccattataggataaccgtattcgcatgcaaagtgcaataaagaacaaccttgtagacagccttctggttttcagagtcctgaattatctcacaagaaatcggatcaagtaacatcttgtctgtcactggctgaacatgatggacatctttgctcaagcatcatatgtcatgttagcactgact

SEQ ID NO: 284 - DNA, 762 bp, Zea mays
  Clone ID: TF_LIB4738-092-Q1-K1-A8
cccaactccgcctcggcttctcttctctggacggggggcggctgccggcgtcgaccttcgcgaggaaggagaggaggccgttggatcccgctggattcgattggattaggacgggataaccgcgggcagatgcgctgaactattgccgtgtgcagtgagcgatgggcgaccttgctgatctcgcgggtgcgggcgaggcggcgcgttcgcatctcgccgccggcggccagcgggacaggctggcggctctgctggagctcgcggcggccgacgacgtcgcgggtttccgcgaggcgctcgcggggggaggcggcgagggcgacacggcggagctggcggacggagtggggatgtggtacggccgaagcaaggcgtatgagccgcgcacgccgctgatggtcgccgcgacttacggcagcgtggaggtggtgtcgcttctgctcgcccttggttgtgtcgacgtcaaccggcgccccggcgtcgacggcgccactccgcttcactgcgccgcctccggcggctcgcggaacgctgtggccgtcgtcaagctgctcctgggtgccggcgccgacccggtaactcccgactccgccggtcgcttgcctgccgacgtcatcttgtctccacctgcttcgcccgacgccttgggcgatctggagatgctccttggccgccgccgagggctcgctgtcgcgacctcggtgccatcgctctcgtcgtccccgccgctctcgtcctcgccggatgagagcacaggtcgcc

SEQ ID NO: 285 - DNA, 1881 bp, Zea mays
  Clone ID: TF_ZmC5707_1
ggagagggagtgttttgttagagaagcgctagcccgcgcgcccgggattttttatcatactattggtttcattccattgtgatagcttttttttcgctcgctcccggcgggcatggtgttttgcggcaagcccacaagcgttttcctctccgagtcctccctggcctctcaaccactcatcatcgccttcgcaggcatcgccctctcgccgggccgtccgattccgccatggcttccgatgagagcaaaaattcaaaaccagagaagccatcttcagcagctggtgcaggcctccccaatccgtttgatttttcttctatgagcaacttgctcaatgacccatcgataagagagatggctgagcaaattgcaagtgaccctgtgttcaaccagatggctgaacagcttcagaaaagtgctcagggtgctggagaacagggtattcctgcattggatcctcaacagtatatggaaacaatgcaacaagtcatgcaaaaccctcagtttgtgtcaatggcagagcgtcttgggaatgcccttatgcaggatcctgctatgtccagtatgcttgagaacttgaccagtccagctcataaggagcagcttgaggagaggatggcccgtatcaaggaagatccatccttgaagccaattcttgatgagatagagaatgggggtccatctgcaatggtgaagtattggaatgaccctgaggttcttcaaaagattggccaggcaatgggtgttaaccttcccggagattctagtgtgtccactgtgctctctggacccgaagagactgaggaggaaggaggggatgacgatgagtccattgttcatcacactgcaagtgttggtgatgaagagggtttgaagaaagctttagaaggtggagcagacaaggatgaagaagatgccgagggaagacgggctttacattttgcatgtggctatggtgagttgaagtgtgcagaaattctccttgaggcgggggccgcagttgatgccctagataagaacaagaacactccgttgcactatgctgctgggtatggtcggaaggaatgtgtggatcttctgttgaagtatggtgctgctgtcacgctccagaatctggacgggaaaacccccatcgaggttgccaaactcaacagtcaagatgaggttctcaagttgctagagaaggacgctttcctatagagaagagaaccgccgaataaagtgtatcaagccgtcaaactattggttttgcattggtttatttatctcggtctggtatggttgtctgtagcttgtgaatttgatgttcttttcatagcgaatgccgtttttgaaccagtacttgtgtaagaagtacctaggcttgttcttgtcctccatatatgaatctttcacacttgtcaagaattgattacagttattttcaaggctatttcctccgttccaaaaaactcgagactagtcaaaaaaaatgttttccaaaacatttctcccgaagctagatacagtttgctatatccacaatttcaagggagctaaaggggaacgccttttcaggtgctaccctgagccttggaaggtcatgagtaaaggcatcgtcctacagctacatctgcctgcatcaacaagaggagatgccttcgttgaaggaagtgtccctcgacatccttccttctgtttagctaggacctctcgagagttgttgtgtcaataagagagtttacgcgactagatcttcatttctcacttctttggtttatacctatgctgaccggtgactgctaagttgcatattgccgctatcagaagttttccatgcagctttgttatctatgcaggggtttgtcagtttggaattctaaataataaaagggtgagagc

SEQ ID NO: 286 - DNA, 1648 bp, Zea mays
  Clone ID: TF_ZmC33803_1
gggttcgaggccggccggggatatgcgcctcggcccgttgctccgttctgagttgcccccgatccggcccacctacatctcccagctcacctcccgagtcccgacgaccgcttcgtgccttcgtttcgtccgtcccctagtccctacgaccctactccctaccgcacgccaccgcccaccagcgccgccgaggggcaaggccgaaccctcctccgttcgccgaggcggagcacgcccttccaggccagcttccaccggagcaagagctaagtcgcctcgaattcttcccagctagtagcgtgtgccgtaccccgtcgctcaaccgggatggcgtcgagtggggatccgcccggatctgctgatgagaagaaaactccaatatccgaagggtcttccgacgaacgtcaagggcttcctccagcaggcttttcaaatccttttgattttggttctatgcaaagtttgctcaatgatccatctattaaggagatggcagatcaaattgcaagggatcctgcattcaaccggatggctgagcagctacagaaaagtgctcaaagcacaggagaacagggcacacctccattaaatcctcaacaatacatggaaacaatgcaaaaggtcatggaaaacccccagtttatgaccatggcagagcgtctggggaatgctcttatgcaggatcctgctatgtccagtatgctggaaacctttagtagtccatcacataaggagcagctggaagagcgtatgtctcgcattaaggaagatccagctatgaagtcaattcttgatgagttagagaatgggggcccttctgcaatgatgaagtactggaacgaccctgatactcttcaaaagattggtgaggcaatgggagctagcttcccatttggtgcaggttcttctgctgaaccttctggtactgaagaaactgaggaagaaggtggggatgatgatgaatccatcgttcatcacactgccagtgttggtgatgaagagggtctcaagaaagcactagatggtggagccgacaaggatgaagaagactctgagggaagaagggccttacattttgcatgtgggtacggtgagttgaagtgtgcccagatccttcttgaagctggtgctgcagtggacgctcttgacaagaacaagaacaccccgttgcattacgctgctggctacggccgcaaggagtgtgtggatcttcttttgaagcacggtgctgctgtaactctccaaaacctggacgggaagacacctatcgatgtcgccaagctgaataaccaggacgaggttctgaagttgctcgagaaggacgccttcctttgaataccatgcctttcgtatacacttggactcttggtgtcatgtttttttttcataccggttgtttttgtctggatagccacatgtcatggtccttaaatctgttatgcctaaatgctattagcatgtgggtgttcgaactggcctgtaatggtctaccgttcgtgacttgtgttttcccactccatttctgatacttaagcacatatgaaaaagttgtttccggatcaaattcaatggtggtgtatcatggttatcaaaaaaaaaaaaaaaacagccaaaaaaaaaaaaaaaaaaaaaactcgagacctcgtgc

SEQ ID NO: 287 - DNA, 826 bp, Zea mays
  Clone ID: TF_ZmC1115_1
cccgggtcttcgaagggcccatgggacctgtgtttagcagctcgctgtacggggaagacgaagggaatgattcagaacttgctgacatccatgttttagcgagggaaggagcaactgaggatatagtgaagtttctggcagcgggtgtggaagtcaacatgagagatactgaaggtagaactccgctgcactgggctgttgaccgtggccatcttagtgctgttgaggttcttgcaaaagcaaatgcggacctgaatgccaaggacaacgaagggcaaacggcactccactacgctgctgtttgtgaaagagaagacatcgcagaattgctcgtgaagcatcatgccgaccttcagatcaaggatgaggatgggaacacggcacaggacctgtgccctccgagctggtcttttatgaaccgggcgaactgacaaccaacatgctaccttacattagctgtactctaagctggtaccgcacttggtcaatgtgttttttatttatgggggacatatggtgtgccctgtgtgaagtgccgtgcgtggcgcccgctatgacgattgggaaatcagatgagctgttttattttatccacctcatctaactagttgtcaaaactcaaaagtcgagtggttgaagtgttagtgctgggagatacatgtgttgccttacaccaatggtctgttactgttagtgaaaaggaactacaatcatacatgtccttgttgtaccttgtttcctttgtatttattggaccgccgtttgtgtgtttcgatggggttggaggcgacagagttccaaaattgatacaagtttttctttttgg

SEQ ID NO: 288 - DNA, 965 bp, Zea mays
  Clone ID: TF_ZmC9440_2
aaccgattggcgagactgatgggacggcgtcacagcggcggcggcggcggcggaagaggaagagggcgagggcgtgggcgagatgaggaagaagatcttcctctgcacaaggccgcaaggtctggtgatgcggcagcagtggagtcggtgtgcgagtccaaccctctcgccgtcaattcaagggatcgcctctcacgcacaccactccacctggctgcatgggctgggcatgttgatgttgtgagatgcctttgcaagcacaaagctgatgtgggagctgcagcaatggacgacactgcagcacttcattttgcttcccagaaaggccatgtagaagtggcccgtgagctgctggcatctggggcctctgtgaaagccaagaaccggaaaggcttcacggcgctgcactttgctgctcagaattctcacctggatcttgtgaagtgccttgtgaagaaaggtgttgacgtcacagcaaagaccaaaggtggccagacagctctacatgtcgctgaggatgatgaagtgcgtgcgttcctgaaggagtgcgagcaatccttgaagaagggtgccgagctaccatcggagaaggatgattctgccgagaaagagggcgatagcaagtcttcaggtgaggttatgaaagatgaggaggatgcagagcagggcgagaagaggaaaagcgaattggttggtgcgtcgagtttgtcaggagtaaaaaaagccaaagtttctcttggtcatctagtttgtgaaaatgacatggacgaggaagaggagtgatttcgagcagccttgaccttgaggatgcaatagaagtgcacttagatagttccacctgcacctgtgtgttgtgttatgctagtcttagtctgtacggcgatgcttgaatgtaaaggcaagtacaaagttgaatctcagttctcctgggtggcctgaatgaaaattctaagggcttgtttggt

SEQ ID NO: 289 - DNA, 2712 bp, Zea mays
  Clone ID: TF_ZmC9798_1
aatttcccctacccgagggaggaacacacaccgaggaggccgcagcagggcagagtacacccccgcgtttcgggaatggcagtgctgctgcgccccgcggcgatcgcaggcggccggcaggtgtggccggtggcggaggacgaggagggggcccgcgaggcggaggcgtcgtcgcagcggctggtggaggcggtggcgcgcggcgacgcgagggaggccggcgagctgctcgcggctgggcgcgcggacgtgaactacgccggagtggtgtggctcagggcgcgtcgcgtcgcggaggcggagccccgggaggacgccgccgccgaggcgcgggccgtgcacgaggagatccgcgccgacgtctcgccgctcttcctcgcggccggcaacggggacgtcgcgctcgtccgcgccttgctcgcaaagggagcggacgtgaacggcaaggtgttccggggctacccgacgacggccgcggtacgggaagggtgcgcggaggtggcggagcgcgttgagggagggaggtgctcttcgtgtgccaacgaagtagaggaggccgcggagctgtgggtgaggggcatcagggtcgctaccagggcggcgtttggcaagagaggcaaggagtgagtaacgcatggctgcgctctctccggttagagtctgtaggttgcagcgagcgcgtgcttgtaaagagttgtagcgggcgtagagccgtaggggtgctatgtggttcggtgtggggtgcagctgcgctggtcttcagctcgagggctttggcttgccatgatggtttttggttcaggggcatggtgttgtgttgtgttgtgtgtatataggctggctgttgtctcatcgacgtaggtgaggctagcgagcgtgttgctgggtcgcgtccaccggcgaggagctgcgcgtcggcgccggactcgccgaaccttacgacgcggtatggtgcgccgtggagtactacgagtccacgggctccatcctgcgcatgctcctccgtagcgggttcacgtcgactgccgctcacctcggccggacgctcctccaccacgccatcctatgcggcagcgctggtgccgtccagaccttgctggcgtccggtgcagactcggaagctcccgtgaagacgaccaggagcaacaggtccaggccggttcacctggccgcgcgcctcggccagccggagatcctgcggatgctggctgacaggggctgcgacctgaacgcgagggcggaggctggcgacactgccgccatcatctgctcgcgccacaaacgcgaggactgcctccgagttctcgtgtccgccggtgcagatgtcgcgctgttaaactcggctggcgactcgtcggcctccgtcgcttcctctgggggatggaagaccggcttcgaacgggctgttattggcgcgattcggtgcggggccgtcccacgctccagcgaacggagcgtgttctccccgctgatgttcggcgcgctgtgcggcgacgcgaccgcgatggaagtgctgctctctcagccagacgtggacgtggacgagcaggattcggacggatgctcgcccataatggctgctgccaagatgggaaacgtcgaggccttccgcgccctcgtattcgccggcgccaacgtgaagctgagcaacaagcgcggggagacggccatcgggctggcgcagcagagcaagaagagagacctcttcgagcaggtcatgctcgagctcgcgctggagaagggcatgcctggaggcttctacgcgcttcactgcgcctcccggcgcggcgacaccgcggcggtgcgccacctcgccagcacgggctgcgacgtcaatatccccgacggtgacggctacaccccgctgatgctcgcggccagggaaggccacgcgggcgtgtgcgagcttctcatctcctacggcgctcgctgcgacctccggacgccgcgcggcgagacggcgctctccctggcgcgagcagcgctggctacggcggcgttcaacaaggccgaagacgtgatcatggacgagatgggccggcaggcggtccttcagggcgcgcgcgtcaggaagcacaccaagggcggacgcgcgaggcctcacggcaagtcgctgcgcatggtcgctgcggcgggcgtgctccggtggggcgggtcaagccggcgcaacgtgatctgccgggaggccgaggtcggtggcagctcggcgttccagcggcacaggcagaggaagggggacgcgtatgagccggggctgttccgcgtggtgactgcgacagggagggaggtgcacttcgtgtgccagggcggtaaggaggccgcggagctgtgggtgaggggcatcagggccgtcaccagggcggcgtttggcaagagaggcaaggagtgagtgacgcatggctgctctctctccgttaggctctgtaggttgcagcgagcgcgtgcttgtaaagagttgtagcgggcgtagagccgtaggggtgctatgtggttcggtgtggggtgcagctgcgctggtcttcagctcgaaggctttggcttgccatgatggtttttggttcaggggcatggtgttgtgttgtgtgtatatagactggctgttgtctcatcgaagttgctttagctaactggtttgtagtgcgtttctatctgaattatcagtctcctatgcgaaacttctccatttgagttactaattacgatttctgatgt

SEQ ID NO: 290 - DNA, 776 bp, Zea mays
  Clone ID: TF_LIB5117-070-A1-PF1-H3
atctctcggctcagcccctctgtgataagaggcgccgggcgagagatgctcccatgggcggccacggcctcctcctcctccgccgccgccgccgccgccgccgctcttctccatgcctctccactccccgcttcccaccgcgctgcactacctcgctaccgtccgtctccctctcttccgccgccgctctcagttgccttccgttccccggcacgtgccctccctcgcggcggcgacgccttctgggaggagccagacgacggctccgggggcgactacgaggatgacggaaagcaagcgaccggacaaagaagctctcctttccctccccccttccctctctccaggctcgttgcaacgcggcagcaggagcgtcaagagcaggatctccggagagaaatcgagcttctcttaacgccggaagaagaggctatcttggatcagaatgagaccgctgatgtcaccaaaatatcatcaccgaaatggcatccgcttcatacatatgcgttggcgctgcagatacctctcatggacaagctgctggacaatggtgttgatatcgatttagttgataaagatggtttcactcctcttcacaaggtgataataggcaaaaaggaggctgtcattagccatctcctaagaaaaggagcgaatcctcatgtcacagatagggatggagccacaccattacattatgcaggtcaagttggggccctgcaaacgtaaagctgttgattaagtacagggttgatgttaacgttgttgatgttgat

SEQ ID NO: 291 - DNA, 761 bp, Zea mays
  Clone ID: TF_ZmC178914_1
ttggtaccctcgaggccgcgggcgcgtggtcgtgttcgctccacacgcgccaccaccagagacctcccgctggttacaccaatggaggccgtcctacggcatccatcgctctcgcgcaccaggcctccgaacctgaaccctcccacaacgccatctccatcccttcatgcaccatctcttctccgcctccgcgcgcgccggctcatcgccgccgcggtgttccaggaccagaagccgaaggagccagcaagcaagggaggtgatgacgaggaggaggcgtacggcgaggtggaccgcatcgtctccagccgcacagtcagcagcccggtgttcgcggaggacggctcggccaccgccgccgtcgccacggagttcctggtggagtggaaggacgggcacgagccgtcgtgggtgcccgcggaggccatagccgcggacgtggtggccgagtacgagacgccgtggtggacggcggccaagaaggcggactcggaggcgctggcggcgctgctcgcggacgagacgttgcggcgggaccccgacgcggaggacgcgcaggggcgcaccgcggcgcacttcgccgctgggctggggtccgaggagtgcctgcgcgcgctcggcgcggctggagcggacgtgggccgtcgggagcgcgcggggggcgggctcacgccgctacacatggcggtcgggtacggccgcgcgtgcgccgtgcgcgcgctgctggagctgggcgccgacccggaggcccccgacgggca

SEQ ID NO: 292 - DNA, 1133 bp, Zea mays
  Clone ID: TF_701167176_FLI
agtccatatttataattagttttataattaaactatatttaatactctaactagtttacaaacattcgattcgataagactgactaaaagttctcgaccccctgatttcgtctgattcccaaacacagtgtggagctgatccaaacgcgaccgcccgggtgctcctgcggtcgctgaagccatccctgcacgccaacgtcgactgcacggcgctctttgcagcaatcgtgagccgtcaagtcgctgtggtccgccatctgcttcaggtgcgcgcatcatttgtgaaaagcagccgcaaaaatacactcatgttcaggaatggacgcttgacaccatctgcccactccatgtccaggccggcgtgaagagggacacgaaggtgaggctgggagcgtggtcctgggacgcgtccaccggcgaggagctgcgcgtcggcgccggactcgccgaaccttacgacgcggtatggtgcgccgtggagtactacgagtccacgggctccatcctacgcatgctcctccgtagcgggttcacgtcgactgccgctcacctcggccggacgctcctccaccacgccatcctatgcggcagcgctggtgccgtccagaccttgctggcgtccggtgcagactcggaagctcccgtgaagacgaccaggagcaacaggtccaggccggttcacctggccgcgcgcctcggccagccggagatcctgcggatgctggctgacaggggctgcgacctgaacgcgagggcggaggctggcgacactgccgccatcatctgctcgcgccacaaacgcgaggactgcctccgagttctcgtgtccgccggtgcagatgtcgcgctgttaaactcggctggcgactcgtcggcctccgtcgcttcctctgggggatggaagaccggcttcgaacgggctgttattggcgcgattcggtgcggggccgtcccacgctccagcgaacggagcgtgttctccccgctgatgttcggcgcgctgtgcggcgacgcgaccgcgatggaagtgctgctttctcaaccagacgtggacgtggacgagcaggattcggacggatgctcgcccataatggctgctgccaagatgggaaacgtcgaggccttccgcgccc

SEQ ID NO: 293 - DNA, 249 bp, Zea mays
  Clone ID: TF_LIB3245-435-P1-N1-A8
ggcggctctctgttagagcagctctaccatacgcaggtccgcggcgcgtgatgctagatggagcaaaaataatcctctaacaaattcaagagggcggacaccgcttcatcacagcgtactgaaggggcgacacgtgttcgcccagctactggtatccaggggcgcggatcctcaagccgcggatcgagatggttggacagcgtgacagtatgcggtcgacagcagctccatattgggcggacagatcct

SEQ ID NO: 294 - DNA, 1130 bp, Zea mays
  Clone ID: TF_ZmC5707_8
attgggaccctcgaggccggccgggaacactcttatcgccttcgcaggcatcgccctctcgccgggccgtccgattccgccatggcttccgatgagagcaaaaattcaaaaccagagaagccatcttcagcagctggtgcaggcctccccaatccgtttgatttttcttctatgagcaacttgctcaatgtatctctcttgctattgccttaatatgttttgattaagaatttaagatgcttatgttgtacatagttttttctgtcggctgaaccacattcagattcatttggaattgttaattttactatagtgttgtatgctcgtcatgtgcaggacccatcgataagagagatggctgagcaaattgcaagtgaccctgtgttcaaccagatggctgaacagcttcagaaaagtgctcagggtgctggagaacagggtattcctgcattggatcctcaacagtatatggaaacaatgcaacaagtcatgcaaaaccctcagtttgtgtcaatggcagagcgtcttgggaatgcccttatgcaggatcctgctatgtccagtatgcttgagaacttgaccagtccagctcataaggagcagcttgaggagaggatggcccgtatcaaggaagatccatccttgaagccaattcttgatgagatagagaatgggggtccatctgcaatggtgaagtattggaatgaccctgaggttcttcaaaagattggccaggcaatgggtgttaacctttccggagattctagtgtgtccactgtgctctctgggcccgaagagactgattctccttgaggcgggggccgcagttgatgccctagataagaacaagaacactccgttgcactatgctgctgggtatggtcggaaggaatgtgtggatcttctgttgaagtatggtgctgctgtcacgctccagaatctggacgggaaaacccccatcgaggttgccaaactcaacagtcaagatgaggttctcaagttgctagagaaggacgctttcctatagagaagagaaccgccgattaagtgtattaaggccgtcacactattggttttgcattggtttatatctcgtcgtctggtatggttgtctgtagcttgtgaatttg

SEQ ID NO: 295 - DNA, 3132 bp, Zea mays
  Clone ID: TF_ZmC885_1
aattcggcacgaggttgaactctcctccctcgcccgcgcgtctccgccgccccaccggccaccgcccgcgcctccgccgcggcagctgtccaaaagctgaaaatagatagaatcacgagggggggattgcctagacaacgatccttagttaatcaaacacgggctgccagattcgggggggcgttcgcgttcctaccctctcatcactctccccgtaaaaccccggctgggtttatctcatcgccgccgggcggcgagcggtgggaggcaatggcagggtgggggccctccaggctgccgacgtgcgggccgtggggccgcggcgtggcgctggagagggagctgtcgcgggacggcagccactacagcatctccagcggcatcctgccgtcgctcggcgcgcgcagcaaccgccgcgccaagctcaggcccttcatcgtctcgccctacgaccgccgatacagatgctgggagacttttctcataattcttgtgatatactctgcatgggtttccccatttgagtttggcttcattcggaaaccgacgggcgccctagctgcagtggacaatgtcgtgaatgctttcttcgcagtggacatcatcctgaccttctttgtagcttacttggatagaatgacatacttgcttgaagatgatccaaaaaggatagcttggcggtatactaccagttggtttgttcttgacgtagcctccaccatccccagtgaatttgctcggaagatactgccaccaaacctcaggtcatatggatttttcaacatgcttcgactatgtcgtctccgtagcaatcagcttctcttagcaaggggggagcaacatagacatttccattacttctgggtggtcgatgtccagcccatatgtgtcacgctttttgaggtccactgttcggcatgcttctactatcttctcgctgacaggtatcctaactcaacggatacgtggattggtaattcgatgcctgattttcgtcagcggggtatgtgtattcgatatgtagtgtcagtgtatttgtcaatcactacgcttacaactgtgggttatgtgcatttgcacgtggagaacacaagggatgcccctgtgaccctgtgtgcatcagtgcatgtcccccatttaaactgaagtgtagcttatgatggttttgaagctgtaggatgtatccagcttggaaatgaatttgtagtcagctggtctgtatgtagtttcgtcatctctttccatgggaagggattcacaaaatgtaattacatgatttcttttttttcctgtctttagatcaagctttctctggaagtgagaaatattcgtgagtcatgaattttgagccctaaggctataagatccagcatttctcagtatctatttttcaatcttgtccaaaaggtttacttgtttgaaggggtgtccaatgacctcatttttcactggtttctgagatgaaagctgaatattttccacctagggaagacgtgattttgcagaatgaagcacccacagacttctatattttagttaccggtagcgcggagttgatagagttgcgaaatggcggggaacagatggctggagtggctaaggcaggagatgttgttggagaaattggggttctttgctataggccccaactattcacagttcgaacaaaatcattatgccagcttctgcgtatgaatcgcactgcatttctcagccttgttcaatccaatgttgcagatggaacaataataatgaacaaccttatgcagttactaaaacagcagaaagacaacagtgtaatggtgggtgttcttaaggagattgagaacatgctagcgcggggtcgtctggacttgccagttaccctctgttttgcggtaaataaaggagatgattttatgttacaccaacttttgaagcgtggtttggatccaaatgaatcggataacaatgggcatacagcactgcatatagctgcttccaaaggagacgaacaatgtgtcaagcttcttctagagcacggagctgatccaaatgctagagactccgaaggaaaggtgcctctatgggaggctttatgtgaaaagcagaatccagtggtagagctgctagtacagagcggtgcggggctatcatctggagacgtggccttgtactcttgcgtcgctgttgaggaaaatgaccctgagctgcttgagaacattatccgttacggcggcaacgtaaacagctcaatgaaagacggaaccacgccgctgcaccgcgcggtctgtgacgggaacgtccagatggttgagttgttgctggaacacggagctgacgtcgacaagcaggacaacaatggctggtcggcgagagatctagctgatcagcaaggccatgatgacattcaggctctcttcaaatcacgaaaagcacacaggaagcatgcctcaaatggcagagtggcacctatgctgatagggagattcaacagtgagccctcgatgccagatatgagccatgaaaacgccagagtacgcagcgaagttgttccgcagaagctcctccgaaagagggtgagtttccagaattctcttttcggcgtcatctcttcgtcccacgcccaccaggacaccggccgtctgctctcgaaaggcctcgctggaacagagggtccaaattgccgtcacgactccctcatcagggtgacaatcagctgccccgagaagggggggaacgccgcagggaagctcgtgcgcctaccgcggtcgatggccgagcttctcgaactaggtgcaaagaagttcggcatcaagcctggcaaggtcctgacagttgggggtgctgagattgatgaggtggagcttatcagagacggtgatcatattcttctcgtcagtgatgaatgggtgccagatgttgagcaaattaggccttaacaataagtgagccagctgtggtgctcttattgcaatttgacatgatatggggaaacatgcccctgtgaccctgtgtgcatcagtgcatgtcccccatttaaactgaagtgtagcttatgatggttttgaagctgtaggatgtatccagcttggaaatgaatttgtagtcaaaaaaaaaaaaaaaaaaaaaaaaaactcgagggggggcccg

SEQ ID NO: 296 - DNA, 959 bp, Zea mays
  unsure (1)..(959): unsure at all n locations
  Clone ID: TF_ZmC29_2
ctcgaggccggccgggtcagcgaagcacgactccctcaccccgcatgcccgctcttcccccagtctactctcttttcagtttctctctccccactttccccatttttaccgcacatctctccttcctcggcgtctcgcacaccccagcaccttcgtctcccctcccctcccccaacaatcggaaccggatagaaagttcggcttcctcccggacgactcggcgcaaggtcgcagcttttctctcgatttttcgcgcttccccgttttgacgcttgcttcgcatggggattctggagatctttggggcggttcgctgctgagatggttcgcctcatcacgcgctgctgtgactcccaacagttcttccgatccgaggagcccctgttatgaacggcatgccgatctctgcgtcctctgcggcaagtgtcgacagtggcgcggtggcggccggcacgcccatgaagaatgcaacggcggcggacgctctcgccgagatggcgagacatcttaccgtcgacacggaagacaccttcgcgggcctgctggagctcgccgctgacgacgacgcagaggggctgcgcctcgcgctggagcgcgcgccacctgccgccgcggacgaggctggcctctggtacggccgccggaaggtcctggagcaccgcaccccgctgatggtcgctgccacctatgggagccttgccgcgctccgcctgctagtgtccatctcgtatgtggacgtcaaccgccgctcgggcacggacggcaccactgccctccactgcgccgcctctggtggctcacggacggctgttgagtcggtcaagctgcttctgggagctgnggcagacgctaacacatggatgacgctgngcgtcgtcgggctgatgtgatctctgtggcaccggagatgtttgatgccaagttcngcccttcagatcttcttggattcccccagtctg

SEQ ID NO: 297 - DNA, 725 bp, Zea mays
  Clone ID: TF_LIB5116-066-A1-PF1-E11
gaacctaaaatacagcgtgctataagcacctccgacgcacgcgccgtcgcctcgcctccttccagatccgcggcgagccgggaacgaggaaaacaaaaggatggaattgaaatttgatgcactgtggaaaagggacttacttgccctgagcaaatacaacgttaatggtaaagttaaagcaattacagtaagaaatgattatccggactaccctgtcccttattttcaagttactgagggttttgatttgaaaaaggttaagaagcttatgctagaaagggatgttgagatcgccaagtccatagcaaacgacataatcatcccagaccctgctccccaatgggtggctgataacttcttggacaaatatgccgaattggagcccatccttgtaaaggatagtgcctggtgcttcctccgactcttccaaaactgtagaggccggggcatgtcatcggatcttaccatcaccgcacaaaccttaaccttcatggtcagtttcaatgccctgcgatgtgcaaaagttgtattggagggcatggcacctgagctctatgggatgcacgccaatcccaactgcataaacaaatttggatactttgcgctccacgaagctgctgaaaggttctctgtggacatgatcaagctgcttttacgccatggtgcatcgcccaatgtgcgcacagttcgcaatgatgtcatttttgatgtcattgagaatctac

SEQ ID NO: 298 - DNA, 781 bp, Zea mays
  Clone ID: TF_LIB4738-112-A1-K1-G12
aaaaatacgagattaccggcaccaatcaatcaggctggcagtggagtgacagcggcggcaacaccacgcccacgcggcgccggagccgaagccgatcccccgatggatctcccgccgctctcccaccaggccctcttcgccgccgtccgatccgccgacgcgcccgccgtccgcgcgctcctggtcgacgccgaggcgtcgggcacctcgttggccgcgctcgccgccgctcagacggacgccggggaaaccgcgctgtacgttgccgcggaggccggaagcgaggaggtcgtgcgcctcctcctcccgctctacgacttcgaggcagccaccgtccgctcacgccttgacctcgacgccttccatgtcgccgccaagcagggccacaccggggttgtgaaagagttcttggggcggtggccagggctttgctcagtctgtgactcttccaacactagtcccctctactctgctgctgtcaaggatcacttggatgtggtaaatgctatactggacactgatgatagctgcataaagattgtgcggaagaatgggaaaacatccctacatactgctgcaagaattggataccatcgtattgtcaaagcactcatagagagagatccaggaattgttccgatcaatgataggaagggacaaactgtacttcacatggctgtgaagggcaaaaatacagatgtaatggaagagttattgatggatgatgctttcattcgccatgtgagggacaagaaaagaaatactgcttttgccatagcta

SEQ ID NO: 299 - DNA, 587 bp, Zea mays
  unsure (1)..(587): unsure at all n locations
  Clone ID: TF_LIB3279-176-Q1-K6-B3
ccacgcgnccgccagccgctcctccaggcggcctggagccggcgcgacgggatggggggcgggaactacgccaggcagatggcgatgtgcttgagcatgattgcctccggcatcgggatggagaccggcggaattagttccgagatggtggaccagatgaagcgcaacgtagcgtcgtccgattgtgacgggagcaacgttatggagttgctcgatagaatgactgaagactctgacaaggaggagcacctggggccactgcatgatgcggcaagggcaggtaaaatggatgtttgcaaacacctggtggagaatcttgggtttgatgtcgatgttcgtgctaatgatgnttcggggaagactcctttgacttgtgcagtgtcatgtggcaaagtaattgctgtgaggtatcttattgccatgggtgcagatcttgaaaaacaagatgctatttgctttactcctctgcactatgctgccaaacgagggtacagtgnacttagcatgtngttgctctctagaggagctaatgttgnatgtggattcttctggagggacaccactacatggtttctgctgcttgtgga

SEQ ID NO: 300 - DNA, 1401 bp, Zea mays
  Clone ID: TF_ZM5008.C1.o2.fg
atgggcaactcactggggtgctcggcttccggcgagcggctcgtctcggcggcgcgcgacggggacgccatcgaggcgcggatgctgctggagctcagccccgcgctcgcgcgctactccaccttcggcggcctcaacactccgctacacttcgccgccgccaagggccatctcgacattgtcacgatgctgctggagaaaggcgctgacgttaacgcgcgcaactactgcggccaggttactagggcagattacttgagtggtcgaacagcactgcattttgctgcacatgatggatttgttcggtgtattaggcttttagttgcagactttgtcccgagtgtggccttggaggatattgcttcttctgtggtggatggtggtgattgccagacaaacagtgggagcagtcctaattcatcgtcggggcagaagtttaatgaatcggcccgtgtgaggtacatcaacaaacctgcagatggtggtgttacagcacttcacatggcagcattgaacggagctggcagtacaccgttgcattatgcagcaggtggggggaaacaagaatgctgtgagctactaatatcaaaaggcgctagcaggttgacactcaattgcaatgggtggcttcccgttgatgttgctagaatatttggacggcgctctttggagccattactttctccaaattcacactcgaatgtccctgtatttcaactgtccagttatcttgccttgccactcatgagtatacttaatatagccagagaatttgggttgcagcataccacaccctcgattgatgataatgatctatgttcagtttgtctagaaaggtcttgttctgttactgctgaaggttgcagtcatgaattctgcatcaaatgtgctctctacctctgctcaaccagcaacatccgtgtcgagttcacaggcccacctgggtccatcccgtgccctctttgtcggaacggcataatgtctttcaccaagttaccaagcacaccaacagaagggcttaaatcaggttcagcgctcacattctgcaacccatgcatactgaacgcccggtccatggactcgccagccactttctccagagctgaaatcagacggaaccgtgtggcagctgtctcttcggagctggtctgtccaatcacctgcagcccattcccgtcgtccgccctcccaacctgcaggtgcagcgacgacgatccatgcggcgatacagacgtgcaggatggtcccgagttccagtctccccggccctcgcacagcgcaagcatggagctggacaagaggggggagggggatctagaccgggccagttgctcaggcatgttctggagccgaagaagctgtcacagggagcagcagtgtgatgcggagatcaacgcttga

SEQ ID NO: 301 - DNA, 1240 bp, Zea mays
  Clone ID: TF_ZmC5306_1
gttgtattctctgccaaggagaagtttattcatgcggagtatgtaaacaaagaattcttacggaaccgtagcatggatgagaatcagctagctcagcagatgtggaatagtgtagctgcaaatgacaagaaaacagcatacagtctcattgtgagatcacgtgccaatgtaaatttagtttacggagagataccttctagcccatttttgactctcggaaaggcacttcagcaagagcaaccggtttcaccgcctgttggaagccctagatttttcgattgcaattcacatgacaagatttctcctcgggagcccctttcccctgctagcacgagttcacgcacagatgacatggaggacggttgcgaaggtctctccttgctccatcttgcatgccgtgttgcagacgttgggatggttgaattacttttgcagtatggtgctagtgtaaatatgaatgattctaggggtcggacacccccatcactgcattttgaaaggaagacatcggcatgcaaagcttctcctctccagaggggctgattcacaagccatggatcgagatggtaggacagcattacagtatgcaatcgatggtggaacaagcgacgaagacattcttgcattgttagaggatcatagtagatgatcttgcaaccgcaccttcagtaaattgaggctctcttggtgtggtcgactcaactaagttagctcggaattcggattgagtgtgattgggtgggttcaaatctcaaacaagtcaaagttcttctaaattttttccaatcctatccaatccatgtataatgggaataaccgaacaagacctaacagggatccagccccgctcggtcctagcttgtcgtgcagacaatccgaattcatggcatgaaagcaacctatgtacatgtcgttctagggcttcagtatcatgatgcgcatgttgtttctttccccgccgtttgcttgtttagcatcagtggtccttatttagtcatctggcaaacggtttggttttgtttgctgcaggtgatgcatagtaagcttgtaaatggagttgcttctctttattttctagtcatcttttatcatgaagtagatgtggcattctgatgaaagatggttgtacatattgagatgtgctgttgtggcatatatgaaatattggcatggtgtggatggtatatacgaaagttgtgcttgcttaatcaggaacgaggcaacataaaatgttccatgt

SEQ ID NO: 302 - DNA, 165 bp, Zea mays
  Clone ID: TF_700165611H1
gaagggcacaggccgctccacctcgccgtcgagggaggccacgcggaggccgtggagctgctgctcgacatgggcgccgaagccaacgcacggacaaggcgcagcgccacgcagctccagatagcgaaagccatagagtacgaggcaatcgatcagctcctgtgc

SEQ ID NO: 303 - DNA, 555 bp, Zea mays
  unsure (1)..(555): unsure at all n locations
  Clone ID: TF_LIB3608-040-Q1-K6-A3
ngagtgatcaggttgcaagaagagttcttcctaccaggagaggttatattggagcaaggaagtgcagtcgatcaattgtactttgtctgccacggtgcactggaaggtgttggcatcggtgaagacgggcaagaagagactctgctgatgctggagccagagagctcctttggcgagatcttctccgagagcgagtatggcggtcaatcctctgcaacatcccgcagccctacacggtccgcgtctgtgagctctgccggctcctgcgtctcgacaagcagtccttcaccaacatcctggagatctacttcgtcgacggcaggaggatcctgagcaatacgggtgaagcagctggaatcggacatcacgttccacatcgggaagcaggaggcggagctcaccctgcgggtcaacagcgccgctttctacggcgacctgcaccagttgaaaagcctgatccgggcaggggctgatcccaagaacaccgactacgacggccgctcccctctgcatctggcggcttccagagggtacgaggacgtcgtgcaattcctc

SEQ ID NO: 304 - DNA, 2273 bp, Zea mays
  Clone ID: TF_ZmC15603_1
ccggccgggccgggattacaaaaaagctaataaaggccttccatttccactccccgtcgtgtcccttcctccctcttcctccggagctgcgaaattttgagacccagccgggaaagcggaggcggagactacccaccccaccaccagccccctggaattcgcgcaaatcacagaagctccctagccgccggcgagcactcgcgggcgcgcgcgcccccggcggcggcggcggagccctcctctctgccggcgccggcgatgggcaactcgctggggtgctcggcctccggcgagcggctcgtctcggcggcgcgcgacggggacgccatcgaggcgcggatgctgctggagctcagccccgcgctcgcgcgctactccaccttcggcggcctcaacactccgctacacttcgccgccgccaagggccatctcgacattgtcacgatgctgctggagaaaggcgctgacgttaacgcccgcaactactgcggccagactgcgctgatgcatgcttgtcggcatgggcactgggaggtggtgcagatgcttcttctatttagatgcaatgttactagggcagattacttgagtggtcgaacagcactgcattttgctgcacatgatggatttgttcggtgtattagacttttagttgcagactttgtcccgagtgtggccttggaggatattgcttcttctgtggtggatggtggtgattgccagacaaacagtgggagcagtcctaattcatcgtcggggcagaagtttaatgaatcggcccgtgtgaggtacatcaacaaacctgcagatggtggtgttacagcacttcacatggcagcattgaacggtcacttagattgcatgcagttgttgattgacttgggcgctaatgtctcagctgtctcattcccctatggcactactgcaaatttgataggagctggcagtacaccgttgcattatgcagcaggtggggggaaacaagaatgctgtgagctactaatatcaaaaggcgctagcaggttgacactcaattgcaatgggtggcttcccgttgatgttgctagaatatttggacggcgctctttggagccattactttctccaaattcacactcgaatgtccctgtatttcaaccgtccagttatcttgccttgccactcatgagtatacttaatatagccagagaatttgggttgcagcataccacaccctcgattgatgataatgatctatgttcagtttgtctagaaaggtcttgttctgttgctgctgaaggttgcagtcatgaattctgcatcaaatgtgctctctacctctgctcaaccagcaacatccgtgtcgagttcacaggcccacctgggtccatcccgtgccctctttgtcggaacggcataatgtctttcaccaagttaccaagcacaccaacagaagggcttaaatcaggttcagcgctcacattctgcaacccatgcatactgaacacccggtccatggactcgccagccactttctccaaagccgaaatcagacggaaccgtgtggcagctgtctcttcggagctggtctgtccaatcacctgcagcccattcccgtcgtccgccctcccaacctgcaggtgcagcgacgacgatccatgcggcgatacagacgtgcaggatggtcccgagttccagtctccccggccctcgcacagcgcaagcatggagctggacaagaggggggagggggatctagaccgggccagctgctcaggcatgttctggagccgaagaagctgccacagggagcagcagtgtgatgcggagatcaacgcttgattctttatctgtggttctgaattacgttgggattcgtagcagctccaacgcgggagatgagcagcggttgttttttccgccccagctatgttccttcctcctatctacagccaatgttttcttgattggtgaaatgctgctgcgtcctttgcagccgtagagtgtgtgttgtaacagttttgttactatggttcatgtgtacctgtgaatctagatagccttcgaagttgctagccagttacggttctttgtagctgtatgtaaattgcagatctggatggaattactttctgtccctgatgataaatatttatatacaacgagtgaagtaccctctaaggccatctccagcggagctggatgtgagcttgtaaaatattgctttgaattgtagactctgtttatagactagtttaaaataagaaatgagatattgagtatgatttagagct

SEQ ID NO: 305 - DNA, 568 bp, Zea mays
  Clone ID: TF_LIB5116-047-A1-PF1-C5
tatagaaggtcgctcgccaccgaggggaatggcggcgccgccggacagcaagtctgataaatccccagaggagctcctgtgcgcggcggcggaggccggtaacgacgatgctatcgccgagatcatttcctctggcgccgaccccacctacttcgacgcctccggcatgacgccactcatgcgcgcggcctccggcggccacgccgctgccgcgcggctcctgctcgatgccggcgcgccctggaacgcgctctcccccgaaggtctctccgcgggtgaccttacctccgaccccgccacatacgacctgctcctcgaccacgccctgcgctccgagctcatcctcggcaccgtcgcccgccgccaggcggcctccgcgaactcctccgacggcgtccccgccgagacctacctcgactcgaggatttcgttcagcgaggaccgggtgatggatgcggagagcaaggcggtgatgatggagtgggagcgtccgctgatggaggcgcacgcgcgggcggtgtgcgccgccggcggcggcaaggtgctcaacgtggggttcgggatgggg

SEQ ID NO: 306 - DNA, 1487 bp, Zea mays
  Clone ID: TF_ZmC11431_1
cattgtttttctcgtttctgaacagagctttcctcgataagaaaagaaaaaaaaaaaaggccggccaggggttgttcttcttcctaaataataaattctagggtttgcctcttccctctcggctctcgctcccaccaccaccaccaggcagacgcagatcggcggcgggataggctagcaatgatccccaattccgacttcctctagactgcctggcggtcgaattccgattcgattggagtagggaacgagaagggaacaaatacaccggcaccaccaccagaccagacagcacgtgcctccatactatggtttacgccccgtgccgctcatcgacgccgccgtcttcctcgccgatgctccacaagaacctccgcgccctcggacccggcttgaatcccttggctcccttcggcatgggcaactactcccgctagccgtttcctcctatccctctttctccgattccgatctctgagtgcttccgcctccgcccccggccgcttcctccatcggaaccgatccccgctattttactcccgttcgtttcattgttccgttgctttggatctgagtctcgagatcctcccctgtcctgctgctcgaggagccgccaaggataccaaaataccatggtgcaggtgcgcaggtcgctcagcatgagccgccttcggagctgccacgacgcggacgaccgtggctggaacccgctccatgttgctgctcgcaagggagacctcaaggaggtccgacgtctcctggatgagggggggatggatgtgaatgcacctgcatggggaccaaaatgtcctggtgctaccccactccatctggctgctcagggtgggcatgttaaaatcatggatgaactactggagcgtggtgccaatattgatgctcgaacaaaaggggcatgcggctggactcctctacacattgctgccaaggaaaggaacaagaaggctgtgagattcctgattgagaatggagcattccttcctcctgagatgaatgaccataggttcaatccccccctccattactgctctgggttagaatgggcgtatgagatgaagcgcatgcaggatgaaagcgattcgcctggcgaaacttcgttgagctcggataactagagagaaagcagcaggtgcatgcagcttgagaacgatgaagttaagtcaagtcattgagtacatttgcttgatgtctggatgatggagatgttctgttctgtgactttagaataattgttgagtggtacctgtaatatacgacgagtgatttgttgaataataatcatacactagtgtatagcgcgcacatgcgcgcatgccgttctgtggtgtaaaatcttgttataagcatgtataacttgatattgtatcgtgaacatgcatatatgcagagtagtcattattgagacaagaaaaaaaaaaaaaaaaaagcggccaaaaaaaaaaaaaaaaatcgaagcaatagcgtccagc

SEQ ID NO: 307 - DNA, 2286 bp, Zea mays
  Clone ID: TF_ZmC15603_2
cattgggacctcgagccggcgggccttttcctccccgtcgtgtcgcttcctccctcttcctccggagctgcgaaattttgagacccagccgggaaagcggaggcggagactacccaccccaccaccagccccccggaattcgcgcaaatcacagaagctccctagccgccggcgagcactcgtgcgctcccctggaagcggcggaggcggcggcggagcccgcctctctgccggcgccggcgatgggcaactcactggggtgctcggcttccggcgagcggctcgtctcggcggcgcgcgacggggacgccatcgaggcgcggatgctgctggagctcagccccgcgctcgcgcgctactccaccttcggcggcctcaacactccgctacacttcgccgccgccaagggccatctcgacattgtcacgatgctgctggagaaaggcgctgacgttaacgcccgcaactactgcggccagactgcgctgatgcatgcttgtcggcatgggcactgggaggtggtgcagatgcttcttctatttagatgcaatgttactagggcagattacttgagtggtcgaacagcactgcattttgctgcacatgatgggtttgttcggtgtattaggcttttagttgcagactttgtcccgagtgtggccttggaggatattgcttcttctgtggtggatggtggtgattgccagacaaacaatgggagcagtcctaattcatcgtcggggcagaagtttaatgaatcggcccgtgtgaggtacatcaacaaacctgcagatggtggtgttacagcacttcacatggcagcattgaacggtcacttagattgcatgcagttgttgattgacttgggcgctaatgtctcagctgtctcattcccctatggcactactgcaaatttgataggagctggcagtacaccgttgcattatgcagcaggtggggggaaacaagaatgctgtgaggtaagtcaatgtcataaagaatcatcacctttttgacaagaatcctgcttcagttgtacctatcagagaaatttatttattttggtatgtgatgatgctgttcttgcagctactaatatcaaaaggctctagcaggttgacactcaattgcaatgggtggcttcccgttgatgttgctagaatatttggacggcgctctttggagccattactttctccaaattcacactcgaatgtccctgtatttcaaccatccagttatcttgccttgccactcatgagtatacttaatatagccagagaatttgggttgcagcataccacaccctcaattgatgataatgatctatgttcagtttgtctagaaaggtcttgttctgttgctgctgaaggttgcagtcatgaattctgcatcaaatgtgctctctacctctgctcaaccagcaacatccgtgtcgagttcacaggcccacctgggtccatcccgtgccctctttgtcggaacggcataatgtctttcaccaagttaccaagcacaccaacagaagggcttaaatcaggttcagcgctcacattctgcaacccatgcatactgaacacccggtccatggactcgccagccactttctccaaagccgaaatcagacggaaccgtgtggcagctgtctcttcggagctggtctgtccaatcacctgcagcccattcccgtcgtccgccctcccaacctgcaggtgcagcgacgacgatccatgcggcgatacagacgtgcaggatggtcccgagttccagtctccccggccctcgcacagcgcaagcatggagctggacaagaggggggagggggatctagaccgggccagctgctcaggcatgttctggagccgaagaagctgccacagggagcagcagtgtgatgcggagatcaacgcttgattctttatctgtggttctgaattacgtttggattcgtagcagctccaacgcgggagatgagcagcggttgttttttccgccccagctatgttccttcctcctatctacagccaatgttttcttgattggtgaaatgctgctgcgtcctttgcagccgtagagtgtgtgttgtaacagttttgttactatggttcatgtgtacctgtgaatctagatagccttcgaagttgctagccagttacggttctttgtagctctatgtaaattgcagaactggatggaattactttctgtccctgatgataaatatttatatacaacgagtgaagtaccctctaaggccatctccagcggagctggatgtgagcttgt

SEQ ID NO: 308 - DNA, 1803 bp, Zea mays
  Clone ID: TF_ZmC11797_1
tcattccaattaccagacactaacgcgcccggtattgctatttattgacactacctccccgtgtcaggattggataattagcgcgcctgctgccttccttggatgtggtagccgcttctcaggctcccgtctgggaatgggcccctaagggtgcttgggccctaaccctgctggcccccgtcgaaactactatgggaataaaggaaaatcgcaaggagtgtcatcacaacaaacaactgaagattgatgcagatgaaaatgatttaagattttgcttcagaataatctcacctgttaaggcatacacattacaggcagaatcaggggctgatcaaaaggactggatccagaaaattactggagttatcgcatcgctactaaattcaccattcccacagcagttgtcatatggtaatgtagcagcagagagtaacagatccacaagttctgttgattctttgtctattgaagataacaagagttcagagggacatgatgatatattcaaccttctgaggaatatccctggaaatgacagttgtgcagaatgtcgttcccctgatcctgattgggcatctctaaacttgggtattctgatttgcattgagtgctctggggctcataggaatcttggagtgcacatttcaaaggttcgatccttgagactagatgtgaaagtctgggagccagtaattatggatctcttccatgcactaggaaatgattacgctaattccatttgggaagccctgcttccaaaagaagatcaaggaatgaacgactcaaatggagctattctttttattgaaaagcctaaacctagtgatgctttctcaataaaggagaggtacatacaaacgaagtatgtggacaaactgctttttgccagagatcccgatcagaataccattaatattttggaagccataaggaaaaatgatgtgagagcagcatatcgaattcttgcaatagctgaagtcagtgctaacatgacatatgatgctttgagcaaagatgtccatcatgttcagccagtgacagacaagatgttacttgatccgatttcttgtgagataattcaggactctggaaaaccagaaggctgtctacaaggatttccatggccgaacaccattgcatcattgtgtccaaaagaaaaatgatgagctcaccaagcatctgctgaagaggggtgcgagaacgacaattaaagatggcggaggtctgactgctctggagagaagaatggaacttggagcgataactgatgaagacttattcatactatttgtgaggtgatgttgcaaacttgcaatacaggcctttggcaactagctgtttgtacctgatagcattgtattgtacccacctaatttagcttctggaaagaacatgatttctacacctgaagacaaatgccttttactgtaccacgatataacttatgggactgctgcgcttggctgtgttttaaaattccactggtcgacatgaccacatcgttggtttgtacaacaattataggcaatcacagtattcgattctttgagtatggttattgaggtatgagaaaaagatgtcaagcaagtaaggaaagaacacccgataatcgtgcatgcatattaccgttgggcaattttcttttttttattgcaattttacaactgtactgcatatggtcgacctgtaacaattattgaatttatgggtacgtgtatcctgcaagatatgaatcaacttgtaacagcatctccaagtatcgcttcaataaaaaagtgcaaatgcagcatagtttttcccgtg

SEQ ID NO: 309 - DNA, 416 bp, Zea mays
  Clone ID: TF_LIB3150-064-P1-N1-E1
tccaaatcgcgaaaccccagccgctcctcgatggcggcctggagccggcgcgacgggatggggggcgggaactacgccaggcagatggcgatgtgcttgagcatgattgcctccggcatcgggatggagaccggcggaattaagttgctcgatagaatgactgaagactctgacaaggaggagcacctggggccactgcatgatgcggcaagggcaggtaaaatggatgtttgcaaacacctggtggagaatcttgggtttgatgtcgatgttcgtgctaatgatggttcggggaagactcctttgacttgtgcagtgtcatgtggcaaagtaattgctgtgaggtatcttattgccatgggtgcagatcttgaaaaacaagatgctattggctttactcctctgcactatgctgg

SEQ ID NO: 310 - DNA, 1487 bp, Zea mays
  Clone ID: TF_ZmC17166_1
cgtagttctcaacactccttcgtggggcgtgctcgctcctagaatcctagggtccgcttctgcgtcaccgatcggtagtaagcctctcggaactttcctcttttttaccgacgtcaactttctcacctttcttccttcccccagtctcccacaccccaactccaacacagagtcaccgcaccgccgcgtctaggtcaccgccatggccggggactggcaggagctgggccaagcggcggccatcggcctcctcttcgccttcctggtcgccaagctcatctccaccgtgatcgccttcaaggaggacaacctccgcatcacgcgctcccctccgacctcccccactgccgccgccgccagccgcgcctcccgtcccctcccactacggctccaccgacggaggcagcggcagcgacagcgactgggagggcgtggagagcaccgagctcgatgaggagttcagcgccgcctccgccttcatcgcggcctccgccgcctccggcaccagcgtccccgaggaagcgcagctgcgcctctacggcctctacaagatcgccaccgaggggccctgcaccgcgccccagccgtccgcgctcaagctcaaggcccgtgccaaatggaatgcttggcataagctgggtgctatgcctacagaagaagctatgcaagggtacatcacaattgttcaggacctattccctaactgggatgcaggtgcaagtgcgaaaaggaaagatgaagatagcattgcttccgcatcagcttcaaaggggcccatgggacctgtgtttagcagtttaatgtatgaggaagacgaaggaaatgaatcagaacttggtgacatccatgtttcagcaagggaaggggcgactgatgacatagtgaagcttctggcagctggtgttgaggtcaacgtgagagataccgaaggtagaagtccgttgcactgggctgttgatcgtggccatcttagtgctgtcgaggttcttgcaaatgcaaatgcagatctgaatgctaaggacaatgaagggcaaacggcactccactatgctgctgtttgtgaaagagaagacattgcagagttgcttgtcaagcatcatgctgatcttcggatcaaggacgaggacgggaacacggcacatgacttgtgcccttcgagctggtcttttatgaaccaggcaaactgataacacgaatatacggatatgcttgaaggtgtcatctgccaagaaacatgctagctgtatcctaaagcccatacggcacatatggtgtatcttagtgtcatgtgtgacgtgtgggaaatcaggcaggttgtttgcgtacgtggtgccctctctgaaatcagatgagttgttttatcgtcctcatcgaaccagttgtcaaaggatagtattagtgttgggaagatacatgtattgctttaatcaaaagaatcatgctggacaccaatgcaagcccaaatgggaagaaaaggatgtgcggac

SEQ ID NO: 311 - DNA, 1006 bp, Zea mays
  Clone ID: TF_ZmC59910_2
acgacggcgagtttaggcgcgagatgatgaaccgcgccgtgcacgccgcggcgaggggaggcagccttgccgtgctcagggacctcctgcgcggctgctccgacgccgcggcatacagggacgcgcagggatcaacgatcttgcacgccgcggctgcaaagggccaagttgaggttgtgaaggatctgattgcatctttcgaggccgggaactgtgtagatgaccaaggggacacggcgctgcatatagcagccttccgaggccatgtccaagtggtcgaggctctcatcaccgcatctccgtctcttatatcagcaacaaacgaagccggcgacacgttccttcacatggcactgactggcttcgggactcccgagttccaaaggcttgatcgccagacggagctcattaggcaattagcgagtggagcaatcgtggatatcagcagcagcagcactattatcaacgcgcagaatgatgacgggaagacagctcttcacttggccgtggtttgcaacctgcattcggacgtcgttaagctcctgatgagtctgccttgtattgacctcaacatctgcgacaaggacggcatgactcctctggatctactcaggaaacagccacggacgacggcgtcagaggtactgatcaaacaactgatcctggccggtgggttcacaagctcaagggaccacgagactaggtcggctatcgcttctcagctgaagatgcactccattgtaggaagcccggggacatcgttcaagataccagacggcgagatcttcttcctccacgctgctggagtcgacgtgtcgggcggcatcggcatcggcgaaggaggagctggagcagtaccgttttcctccgttattgctagggctgatgccgctgacgtcctgctgggacccaaactgaagaggctcaactctttccaagacgcggcgaagcatatcaaggtactattcagatggcctcgccgcggatggaagaaccaggcagcggc

SEQ ID NO: 312 - DNA, 732 bp, Zea mays
  Clone ID: TF_ZmC263942_1
caaatacattcccagccgtcagatacagtgtgccgccgcgaggcgagtggccgacgtacgcgccgtcgcctccttccttccagatccgcggcgagccgccaacgaggaaaacagaaggatgaacttgaaatttaaagcaccgtggaaaaaagagttagttgccctgggcaaagctaacgtcaatggtgaagataaaacaattactataagaaatgattatccggattaccctgtcccttattttcaagttactgagggttttaatttgagaaaggtcaaggagcttatgctagaaaggaatgttaagatcgccaagtccatagcaaatgacataatcatcccagaccctgctccccagtgggtggctgataacttcttggacaaatatgccgaattggagcccatccttgtaaaggacagtgcccggtgcttcctccaactcttccagaactgtagaggccggggcatgtcatcggatcttaccatcaccgcacaaaccttaaccttcattgtcagtttcaatgccctgcgttgtgcaaaagtcgtattggagggcatggcacctgagctctatgggatgcacgccaatcccaactgcataaacaaatatggatacttcccgctccacgaagctgctgaaaggttctctcttgacatgatcaagctgcttttacgccatggtgcatcacccaatgtgcgcacagttggcaatgatgtcatcaagaatctact

SEQ ID NO: 313 - DNA, 1162 bp, Zea mays
  Clone ID: TF_ZmC26160_2
gccggccgggccggcttcacaaatcctccagccaaggacacgctgataatccggtgtcagctggtagcatttctggagcagctgactctttttcagggctgagtttgggtaaggaggatgattcgtcgcctatgaagaattcaacggttcagagcacggcagcccttattgagtgcaaatgtgggatccggttgtgtatatgtgaagcaccaaaaccagaaccttctcctacacctgtaaagaatatcaacaccgttcccccaaccacacagtcaaatccaaggccaaagaagcctgctaacactcaacagaaggcttcagctacttccagtagcaactcaagcccattcttaaatattggattaatgaacaacgatagcaatgataagggcattgttgactatgaagttagtggggagggactgagagaagcaattaaaggcggggatgttaagggtgtaaagaaacttcttacacagggagtggattctaactactgcgacaaacaaggatttactttgctgcatttggctgctttgtttaaccaaactgaaattgctcttattctcatggaccatggggcaaatgttgaaagcaaaaatgggcaaggggaaactcctttggactgtgctccggcaatgctgcaatacaaaatgcgccaacgggtggaagaactcgcggcttcggcttcgaagggaccactagggtgaactgtgctcgtgctagtttctgctgagttcctcctattccagtttgtgtcaaatgtggtgtcaagaataaaatagttaagtcagctgaaagcttcttgctggtgggacagtgtttggtccgccagtgtataccatctagaaacgttgaatgccagtcacggctcacgcgtgtgaaataatatatattcagcttcatcctacattcctactcatgtactctgtagccggtgaatacttccaaacatttaccacgtacaatatgttttcttttactgaaaaaaaaaagggcggccgccaccgcggtggaaagatttgccccatggtttgtggggataagagcaatttcagtttggttaaacaaagcagccaccgggccgaaaccagagctgatgtaagcgtgcttgagcagtttgcgcacgtcgatagcgacacctgaatgggactaactggcc

SEQ ID NO: 314 - DNA, 1656 bp, Zea mays
  Clone ID: TF_ZmC1327136_1
atggatcggctggtcatacctgagccgtcgaacgaggtggtggtccgggtggagcccgggaggcaggcgaggggggagctgacgctgcggaacgcgatgcacaccatgccggtggcgttcaggctgcagccggcggtgcgcgggcgcttcgcggttcgcccgcacacggggatcctggcgccgctcgcggcggtcaccgtggacgtgctgtacctggcctccgcgcctccggaggggcccagcggctcaggaagccgtggcgaggacgcgttcctgctgcacagcgtggtcgcgcccggcgccgcggtgaaggagcccgtcacggcgctcgactcggtcaacccggagtggttctcggcgaggagcaagcaggtgttcgtggacagcgggatcagggcgagcttcgtgggagcgtccgtggccgcgcggctcgtcgaggccggcgcggtcgaggcgctcagggaggtgctcgaccgcagcgagcccgagtggcgcgctgcggacgccacggacgagtctggccgcacgctgctcgacctcgccgtcggcctggcccgcgccgacatcgtccaggtgctgctcgagtacggcgccgacgctgacaagccgagccgaggccggacgcccctcgagaccgccgccgccgctggcgagtgcctcatcgccgagctcctcctcgccaacggcgccacgcccgccggctccgacgccatccacgtggccgccgccgccggccacaacgacgtcctcaagctgctccttgccaggcccgcctccgcttctcccgcctcgtcctcgtccttctcgtcttctttgacatctatcgacgcggcggggagggacggcaagactcctctacggttagcggcggaggcggggcggcgagacgcggtcaaggcgcttctcgcggcgggcgcgagggccgacgcgaggtgcggcgcggacggtgccaccgcgctccacgccgcggcgaggcgcggcgacgaggcggtcgcgcgtctcctcctgtcgcacggcgtctccggcacggcctcggtgcgcgacgtggccgggaagaccgcattcgagatcgccgccgaggagggccacggcggccggatcctggacttcttgggactcggcgaggccatcctcgccgccgcgcgcaagggcgaagtgagatcggtcaggcgcgcggccgatggcggcgcgtccgtcgaggggcgggatgcgcatgggtggacgccgctcatacgagctgccttcaaagggcgggccgacacggtccgcgaccttatcgaccgcggtgcggacatcgacgcggccgatgccgacggttacacggcgctgcactgcgcagccgaggcgggccgcgccgacgtggtcgacctcctcttaaagaacggcgccaacgttaaggccatgaccgtgaagggaagaaccgctgccgatgccgccacagcctcggggaagtccaaggtggttcggcttcttgacaaggccaccatcatggggaggaagcaggatgttagcgagaaggtggcgccggcggtggcgaagggcggtagcatggacaggaaacggagagcgcggaaagggagcagtggcgccatacggtttggtggtgggaaggaggggttcgaagccgccgcggttaccgttgggtggtcacactag

SEQ ID NO: 315 - DNA, 2077 bp, Zea mays
  Clone ID: TF_ZmC12604_1
cattggctcactcgaggccggccgggctggcgggggaaagtgatggctccccgcgggccgggccggatcccacgctgccctcggcgctgcgtctggacccggcacctacctcccccctccccacctcgccgccggcgggtggagtcgggctggagcagccgctctcctctgttacccccctaaccccctataaagaaaaagaaaaaaaacagagagagagcgagcgaccggcggctcggcagccatggggcacggcgtcagctgcgcccgcaccggcgacgagcacgactacttccgcgcggcgcaggtcggggacctcgaggccctggacgcgctcctcgacgccgacccctctctcgcccgccgcgccacgctctacgaccgcctctccgcgctccacatcgccgccgcaaatggccgcctcgaggtgctgtcaatggtcttggatcacggggtgccgccggacgtggtgaatcggcacaagcagacgccgctgatgctcgcggcgatgcacggcaagaccgactgcgtgctgaagctccttcaggccggcgccaatatcctcatgttcgactcccagcacgggcggacctgcctgcaccacgcgtcctacttcggccacgtcggctgcctgcaggccatcctcacggcggcgcggaccacgccggtggccaactcatggggtttcgctcggttcgtcaacgtgagagacgaccacggcgccacgccgctccacctcgccgccaggcagggccgccccggctgcgtgcaggcgctgctggagaacggtgccatcgtctccgctttgaccggctcatacgggtttcctggtagcacgtcgctgcacctcgccgctcgcagcgggagcctggattgcacccggaagctgctcgcctggggagcggatcgtctccggagggattcagcagggaggatcccttacgccgtggcgctgaagcgcaaccacgaggcgtgcgcggcgctgctgaacccgtcggcggcggagcccatggtgtggccgtccccgttcaagttcatcagcgagctggagccggaggccaaggcgctccttgaagcggcgctgacggaagccaacagggagagggaggagaagatcctcaggggcaccaagcactctccgcatcctcccacctgggaccacgcgagcgacgccgccgacgccgacgccatcgacgacgcgtcctcagatgccagcgccagcgacgcggagctgtgctgcatctgcttcgaccaggcgtgcacgatggaggtgcaggactgcgggcaccagatgtgcgcgccgtgcacgctcgcgctgtgctgccacagcaagcccgacccggtgacgctagcgctgccgtcgccagcctgcccgttctgccgcggcagcatctcgcggctgctgctggtggcccgggcaagcagcgacgacgcagacaccgagaagtcggcggcagcggctgcggcagcggctgcctcctccccgcagctcgtccggcggcggtcccggcggtcgcacaacctcagcgacggcggcagcagcagcttcaaggggctgtcgtccgccgtggccggttccttctccaagatcgggcgcgggtcgagccggacgatggccgacagcgacggctgcggcgtggacaagcccgagcacgacccgtgatcggcattggatcctgcgcatgtggagccgagcgcggggccatttgcggacatccaatcgaatccaagccaagcgtgactgcttgctgcgaaaataaccgcatccttttcttcttcttctccccatgtccctgtctgtcaatcctattcttgggcgtgccaggatttgttcacctggccattgccgtattccattgtcaccgaccggctatagtatatagtactagattccatttccataaaaaaaaaaaaaaaagcggcctaaaaaaaaaaaaaagcggccgtggccaacagcaagactactgctacctccaacagcttcaggggactcacctcggccatcaagtccttgtccttgtccaggattgctcgtggctccgggagggtagccgacagctcattaccccaatcattc

SEQ ID NO: 316 - DNA, 238 bp, Zea mays
  Clone ID: TF_LIB3067-045-B5-F3A
gagcttccttcgccggagccgacgaggtttggcttcgccaccgcggtcaaggcagcagttgatggcgtgatgaccaccactccaaaggatgtgcaaggagatagagcagtaaaaaagcgcggtcggaagaaccagtacaggggaattaggcagcgccctttgggcaaatgggcagctgagatcaaggaccccaacaagggcgttcgcgtctgggtcggaacctacaacaccggcgagg

SEQ ID NO: 317 - DNA, 3741 bp, Zea mays
  Clone ID: TF_ZmC660_4
ccccgcgtccgattttttttcttcaatctttggcgatggtggtccccttggcgccggtgatctgcatgtgcctgtgatctactgctggctgcatcacctcaatagtctacctgggggcgtatgacagcgaggaggcagctgctcgtgcctatgacctcgcagctctcaagtactggggtcctgagactctgctcaacttccctgtggaggattactccagcgagatgccggagatggaggccgtgtcccgggaggagtacctggcctccctccgccgcaggagcagcggcttctccaggggcgtctccaagtacagaggcgtcgccagacactcaagaagaggcagccaaggcctatgaccttgcggccattgaataccgtggcgtcaatgctgtaaccaacttcgacatcagctgctacctggaccacccgctgttcctggcacagctccaacaggagccacaggtggtgccggcactcaaccaagaacctcaacctgatcagagcgaaaccggaactacagagcaagagccggagtcaagcgaagccaagacaccggatggcagtgcagaatctcctttgttcgcttcaatctttggcgatggtggtccccttggcgccggtgatctgcatgtgcctgtgatctactgctggctgcatcacctcaatagtctacctgggggcgtatgacagcgaggaggcagctgctcgtgcctatgacctcgcagctctcaagtactggggtcctgagactctgctcaacttccctgtggaggattactccagcgagatgccggagatggaggccgtgtcccgggaggagtacctggcctccctccgccgcaggagcagcggcttctccaggggcgtctccaagtacagaggcgtcgccaggtgcttatactgcttatattattctactgtgttactatgtgctaatcttgattccagcacctacatctcgattgatcacctagtagcaaatggtagggtgtataaatctgctagctcaatcagcacatgcactgaccatggaatgatggaacacacctggcatggcaagaggctgtgcagctcccaagtgcaaaaaaatggatgtcacactggattgtgaaatggggtccaggctgcaggcacactaactcacaccggcgttctctagttgcattgggtgacagacacggcacaagatgaggtccaactgtaacctagaacgtcagaggcacacgcatcacctgggcgggcctgtggcacgtcacacacgccagccatgtcatgcatgactcatcacccacctggcattgtgcttctgtgcacctagaaaatgccagctctgaactgcatgcatcacagactactactaaaattgtttgtgaaaccagtgagtgcatcattcttcaaggatcaggatgcacgccttcaataagctaaaagaatgaatgttttttttcttcatgttcttgttgctttgatggtctaggcatcaccacaacgggaggtgggaggcacggattgggcgagtctttgggaacaagtacctctacttgggaacatttggtatggatggacagtcggcgtactaggtacatcccgcaatgatagtcgtcaagcgaatccaagacaccggatggcagtgcagaacccgatgagaacgcggagcctgacgacaccgcggagcccctcaccacagtcgacgacagcatcgaagagggcttgtggagcccttgcatggattacgagctagacaccatgtcgagaccaaactttggcagctcaatcaatctgagcgagtggttcgctgacgcagacttcgactgcaacatcggatgcctgttcgatgggtgttctgcggctgacgaaggaagcaaggatggtgtaggtctggcagatttcagtctgtttgaggcaggtgatgtccagctgaaggatgttctttcggatatggaagaggggatacaacctccagcgatgatcagtgtgtgcaactaattctggaacccgaggaggttttcgctttccaggtgtcctgtcttgggtaatccttgatctgtctaatgccacagtgccactgcaccagagcagctgagaactttcttgtagaaagcccatggcagtttggcgttagacaagtgtgtcgatgttctttaattctttgaatttgcccctaggctgcttggctaacgttaagggtttgtcattgtctcacttagcctagattcaactaatcacatcctgaatctgaagtggttgtgcttgtgcagtttatcactgagtttacatggcatgatcatggtaacgactagatcaagattcaagatccagaccacagatttgctttcacccccctattaccatcataaaagcctagtgacagaggaaaacacaaaggtttaactagttgcactgagactggatatgtccggtggctggcacatgtgcaagcaagcagcccaccgtccattcagattagttgagcagcctttgtctgcaattcagtatctcacattaagcataatctatgtgcatgctttttttttctttctttctaaaaccaacaaattatatacatttaccagaatctgtgtcaccaaacattttgtcttactttcgagaggcactactgtactctgagaacaagggcacttggacaaattttgcacttggacaaattagccaagcgtcatgtctgaacatctgtttttatccacccattcagacagactacttaaccattcgtccgcttctgcagacactcaagaagaggcagccaaggcctatgaccttgcggccattgaataccgtggcgtcaatgctgtaaccaacttcgacatcagctgctacctggaccacccgctgttcctggcacagctccaacaggagccacaggtggtgccggcactcaaccaagaacctcaacctgatcagagcgaaaccggaactacagagcaagagccggagtcaagcgaagccaagacaccggatggcagtgcagaacccgatgagaacgcggtgcctgacgacaccgcggagcccctcaccacagtcgacgacagcatcgaagagggcttatggagcccttgcatggattacgagctagacaccatgtcgagaccaaactttggcagctcaatcaatctgagcgagtggttcgctgacgcagacttcgactgcaacatcggatgcctgttcgatgggtgttctgcggctgacgaaggaagcaaggatggtgtaggtctggcagatttcagtctgtttgaggcaggtgatgtccagctgaaggatgttctttcggatatggaagaggggatacaacctccagcgatgatcagtgtgtgcaactaattctggaacccgaggaggttttcgctttccaggtgtcctgtcttgggtaatccttgatctgtctaatgccacagtgccactgcaccagagcagctgagaactttcttgtagaaagcccatggcagtttggcgttagacaagtgtgtcgatgttctttaattctttgaatttgcccctaggctgcttggctaacgttaagggtttgtcattgtctcacttagcctagattcaactaatcacatcctgaatctgaagtggttgtgcttgtgcagtatatcactgagtttacatggcatgatcatggcaacgcagccagtgcagcatagatttgttcgtttgaacagtttacaaggctgtaaccctagtaagctccagattaacgaaccctttgttttcccc

SEQ ID NO: 318 - DNA, 437 bp, Zea mays
  Clone ID: TF_jC-zmX700221106a1
tttctattaggactcaaaggccgacaagggggactatggagtccattccggtgatattgatcttggagcttaccgatgggcatggctactatgggatgaagacaatcccttgtgcgaaagagtcctaatttcagagatggcttaagcacacatgactactgctggttctgatgcccatgcagcatgggtggccaaagggaagaggtagaatgaatacaggggtatactccagcgggcttggggtaagtgggctcttatgatcagagattcacaccagggcgctcgtgtacggcttggtactttcaatcgtccgaacgtagacgaaagatcttatgatgctgaaatgcgctagattggtcgcaagaacgtcaaggttcactataccgacgcaccatcaagtggtcagacgcgtccatctaggtcaactgctcctcaag

SEQ ID NO: 319 - DNA, 538 bp, Zea mays
  Clone ID: TF_LIB3732-034-Q1-N6-A3
tacgacgtggcggcccgcgcgctccgcggcgccgacgccgtgctcaacttccccggcgcgatcgcctcgcgcgcggccccagcgtccgcgtcccccgaggacatacgcgccgcggcggccgccgcgcagctcgagtactcgcatcagggtcgtaccgccaatcctccccctcctcctgcttctcctccttctcctgctgctgcagcggcacaggactggcatcaacagcacgacgcggcgagctacacgccgcagcaggaggccggcactgacgagttcatggacgaagaggccatcttctagatgccgcagctcctgcggaacatggcggcggggatgatgatgagcccgccgaggctcagccccgacacctccgacgagtcgcccgacccgtccgaggccggggagagcctctggagctaccgtgacccgtagattgttgcacacctatagctaggccatggcaccagcagtgtggtaataacacaaaccatcaccggcaggtagcaaaccagagaagttgattattatggcgaca

SEQ ID NO: 320 - DNA, 471 bp, Zea mays
  Clone ID: TF_ZmC1903_6
cccacgcgtccgcccacgcctccgcgcaagcgcaacagaagcatactacgccgctacgcgctgggcggtgccgcacagctatagatagctagcagtgttgcatagaaatggacagcgccagcagcctcgtggacgacaccagcggcagcggcggcggcgcgtgcacggacaagctaagggctttggccgccgccgccgcctccgcctcggggccaccgccggagcgcatgggcagcggagccagcgcggtcgtggacgcggccgagccgggcgccgaggcggactccggctccgccccggcctccgtcgccgccgtcgcggcgggcgtgggcgggaagctgccgtcgtccaggtacaagggcgtggtgccgcagcccaacgggcggtggggcgcgcagatctacgagcgccacctgcgcgtgtggctcggcaccttcgcgggcgaggccgacgcggcgcgcgcctacgacg

SEQ ID NO: 321 - DNA, 571 bp, Zea mays
  unsure (1)..(571): unsure at all n locations
  Clone ID: TF_LIB4767-002-R1-N1-D7
ccggccgggnaaaaaaaaaaatatttgtcttaagatgtatgtctatcgaactgcttgcttcagccttcaatctctgcgctgtgctgtgccccgcgaattgtttacgctcgctctcgagatctctctctagattctctcggcttccctcttctctctgtctcctgcaagaacccatggcggctacgacgatagattggcacgcccgcaacaacgccgcgcttcccgccgccatgtatggcgtggccgtgccggacagcaaggagctcgtgcgcgcgcttgctccgcccacgcagcaggcaccgaccatctcgttcgcgtacccccgctccggcgtggagcagcagagcgcggcgggctcgtttctgggtgccggcggtagtggcctgaccccggcacagatcctccaggtgcagtcgcggctccagttcctgcgccggccggcgggggccgcggtcgccacccagccgatgaagcggcagggcgtgccgctgccgcangcgccggcggtgtccaagctgtaccgnggcgtccggcagcggcattgggggaagggggtcgnggagatccgcct

SEQ ID NO: 322 - DNA, 490 bp, Zea mays
  Clone ID: TF_LIB3136-018-G10.R6A
accactaaggaaacttgccttcctttcttgtttgcccttcctttctgcaactattatcccacaaattgttctcatatcttccagtccatctatgccttgtaacaccacgatattgagatgctctttgcccaaaagtgtcaatagatttgcgaggaactggttctctagcatgagatttcgccatgacccgtttcctactatcctcattcacttgaacagaggaaattgcacccaccccattttgcacactggggctcatagtgagggacaaagattggaaattgcacccattagcctcatttgaaggttttccatcagaagaatactgggtttgcgccaaccaggacttgtacatgccattggtggggataagagcatgtgagttatcattatatgcatggaaagaatggagcaaggaagaaggttttgtgagactttccccagtttcaatctttgaattgttggtgcaaaagcttgttgccacattaac

SEQ ID NO: 323 - DNA, 527 bp, Zea mays
  unsure (1)..(527): unsure at all n locations
  Clone ID: TF_LIB4730-052-R1-K1-B8
cctcgaggtcctgtcncgggaaaaaaaagaaaaaaaaaaaaaaaaaaaaaaaaaaaaaaaaaaaaaaaaaaaaaaaaaaaaaaaaaaaaaaaaaaaaaaaaaaaaaaaaaaaaaaaaaaaaaaaccggcccttgcggggggccgtttccagaccggggccttgaacttgaagccttcatccgagagagtggagctgaaaagggaaaaccttctgagtctaattaggacaacgctggggggggggcccccccttgttagttaggaggctcgaggcccaaaaaaaaaaagcttaacgatgaggcgcgcggagccggtcgggaagcaggcggacccggagcgggggataaccggttacaagggcgtgcgggggccccgggggggcaagggggtgtcgaaaatccgggtgcccggttcgggggagcgcctggggctcggttcctaccccacgcccgaggccgccgccgtcgcccacaaaacggccgtttacttcttccggggnggngggggcggcccgggcaacttccggg

SEQ ID NO: 324 - DNA, 520 bp, Zea mays
  Clone ID: TF_ZmC421638_1
atacaacctccactccctgtccactcccccccaccacctttgcctctcctagcttttccttggcatcctagctcttcctcctcagccgcagcagatcgactaggaaacatgtgcggcggcgcgatcatctccgagttcatcccgcagcgcggcgccaagcggggtctctgcgccgaggacatctggccgcacgcggccgccgacttcgacgacctcctccacgcgcacgcgcacgcgcacggccacgacgacgacgacttcgccgccgccgcctccttccatcccgaccaagagccgccggcccggaagcgggagcgcaagaccatgtaccgcggcatccggcgccgcccctggggcaagtgggcggtggagatacgggacccggccaaaggctcgtgagcgtgcagcagatgctggctcaccgatgaggctgcctattgctgacaataggaagctgctgagcccgtccaggtatagcggtgcagtgaaacatcatggacgaaggacatgaccgtcacct

SEQ ID NO: 325 - DNA, 698 bp, Zea mays
  Clone ID: TF_ZmC2171_1
ggcaagtgggcggcgccgtccacgccgtcgtccacgaccacgaggcggcgctgcggttcaagggcaccaaggccaagctcaacttcccggagcgcgtgcagggccgaaccgacctcggcttcgtcgtcacccgcggcatcccggaccaccaccggcacccgcgggcggcggcggtgaacctggcagtgcatggccgtacggtggggagcaccacaggaataaaaaggacgcgtgatcgtccagctggccggccgatcgaggatatggatatgcatgcatgcaacttgcagtgcgaggggatcagatcaagaagtagctgtgcggaggaatggaatatgcatgcacgcatgcaatatgggcggggtaagtggcagcgacgatttttggtccaagcataaccatttcttggccctttagtttccacgtcgatttcttcttctttttttttctcacgagatgatcttcttttgttcatttcttggaggatcttgatcactttggttaattagagagctagctcgctatagctgcttgcttaggtgcttttactactaccttccttttgtataatggcctgctctaggtgctcatatctttaatttgttcaagtgtcaactgagattaactacctgtgtgcaaactaatccaaagcaaagaagagtggaaccttatgtatatggggcatgttctccctctct

SEQ ID NO: 326 - DNA, 204 bp, Zea mays
  Clone ID: TF_LIB3062-027-Q1-K1-B1
acgcgatctgcgacgcgcagcctacgtacaccgtctcgcggaagctgacgtcatgccggttcggggctgacatccggtacccggcgaagcgcgcgcgcgtctggctcggcaccttcgactagacgcccataccttggcccgctcctacaacgtgagcactcggaccgtgcgccggcctatcaccaggaccaactttcccgggct

SEQ ID NO: 327 - DNA, 1476 bp, Zea mays
  Clone ID: TF_ZmC4345_1
ccttcacaaaaaataaaataaaataaatgaataaacgcaacggatggaaggatatcttcgagtaattaacgggaggagatgtagggagagagagaaaccaccagaggcgagcgagcaggtgtgggcgtggcgtgggggaggcgccgaggcggtcgggcccgtagataagagtcgtctcacctcgtcgtcgcacccgggcatcgcacgagaggagaaggagaggggaagggctagagagagaaacaaaggtggtagtagatgtgagccaccctctttgtatccctcgtcaacttctcctaccaacttctttttcctcccccaccccttccttaccgtctcgcgcccgctccgcagcctcgcaccacccgccgccgccggccgaccggccggcaccgccggtggcatttgaagtatggttagcttgaggcgacgccgactattgggtctttgttctgggaaagactcattgccagttgatcttcctaagccgattgaaaatgaaaaaactgtggaagttgcacactccaatgtgaagccattcagtgtgcatccactacccttggcaaagacttctgatgtgctcataaaatcctcaaatggttctgatgattcaaaggaagagaaaacccagtactatccaggcaaggaaatcaagtgcagaaaacggcatagaagaaagcagtatgtggatcaagagccatgcattatgaggggggtttatttcaaaaatatgaaatggcaggctgccataaaagttgacaagaaacagattcacttgggtactgttgggacacaggacgaagcagcccggctttatgatagggctgcttttatgtgtggaagggagccaaacttcgtgctttctgaggaagagaagcaggagctacggaggtacacctgggaggacttcttagcagtgactcgcaacacgataaccagcaaaaaacaaaggaaagtcggatcactaaggcgtagcaaggcagacctgttcatgggacagagtgacggcgacaccgagatggccaatggtggcggttcatcgaattccgacaatggcgacgcggggacgtcggcgtcatagatcgctcccaggggttctgccgttgtggcaactcaaagtggagtcctccagcacattcatcccggtcatgcatgatacgagctccgtctaggattttgttctctcaataattaatttccatgtgcataaggccccgttggtctaatcaaatcaaaggttagggaaaccatgccatctcagacgagaattagaggtggtccattgttagaaaacagttcatctgaatagtaatgtataccggttctgaaaactgtgtatatctaccgataggttcaccttacattttgcccagtgtaattagtttaccttataatttaccaaaaaggaataatttttccctttccgttaataccatctctatactagtgggaagaaaaaaaaaaaaaaaagcggcc

SEQ ID NO: 328 - DNA, 445 bp, Zea mays
  Clone ID: TF_LIB3076-043-Q1-K1-H9
gcgaaaaaaacagaaaaaaacaaaaattaaaaattaaaaaaaaaaaaaaaaagggcgtggtctcgggatctagaaccgagcctcaagcgggcaggccacccagcactcaggctagatagctcatcacagccacagcagctagaccctagtagctcactcgcgctcgtgccatgatgaatacccgagcctgtggcagcggcagtggcggcaggaacgaccagaccatgatgggcttctccgagcatccgaagccggcggcgtcggggcaggcgcagccgtccccgccgtcgtcgccgagcgagcgtccgccagcaggccgcgggcgccggcgcgcgcaggagcccgggcggttcctcggcgtgcggcgccggccgtggggccggtacgcggcggagatacgcgaccccacgaccaaggagcggcattggctgggcacgttcgacac

SEQ ID NO: 329 - DNA, 354 bp, Zea mays
  unsure (1)..(354): unsure at all n locations
  Clone ID: TF_LIB3245-182-P1-N1-H5
cggcttggttttctgaaacaaggacctttactggggcgctttcagtactcgggaagaggcggcngatgcgtaccacatcgctgcgatcaaatttcgcgggctcaacgccgttaccaacttctacatgagccgcttccccgtggaaagcattcttttgaacgaccttcccgtttggggcggagacaccttgcgcgccggcaaattcccgttggacttggtgcaaaccgcgagcgctggtgagatgattctcgaccgggctgctgccgctttgcaggccaccatgcccccttgcgagaaggactactggggtttggtcaccctgcactaccaacagcagcaggagcacgggccgca

SEQ ID NO: 330 - DNA, 346 bp, Zea mays
  Clone ID: TF_cC-zmle189002g10d1
acccgtccgccgacttctagctaatgccttacacacttataggctctttgttttgttcagcccacatatcgccctatggggagggggcgcatttcagctccggagagagctctacttcttgtggtctgtaacaactcaactactacagctggcggtttataatggcctgcgaagtgcgattcagtgccattgtacaggggcgtgcagaagcatgtgtggggacggttcgcggagaatattcggtacctgaccaagcgcgcactcgtttgactcggcaccttcgactcgaacgatgtcgctgagctcgcctatgacgtggaccaacgtgacctgttcggtccgtttg

SEQ ID NO: 331 - DNA, 356 bp, Zea mays
  unsure (1)..(356): unsure at all n locations
  Clone ID: TF_LIB3355-042-Q1-K1-C6
ctgctctaggcggctatgacagggaggagaaggctgcgagggcttatgacctggcagctctcgagtactggggcccctcgactcacataaatttcccggaacagcagcggcttctcgaggggagcatccatgtacagaggagtgacaaggtgccgtgctgcaagtctgctcgcccatttttgcaccccacctgctgccttttccaacaccccaaaacttctagccatctcacatccgagtctgggcacagctctgtgcctctctctgttgggagttctgagttttctgaactcacacgcacgcacacgcatncgnctgctgcttgtgtataaagtataaaccttttcttgtcctct

SEQ ID NO: 332 - DNA, 311 bp, Zea mays
  Clone ID: TF_LIB4705-003-R1-K1-A4
cggaaatccagccgccggcgtgcgcgcgcgtctgtgccgcgggacagcgaccgagcaactgcctgcccaaccgccccgcccagcggacgccgagcagtgcgccgcgttctacgcccgtccacctgtcaactgcgctgcattccattgcacgccgttagtcccggctatgccgcggcgtccgctattttcactggcccaagtggttgtcgggggtccggttgcccaataaccgcacgcggctgttgctcggctccttcgacaccggcgcggacgcgtttctcgcttacttcttggcggccttgcttctccgc

SEQ ID NO: 333 - DNA, 333 bp, Zea mays
  Clone ID: TF_LIB3150-014-Q1-N1-B11-F2B
cttcgctctgaactatatcgggctacaactaatatggcgaggaagcgcaaggccggcgactcctccaagggtatcgacggcgcccactctctgccaccaccgctggctatggatcaacagtacgcgtgtgcatgggcatctgaccgacggaactagcatggccgcggcggctgaagcggcggcggcgcagcatcagcggcggagaaggaagcggttcgtgggtgtgcagaagcagccgtcggggcggtgggtggcggagataaaggacaccatccacaagatccgcgcgtggataagcacctttgacacggtcgaagaagccggccgcgccta

SEQ ID NO: 334 - DNA, 692 bp, Zea mays
  unsure (1)..(692): unsure at all n locations
  Clone ID: TF_ZmC5367_25
acctcggtaaatcgatgcaccacgagaaaatccactgcttttcctgaaatcttgattttgaccgcgcgttccttctaagtgacgcaacatattcttgtcgtcacatattattcatctcttccaggtccttctcatagttgctgatctaagcatgaaaaataaatcgtataatatccaaaggaagcagtgataaaggaaaaaaagtataattcttgagaagtgaactgaaatatatgcaaatactggaaaacttgtagtcgttgtggttccccagtacttgagagcagctaaattgtaagccctggtagctttctcttctttatcatgtccacctagatacacagaacccgatcttgaaatcgtcccaggtgatcccgacgagccgtagaggcgccggcccgaagcgaaggccctgcagaatcgatgggtcgcgcacgaagcagagcaccagcccgagcgcgaacacgatgagcgccgccgagatgcggctgcaggaccggcgaggggagatctcgggcgagggcacatcgggcgtagatccgcgatctcggacgcagccccacgcccacatcgggtgtagatccgcgatcttggacgagggtacgggaatgaggggtgggcgctcggcgacgatctcgggcgagggctgggggacggggccggacaatgcncgggggcggaggcgagggcac

SEQ ID NO: 335 - DNA, 372 bp, Zea mays
  unsure (1)..(372): unsure at all n locations
  Clone ID: TF_LIB3608-011-Q1-N6-A11
gtccagcgacggggccgccagcggcagggagcacgacgacgccgacgccgacgccgacgacgactcgtacaccacggcgctcccgctcccgctcgcctttggagcctccgccaacgcctccttgggggggggggggggtttttatttggtggcggcacctnacccacggagcttgagcgcggtggcnttntacgcccgctccgtctgctccggtgtgtagaaggtgcccaggcaaactcgcgcctttcgtaccgggtcgcggatctacgtcgtgtaccgggacataggggggtttcgcactgcgtgcagtcttggttgntacgtcgntggtgttggttaaaatggtttattgggggctatggagggattgag

SEQ ID NO: 336 - DNA, 353 bp, Zea mays
  Clone ID: TF_LIB3245-310-P1-N1-B6
ggccaaacaccaaactgaacttcaatgtaagaatcacatgttgcttagcacttactgatgcactaggaactggtgtttcttgttcaagaacagaagtaaattgcattaatatctgttacgtgttatcagatttctgattatgagaaagaaattgaggttatgaagaccatgtcccaagatgaatttgtggcctacataaggagacaaagcagttgtttctcaagaggtacttcatcataccggggtgtaaccagacggaaggatggtaaatggcaagcaagaattggtaggattggtgagagtagagacaccaaagacatttaccttgggacctttgaaactgaagaagaggc

SEQ ID NO: 337 - DNA, 496 bp, Zea mays
  unsure (1)..(496): unsure at all n locations
  Clone ID: TF_LIB3633-001-P1-K6-G1
cgtccggcatcccggtcgaccccgcgtccgcgcctcacccccccacagacaccaagccactccctcctctcccggtgaggcttgagcgatccgagcaaaaaaatcatccgcgacgcagcgacgcagctacgccacctcgcctcttcccactcccgccgccgcctcctcctcgcagcttccgccgctctactcgtcgccttatgcggcgccgtgcatggccggccagatgggcctgaaccagctcggcccggcccagatccagcagatccaggcccagttcatgttccagcagcagcagcagcagcagaggggcctgcacgcggcgttcctgggcccgcgggcgcagccgatgaagcagtcagggtcgccgtcgccgccgccgccgctggcgccggcgcagtcgaagctgtaccgcggcgtgcggcagcgccactggggcaagtgggtggcggagatccggctcccgaagaaccgnacgcggcnggggctcgtcacc

SEQ ID NO: 338 - DNA, 675 bp, Zea mays
  unsure (1)..(675): unsure at all n locations
  Clone ID: TF_LIB4730-104-Q1-K1-E6
agcgagcgcacgaaagttggttcggaggtttcttgaggggtttagctttggcggcaagtcaaatgcgagcggagtgatgtggcccatggaggaagaggaggtgttcgtgacggtgaggcggacggagcacgtcgacgtcacctcccgggcggtggtcgtggctgcggggcgcgccgccgtcgcggggcccaggacggtgcgggtcttctgcgacgactacgacgcgaccgactcgtccggcgacgaagcggaggaggaggaaaagaaggccgcgcgcaggagggtgaagcgctacgtgcaggagatccgcctggagcgggcggcgaaggaggagganggaggaggaggaggcgacggccgcggcgtctctgggggcggtgctcccggggcggaagcggaagcggaagcccgacggtgaggcctcggagccccggttccgcggcgtgcggcagcggccgtggggcaagntacgcggcggagatccgcgacccgtggcgccgggnttggcgggtgtgggctcggcaccttcgacnaccgccgaggaggccgccaaggtgtacgactcggccgccgccaaggctccgcgggcgcgacgccaccaccaacttccaggcagcaggtggaccccgagcgctctcacagggccgggcggggtccaagagcgccgcgacatcg

SEQ ID NO: 339 - DNA, 624 bp, Zea mays
  Clone ID: TF_LIB3912-059-Q6-K6-H4
ccatgatcaagacctggctacggaacaaccaggtggcccagccccagccgccagctccacatcagccgcagcctgaggaaatgagcaccgacgccagcggcagcagctttggatgctcggattcgatgggaaggaacagcatggtggcggctggtgggagctcgcagagcctggcgctctcgatgagcacgggctcgcacctgcccatggttgtgcccagcggcgccgccagcggagcggcctcggagagcacatcgtcggagaacaagcgagcgagcggtgccatggattcgcccggcagcgcggtagaagccgtaccgaggaagtccatcgacacgttcgggcaaaggacctctatatatcgaggtgtaacaaggcatagatggacagggcggtatgaggctcatctatgggataatagttgtagaagggaagggcagagtcgcaagggtaggcaaggtaatgaaacatatatccataacaaccactgcttatatcgtcatagaaaaaacatatatggtttgtacaacttgagctactgataaagtattgtgtcttttggttccattgcacacacccctggcttcaaacattgcctaccggaatgacaccaacaatatgcag

SEQ ID NO: 340 - DNA, 560 bp, Zea mays
  Clone ID: TF_ZmC167604_1
ggccatcttcgccatcgggtacgtgccgagccatatgcgccgcgccttgcggggctgcgggatctccgacacccacttgccgctccggcaccggatgcctgggtagaatgcgtgcttgccggacgaccgcggcgacggctcccccgagctcgtcgcggtcgtcgtccccatcggcggagccgtgatggcagctgcccgcgccgacgacgtcccgtcgccctgctgcaccaccggagaaggggaatgaggcgaggctgggcccgaagccgaagcagaagccgcctggtggtggctgtggccgccggctgccggcccggccggttgcacctgcaccgccggggaaggagaatggggtgccggcggctgcttctcagccatgaaccgttagggcacgcccatctgtttgggcacctgctgacatgtgccaaattcagctcctgcagcagtggagtcagtgcacctacctatctatggcgcgtgcacgcgcacaggtatatccctccctccctccccaggagctgtcagctagctattccagtgttgcgcgtttgcagctcgtg

SEQ ID NO: 341 - DNA, 709 bp, Zea mays
  Clone ID: TF_ZmC485_4
cagtaaaagtatatgcttgcttgatcagtggttgtttcaatcagaagattaaaaaaacggaattaatattaaaaaaaaggggaagtggctagggaattcctcagtcctagctagctagctcaccggtgggaacgccatgcttggcttgggtgcaggtacatatatcttgggctattcgacagcgaagtagaggctgcaaggttgttcacctcggacgattctgccatttgttcatacacaccatgccttttgatttctctcttgcaatttctcttcttcttttatcatggcttttgattcccaaagggttgagtaccgactcgatattcgattctccctgccgtttcgtgaccccagggcgtacgacaaggccgcgatcaaatgcaacggcagagaggccgtgacgaacttcgagcccagcacgtacgacggggagctgctgctgactgaagctagcgctgaaggtaattaagtagctgctcgctgccatgtaatcttcagatgacgccgctgttaattattagctcatcagctttctgacgatcagcccttgtttttgtttctgcttctgcagttgctgacgacgttgatctgaacttgagcatctcgcaaccggcctcgacccagagccccaaaagagacaagaactgccttggtccgcagctccaccaccaccatgggcggccgtttgacggctccgccgttctcc

SEQ ID NO: 342 - DNA, 294 bp, Zea mays
  Clone ID: TF_ZM4997.C1.o1.fg
atgtggcggctggagaatgcctcggaggttccgccgatcgagttccctcaagaattactacagaaggaagtcgaccggccgccgacccagcagttctttccgcccactactacggccgcgcagcaggcgacttctaccgcctaccgcggcgtcaccttctaccgccgcaccggccgctgggagtcccacatctgggactgtgggaaacaggttggatttatttcgtttgagacatgtaaggacttctccggagagattggaaatgtgcttgtattcttccgctcttccgtctaa

SEQ ID NO: 343 - DNA, 1912 bp, Zea mays
  Clone ID: TF_ZmC141723_1
gggtaccctcgggctggccgggacttcgtctccctgcaccgctcctcctcatcgtcgtctccccacctgacctgacccgaccgaaccgacccgaccactcctcccctgctcttccgccccaagcaagacccattaaaccccctcgccctctcctttcggggcggatctcgcctctcccccgtcccctgcctggaccctcccgatccgcctctcctcggattccgggtggttcccattccatcgacgtaccccctagtattcactgcttcggtgttgtgggctccgtagatcgacgtggcaccagaactatccgcgctagctgttgatttatgtcgcctgctctgctgccgctccatggttctgagctcacgtcgtcagcatcctcttcttgctcctttctccagcctgggcaggggggcgccagagactgcgggtttcgcttcaggatctcaggatttggatttggggtgaagtactctgggtttctacatttaggccctcgcttcctactttgccgcacctgagatagtaaaagagttcaagaatcccccccaaatcacagtcagtcttgggtctggtttgggtggatttcattacgtttcctccaagttcaaacagccagcaggatttccgagttgagtctgaagatcttcgcttttccggtttccatcagaagttagagagaacccctattctgatttgccagattccatctgtgctgcagttcttgcgcagttcaagagactgccccaactttatccaaaaagtttcctccgtctcatttgtggtcaatctggaagcggtgtgtcaagatgcggccctcggtgcagaaggtccgcattttctgttctgatcctgatgctactgactcatctgatgatgaagatggccagatcatcgcagtgaagaaaatggttatggagatactagtcccagtgacaaactcgaagacatctaatagtctgaagacccttgtgccgtgtggagcaaaggacctggaggtttcagagaagaagggtgaatcaagcaggttccgtggcgtgcgcaagcgacgctggggtcgatcggaagccgagattcgtgatcctgtagagaaaaaccaggaagtggattggctcgtatgactctgaggaggctgctgctggggcatatcaggcgtatgcaaaacagatccgtgaagagttgctagccatcaagaaccaacggtctgtatcagaacgtgcagctctatcaagttcatcctcggtttcttgcgtatcttcgtctcccccatgtgagcagacagggcatgaaccgcagactagagtgctcgtggagaaagatcctgagcctgtagatgaagtctttctgaacttctctctcacacccaaggggatttcaatggacgatttgttaggacggatagatgagattcctgtttgtgacgaccctgtcagcccaactgatgagcttccacttgacaatttcacgagcctggaagatgcattcccgatcagcgatttcatcggttcaagagatgagcatctgtatgagcactatattggcctggctgacattagccacctgcctcttccaatggatgatccagctttcaatctggatgcagagcttgattggagtgggtttgacttcgctgcgattgaaggtgaacttgatgtcctttgaggctgcaatcagtgatgtgttatactgaaacctgcacttgcttatgttgtattcagctgaaagctcctctctatgttttttatatttgtcagaatacaacaatgaatacggattcaggtttcagtccatctatgtcagaatacatgagcacagtttccttcattttgttcttagaaaaactgatgcacatatgggtgcagtctatctctaacaaggagttcgcatttttaatacattttcagtagat

SEQ ID NO: 344 - DNA, 613 bp, Zea mays
  unsure (1)..(613): unsure at all n locations
  Clone ID: TF_LIB4073-004-Q1-K1-D9
gtcgacccagcgtccggcatctagtagtcctcatggccgcagctatcgacatgtacaagtactacaacgcacaccagatcgcctcctcctccccctcggatgaggagctcgcgaaagcactcgagccttttataacgagtgcttcctcctcctctccctaccatcgctactcgtcttctccatccatgtcccaagattcttacatgcctacaccctcctacaccagcttcgccacctcgcctcttcccacccccgccgccaccacctcctcctccacgcctttctcgcagcttccgccactctactcgtcgccttacgcggcgccgagcatggttgggcagatgggcctgaaccagctcggcccggcccagatccagcagatccaggcccagttcatgttccagcagcagcagcagcagcagcagaggggtctgcacgcggcgttcctgggcccgcgggcgcagccgatgaagcagtccggatcgccgccgctggcgccggcgcagtcgaagctgtaccgcggcgtccgccagcgccactggggcaagtgggtggcagagatccgcctncccaagaaccgcacccggctgtggctcggcaccttcgacaccgc

SEQ ID NO: 345 - DNA, 591 bp, Zea mays
  Clone ID: TF_9952793
cccgacgtaactgctccccacagtggtctccatattcttcagccttcagtccctgaccttgcggaaagaccaccacaccacacgcacgttgctgtacctgtacccaacaagccctacacctctcagctctcggtcacacatggatcccacgccacgggcagtgctgatctctatcagcagtggcggggcgaagggaggaggaggaggaagccacgcgcactacaggggcgtgaggaagcggccgtggggcaggtacgcggccgagatccgcgacccgtggaagaagacgcgggtgtggctgggcacgttcgacacccccctggaggccgccctcgcgtacgaccgtgccgcgcgcacgctccgcggcgccaaggccaggaccaacttccctgacgaccacgccgggcagcagctgcagcagcacctccgtcggcgccaacacccgccgccgcagcacgtctcgttcggaggcgtcggcgtcggcgtcgacgtcgactgcgctcctccgtggcatttcgtctgcttccagacaccgacgacggccccggcaaccgagacaccgtcaacggcgctggagctgggcacgggccg

SEQ ID NO: 346 - DNA, 1545 bp, Zea mays
  Clone ID: TF_ZmC6700_2
acctcgcctcccccactccttccctccctccctcgctcacccagtggggcagccaaagccgagccgcaaccgcaaagatcttgcgcggcctcctttccccagctcgtcactgtgccgctcgtgccatccaccctcggttcacccaaccaacaatccatccgccaccacaccccgctgcggcgatgtgcggcggcgccatcctctcgggtttcatcccgccgtccggggtgccggcggcggcagcggcggccaagaagaaacagcagcggcgaggctcgccttcgccgccgcggttggggcgccgcgcactgcagttgacggcgtgatgactccaaaggatggtgaaggagacatgcctactaccgctaacaactcagcagcaaataagcgcaggcggaagaaccagtacaggggaatccggcggcggccctggggcaagtgggcggccgagatcagagaccccagcaagggcgtccgcgtctggctcggcacatacagcaccgccgaggaggcggccagggcgtacgacgccgaggctcgcaggatacgcgggaagaaagccaaggtcaatttccgggacgaagcggcggcggcaggtgctcagaagccaccagccgcaactactccaactgcttgtgccagcgcagcgaggctagctcctccacctccaccgccgaagttccgtgctgacgaggttttcgggaacatggacggtggcagcaacgatctgttcgcgatgctggcgttcagtgacagtagtagtaaggtcgttcgtgtggagccaggtgagggcgccgccggtttcctccccgcagatctgttgcccggcagtaagaggtctgcggctaacatgctgctgctctccgaccagagcagcgactcgtatggctcttgtgacttggggtgggagtgggactgggacgatgacaccatgacctcagactacgcctcagtctttgctccagctgctcccagtaacgttgtgccagcatggtacacgcaaggtggaccggtgtcgaagagaacgaggagcagctacggctacggtgcggccatgccgggcggctttgaccctgagacgaactaccagtaccagccgttgccttatgtcgtcgagagcagcccgtcagacggcgcgtcgacggacgacatggactgccttcaaatgatgcgggctggtgatgttccacaggatggggcgagcagtggtggtggtggcggcgacggcggcgatatctggagccttgacgagctgctcatggccgctggcgcttactgagaaaagctatgtgcatcgcattcgcatgtgctagacggctacttgctgtgccgtgaatggagtgtttctcagcttcgttttgcttttaattttttgttatgccaggtctcctgcttgtgcttgtggtgatgatgcaggagagccatggtgggtactatgcttttgctgccagtggaactgtaagacaatgtttatatagtatctatactatgttggtgcgtcgatggttcatggttggttggaagcgagtttgagactgattcagt

SEQ ID NO: 347 - DNA, 912 bp, Zea mays
  Clone ID: TF_ZmC11704_1
cttcgctcactcgtcagctccctgtcgcgcacacaacggacgcagaggccagagccagagcagctgcccccctccgatcggagcaagcaacggcgccaccgtctgtccgtctccaatggcgcggccacagcaacggtaccgcggcgtgcggcagcgccactggggctcctgggtctcggagatccgccaccccctcctgaagacgaggatctggctgggcaccttcgagacggccgaggacgcggcgcgcgcctacgacgaggcggcgcgcatcatgtgcggctcccgcgtgcgcaccaacttccccgaggacgcaggcggcggcggcggcggcgacgggcagcagcagcagcaggccgcgccgtcgctcctctcccccgcgctcgtcgccaagcttcaccgctccaacctcgcgtccgctcaggcggcgcagggcaaggccgacgcctcggcagccgccgccgccgcgctcccgcgcgtcgcggcggcagtgcctgccggcatgggggtctccgcctcgccgtcggcgtcggcgtcggcggcgggggactggagcggcgggctgcttgaggagcagtacgtggaccagatgatcgaggagcttctggactccaacttctccatggagatctcctactagctgcgcgcctgcgcgcacgacgcgtcatcccgcgccccccgcctcctctgctccgtcacatctcaattctcatctcatctctctgtttggtttcgtcggtcaggtagggaagtgcagtgcagtgagttacttagtattagcagtatcattagccatgccaggagtgactcgaggttactttggcctgttggccagacgagttggttcttgagcaacctgatgtgtagtatacggtagtgtcgccagagcataaaagagttggattggactcc

SEQ ID NO: 348 - DNA, 1085 bp, Zea mays
  unsure (1)..(1085): unsure at all n locations
  Clone ID: TF_ZmC8439_2
cgggccgggntataagtccctcctccgctctcctctcccacctcaaatcccagacgccacgccacccaacacatacaaacacacgcacgcgcgcgcgcgcgcctcccgctgttccgcaaaacaaaggaaacgaaggagaggaggccatggcgccgagaacgtcagagaaaaccatggcaccggcggcggccgctgccacggggctcgcgcgtggcgccggcccgcactacagaggcgtcaggaagcggccgtggggccggtacgccgcggagatccgcgacccggccaagaagagccgcgtgtggctcggcacgttcgacacgcccgaggacgccgcgcgggcctacgacgccgccgcgcgcgagtaccgcggcgccaaggccaagaccaacttctccttcccttcgtgcctgccgctcgccgccgcggacgtcggcggcgcctgccggagcggcaacagcagcagcaccaccaccaccgtcgactccttcggcggcgacgtgcaggcgactctgatctttagagtgaaactacgaacatgtggtttaaatggttcaaagttaactctatatggtttatactcatgagaaacggctaaaaaatattgcaagctgttgcagatattcggacggctaacagaaactatttatttcctgttctcataaactgaagtgagatctacgagctgcaaagatcagtaaggcgtttccttcatgtatggcttgcttgcgatctatgcaacgtcgcctttattggtcgattaaagatgtacttaccaaacggagtcgtctcatcccgcgtagacaggctcgcagctcgctcggtcatgtacgttgtccacttcagaacaacgagcagtgctacgggtagttggcacgaccagtggacggaggcggcgaataatataatttcgccgctacagtcgccgtgccgacggagaataatataaactagtgaatggggcgcgcccttgggcgcgcttgagttagtttgtaagtattgtcgatggtagtagtggtaggtattgtaataaattgtattattaacttatgcttaaagtaaaaaaaacttaacctgtgggagtt

SEQ ID NO: 349 - DNA, 571 bp, Zea mays
  unsure (1)..(571): unsure at all n locations
  Clone ID: TF_LIB4742-037-R1-K1-F10
cattgggacctcgagccggccgggtcgccaccgatgtcctcgaactcgatcaccgctcctggatcgctgaccgagcgttcttgcgccatcaacggcgtcatgacctggtcatctttcttcgcacaagcgaacgacaccatggtcgtcgtcggatcacgggcagttgccgccgccacactcccatcgcttctcgtatcatcaccaccagcagcgtcgtcgtgattggctctccttctcttccggcgcagcacgcggggcgtcgtctcggctcggccgccgccgtccgccagcgcgcgctgcaccacgtcgagcgggaagttgaggcacgcgcgcgggccgcgcatgcgcagcgccgccttgtcgtaggccagcgcggcgtcgtcggcggtcgcgaacgtgcccagccacacccgcgcgcctctcctccgcgtgtcccgtatctccgccgcgaacttgccccacggccgccgcctcacgcccctgtagctcttgcacgccgccgccgccgacgacgncttggagctgctgcaccgatgatggcggagccggcctgcttcttggttcgacggcg

SEQ ID NO: 350 - DNA, 649 bp, Zea mays
  Clone ID: TF_LIB3354-089-Q6-K6-E1
gtttaacatgaatgctcatgatagttaggatagggaaatacatatggttaattgcaatattatataaatataggcctccactttgtgttttgcaccaggccaaaataaactcaggtacgggcctggctacgctacgctacgcgcgccgcccctgttcctcacctcgcatcgtcccgggcggggagctgaccgcgcccggctggggctgttgatttgcatgcaggaaggcgcggatatggctgggcaccttcgagacggcggaggacgcggcgcgcgcctacgacgaggcggcgcggatcatgtgcgggccccgcgcgcgcaccaacttccccgcggacgccaacggcccgccgccgtcgttcctctccgcggcgctcgtcgacaagctgcaccggttcaacctggcgtccgtgcaggccgcgcagcggcagagagaggcggcggcggcggcggcggcagcagcagcaacctccgcgcccgcgacgcctccgacgccgccggccacgcagtggggcggcggcggtaggtccctggaggagcagcacgtggagcagatgatcgaggaactgctggactccgacttctccatggagatttgctgctagtgctaggctagccgcgacgcgacctgcctagcgattagctagcg

SEQ ID NO: 351 - DNA, 2310 bp, Zea mays
  Clone ID: TF_ZmC485_1
ggatctttcgctttccttaccccgtgcacgtgcctgcttgatacactacgaccacagattctttggcagaccgctaccaagtgcaagtgtgcaacccacacacatcactcacagtctcacggtgtctctgtgcgcgcgcgtgggacacaggagggagagagacacagagaagggggcgggacgatcaactctagctcagctgggatagctgaaattgctgataggtggaccggatacagggtgcaatgatgcgtgccggcgcatagatagggagagggacgggagagagagccccgactcgggggcgcggaccgccgggtgttgtgtttgtgtgcatgtagcgccgtacacgctcgcgcgtgtgcagcataaaggtagcccgccaacgactcggcacgctcatgcttctacctctgcgtcgtctagttcattcttcgtgacagtccggggcagcaggtggcgaggtcggcaccgccccaggttgcgagtgcggatcgatgcgccggtagcatttgcgtgggcttcgccgtgccgcggcccacgatgccggaccgccggccggccgccgtcacccagcagttctttccgcccactactacggccgcgcagcaggcgacgatggaggagcaatgccacgtgcccgccggtagcgcggcggagcagtgggtccggtcgtcggcgtccaggaagagccggcgcggcccgcggtcacggagctcgcagtaccgcggcgtcaccttctaccgccgcaccggccgctgggagtcccacatctgggactgtgggaaacaggtgtacttgggtggattcgacacggcgcgggccgctgcgagggcctacggccgatccgcgctctagtcccgcggcctgaccgcgtacgctaacttctctcttgactacgactacgacggcatggagaaggtgaaggacttgaccatggtggagttcgtcatgccggcagatgagtgcagcagcggctctccccagggcagctccaggtgccgtggcgtcaccggcaacgcaggcggcagcagcagggcctcctcctgccggcccgccggcgaccgctgcgtcatcatcgggattttccacaccggccacgacgctgcccacgcctaccacatcgccgccatcccgtccgtcgggcccgccgccgccaccgacgtcgtcgacccatcccacgaccagcatgtgaggatcaagaagcgcgcactgtagcaggagctgggactcggcctgggcagtttcccccccggtccgctccccctctccggccgttgctactttttcggttttgccccccggggcgggatgctggttacttgtagccgatcgattggattcctggaggaggagctgacgagagtcgcctaccatcaacctgctgccggcatgttcggccgaccggctgataaaaacgtccacgtagcaccgccgccacaccggcaatggcagcagcagcagcaggggaaccgctcctgtctggatacgctgccgcagcaactggcggcgacgctgagctgcacttgagagtcgggcagccgcgctcgccggcccatccccaacgacagcggcattaactgggcctgcgcgccgccgtacgccaccgccggcgctggcacggatgacgaggacgccagcagcgccgccgctgcggcatcactaggatttccactgtgggccctgcgtgcggcgccttcctcgcccagctggcccagccgctgcgcctttcctgtcgtcccgcgccaccaacagtgacgctgctgggccacgtactgacggcgactggtgacctgctggaaccgccgccggcctgtttcccttttctaggtaaaagcagtggcagaggggcgagctagcgacagcgtgcctcgtcatccatcgtccctgcgccgtggctggcggggtgggaaaaaggtctgagcagttttgagcgtccggaggagctcgacgatttcctgccctcgaatagtcacttggggtggccactagttattatttctttccttccccctcgttgattctgctacccattatcgcctccgtctcccgctgcatgcataatacggctctcgcgcagttggacgttaatggcccggtgtccggcggccggctcctccccccgggaccccctgcccactgcgaggcctttttccacatcgagtatttctgctagtcgatcgcttggattattcacgactgtattagcctatagcttacacgacacaagtcaaatcgcaaatggcgccttcctcccgcatgatgaacaccacgttatatatttttctttgcgccgcctgggacgggttg

SEQ ID NO: 352 - DNA, 1134 bp, Zea mays
  unsure (1)..(1134): unsure at all n locations
  Clone ID: TF_ZmC278_2
ccgctcgcgaatctagnnaactagcccagnaaggagnaaacaactaggataccaccgccaccggcccccggcaggcggcaggcgggcgggagagacgaaatctagggaggactgactggacggaggaggaggaggagcggggagatctctcgctcttccgcccatggaggagctgggagacgccggccagggaccgcaaggcgacgcctccggggcccttgtcaggaagaagaggatgcggaggaagagcactggccccgactccattgccgagacgatcaggtggtggaaagagcagaaccagaggctccaggacgagagcggctccaggaaggcgccggccaagggttccaagaaagggtgcatgatgggcaaaggagggcctgagaacgtcaactgcgtgtaccgcggcgtgaggcagcggacatggggcaagtgggtggcggagatccgcgagcccaaccgtggccggcggctatggctgggctccttccctaccgccgtggaggccgcccatgcatacgacgaggcggcgaaggcgatgcacggccccctgccacgcgtcaacttctctgctggctctgctgatgccggctgccgcgttgcaacggttttattagaaagtggagaccgaggtggaatccgtggagactgaggaggtggtacattaggtgaagacggaagcgaagaatggtgccttgggaagcgtcaaggtcacctgggtcattcagtccgcggaggagactgtgctacccaaggaaggggacgtgagttatgattacttcaacgttgaaaaccccgtcgagatgataattgtagaactgaatgctgataaaaaatttgaggcccccgaagaatcccttgatggagatgatgggtttagcctttttgcatattaaaaagcccggtcatggggggggggggggagtagtaggaatagcttcattctacatcatgctgatgagacatagctttatactatgagccacccggtccaccaagttgtcctgtgtgttgagttcctgtactatagtagggatgagttcgtgtttaaaaaaaaaaaaaaaaaaaaaaaaaaaaaaaaaaaaaaaaaaaaaaaaacggacgctgggcggacgctgggcggacgcgggg

SEQ ID NO: 353 - DNA, 1006 bp, Zea mays
  unsure (1)..(1006): unsure at all n locations
  Clone ID: TF_ZmC218929_1
cccgggtcgnaccagcgttcgggcactctcatgcgtgtcgtctctgctctggccancgaccaggtctgcctgtgtgcgtgcgtaagatgaacacgtacatgtctctctccttggagcgaagcagcagcgtggtccgcgacgtcgccacgcccgcgcctccggcgaccagtggcgccagtgcgccgtatccacgcgcgggcgcgggcgcgtcgctctccctgcccggcgcagcggcggcgcacgggcacagccagtacctgcccctcaacgaggacgactccctggacatggtcctcttcgacgtgctccgagaggcatccggccccggctccgcctccgccgcggcgcccgacacctaccagccgccctcgtcgctgcctacgctcaaggcgctcgcttccggcgccgcgcgcaggggcagcaggaccgcgtacgcaccgaaggcggccacggcgggccaccactaccgcggggtgaggcggcggccgtggggcaagtacgccgcggagatccgtgacccggcgcggcacggggcgcggctctggctcggcaccttcgccacggccgaggaggcagccgccgcgtacgaccgcgccgcggtccgcatgcgcggagccaaggcgctgctcaacttcccgccgggggtcgcgggctgcgggagcgccgcaaccgctacggcgaagcaggctgggctgacggaagccaagtgaacagcgaatgcgatctcaaaggaaccagctgcgaaactgtgtaatgtaattgtgtggaatagtagtatataatgtaaatgtggatgaactagagagagatttccattcatcattgaacggaccacgacaaggattccaaggcgccgattcccaagatctgcacgcagctggtaggatgagatcatcccattacagttctgccacccatttattttaactcatggggataaaacaatttaaaaaacatgtttggtgaattcatagtatcaacgcaccatggtttatgttgttgtttt

SEQ ID NO: 354 - DNA, 723 bp, Zea mays
  Clone ID: TF_LIB4979-098-A1-K1-H5
ccgtttcgtgaccccagggcgtacgacaaggccgcgatcaaatgcaacggtagagaggccgtgacgaacttcgagcccagcacgtacgacggggagctgctgctgactgctgaagctagcgcagaaggtaattaagtagctgctcgctgccatgtaatcttcagatgacgccgctgttaattattagctcatcagctttcggacgatgcccttgtttttcggttgaaccggggtgaactttctgaatttgagatttgattttttttgtttctgcttctgcagttgctgacgacgttgatctgaacttgagcatctcgcaaccggcatcgtcccagagccccaaaagagacaagaactgccttggtccgcagctccaccaccaccatgggcggccgtttgacggctccgccgttctgaagaaaaccaagatcgatgctccgtctgagctgtcgtcggcgggccgccctcaccggtcgttcctccctcatctcgtggctgccgagcatctaccgcctcggtctcaccccttcttcatcacacaccatgagagtgatgcatcaagaagagatcctagctgggcagcagcagcagcatggaaggtgaccgcagctgcacctcctcctcctaccaccaccctgttgccgttgccgctgccgtcgacgtcgtccgctgcagcatcatcaggattctccaataccgccacgacagctgccgccgccccat

SEQ ID NO: 355 - DNA, 590 bp, Zea mays
  unsure (1)..(590): unsure at all n locations
  Clone ID: TF_ZmC109013_1
gcgacccgcgccgcgccgcgcgcagtggctcggcacgttcgacaccgccgaggacgccgcccgcgcctacgacgccgccgcggtcagttaccggggccgccgcgccaagctcaacttcccggacgccgccgccgccgctgcggcgcgggatgtgcagccgcgccgcccgttgcccggtcagagcctccgcgagaactgtgggtccaacgccgcgtcgccgctgcacgtggcggtggcgcgggcgccgaccacgctgcagggaacagggccggcgccgcccaaggaccaggacatctgggacggcttgaacgagatcatgacgatggatgaccgcagcttctggtccatgccgtgatcctgctacttcggccgtccatctccggatcttcctcttgttgttgtgcgtttatttttatgatgaccagattctacggttgttttttaggggaagagaatcctacgcttagctcagacgatcgtaaattgaattttggagccatgtggccaccagctcactggctgtgctgtaaatctgtaactcgtcagtcagccatggctntcgtacgagttttacaccaccgtcatccctc

SEQ ID NO: 356 - DNA, 428 bp, Zea mays
  unsure (1)..(428): unsure at all n locations
  Clone ID: TF_LIB3137-013-Q1-K1-H10
aaacaccacgccgaagataaaggggagatagagtacacggttatcagaccagtgcagagagcaatagatgctgtggtggggtgccgatcctcgtccgagtctcatctccgatccacgctcggctgcgtccgnggctggtcgcgtgcgtggtcccgtccggcacagtgtcaagcggtcggaagtgcgaacgatcttcgagggccgccgttccgggagtgtcgacgaggacctccgaggagtgaggaggaggacgacgtagggggtggttggagagcaagcccgccttcgtcgtccgcgcctcgtccgcggcgacgcatcccagggcgcgccatgagcagcggagccggcgccgggcgcccgaccagcagtacatgggcgttcggcgccgcccgtggggcaagtgggccggcgagatccgcgaccccgtc

SEQ ID NO: 357 - DNA, 789 bp, Zea mays
  unsure (1)..(789): unsure at all n locations
  Clone ID: TF_LIB4730-087-Q1-K1-C5
acaccgttcatgcatgaccatgggagagatctcaaccgcagcaccagcagtctcctccgtcgccgtcgtcctcctcgtcctgcgtctccgcggacaccgtcctcgtccctccgggaaagaggcggcggagggcggcgacagccaaggccaataagagggcccgcaaggacccctctgatcctcctcccgccgccgggaagaggagctccgtatacagaggagtcaccaggcacaggtggacgggcaggttcgaggcgcatctctgggacaagcactgcctcgccgcgctccacaacaagaagaaaggcaggcaagtctatctgggcaagtctgcgtccctttgatggcttgtcgccagatcctgctgcgatctgcgtccttgtcttaatgcggggcggaaccgggattaattcggtcaattatgcatgcgtgcgtgtgcatgatctgcaggggcgtacgacggcgaggaggcagcggctcgtgcctatgaccttgcagctctcaagtactggggtcctgaggctctgctcaacttccctgtggaggattactccagcgagatgccggagatggaggcagcgttccgggaggagtacctggcctccctccgccgcaggagcagcggcttctccaggggggtctccaagtacagaggcgtcgccaggtggntactgctcattaatctactcattatactaaaacctttgatttgacacctacgcctcgatctgatcacctatgttagtttaaccctctcctagtcactagaatttacttacagtaggatct

SEQ ID NO: 358 - DNA, 746 bp, Zea mays
  unsure (1)..(746): unsure at all n locations
  Clone ID: TF_LIB4727-004-R1-K1-H3
ggcagcggccgtcgggccggtacgcggcggagatccgcgacccggcgaagaagagccgggtgtggctcggcacctacgacacggccgaggacgccgcgcgggcctacgacgccgccgcgcgcgagtaccgcggcgccaaggccaagaccaacttcccttacccctcgtgcgtgcccctctccgcagccggttgccggagcagcaacagcagcaccgtcgagtccttcagcagcgacgcgcaggcgcccatgcaggccatgccgctcccgccgtcgctcgagctggacctgttccgccgtacgcttccctttcggcagcatccccgttacgcacccgtactacttcttcgggcaggccgcagccgcagccgcggaagcagggtgccgtgtgctcaagctggcgccggcggtcaccgtggcgcagagcgactccgactgttcgtcggtagtggatctgtcgccgtcgccaccggccgctgtgtcggcgaggaagcccgccgcgttcgatctcgacctgaactgctcaccgccgacggaggcggaagcctagtcgtcgaagcttttaatgactgtctgtcttcttagttctttcttctcctttttctcgaggaaaattcggtactactaagctgagagacgctctcctccgacanacgacgtcgacgacgggcatttttgtaaatagtttttgcgccgggacctttttagtttatgatgaaagctgtattgtcaccgaagacaggtcct

SEQ ID NO: 359 - DNA, 1476 bp, Zea mays
  Clone ID: TF_ZmC455_1
cctcgaggccggccaaaaaaaaaaaaaaaaaaaaaaaaaaaagggcttttggattctggtttctctcgtctttctcctccctctcctgacttttcttctagacatctcgcgggtcttatcgactccaacaagaacacactacacaccagccagcgagatagcgaacgctaggaacccagtggccatctttggagcggccatgacgctggatcagaaccatgccatgccgatgcagcccccggccctgcagcccggaagagcatatggagcagagggcagtgctgtggtgcatggttccatcagaacagtaggaagaagcgacctcgcagatcacgagatgggcctacgtcagtggcagctgtcatccagcggtgggctgagcgcaacaagcatttggagtatgaggaatctgaggaggcaaagcgaccaagaaaagcacctgcaaagggttcaaagaagggctgtatgaagggaaaaggggggcctgacaatactcaatgtggataccgtggagtgaggcagcgtacttgggggaagtgggttgctgaaataagagagccaaatcgtgtcgacagactctggctgggtaccttcccaaccgcggaggatgcagctagggcctatgatgaggcagccagagcgatgtatggagacttggcacggactaacttccccggacaggatgcaacaacctctgcccaagctgctctagcatcgacctctgcccaggctgctccaacagctgtcgaagctcttcagactggcacgtcatgcgagtcgacaacgacatcaaatcactcggacatcgcatccacctcacacaagcttgaagcctctgacatctcgagctacctaaaggaaaaatgtccagctggatcatgtggtatccaagacggcacacccattgtagctgacaaggaggtctttgggccgttggagcctatcacaaatcttccagatggtggtgatggttttgatatcggtgagatgctgaggatgatggaaagcgatccacataatgcaggtggagccgacgctggcatgggacagccctggtatcttgatgagctggattcgagtgtcttagagagcatgctccagccggagccggagccagagccagagccattcctgatgtctgaagaaccggacatgtttcttgctggcttcgaaagcgctggtttcgtcgagggtctggagcggctaaactgaatttctgatgtttgaccgttgatcctcatcccacttcatgtctgagcttgtgaattcggaggcaaacattggcagaacttataagctctagcaattctaggctttacattcctctgtgatagttctctatgcatgggaactgggtttgcttcacaatttttgtaagaccagaagtgatgtaaatagttcccaccttgtggaaggacaagaaaaaaataaataaaaagagtgcttgctttcgttcctaaaaaaaaaaaaaaaaaa

SEQ ID NO: 360 - DNA, 1202 bp, Zea mays
  Clone ID: TF_ZmC455_3
gcaggaggccctactcttgccttgaatgagtgccagattttggtacagcagaaaccccagggagattcacgactgctggcctctaatctgtgcaggaagaagcgacctcgcagatcacgagatgggcctacgtcagtggcagctgtcatccagcggtgggctgagcgcaacaagcatttggagtatgaggaatctgaggaggcaaagcgaccaagaaaagcacctgcaaagggttcaaagaagggctgtatgaagggaaaaggggggcctgacaatactcaatgtggataccgtggagtgaggcagcgtacttgggggaagtgggttgctgaaataagagagccaaatcgtgtcgacagactctggctgggtaccttcccaaccgcggaggatgcagctagggcctatgatgaggcagccagagcgatgtatggagacttggcacggactaacttccccggacaggatgcaacaacctctgcccaagctgctctatcatcgacctctgcccaggctgctccaacagctgttgaagctcttcagactggcacgtcatgcgagtcgacaacgacatcaaatcactcggacatcgcatccacctcacacaagcttgaagccgacatctcgagctacctaaaggaaaaatgtccagctggatcatgtggtatccaagacggcacacccattgtagctgacaaggaggtctttgggccgttggagcctatcacaaatcttccagatggtggtgatggttttgatatcggtgagatgctgaggatgatggaaagtgatccacataatgcaggtggagccgacgctggcatgggacagccctggtatcttgatgagctggattcgagtgtcttagagagcatgctccagccggagccggagccagagccagagccattcctgatgtctgaagaaccggacatgtttcttgctggcttcgaaagcgctggtttcgtcgagggtctggagcggctaaactgaatttctgatgtttgaccgttgatcctcatcccacttcatgtctgagcttgtgaattcggaggcaaacattggcagaacttataagctctagcaattctaggctttacattcctctgtgatagttctctatgcatgggaactgggtttgcttcacaatttttgtaagaccagaagtgatgtaaatagttcccaccttgtggaaggacaag

SEQ ID NO: 361 - DNA, 894 bp, Zea mays
  Clone ID: TF_ZmC7732_2
acaacacactcccctgccgctgtgccgcacccgcacccctccagcgcgcgcgggcacgagcacgagtacgaggctccatcgccggacgaccaggtagttgcactgccgccaccgtcgacgacgaccgaaggcgacgatggccaggccgcagcaacggtaccgcggcgtgcggcagcgccactggggctcctgggtctccgagatccgccaccctctcctgaaggcgcggatatggctgggcaccttcgagacggcggaggacgcggcgcgcgcctacgacgaggcggcgcggatcatgtgcgggccccgcgcgcgcaccaacttccccgccgacgccaacggcccgccgccgtcgttcctctccgcggcgctcgtcgacaagctgcaccggttcaacctggcgtccgtgcaggccgcgcagcggcagagagaggcggcggcggcggcggcggcagcagcagcaacctccgcgcccgcgacgcctccgacgccgccggccacgcagtggggcggcggcggtaggtccctggaggagcagcacgtggagcagatgatcgaggaactgctggactccgacttctccatggagatttgctgctagtgctaggctagccgcgacgcgacctgcctagcgactggctagcgcccccggccggcccgtcaccgccgcgctccgctccacctctcctctgttcttgttcttgcacttgcaccatgcgtcgcgctcgcgctcttctttgtactcgtgccgacgtgcgtagtatcgctcagccgctgcagcgtgcgtaggagcctgatttgtgtacgccacgtgtatagctgtagctgtacgtataagtatatatatgtaatcgagcattctcattcttgcaaatttaaaggccgcgtgcgtgc

SEQ ID NO: 362 - DNA, 1744 bp, Zea mays
  unsure (1)..(1744): unsure at all n locations
  Clone ID: TF_ZmC118_2
tcgagggccggcnncgggaaaaaaaaaaaaaaaaaaaaaaaaaggtacacccgcgggcgggctggaaagtttcgtccaccatttggctcccgcaagcaccgatttgtttactgctctctccgacgcgcggcggcggagctccctacgacgactgaaccatgtgcggcggcgcgatccttgccaaccttcgcgagccggcgccgcgccggctcacagagcgggacatctggcagcagaaaaagaagctcaagaggggcggcggcggcgggaggcgctcgttcgcggcggaggacgatgaggacttcgaggccgactttgaggtcttcgaggccgactccagtgattcagatttggagctcagggaggggactgacgacgacgtcgtcgagatcaagcccttcactgccaagaggactttctccagcgatggcttaagcaccatgactagtgctgtagcaaggtcagccaagaggaagagaaagaatctatacaggggtatccgccagcggccttggggcaagtgggctgctgagatcagagatcctcagaagggtgttcgtgtttggcttggtactttcaatagtcctgaggaagctgcaagagcttatgatgctgaagcgcgcaggattcgtggcaagaaggccaaggttaactttcctgatgcaccagcagttggtcagaagcgccgttctggctcagcttctgctaaagcatccaagtcaagttttggacagaagcctatcgtcaaagtagctatgaacaaccttgccaacacaaatgcatccttcttccaatctgctagctacccctccaattcatttgttcagcatggcaatataccatttgttccagcaatgaactctactgcttctgttgatgatcctatcatgaatctgcactctgaccagggaagtaactcctttggctgctcagacttgggctgggagaatgataccaagacaccagacatcacttccattgctcccatttccactattgcggaaggagacgagtctgcatttgttgacagcaattcaaacaactcatttgtgcttcctgccctggagaacagtgctgttgatctcactgatgggctgacagatttagaatcctatatgaggtttgttctggatggtggtccaagtgattcagttgatagccttctgaaccttgatggatcgcaggatgttggtagcgacatggacctctggagcttcgacgacatgcccatcgtcggcgatttcttttgaggattttgaagcttggtcataggagtatgtacatagggactaggggaataaagaccgggggagattgggaagcacctgcttggcaccttgggggtagcatttgctcgtgtctagctcagagatgcagaagttgcattctgaaactacttggttatcgacctgttccctattttagctatctctttatgagagccatttatgagactgaaccattttgttttgctttcttttcgttgttacaatatatggtttaacattatgatttatggatatgtgccaaatatggtgctcaacagtggtcaaacatgccttttagatgctcttgtttctcgtattgttgtgtaccttgtgatatttcattcgttgaaattgagttaaactagttatctgctgaaacttttcttgtacaagcaaaagtattcaagatttaatcttattggcatttggcaagatgctagacttttggtgccgaaaaaaaaaaaaaaaaagcggcc

SEQ ID NO: 363 - DNA, 1175 bp, Zea mays
  Clone ID: TF_ZmC118_4
aaagtttcgtccccatttcgctctcgcaagtcgccaagccaccgatttgttacaggcgccggagctcccgacgacgactgagccatgtgcggcggcgcgatccttgccgagctccgcgagccggcgccgcgccggctcacggagcgggacatctggcagcagaagaagaagcccaagagtactttctccagcccacgcgtccgcaccatgactagtgctgtagcaaggtcagccaagaggaagagaaagaatctatacaggggtatccgccagcggccttggggcaagtgggctgctgagatcagagatcctcagaagggtgttcgtgtttggcttggtactttcaatagtcctgaggaagctgcaagagcttatgatgccgaagcgcgcaggattcgtggcaagaaggccaaggttaactttcctgatgcaccagcagttggtcagaagcaccgttctggctcagcttctgctaaagcatccaagtcaagttttggacagaagcctatcgtcaaaggaagtaactcctttggctgctcagacttgggctgggagaatgataccaagacaccagacatcacttccattgctcccatttccactattgcggaaggcgacgagtctgcatttgtcgacagcaattcaaacagctcatttgtgcttcctgccctggagaacagtgctgttgatctcactgatgggctgacagatttagaatcctatatgaggtttcttctggatggtggtccaagtgattcagttgatagccttctgaaccttgatggatcgcaggatgttggtagcgacatggacctctggagcttcgacgacatgcccatcgtcggcgatttcttttgaggattttgaagcttggtcataggagtatgtacatagggactaggggaataaagaccgggggagattgggaagcacctgcttggcaccttgggggtagcatttgctcgtgtctagctcagagatgcagaagttgcattctgaaactacttggttatcgacctgttccctattttagctatctctttatgagagccatttatgagactgaaccattttgttttgctttcttttcgttgttacaatatatggtttaacattatgatttatggatatgtgccaaatatggtgctcgaaaaaaaaaaaaaaaaaagcggcca

SEQ ID NO: 364 - DNA, 1176 bp, Zea mays
  Clone ID: TF_ZmC11610_1
cggacgcgtgggcttcggctcgagcttcaaacacactccaaactccaagcctcaataatctcgacctctgtaatgaccaagaagctcatctccatctccaccatggccgggaagcaaggttgcaaggagcagtccaatgatcggaggatccaggcttcgatccaaggagacgccaagagcgtggtggtggggttcggcggcaggctggtcacccgtgagcaggagcaggaggacgccatcatcgtcgcggcgctgcggcacgtggtgtccgggtacagcacgccgccgccggaggtcgtcgtcacggtggcgggcggggaggcgtgcgggacctgcggcatcgacgggtgcctcggctgcgacttcttcggggcgccggagctggcgcaggaggcagtgtcctgcggcacagggcaggtggcgacgacggcgtcggtcgggggcggggcagcggcggcggcgctgaggccccggcggcgtaggaacaggaacatgtaccgcggcgtgcggcagcggccgtggggcaagtgggcggcggagatccgcgacccgcggcgcgcggcgcgcgtgtggctgggcacgttcgacaccgcggaggaggccgccagggcctacgactgcgccgcggtcgagttccgcggcccgcgcgcgaagctcaacttcccgggccacgaggcgctgttccagggccacggcgacaccgcggcggcggcggacaccgagacactgacgccgtcgccgggagagtggcagctgggcggcggagcaggagacgagctgtgggaaggtctacaggacctcatgaagcaggacgaggtggaccgctggctcgcgccggttttcggcgccgcgtctagtttttgagctgttgtactgtgcacacacaagcgtggttactgacaggatcacagctagactgaccaccattcttttgctgtctattgaactagttggttcttttgtagcgtatttttttagggaaacatgattcttttttttttttttgccgtgtgttgattgggatatagagagtttttttcctctcttgatggaagtacttgggaagctatgttgatagactgaacatttttttgtactctggctgctgagattctttgacgaattatacggtgaacaaagcatcgttttttatataaataaaaaaacagttgaccg

SEQ ID NO: 365 - DNA, 625 bp, Zea mays
  Clone ID: TF_LIB4865-004-R1-K1-D8
gacttctggcctggttctgaagcagacgccgaggacattcatgcctcgcactcccctgacccacagagaggtaagccctgctttcgtctcttgctctgctatcccggcgacaacacgccatccaggcagcaagctgcaaacggtcaaatcaatggtgtgacgccgtgctgccgactgttcccatgcagcgccgcgcgcgaaggcgaagcctgggcgccgcaagaaccagtaccgcggcatccggcagcggccgtggggcaagtgggcggcggagatccgcgaccccgtgaagggcgtccgcgtctggctcggcacctaccccaccgccgaggccgccgcgcgcgcgtacgaccgcgccgcgaggcgcatcaggggagccaaagccaaggtgaacttccccagcgacacctcctccagcgtcaccgtgccgacggcggtgtcgaggtctgctgctgctgctgcacaggccccggccgttctcccgccgcccaaggtggaggcacagactcaggtgtccgacgaggtcaaggagttgtccgaagagctgatggcctacgagaactacatgaacttcctcggcattccttacatggagggagggactacagctgcaagtgccaccaca

SEQ ID NO: 366 - DNA, 1140 bp, Zea mays
  Clone ID: TF_ZmC28357_1
aaatccaacgtccacagaaaagaaaacacgcacgagaccaaatccaacgtccgcagaaaccacactcccgtcgaggaggaggcgtcgacttcccatagtttccactccacttcgatcctatcctatcctccccaaacactccaccaagaacctttccccctccaatagtccgagttactcggaggaatccatgtgcggcggtgcaatcatcttggactacatcccggcgcggcgccgggtgtccgccgccgacttctggcctgactccgaagccgacgccgaggactccgactcgcacgcccctgaccctgagagagcgccgcgcccgcgcgggaaggcgaagcgtgggcgcaagaaccagtaccgcggcatccggcagcggccgtggggcaagtgggcggcggagatccgcgaccccgtgaagggcgtgcgcgtctggctcggcacctaccccaccgccgaggccgccgcgcgcgcgtacgaccgcgctgccaggcgcatcaggggcgccaaagccaaggtcaacttccccaacgacgcctcctcctccagcgtcaccgcgccgacggcggcatctggggtggcggcacaggccccggccgtttttctcccggcgcccaaggtagaggcgcgcgcacaggtgtccgacgaggtcaagggagctgtccgaggacctaatggcctacaagaactacgtgaacctccacggcgtcccctagatggcggccggaaatgcagcctgcgagtgccaccaccgctgcccgtcccgacgagaagcgcaggtgccggcgccagcgccagccgggctgtggagcttcgaggactactactacccgccgtcactgtcgctcttcactgaataatgaacgcggtttgccgtgcctgtgttgttatctcttttgtatctgtggctcgcgagttgaggcatgtaaacaagctttgcagttttttttttaactccggtctgtgcttctcagcagctcgctgcggtgcagaggaatctgtttcattctgttcgtgattgaaactagttttacggttacaacgcgcagatggaggatcgtcggacactcggaccattgtaacaaggcttgcataccatttggaagattttaccatactgaattggcgacacgcatc

SEQ ID NO: 367 - DNA, 1033 bp, Zea mays
  Clone ID: TF_ZmC28357_2
attggtacccccgggccggccgggataccgccgaaccaaatccaacgtccacagaaaagaaaacacattcccgtcgactcccctagtttcatcctattcatttctccccccaaacactccagctactagttactcgaggaatccatgtgcggcggcgcaatcatcttcgactacatcccggcgcggcgccgggtgtcgacagccgacttctggcctggttctgaagcagacgccgaggacattcatgcctcgcactccactgacccacagagagcgccgccgccgcgcgcgaaggcgaagcctgggcgccgcaagaaccagtaccgcgggatccggcagcggccgtggggcaagtgggcggcggagatccgcgaccccgtgaagggcgtccgcgtctggctcggcacctaccccaccgctgaggccgccgcgcgcgcgtacgaccgcgccgcgaggcgcatcaggggagccaaagccaaggtgaacttccccagcgacacctcctccagcgtcaccgtgccgacggcggtgtcgaggtctgctgctgctgctgctgcacaggccccggccgttctcccgctgcccaaggtggaggcacagactcaggtgtccgacgaggtcaaggagttgtccgaggagctgatggcctacgagaactacatgaacttcctcggcatcccttacatggagggagggactacagctgcaagtgccaccacagctgccgcctccgcctccgccgccgccggtcgccgaagaatcgcaggtcccggctccggccgggctgtggagcttcgaagattactactacccgccgtctctgtcgctctttactgaatgatgaacgtgctttgaccgtgcctgttttggtaacacctttgtgaacagatttcctgctcgtcgtagtcggtgtgatgtgatggcatcaatcgagctcctgtcctgtaattttgttgaacccatccattgtttcgtgactaatgtgtgtccctgtaactcgcaagttgaggcatcaaagtttccagtttaactc

SEQ ID NO: 368 - DNA, 2331 bp, Zea mays
  Clone ID: TF_ZmC485_3
cctcgaggcggccgggcccaattcggcaccctccttcctcagctccgttgcgcaccgccaccgccggccggccagccgccggagcaccgaaagacccccgttctttcctgtaaaaaaaaacccgccgcctttagctagctaaccggtcgtcctcttcaccccctagctttgctagctctagctaggaacgaaagaaattaaaggataactgagattgctgattggtggtccgggtacggtgttcttgagtcgtgaagcgacagtacagtggctagggtcgtgccgcccctgcagtctccggggttgcgtgcaggatggtcgtcagggatcgggagtgaggaggcatcagctctcgcggtcgtggagcctaaatgtaccgcaacaacgactcggcactctcctgcttctacctcttcctcctctggttcttcttcttgaagtagacaccaccagttcgccaggtagttagcagcccagttgcgactggggatcggtggcgggctgccgcttgcgagttgtaagcttggaggggaggggagcaggagcaggagatgcagctggatctgaacgtggccgaggcgccgccgccggtggagatggaggcgagcgactcggggtcgtcggtgctgaacgcgtcggaagcggcgtcggcgggcggcgcgcccgcgccggcggaggagggatctagctcaacgccggccgtgctggagttcagcatcctcatccggagcgatagcgacgcggccggcgcggacgaggacgaggacgccacgccatcgcctcctcctcgccaccgccaccagcaccagcagcagctcgtgacccgcgagctgttcccggccggcgccggtccgccggccccgacgccgcggcattgggccgagctcggcttcttccgcgccgacctgcagcagcaacaggcgccgggccccaggatcgtgccgcacccacacgccgcgccgccgccggccaagaagagccgccgcggcccgcgctcccgcagctcgcagtaccgcggcgtcaccttctaccgccgcacaggccgctgggagtcccacatctgggattgcggcaagcaggtgtacctaggtggattcgacaccgctcacgccgctgcaagggcgtacgaccgggcggcgatcaagttccgcggcgtcgacgccgacatcaacttcaacctcagcgactacgaggacgacatgaagcagatggggagcctgtccaaggaggagttcgtgcacgtcctgcgccgtcagagcaccggcttctcgagaggcagctccaggtacagaggcgtcaccctgcacaagtgcggccgctgggaggcgcgcatggggcagttcctcggcaagaagtacatataccttgggctattcgacagcgaagtagaggctgcaagagcctacgacaaggccgccatcaaatgcaatggcagagaggccgtgacgaacttcgagccgagcacgtatcacggggagctgccgactgaagttgctgatgtcgatctgaacctgagcatatctcagccgagcccccaaagagacaagaacagctgcctaggtctgcagctccaccacggaccattcgagggctccgaactgaagaaaaccaagatcgacgatgctccctctgagctaccgggccgccctcgtcagctgtctcctctcgtggctgagcatccgccggcctggcctgcgcagccgcctcaccccttcttcgtcttcacaaaccatgagatgagtgcatcaggagatctccacaggaggcctgcaggggctgttcccagctgggcatggcaggtggcagcagcagctcctcctcctgccgccctgccgtcgtccgctgcagcatcatcaggattctccaacaccgccacgacagctgccaccaccgccccatcggcctcctccctccggtactgcccgccgccgccgccgccgtcgagccatcaccatccccgctgagagaatcaagaagccgcactgtaaatctgccgggaagctagcattttccccccggcccctccccctctccgggcgttgcgactttttcagttttgcgccgccggccggggtggtggtttcttgtagccgatcgattggattcctcgtattactgctgcttacactcccaattaagtgcttgttcggctattgatattacatgtgtattggagtgtattgagtgggattgtgatgtattttgacttgttatggatttaaaccggctcaataccacccgatacatgtggattatcccccaaaaatatggtgcaaaaaaaaaaaatatattcaaaaatcaataaaacaagaggggaccgctcgcgatcgc

SEQ ID NO: 369 - DNA, 1327 bp, Zea mays
  Clone ID: TF_700281859_FLI
gtgtcactgcaggtacgtctacttgggcctgttcgacaccgaggaggaagccgccaggtaaaataattggaccgcactgtgtgcccgcgaggcgtttctcggagcaccgccacccccctctgggccgcgaaactgactgatggatggatgccccgtgtctgtgggattgtcgggtcgtgtgtgtgtgtgtgtgtgtgcagggcgtacgaccgcgcggccatcaagtgcaacggcaaggacgcggtgacaaacttcgatcccagcatttacgccgaggagctcgagccggcggcgtcgacgggcggcggtggcgatgaccacaatcacaacctggacctgtcgctggggagctcggcggggaacaaaaggggcagccttgacgacggcggcggcggaggaggcggcggcgacgacgagacctcggaccagcgcgtccccatggcgttcgacgtcgactggcagacggccgcgccccggagcacgaaagcaaagctggacgcgagctccaagcaaccccagacccagatgctgcctcctccgcctcctgctgtcttgcgagtcgcccaccagctgccgttgccgttcggtcccaggcatccgcaatcgcagttcctgagcaacggcggcgatccggggacctcgggaggcctgtccctcgcgatcggcggcgcgggcggcgggcactggcctccccagctgcagcacctgcagcagcagaggctgcacggcgcctgggccaacggcggcggcacgagctggccgcctccgccgcacccgcacccgcacccgcacccgccgccaccgagcaccgccgcgaccgcagctgcagcatcatcacgattccctccctacgttgttactacgacgcaaggcccggcaggctgggctcagaagaatgggttccattcgctggccaggccaacctagtatgccaagaaccacgactggccggagcgttcattcgtcgtcgatcgtcgacccagggcaaacgacacctccaaccactgcacgacgacgttttaatttaccggatgccattctctctctcccctccccccttcccttctcccttctcccttctcccttctctgtgttcttgattgggtgagacatggatccgaggatggatggacggcctgtacctgaggagttcccgggaagaagacgagtgagtgagtgagtgattggtagggtaggcgactaggcgtcgcgtcaggcagtacgtccttttggcgccttttttcttctttcactcaccattggcgaccaccaatgaatgatgacactgactggggtgtcaacatcgcagctggttttgtttggtcta

SEQ ID NO: 370 - DNA, 1093 bp, Zea mays
  Clone ID: TF_ZmC485_12
aattcggcacgagggcgacgcagggattgcggcaagcaggtgtacctaggtggattcgacaccgctcacgccgctgcaaggcacgcactggactggacgcccagaattcttcgtcatgtgagtctctgaccgaattgattgattaacgagtctctggctcctggaactcgcagggcgtacgaccgggcggcgatcaagttccgcggcgtcgacgccgacatcaacttcaacctcagcgactacgaggacgacatgaagcagatggggagcctgtccaaggaggagttcgtgcacgtcctgcgccgtcagagcaccggcttctcgagaggcagctccaggtacagaggcgtcaccctgcacaagtgcggccgctgggaggcgcgcatggggcagttcctcggcaagaagtccacgcgtccgaacgcttcttttctttttcttttttttatagcatgcagtgatgattcaaccttagttgtgcctttcctcctaatcctatatatgtaggatttagtactggttgactatataagtatatatgtattgttcagtaaaagtatacataggttagctgcatgtttatgtatgtagctggttgtttcaatcagaagataaaaaaaaagggaagtagtggctagggaattcctccggtgggaacgccgtgcttgggtgcaggtacatataccttgggctattcgacagcgaagtagaggctgcaagagcctacgacaaggccgccatcaaatgcaatggcagagaggccgtgacgaacttcgagccgagcacgtatcacggggagctgccgactgaagttgctgatgtcgatctgaacctgagcatatctcagccgagcccccaaagagacaagaacagctgcctaggtctgcagctccaccacggaccattcgagggctccgaactgaagaaaaccaagatcgacgatgctccctctgagctaccgggccgccctcgtcagctgtctcctctcgtggctgagcatccgccggcctggcctgcgcagccgcctcaccccttcttcgtcttcacaaaccatgagatgagtgcatcaggagatctccacaggaggcctgca

SEQ ID NO: 371 - DNA, 404 bp, Zea mays
  Clone ID: TF_LIB3357-055-P1-K1-F1
gcggacgccgacgcatggcgggtcaaacgcacgacgccgccgacgcactatatatccgtcgcactgcttaccctacgctacgtcgtgtccgtgtgtgccgtgtccgtgtgcgcgactagctagctagtgctgtgcacagtgtactcatctcatctctatctatccgcgcacgcacgaagagagcaggcggcccacgacgtgcacggcgcggaggccatggagggccactactcgcccacggactccgccgacgaggcgggcggcgagcgaaggttccgcggcgtgcggcagcggccgtggggcaagtgggcggtggagatccgcgacccgcacaaggcggcccgggtttggctcggcacgttcgacaccgcggaggccgcggcgcgcgcctacgacgaggccgc

SEQ ID NO: 372 - DNA, 517 bp, Zea mays
  unsure (1)..(517): unsure at all n locations
  Clone ID: TF_LIB3591-110-Q1-K6-H5
ggcgcggcggccatgggggggcactactcgcccacgggctccgccgccgaggcgggcggggagcggggggtccgcggcgtgcgggagcggccgtggggcaagtgggcgggggagatccgcgaccctcacaaggggggcgtcgtgggggtcngcacgttcaacaccgcggaggccgcggggcgcgcctactacgaggccgcgctccgcttccgcgggagccgcgccaagctcaacttccccgaggacgcgcgcctcaccacggggccatccgctgcgggcgctccggcgggggggggatccacgaggacgatggccgtggcgggctctgggggcgggtcgtaccagcaggaggccagcgccgncgtcntctttgcagactacctgcagtaccagatgatgcttctgcaggggggcaccagcgggcaagggagcagcagtcatgggggggatcctntgtactactactatggggggcaccggggggctggcgctggcgctggtggtggggccatgagca

SEQ ID NO: 373 - DNA, 1408 bp, Zea mays
  Clone ID: TF_ZmC4595_1
ctcgatcacctttctcccctgcttccattcccatttccacacacacacgtctcagctcactccctcctccagtttcgtcagctcgtcatcataaaccgaacacagagctctcgattccattccaggatgctgctgaacccggcgtcagagacgtcggtgctagacaccatccggcagcacctcctcgaggagccagcggcggcggaggcgcggccggccgacgagagcttcgggagcctggtggcggaccagtggagcggctcgctcccgttccgcaccgacgacgccgacgacatggtggtgttcggggggctgcaggacgccttcgcctacggctggctgcccgacggctcattcgggcacgtgaagcccgagccagtgcggtcccccgactcgtcctcctggcacccctgctcctacgacggctcaacctgcttcggcctccgggacccggagcagccactgacgcccggcacgaccacgcccgggagggggccggagggggcgccggccgcaaaggcccggggcaagcactacaggggggggaggcagcgcccgtggggcaagttcgcggcgtagatcagggaccccgccaggaacggcgcgcgcgtctggctcggcacgtacgacaccgccgaggacgccgcgctcgcttacgaccgcgccgcctaccgcatgcgcggctcgcgcgcgctcctcaacttcccgctccgcatcggctccggggacaagcgcccgtcgccggcgccgcccgagcccgccacctcctcggactcctcctcgtcttcggccagcggctcgcacaagaggcggaagcgaggcgaggccgcggctgccaacatggccatggcgctggtgcccccgccctcccagcttaaccggccggcccagccgtggttccctgccgcgccggtcgagcaggcggcgatggctccgcgcgtggagcagatcgtcgtctagtctagccatgcgccggcgaaagcgggggcaaggccctgcgctgcacttgcgtgacagctccaccggatggaatgcgaatatgcgataaagctcgggatgccgctgttgctccttgcaactggcgcaagtggaagaagctgtctctgtgtgtaatcaagtgtcttgtctgcggacgaattttcggtatgtgcgtcgttgtaaaaaaaaaaaaaaaagctgctgctgataagttcggaaaactgtacaaagacgtagggagagagacgatgcgtgatcaagaacagcccgctttgttctttctctgataaaaaaaatatccagcggccaaacaggcgcgcaagtcaacagaacagcgacctgagctcgtgacacgagatcgagatcgaaatcgcccccactgaaaccagaactgcagagccgagcggtaatccaacgctgacgacgtaac

SEQ ID NO: 374 - DNA, 1146 bp, Zea mays
  Clone ID: TF_ZmC8128_1
gcgcccccggccgaggcagctgcaggcagcggcccggccggcggagaagggcggaagggcaaggcgcccaagggcgggcccgagaacggcaagttccggtaccgcggcgtgcggcagcggagctggggcaagtgggtggcggagatccgcgagccgcggaagcgctcccgcaagtggctcggcaccttcgccaccgccgaggacgccgcgcgcgcctacgaccgcgccgcgctcctcctctacggcccccgcgcgcacctcaacctcacctccccaccgccgcctacgctcgccgcgccgcgctcgcacccgcactcctcctccgccacgtcgtctgccccgccagcgctccgcccgctcctgccgcgcccgccactgcaccagctctccagcgacggtgctcctgcaccggatttccactaccacaaccagttccagcgccgtctcttgccgcagccgacacccacactatactacgccaacacggctacggcgtccacagtgaccaccagtgtgccgacacgggtggcggttccgcaggagccggccatcgcgcccgcagtaggctccttgacgtcaccgggggagccgcaggtgggtagaaaggaggaggcgcgcggggaggcagggtgggactacaacggcggcgaggaggaggattatgcggcggcgctgctgtgggacgagccggagcctttcttctggtttgatgtcttcctcaagtgatgaccagcacggcgctgcatgccagcaattcgaatcctgcatggttggtttggagtttcggagtgacggcagctcatgctcctgcatctgcatgcatgtgttgggcagtaagcaagcaagaaaggtagataggcttgctagctagggtttctgactcctttgtactaaattatctttatattttttatcttatccttcttttttccctgagggtgtgattgaggtatagtaatgtgaggtggtattactggtgggaggatttagggttctctgtcttgatttaaagattcaattttgaatcacatcgagtcgatttcttgcatggggatgcaatctatttaactgtggcatgtataaaaattagcgatgcaacaatttttaattctgtgttttcttctatcgaatgttgaactttagtcc

SEQ ID NO: 375 - DNA, 1114 bp, Zea mays
  Clone ID: TF_ZmC25962_1
ggcggtgaagatggaggcggagcaagcggcgatggcggcgccgcagctgggggcggcgcaccagcagacgcagccgcggcggcagtaccgcggcgtgcgcatgcgcaagtggggcaagtgggtggcggagatccgggagccgcacaagcgcacgcgcatctggctggggtcctacgccacggccgtggcggcggcgcgcgcctacgacacggccgtgttctacctgcgcggacggtcggcgcggctcaacttccccgaggagatcccctcgttcgggctggcggatggcgtggacgtgggggagcacgcgcgcgacccggccgccgccgccgccggcggcggcggcggctgcacgctgtccgcggcgtccatacggaagaaggccatcgaggtggggtcccgcgtggacgcgctccagaccggcatggtggtcccgccgccgcaccaccgcgagcgccataggcaccacaaccacctgccgcagctgcgggtgcacgcggaggagcagcaggaggaagaggagcagaagccgcagcggcctgcgtggagcgggcgcgtcaagaacccggatctgaaccgtgcgccgagccccgagagctccgacgccgagtgacaagcgagcgagagctgagcagcagccaccgcaaggcgaggttcaacgacgacgtccgttatcggttattcccaatcccacgacgcagcatgccgttgtcgtctccgtccgaccgtccccacgtacgtacgtacgtacgtacacgacgatccagctgaccctgccgcctgcctatcctatccgtcctcgacgacgaccggatggtcggcgggcgggagggagggcggtgcggcgagggttttgggtacgttgtggataagcacgagggcagcagcagcaggggcggcgtgcgcgggcaggcaggcgaagacggagggaggcggccacaagcggcggtctttccaaacgtcaaaaaggacagctgtaacagcgataagaaaaaacaagtcatcatcaccctcgtctcactactagttctactactgttcccgagagtagtagtaacgattagcactccactagcagtatgattattcgaatcggccttgcttgacagcgatt

SEQ ID NO: 376 - DNA, 2342 bp, Zea mays
  Clone ID: TF_ZmC485_2
aattcggcacgaggtccttctcctattctatctatatatcacccgcctcttttttctcggcccaattcggcacgaggcttccctcttcttcctcagctccgtcgcccaccgccggagctccgaaaggccccgcgctcgccgcctttcctgtaaaaaacccaacctttagctagctaaccgctcctcttctccccctacgtactccccttgcccaaatcagagaagatatttaacggaggaggggaaggagaggatatttagctgattgttgattggtggtccggggtacggtgttcttgagtcgtgaagcgaccgtacggtggctagggccgtctccgggttgcgtgcaggatggtcgtcagagatcgggagtgaggaggcagctcgtggtcgtggaggctaaatgtaccgcaagaacgactcggcactctcctgtttctacctcttcctcctctggttcttcttcttgaaatagaccagcgccagccaccaggtagctacctactagctagcagcccagttgcgactggggacgggctgctgcttgcaagttggaatcttggagcaggagcagaggagcgggagatggagctggatctgaacgtggccgaggtggcgccggagaagccagcggcggcgctggaggcgagcgactcggggtcctcgggctcgtcggtgctgaacgcggaggcggcgtcggcgggcggcggggggcccgcgccgggggaggaggggtccagctcgacgccggccgtgctcgagttcagcatcctcaggagcgacagcgacgcggccggcgcggacgccgacgacggcgacgccacgccgtcgcctcctcgccaccaccaccagcagctcgtcacccgggagctcttcccggcgccgcagcattgggccgagctcggcttcttccgcgccggcccgcagcagcagccggacatcagggtcctgccgcacccgcacccgcacccgcccccgccgccgcccgcgcagccgcagccggccaagaagagccgccgcggcccgcgctcccgcagctcgcagtaccgcggcgtcaccttctaccgccgcaccggccgctgggagtcccacatctgggattgcgggaagcaggtgtacttaggtggattcgacactgctcatgccgctgcaagggcgtacgaccgagcggcgatcaagttccgcggcgtcgacgccgacataaacttcaacctcagcgactacgacgacgatatgaagcagatgaagagcctgtccaaggaggagttcgttcacgccctgcggcggcagagcaccggcttctcccgcggcagctccaagtacaggggcgtcaccctgcacaagtgcggccgctgggaggcgcgcatggggcagttcctcggcaagaagtacatatatcttgggctattcgacagcgaagtagaggctgcaagggcgtacgacaaggccgcgatcaaatgcaacggtagagaggccgtgacgaacttcgagcccagcacgtacgacggggagctgctgctgactgctgaagctagcgcagaagttgctgacgacgttgatctgaacttgagcatctcgcaaccggcatcgtcccagagccccaaaagagacaagaactgccttggtccgcagctccaccaccaccatgggcggccgtttgacggctccgccgttctgaagaaaaccaagatcgatgctccgtctgagctgtcgtcggcgggccgccctcaccggtcgttcctccctcatctcgtggctgccgagcatctaccgcctcggtctcaccccttcttcatcacacaccatgagagtgatgcatcaagaagagatcccagctgggcagcagcagcagcatggaaggtgaccgcagctgcacctcctcctcctaccaccaccctgttgccgttgccgctgccgtcgacgtcgtccgctgcagcatcatcaggattctccaataccgccacgacagctgccgccgccccatcggccgcctcctcccgccggttcgacccgccgccaccgtcgtcgtcctcctcctcgagccatcaccaccaccaccaccgccgctgagaatcgaagaagccacactgtaaatctgccgggaagcggctggtggcatccggcccgctcctccctccggggcgccgcaacttttttcgatcggttttgcgccgcctgggacgggttgtagttgatcgattggattcttcataactgtatttgcgtactgcttacactacgacccaagtgaaatcgaaaatggtgccttctctctgaaaaaaaaaaaaaaaaaaaaaaaaaaaaaaaaaaaaaaaaaaactcgagaaggggcgccggtaccc

SEQ ID NO: 377 - DNA, 1135 bp, Zea mays
  Clone ID: TF_700262211_FLI
cttttttttcttcaatctttggcgatggtggtccccttggcgccggtgatctgcatgtgcctgtgatctactgctggctgcatcacctcaatagtctacctgggggcgtatgacagcgaggaggcagctgctcgtgcctatgacctcgcagctctcaagtactggggtcctgagactctgctcaacttccctgcatcaccacaacgggaggtgggaggcacggattgggcgagtctttgggaacaagtacctctacttgggaacatttgacactcaagaagaggcagccaaggcctatgaccttgcggccattgaataccgtggcgtcaatgctgtaaccaacttcgacatcagctgctacctggaccacccgctgttcctggcacagctccaacaggagccacaggtggtgccggcactcaaccaagaacctcaacctgatcagagcgaaaccggaactacagagcaagagccggagtcaagcgaagccaagacaccggatggcagtgcagaacccgatgagaacgcggtgcctgacgacaccgcggagcccctcaccacagtcgacgacagcatcgaagagggcttatggagcccttgcatggattacgagctagacaccatgtcgagaccaaactttggcagctcaatcaatctgagcgagtggttcgctgacgcagacttcgactgcaacatcggatgcctgttcgatgggtgttctgcggctgacgaaggaagcaaggatggtgtaggtctggcagatttcagtctgtttgaggcaggtgatgtccagctgaaggatgttctttcggatatggaagaggggatacaacctccagcgatgatcagtgtgtgcaactaattctggaacccgaggaggttttcgctttccaggtgtcctgtcttgggtaatccttgatctgtctaatgccacagtgccactgcaccagagcagctgagaactttcttgtagaaagcccatggcagtttggcgttagacaagtgtgtcgatgttctttaattctttgaatttgcccctaggctgcttggctaacgttaagggtttgtcattgtctcacttagcctagattcaactaatcacatcctgaatctgaagtggttgtgcttgtgcagt

SEQ ID NO: 378 - DNA, 651 bp, Zea mays
  Clone ID: TF_LIB3066-048-Q1-K1-F2-120a
aggataactttggcgacacatagctctcggaattcgattcagatcaagtaaggcggacaggcttatctgggagcatatgacagtgaagaagcagcagcacatacgtacgatctggctgctctcaagtactggggacccgacaccatcttgaattttccggcagagacgtacacaaaggaattggaagaaatgcattttgtgtctgtggaagaatctttggcttctctccgccgccagagcagtggtttctccagaggcgtctctaaatatcgcggcgtcgctaggcatcaccacaacggaagatgggaggctcggatcggaagagtgtttgggaacaagtacttgtacctcggcacctataatacgcaggaggaagctgctgcagcatatgtcatttctgcgattgagtatcgaggcgcaaacgcggttactaatttcgacattaggtaattacattgaccggttaaagaagaaaggtgttttcccgttccctgtgaaccaagctaaccatcaagagggtattcttgttgaagccaaacaagaagttgaaacgagagatgcgaaggaagagcctagagaagaagtgaaacaacagtacgtggaagaaccaccgcaagaagaaagaggagacggaagaagagaaagcagagc

SEQ ID NO: 379 - DNA, 723 bp, Zea mays
  unsure (1)..(723): unsure at all n locations
  Clone ID: TF_LIB4729-131-A1-K1-D11
cacaaaaccacgcgctactacaccagcctagctagccctttcgccgtcgctgcggctcctgcccactgactcgtaggtttcgttgtttcgacaatgtgcggcggagccatcatcgccgacttcgtccccgccggcgcccggcgcccggcaacagacgacaccatgtccgcctccatcctctccggtagcgaggaccatccggagctgccgctgccgctgccggcgccggcgccggggcgcaagacggcgtaccgcgggatccggcgccgcccgtggggccggtgggcggcggagatccgcgacccgcggaagggcgcccgcgtgtggctcggcacctacgccaccccggaggacgcggcgcgcgcctacgacgtggcggcgcgcgagatccgcgggcccaaggccaagctcgaggcgttcctggggctgcaggacaccgacgagggtggcggcgtcgaggcgtgggatgccgtggacctcatgttggcgtaggccgtacgccngtagcaggggggcccagccccagccccagcgcgcgcgtgccgtcgctgtgaacggccgccgcagctgttttggatcgagtaataatgctattagtagtataatgtttctccaagcagctaagataattgcaagccttgctgggtggtattactagcactactatctaggaggagtatgtactagcaggatgggtttatctagcttgttgctaaaacagat

SEQ ID NO: 380 - DNA, 803 bp, Zea mays
  unsure (1)..(803): unsure at all n locations
  Clone ID: TF_ZmC145170_1
gtctgtgtgaccctttgcttgcgcgcgctgtgggcaacagcgcagacggcctctcgccctctcctatatatataccagtcgacttgctcacgcatcagcgtcactctcccatccccgcccccaaggcacggacagagaaagatctaagcgccgcggcgaacggcaacatatatgatggtgaagaacccaagcagcaatggagttctcacggcgaccgccttctccgacagcaaaaccaggccggagcgcggcgtaggtggcgaggcggcggggaggccgtacaggggggtgcggatgcggagctgggggtcgtgggtgtcggagatcagggcgcccaaccagaagcgccggatctggctcggctcctacgccacgcccgaggccgcggcgcgcgcctacgacgccgctctgctctgcctcaagggctccaacgccgtcctcaacttccccgccgcatcctcctcctcctcctcatcctcctccacatccgcttcctcgtcccaccagcgtgctgacagccgcggccacccggacgacgacccagctgctgccggcggcgacatgtcaccgaggtccatccagcgcgccgcggcggcggctgccgcggcaatcgacgacgacgccggcatgggcgccagcgccgctgacgacaggtgctcctccagcgccggcgcgacgaccccgacgtctgcctctctgtcgacgcagggcagcaccgccgatcacgtcggccaggagcagcacgcgacgacaacatncgccgcggccagcaccggctcgccgcccgaggggaaggaggagct

SEQ ID NO: 381 - DNA, 1989 bp, Zea mays
  Clone ID: TF_ZmC3465_2
aagtgggcacctcgagcggccaaacagacacgcctcacccccaccacaagaacaccaaagccacatcccatccatctccacggtgaggcttgagcgacccgagcaaaaaaaaatcatccgcgacgcagcgacgcaggtttgttctctgatctctctggttcttcttttagcagcagggacgcacagcacaagaaaaggtccggttcaagaggctcttctgttgggtttttttagaatcctcaagagaagcgtgttcttgggttaggatttttttctcacctcatcacacctctcctaggaggaacagagatccagagaaccttttttctcttctggatccttgccgccttttggccttcgaaagggggttgttttgcaataccctctctctgtttttttttttcttcgcacaaacccacctcgtttctctacttttattgaggaacagagctggttttccaaaaaaaaaaaaatctactttgattttccataaagaaaacctctcagcctctttcttctagctccatccaagctttagtcctaatggccgcagccatcgacatgtacaagtactacaataccagcgcacaccagatcgcctcctcctcctccccctcggatcaggagctcgcgaaagcactcgagccttttataacgagtgcttcctcctcttcgtcctcctccccctaccatggctactcgtcctctccatccatgtcccaagattcttacatgcctacaccttcttacaccagctacgccacctcgcctcttcccactcccgccgctgcctcctcgcagcttccgccactctactcgtcgccttatgcggcgccgtgcatgaccggccagatgggcctgaaccagctcggcccggcccagatccagcagatccaggcccagttcatgttccagcagcagcagcagcagaggggcctgcacgcggcgttcctgggcccgcgggcgcagccgatgaagcagtccgggtcgccgccgccgctggcgccggcgccggcgcagtcgaagctgtaccgcggcgtgcggcagcgccactggggcaagtgggtggcggagatccgtctcccgaagaaccgcacgcggctgtggctcggcaccttcgacaccgccgaggacgcggcgctcgcctacgacaaggcggccttccgcctccgcggcgacacggcgcgcctcaacttcccggccctccggcgcggcggcgcgcacctcgccggcccgctccacgcgtccgtggacgccaagctgaccgccatctgccagtccctgtcggagtccaagtccaagagcggctcgtcgggcgacgagtcggccgcgtccccgccggactcccccaagtgctcggcgtcgacgacggagggggagggggaggaggagtcgggctccgccggctcccctcctcctcctcctcccccgacgctggcgccgcccgtgccggtgccggagatggcgaagctggacttcacggaggcgccgtgggacgagacggaggccttccacctgcgcaagtacccgtcctgggagatcgactgggattccatcctgtcatgagcaataatagctccgtgtaatttttttctactgtttggtttttgcggctgcgttggcccgatggcattttagacgtcggccatggcggctgcaagtagcaagtgagtaactagctagctagtacatcgtcgtcgactcgtcgtgtccagtgttgtgaagcagcgttaagtacatgcgtgctaatctcctggttgagctgccggttgttttttttctcacggcacggccagtcgagaagagtcagtagtgtaatctcgtggttttatgatcatctgttgcagcttatgtatggaactttgtctagttttattggtctagtactatttattggtctaaaaaaaaaaaaaaaaaaaaaaaaaaaaaaaaaaaaaaaaaaaaaaaaaaaaaaacttattatttttaatattttattaattttatatt

SEQ ID NO: 382 - DNA, 636 bp, Zea mays
  Clone ID: TF_ZmC966436_1
ccgccgtcggcggtggtttcgcgagcgtggcggactccgggaagttgaggttagcgcggctgccgcggaacctgagcgccgccacgtcgtacgcccgggcggcggcctccgcggtgtcgaaggtgcctagccacacgcgcgccgccttgtgaggatcccggatctccgccgcccacttaccccacggccgctgccgcacaccgcggtaccgcctccgcggcgtgccggagccggtggaggacggcgagggggcctgcgagctagagctgggtgacgccgtcgtcgcgggaatccgtgccgctccgtgctcgtgagcggccggtgcagaaagagagggcggcggcggcggcggcgttacatctccggcgtagtagtcgctccaccactggccctcaggcgacacctgatgctgacgggcaccggccgttgccccgccagcgacgaccgtggccagcgcgtcgaccatcatgaacgcctcccggctccgctcgtaccccgatagcattcgccacgccgctgccgggtgttggcggtcctagtcgtcctcctcacccccggcgccccaacgacagggccctcgtccaaccgcgaaaaccaccttgggcgcgcagcacatgaatgtagtatgtatgggcc

SEQ ID NO: 383 - DNA, 126 bp, Zea mays
  Clone ID: TF_700610879H1
atcagatctggggtaaccgtcggatcccgttgggcagatgagctgctgagatcaaagagtctcgcaagtgcgtgcgcgtctggctcggtacattcaactctcccgaagagcctgtgagggcttacg

SEQ ID NO: 384 - DNA, 533 bp, Zea mays
  Clone ID: TF_jC-zmshLIB3587P021g01a1
cttggcacgaccggacggtcttggttttcgcctcctccgtactcgttctcgttctagtgctcgggctcgttcacgcgcggcgccgccttggcgactgcggagcggcgcttggagttggacgggaagttgagcctggtggtggcgccgcggaggtcgcgcgcggagtggtcttaggcgcgcgccaagtcctcggcggtggcgaaggtgccgagccaaacgcggacgccccggacggggacgggcacctcggccgcccacttgccccacggacggcagcgcacgctttaatacgggctgatggaccttctgctgccagaaccggcgaacccgaacgccttctataaaataaaccacaccggctgtttctcggagtcctcacacaagtcccggaacgcggcctcgaagtcgtcatcatcgttggccgcggtcagacgaaccttgacgcccctaccgtggcctggcgtgacgcctcgccgaaccagcacgctgggtatgaactcaagaaggatcgcaccgtcgcacaatgttggtaa

SEQ ID NO: 385 - DNA, 408 bp, Zea mays
  Clone ID: TF_ZmC8692_2
agcatttccgttgcccgcgcgcgcacacactgcaggcctcacttcttggtggcactggcagtggcactggcggcaatgccggactcggatgtccccagcccagcatcgtcgccgcttggcagcgtgcagaagattgccaggggtcggaaaagcaggcgcggcggcgggcggagcccggcgtaccgcggcgtgcggatgcgggcgtgggggaagtgggtgtccgagatccgcgagccgcgcaagaagtcccgcatctggctcggcaccttcccgacggccgagatggcggcgcgcgcccacgacgccgccgcgctagtggtcaagggccgcggcgcggtgctcaacttccctgagatggcggcgtccctgccgcgcccggcttccgccgcgccgcgcgacgtgcaggcc

SEQ ID NO: 386 - DNA, 2197 bp, Zea mays
  Clone ID: TF_ZmC1979_1
ctctgcttgtgcttgtgcaatgcagggattgcggcaagcaggtctatttgggcgggtttgacaccgctcatgcggcggctcgggcgtacgatcgggcggcgatcaagttccgcggcgtggaggccgacatcaatttcagtctggaggattaccaggacgacatgaagcaggtgatttatactcctatacggagcatgtagcgagaaagatacatgtaattttttctttccttcgtctaccagcagatgggccacctgagcaaggaggagttcgttcacgtgctccggcggcagagcacggggttcccccggggcagctccaagtacagaggcgtgacgctccacaagtgcgggaggtgggaggcgcgcatgggccagttcctcggcaagaagtacgtctacttgggcctgttcgacaccgaggaggaagccgccaggtaaaataattggaccgcactgtgtgcccgcgaggcgtttctcggagcaccgccacccccctctgggccgcgaaactgactgatggatggatgccccgtgtctgtgggattgtcgggtcgtgtgtgtgtgtgtgtgtgtgcagggcgtacgaccgcgcggccatcaagtgcaacggcaaggacgcggtgacaaacttcgatcccagcatttacgccgaggagctcgagccggcgggttcgtctatcccccgcccgcgatctccgccacgatcgcgccccctcgtcgctgtgcggcgatttcgctacaggctacagcctatacaggcaagctctgacggtccgctgtttcgccgtgcagcgtcgacgggcggcggtggcgatgaccacaatcacaacctggacctgtcgctggggagctcggcggggaacaaaaggggcagccttgacgacggcggcggcggaggaggcggcggcgacgacgagacctcggaccagcgcgtccccatggcgttcgacgtcgactggcagacggccgcgccccggagcacgaaagcaaagctggacgcgagctccaagcaaccccagacccagatgctgcctcctacgcgtccggtcgcccaccagctgccgttgccgttcggacccaggcatccgcagtcgcagttcctgagcaacggcgatccggggacctcgggaggcctgtccctcgcgatcggcggcgcgggcggcgggcactggcctccccagctgcagcacctgcagcagcagaggctgcacggcgcctgggccaacggcggcggcacgagctggccgcctccgccgcacccgcacccgcacccgccgccaccgagcaccgccgcagctgcagcatcatcacgattccctccctacgttgttactacgacgcaaggcccggcaggctgggctcagaagaatgggttccattcgctggccaggccaacctagtatgccaagaaccacgactggccggagcgttcattcgtcgtcgatcgtcgacccagggcaaacgacacctccaaccactgcacgacgacgttttaatttaccggatgccattctctctctcccctccccccttcccttctcccttctcccttctcccttctctgtgttcttgattgggtgagacatggatccgaggatggatggacggcctgtacctgaggagttcccgggaagaagacgagtgagtgagtgagtgattggtagggtaggcgactaggcgtcgcgtcaggcagtacgtccttttggcgccttttttcttctttcactcaccattggcgaccaccaatgaatgatgacactgactggggtgtcaacatcgcagctggttttgtttggtctcatgttgcatcactcgctgctccacgatgccttgctatggttggggggagatttgctccatccaccccacgccggtcaggcgacagagcctccgctgcgtcgtctcatccgtctggtgagttgccactgtcttagaatctgagtggtacggtacgtgtggatctcgcgcgcgtgtaaacctagtattatgtactacaaactgtcatcatcggagatcactcgaataagatatcgatcttgagattacgggcggcggctcctgtcatgtgcttactacagcaaagctgataaactgtccgagtctgaacagctcatgtaatggaacgccgcatagatatttccttcttgttaggggtactttggaaccccaattttttaagagatttttatttttcc

SEQ ID NO: 387 - DNA, 619 bp, Zea mays
  Clone ID: TF_LIB5116-043-A1-PF1-B9
attctctcgacccgatccgggtcgggtcggccatgacggtagatcggaaggacgctgaggcggcggcggcggcggccgcacccttcgagatcccggcgctccagcctggaagaacttgtggagcagaggaaagtacccggagtcatgttctcgtcaaaccaataggaaaaagcgacctcggagatcacgtgatgggcctaattcagtctctgaaacgatcaggcgatggaaagaagtgaaccaacaactggagcatgatccacagggtgcaaagagggcgaggaagccacctgcaaagggttcaaagaagggctgtatgcaggggaaaggaggacctgagaatacacaatgtggattccgtggtgtaaggcaacgtacttgggggaagtgggttgctgaaattcgggagccaaatcgggtgagcaggctctggttgggaacgttccccactgctgaggatgctgcccgtgcttatgacgaggcagccagagcaatgtatggcgcactggctcgtaccaacttccctgtgcatcctgcacaagctcctgctgtggctgtagcagcggcaattgaaggtgttgtacgtggtgcttcagcatcatgtgagtctactacaaca

SEQ ID NO: 388 - DNA, 677 bp, Zea mays
  Clone ID: TF_ZmC8271_1
ccgggcacgcgtccggccaccggacgaacacacagatcgctacagcccgcatgaccaacctctccgccatggcagcgagccaatcctacgtgatccgattcgacggccacttcgacgagccgtcgccgagctccgcgggcgccgagccgccgggcccgcagccgccgttcgcagggaggatgatctcgctcgagcgggagcaccaagtcattgtcgccgccctgctgcacgtcgtctccgggtacgccacgccgccgccgcaggtcttcacgccgccgccggcagcggcgcgctgccaggtgtgcgggatggagcggtgcctcggctgcgagttcttcgccgccggggagggcgcattgggcggcggcgcggagaaggcagccgcgacaggaggcgcggcggcgctggcggcggggcaaaggaggcggaggaagaagaagaacaagtaccgcggcgtgcggcagcggccgtgggggaagtgggcggcggagatccgcgacccgcgccgcgcggtgcgcaagtggctgggcacgttcgacaccgccgaggaggccgccagggcctacgaccaggccgccatcgagttccgcggcccgcgcgccaagctcaacttcccgttccccgagcagccgccgacggggcacgacgagcccatcagcagcaacggcgacgcgagc

SEQ ID NO: 389 - DNA, 1879 bp, Zea mays
  Clone ID: TF_ZmC5960_1
attcttcccctaagcacgcacacatcaacatcggtagctctcacattccctcccacggctgcactagcgcctggaattctatcgtacagtatagcttcattcttaactggtgaacaaggcagcagctagcagatcgatctccatggacatggacatgagctcagcttatccccaccattggctctccttctccctctccaacaactaccaccatggcctactcgaagccttctctaactcctccggtactcctcttggagacgagcagggcgcagtggaggagtccccgaggacggtggaggacttcctcggcggcgtcggttgcgtcggcgccccgccgcagccggcggctgcagatcaggatcaccagcttgtgtgcggcgagctgggcagcatcacagccaggttcttgcgccactacccggcggcgccagctgggacgacggtggagaaccccggcgcggtgaccgtggcggccatgtcgtcgacggacgtggcgggggcggagtccgaccaggcgaggcggcccgccgagacgttcggccagcgcacatccatctaccgtggcgtcaccaggcaccggtggacggggagatatgaggcgcacctgtgggacaacagctgccgccgggagggccaaagccgcaaaggacgccaagtctacctaggaggctatgacaaggaggagaaggcggctagagcttacgacctcgccgcgctcaagtactgggggcctacaaccacgaccaacttccaggtgtccaactacgagaaggagctggaggagatgaaatccatgacgcggcaggagttcatcgcgtcgttgcgcaggaagagcagcggcttctcacgaggcgcctccatctacagaggagtcacaaggcatcatcagcacggccggtggcaggcgaggatcggcagggtggccggaaacaaggacctgtacttgggcactttcagtactcaggaagaggcggcggaggcgtacgacatcgctgcgatcaagttccgcgggctcaacgccgtcaccaacttcgacatgagccgctacgacgtggagagcatcctcagcagcgacctccccgtcgggggcggagctagcggtcgcgcccccgccaagttcccgttggactcgctgcagccggggagcgctgccgccatgatgctcgccggggctgctgccgcttcgcaggccaccatgccgccgtccgagaaggactactggtctctgctcgccctgcactaccagcagcagcaggagcaggagcggcagttcccggcttctgcttacgaggcttacggctccggcggcgtgaacgtggacttcacgatgggcaccagtagcggcaacaacaacaacaacaccggcagcggcgtcatgtggggcgccaccactggtgcagtagtagtgggacagcaagacagcagcagcaagcagggcaacggctatgccagcaacattccttatgctgctgctatggtttctggatctgctggctacgagggctccaccggcgacaatggaacctgggttactacgactaccagcagcaacaccggcacggctccccactactacaactatctcttcgggatggagtaggtgcatgcgctgacaagctagctagctgaaatcaggtggtaggcctaggaagaagctaggactgacatggaactgatcacaattttggctgctacatataccatgcatgccccatgtatggatgggggtgcgtgtccgtccttctgcttgctattcacgacacttgctgacttactgtggcagagccgcagagggctcgtgtaccatcagcatttctaaattctaattatcaagctcgtttcaagctatattatgctaaaaaaaaaaaaaaaaaaa

SEQ ID NO: 390 - DNA, 2913 bp, Zea mays
  Clone ID: TF_ZmC484_102
tgaagtcccggccgcagcagccggcgcctgccccggcccagccgaggcgccgcgtccgggttctcttcgaggatcctgacgccacggactcggactccgacgacgaggaggccggcgcctctacgtgcccggcgaaggccaagcgcttctccttcgagacgttcgtcggcaaggtcccagccaggccggtccttccggcggccgctgtcgccgcgtgcgccagtggcggggccccggagagctaccgcggagtgaggctccgcaagtggggcaagtgggcggcggagatccgcaacccgttcacgggcaagaggcagtggcttggcaccttcgacacggccggcgcggcctccgcagcctacctatccgcttcccggagcttcgccgacgagaagcgccgccgccgcgggcagcctgtgccctcttcctcaccagttccttcggcaagcgccaccccgacggcctcctcttcgtcgtccacctcgactgctccgttcgcgcacccgtcgccgtcgtctgttcttggacccgccaccaaggaggcgccgctgaacccgcagtccccggagctggtcgcgacaccaacgctcgtcctgccgtccgatgagtccgcggagctgccggacgacccggagttctaccaggaccttctccgcggcctgcagctgccagacatcagcccgatggacttccgtgccgggcttgacgctctggacgtctccgatgcgcccttctgcctggacgatgagcaggacctgctgcttggggacttcggggacgaggaactggagatcgacctcgacctcgacgatatcaacgacgtcttcccggagatgcctggctgcgacctcggccgcggcatggacgatttcctgcaaaccgttgatttctgcgtgtgaattaagtcagtgccttaatatgttagggttgatggtttgataagcgtgcttggaaggggggattgtcttgggtttttccctcgggcatttcagtctgctcgggcccaagatttctcttcttcccaaacagcacattagcttccggagaggtaattttgataggttacattatgttaagttatagtggttgtgttttttctgttatttggtaatgcttgtcaagacattatgaacaagtcattgagctgttactattggcgacgactacaaagaattcggcgaccacgccgtctgccttctgcgcctccatttcggcctctgtcccttgcaagttcaatctcacctccaaccatgggtaaagagaagtcccacatcaacattgtggttattggccacgttgactctggcaagtcgaccaccacaggacacctgatctacaagcttggaggcattgacaagcgtgtgatcgagaggtttgagaaggaggctgctgaaatgaacaagcggtccttcaagtacgcatgggtgctcgacaagctcaaggctgagcgtgagagaggtatcaccattgatatcgctctgtggaagtttgagaccaccaagtactactgcacggtcattgatgcccctggacaccgtgacttcatcaagaacatgatcactggtacctcccaggctgactgtgctgtccttatcattgactccaccactggtggttttgaggctggtatctccaaggatggccagacccgtgaacatgctctccttgcgttcacccttggagtgaagcagatgatttgctgctgcaacaagatggatgcaaccactccgaaatactccaaggcacgttatgatgagattgtgaaggaagtctcatcctacctcaagaaagttgggtacaaccctgataagattgccttcgttcccatttctggttttgagggcgacaacatgattgagaggtccaccaaccttgactggtacaaaggcccaaccctgcttgaggctcttgaccagatcaccgagcccaagaggccttcggacaagcccctgcgtctgcccctccaggatgtgtacaagattggtggtattggaactgtaccggttggtcgtgtggagactggtgtcatcaagcctggtatggtagtcacctttggtccaactggcctgactactgaggtgaagtctgttgagatgcaccatgaggcgcttcaggaggctcttccgggcgacaatgttggcttcaacgtgaagaacgttgctgtcaaggatctcaagcgtgggttcgtggcctccaactccaaggatgaccctgccaaggaggctgccagcttcacctcccaggtcatcatcatgaaccaccctgggcagattggcaacggctatgccccagtgctggactgccacacctcccacatcgccgtcaagtttgctgagctcattaccaagatcgacaggcgatctggcaaggagctcgagaaggagcccaagttcctgaagaacggtgatgctggtatggtgaagatgattcccaccaagcctatggtggtggagacattctccgcgtatcctcccctgggtaggtttgccgtccgcgacatgaggcagacggttgctgttggagtcatcaagagtgtggagaagaaggacccaaccggcgccaaggtgaccaaggcggccgccaagaagaaatgatgcgatcccgtgtctgcttttgcagtgcctggataacttgccactaaagttgtgtatgcggttgttgctgttattgcgtggactgtttgctgcggtgtctcctgtttgtttgggtagcgcagcgtcggcctcttcaggtgtctgttgtctgttgtctttactatcagtaatgctcctgagacttgtatttctccttttggcgccgctaaatggaattttcgaacaatgattttcgtgttattattttacaaccttttcgaacaatatttacacgtctgatgtgttttgctgaaaaaaaaaaaaaaaacccacgcgtccg

SEQ ID NO: 391 - DNA, 2130 bp, Zea mays
  unsure (1)..(2130): unsure at all n locations
  Clone ID: TF_ZmC2282_1
cattgggtacctcgaggccggccgggacctaccaatctaccacctccccaactccgcctcccgcctcccaagtcccacccccactccctcgctcaccagaggaactagcggaccaggcaaagccgagccgcaaccgcgaagatcttgcgtggcctccttttcccagctcgtcactgtgccgctcgtgtcctccactcccggtccgcccaaccaataatccatcgatccatccaccaccaccaccccgctgcggcgatgtgcggcggcgccatcctctcgggtttcatcccgccgtccggggtggcggcggcggcggcggcggcgaagaagaagaagcagcagcagcggtgccgtgtgactgcggacctgctatggccggggcccggcagtaagggagctccccaggaccaggaggaggacttcgaggccgacttccgcgagttcgagcgcggcctcggcgaggatgacgtggacagcgccggcgaaggcggcgaccccgaggtccaggagcttcctccgccggagccgacgaggtttgccttcgccaccgcggccaaggcggcagttgatggcgtgatgacgacgactccaaaggatgtcaaaggagatagagcagtaaaaaagcgcggccggaagaaccagtacaggggaatccggcagcgcccttggggcaaatgggcagctgagatcagggaccctaacaagggcgtccgcgtctggctcggaacctacaacaccgccgaggaggcagctagggcatacgacgccgaagctcgcaagatccgcggcaagaaagcgaaggtgaatttccccgatgacgacgcgccaggcactcgtcacaggccaacgaacgcagcgaacgcagcgaggctagtagctccacccccacccccgaaggcctgcgccgatgagatctttaacaacctgaagaacgacgacggcgacaacaacaacaacgatgatctgtttgcgatgtttgcgttcggtgacaataagaaggaggccgttcctgcagcgaagccagccgccgccgagggtggcagtggcagtggcagtggcagcttcctcgtccctgcgcctgcgatggcggcggcggtgcccggtaataagaggaggtcgtccgcgaccaacattatggtctccgtctccgacgaccagagcagcaactcctacggctccggctcctccgacttggtggggtcgtggtcgtgggacgacgccgccgccgccgccgccatgacctcggactacacctcctcggtcttcgctccggcgtcttactcttacatgcaaggcggagcgccgaagagaatgaggagcagctacggcggcgcgccgcccagcctcgcacatgacgcggccatgcctggctttggccttgataaagtgagctaccaccactaccaggcgttgcctccttattacgtcgggagcagcaacgcgtcggtgggcaacctcggtcttctgcagcaggctgatgatgctccagctccacaggatggggcgagcgccggggatatctggagcctcgacgagctgctcatgctggcagcagctggtgcttattgagaaccgcaagaaaaaaaaatgtgttggcgctgctagctggagacgagacgagggcgagaggcagttgcatcatccgccatccgctatcgttttgtctctcctatatctagtatatatatgcttctggcagtcgaactctatggcaatgcgtgtgtatagtgtgttgctgccgtctatgattggaagcgagctcgagactggttcaataattcacctttgcctaccgtcgtaccgccggcctgctggactgtagtgtgcgtactgcatatatatgccataattatgtatgcactcctcctatataaactatattattatgatgtgcttatactagtactgggcaaaaaaaaaaaaaaaaaaaaancgtgcggctccccttttttcccgtttcgtccctttttctcgttgtttcctgtttgctctataaaaagggggggccgtttttggggttcccgtttttcttccccgggttttgggcgttttggtttttttttgggggcccctcgttccctttctttggccgcgtttttccccgggggcctggaaaacccttggggtccc

SEQ ID NO: 392 - DNA, 1953 bp, Zea mays
  Clone ID: TF_ZmC2282_3
gggtaaccctggccggggccgggccgggctccccaactcggcaactccgcctcccaagtcacacccgcactccctcgctcaccagaggaactagcggaccaggcaaagccgagccgcaaccgcgaagatcttgcgtggcctccttttcccagctcgtcactgtgccgctcgtgccctccactcccggtccgcccaaccaataatccatccatccatccaccaccaccaccccgctgcggcgatgtgcggcggcgccatcctctcgggtttcatcccgccgtccggggtggcggcggcggcggcggcggccaagaagaagcagcagcagcggtgccgtgtgactgcggacctgctatggccggggcccggcagtaaggaagctccccaggaccaggaggaggacttcgaggccgacttccgcgagttcgagcgcggcctcggcgaggatgacgtggacagcgccggcgaaggcggcgaccccgaggtccaggagcttcctccgccggagccgacgaggtttgccttcgccaccgcggccaaggcagcagttgatggcgtgatgacgacgactccaaaggatgtcaaaggagatagaccagtaaagcgcggccggaagaaccagtacaggggaatccggcagcgcccttggggcaaatgggcagctgagatcagggaccctaacaagggcgtccgcgtctggctcggaacctacaacaccgccgaggaggcagctagggcatacgacgccgaagctcgcaagatccgcggcaagaaagcgaaggtgaatttccccgatgacgacgcgccaggcactggtcacaggccagcgaacgcagcgcctaggctagtagctccacccccaccccccaaggcctgcgccgatgagatctttaacaacctgaagaacgacgacgacgacaacaacaacaacaacgatgatctgtttgcgatgtttgcgttcggtgacaataagaagaaggttcctgcagcgaagccagccgccgccgagggtggcagtggcagtggcagcttcctcgtccctgcgcctgcggtggcggtggtgcccggtaataagaggaggtcgtccgcgaccaacactatgctctccgtctccgacgaccagcgcagcaactcctacggctccggctcctccgacttggtggggtcgtggtcgtgggacgacgacgcggcggccgccgccatgacctcggactacacctcctcggtcttcgctcccgataacgccgtgctgccggcggcgtcttacacgcaaggcggagcgccgaagagaatgaggagcagctacggcggcgcgccgcccagcctcgcacatgacgcggccatgcctggctttggccttgataaagtgagctaccaccactaccaggcgttgcctccttattacgtcgggagcagcaacgcgtcggtgggcaacctcggtcttctgcagcaggctgatgatgctccagctccacaggatggggcgagcggccggggatatctggagcctcgacgagctgctcatgctggcagcagctggtgcttattgagaaccgcaagaaaaaaaaaatgtgttggcgctgctagctggagacgagacgagagggcgagaggcagttgcatccgccatccgctatcgttttgtctctcctatatctagtatatatatgcttctggcagtcgaactctatggcaatgcgtgtgtatagtgtgttgctgccgtctatgattggaagcgagctcgagactggttcaataattcacctttgcctaccgtcgtaccgccggcctgctggactgtagtgtgcgtactgcatatatatgccatagttatgtatgcactcctcctatatatactatatattattatgatgtgcttatactaaaaaaaaaaaaaaaaaaaaaaagaaaaaaaaaagggcggcgctcgcgatctagaaccccacgcgtccg

SEQ ID NO: 393 - DNA, 1668 bp, Zea mays
  unsure (1)..(1668): unsure at all n locations
  Clone ID: TF_ZmC2282_5
ttgggtacctcgaggccggattggatacctcgaggccggccgggctcccgaactcggcaactccgcctcccaagtcacacccccactccctcgctcaccagaggaactagcggaccaggcaaagccgagccgcaaccgcgaagatcttgcgtggcctccttttcccagatcgtcactgtgccgctcgtgccctccactcccggtccgcccaaccaataatccatccatccatccaccaccaccaccccgctgcggcgatgtgcggcggcgccatcctctcgggtttcatcccgccgtccggggtggcggcggcggcggcggcggccaagaagaagcagcagcagcggtgccgtgtgactgcggacctgctatggccggggcccggcagtaaggaagctccccaggaccaggaggaggacttcgaggccgacttccgcgagttcgagcgcggcctcggcgaggatgacgtggacagcgccggcgaaggcggcgaccccgaggtccaggagcttcctccgccggagccgacgaggtttgccttcgccaccgcggccaaggcagcagttgatggcgtgatgacgactcctccaaaggatgtccaaggagatagagcagtaaaaaagcgcggccggaagaaccagtacaggggaatccggcagcgcccttggggcaaatgggcagctgagatcagggaccccaacaagggcgtccgcgtctggctcggaacctacaacaccgccgaggaggcagctagggcatacgacgccgaagctcgcaagatccgcggcaagaaagccaaggtgaatttccccgatgacgacgcgccgccaggcactcgtcacaggccagcgccgaaggcctgcgccgatgagatgtttaacaacctgaagaacgacgatgacaacaacgatgatctgtttgcgatgtttgcgttcggtgacaataagaagaaggttcctgcagcgaagccagcagccgccgagggtgacagtggcagtggcagcttcctcgtccctgcgcctgcggtggcggcggtgcccggtaataagaggaggtcgtccgcgaccaacattatgctctccgtctccgacgaccagagcagcaactcctacggctccggctcctccgacttggtggggtcgtggtcgtgggacgacgacgccgccgcagccgccatgacctcggactacacctcctcggtcttcgctcccgataacgccgtgctgccggcggcgtcttactcttacatgcaaggcggagcgccgaagagaatgaggagcagctacggcggcgcgccgcccagcctcgcacatgacgcggccatgcctggctttggccttgataaagtgagctaccactaccaggcgttgcctccttattacgtcgggagcagcaacgcgtcggtgggcaacctcggtcttctgcagcaggctgatgatgctccagctccacaggatggggcgagcgccggggatatctggagcctcgacgagctgctcatgctggcagcagctggtgcttattgagaacgcaagaaaaaaaatgtgttggcgctgctagctggagacgagacgagggcgagaggcagttgcatcatccgncatccgctatcggtntgtctctcctatatctagnatatatatggcttctggcagtcgaactctatgg

SEQ ID NO: 394 - DNA, 2053 bp, Zea mays
  Clone ID: TF_ZmC1995_1
aattcggcacgaggatttcttccctggctgaaggcgtgggtctcgagagctgcttaaaaagctttgcacaaaaatggcttcgttggcgatctcgaggccgcccgggacgtcccatcgcgccgctcccttcgtcctggggtgtcctcctccatggccaccgccaccgccgcctgccgctcgcccacggccgccgccgccgcgccctgacgctgctgctgctgctagactgctagaggaggaggccggggcaggcagctcgcgagctcgatcgcctggcgggcccgagctggagtcgatggtgctggatctcaatgccgagtcgccgacgcccggctcggcctcggccgcctcgagctccagcgtcgtagtgggcgggggcttcttccggttcgacctgctcggagggacacccgacgaggagggttgctcgccctcgccacccatcgtgacgcgccagctcttccccttgccgtacccggacgctgcaggtagcaccgccgcctcgacggcgtcgaacgggtcgccgccgccggaggtggcggtggcatgggcgcgccgcccagcggatctcggggcgccggcgctggcacaggggaaggtggtgtctgcgccttcgtcgcccgcggttgtgtctcctgccgccgggaagaagagccggcgggggcccaggtcgcggagctcgcaataccggggcgtcaccttctacaggaggaccggccgctgggagtcacacatctgggactgcgggaagcaggtctacctgggtggatttgatactgcgcacgccgcagcaagggcctatgatcgcgctgccatcaagttcagaggccttgacgccgacatcaacttccagttgaaggactatgaagatgacttgaagcagatgaggaattggactaaggaggagtttgttcacatactccgacgtcaaagcactgggtttgccagggggagctcaaagtaccgtggtgtgacactacacaagtgtggtcggtgggaagctcggatgggtcagcttctcggaaagaagtacatctaccttggtctatttgacagtgaaatcgaagcagcaagagcatatggtagggcagctattcgcttcaatggaccggatgctgttacgaactttgattctgtttcctatgatggagatgtcccacttccacctgcaattgagaaagatgtggttgatggggacatccttgatctgaatttgaggatttcacaacctaacgtgcatgatctcagaagtgatggtaccctgactggttttggattaagttgtaattctcctgaagcttcaagctccattgtttctcagccaatgggcccccagtggcctgtccatcctcacagcagatcgatgcggccccagcatccacatctgtatgcatctccttgtccaggcttctttgtgaacctcagggaggcgcctatgcaggaagaggagaaccggtccgagccggcgtgtccccagccgttcccctcctgggcatggcaaacgcagggctcccgtgccccagttctccctgccaccactgcagcatcatcaggattctctaccgccgctgccaccggcgtggacgcggccacagccggccacagcgtgccgccgccgtctggtagcctccggcagttctcgggctaccaccagctccgcttccccccaaccgcctgacggagacagaccacctcctgttgagttggcggcggcggcggcgtctcatagctggccggtggttggctggctgcccatgcaacgccacgccggtgggtgcgggtcggtattcggtaacagtcgccactgttgggtatggttttgtgggactacagaggatgcagtgatctctcgctgctgctgtgtgctgtctctctcgctccctctacccacccacacctgtttgtaatatgaatttatcgccctctcgcgctcgtgattcgtccatcttcgtttcgttttgatggccaccggatgggatcatgagcgtgttgcgagaaattgtgtaataaaccatgcgtatttttatttatatttatttattgtgacgatggt

SEQ ID NO: 395 - DNA, 364 bp, Zea mays
  Clone ID: TF_LIB3156-001-Q1-K1-H9
cccacgcgtccgcccacgcgtccgcccacgcgtccgcccacgcgtccgggggaaagcgtcggctgagataagagatcctcacaaaggtgtccgagtctggctcggtacatacaacacggctgaagaagcggctcgagcctacgatgaagccgccaagcgcatccgtggggagaaagccaagctcaacttccctcaaactccacacctaactcagcctcctgctaagaaaaggtgtatgatggctcctgagttgactccgccgagttctgaaacaaagagcccaccaaccccacaactttttatgggttttggttacgagaatggcgtttacagaccgagtgaagcaatggaaagcgagatggag

SEQ ID NO: 396 - DNA, 1046 bp, Zea mays
  Clone ID: TF_ZmC234991_1
ctcccgagtcccgacctcttgtttctctcgctcgcctccctcgtccgcggtccgtcgccgctccagatccagcctccagcccgccggtgtcttctgcgccgtagtcggcggtcaggtcgtcgggtatggtgaggtcgtccatgagagcggacatgtcctcgacaccatagccatagcctgccgcgccgttcgcggccgggagcgccggtggtaaagacgcggcggctgggtcgacggcgtagaatggctggaggagctgcgtggcgttgtcgcccgaggtgaggtccggggagaggtagggcgtgacggaggagcccggcgggaggtccgggtaggcgaagttggtgcgcgcgtgggagccgcggagggagcgcgcgacgcggtcgtgtccttggtggccgggtcccggatctccgccgcgtaccggtcccacgaccggcgccgcacgcccaggtaccgcgtcgtgttggcgtccgcctggggctgcgccacgagcggacgagcccacgaccgcagaacgcaccgtcgctgctcgcctgcgctgcgctgctccgatccaaatccaccccaagggaacatctaccgccggccgactcctgtgtctggcgtgtattggaccacgaccagcaggcagcagccccgcgcacgagccaagatgcgcacgcctagcgcgacggcggccgagatgtgcgtttatcaggaactgaggaggcgtgtcgtgcctggaccagcacggcccgacggaagcccgtcgtgctttagggtcatactagaccttacttctactcgctaggtccggtaagacatgacctgactctattttgtgctagctaggcccgactaaccgaggcccgaagcacggcgggctcgtgccgggccggcacggcacgacccaacttgcagcactaatggtaacgatcatttctcaagcgctgtgagccgcagtaaatttgaaatgagcaaggacaacagaaagggcaggaggagagccaacggacaatgtacttctgtacctttataaaattcgataagcgagcccacggggc

SEQ ID NO: 397 - DNA, 670 bp, Zea mays
  Clone ID: TF_LIB3607-014-Q6-K6-G12
cgcatggttcctcttccgctgctgccgtcctgcgatcgaccgggttggcgggcggtccggcgcgtgcctgcagtttatctcggcgcgtacgacgacgaggacgcggaggagcgcgcgcacgacctggcggagctcaagtactggggccccgccggcaccgtcctcaacttcccgctgagcggctacgacgaggagcggagggagatggaggggcagccccgggaggagtacgtcgcgtcgctgcggcggcggatcagcggcttcgcgcgaggggtgtccaagtacaggggcgttgccaggcatcatcacaacgggagatgggaggcgaggatcgggcgcgtgttaggcaacaagtacctctatctcggcacttacgcaacacaagaggaggcggcagtggcgtatgacatggcggctatagaacaccgcggcttcaacgcggtcaccaacttcgacatcagccattacatcaaccactggcatcgacattgccatggcccctgcgacggcagcctcggcgcgatggacgtcgcaccgaacgtctcgctcgaactagacctactcgagtgcccagtcaccgtccggctcagcctcgaggagaccacgggcgacgatgaattccacaaccgcgaggactacctggggcaccttttcggcgtgcagcagcttc

SEQ ID NO: 398 - DNA, 1007 bp, Zea mays
  unsure (1)..(1007): unsure at all n locations
  Clone ID: TF_ZmC21315_4
tcgcgatctgatcacaggaagcacacacatcactgatcgagaacttactacatagtacaccaagaaagcaagcgacgacgacgtctgggaacgacgaagccgaagctggagagctatactatacctgtcatccaaccagccagccagccaagccatcatatcatggtgaagacggcggcgagcagcagcagcgacgacgccgccgccgccaagaggaggacgtacaagggcgtgcggatgcggagctggggctcgtgggtgtcggaggtgcgagcgcccggccagaagacgcggatatggctcggctcccacgccaccgccgaggccgcggcgcgcgcgcacgacgccgcgctgctctgcctccggggctcggcggccgacctcaacttcccgctccgcctcccgttcgacctgccccccgcggccaccatgtcgcccaaagccatccagcgcgtggccgccgccgccgccagcgcctcctcctcctcctcctgcggcggtggcggcggcttgcgcgcgccgccgcccttcgcgccacgcgccgagaacaacggcaccagtgcctgcagcgacggcgacggcgacgccaccccggcgtcgagcaccaccagctcgcccaccagccacgccgacgacgtctcctccccggactccaccgtcagcagcgccggcgacgtcgactactacacctcgctcgcggacatcgacgccttcttccagtcgcccaagtgcgtggtggactacgccctcatggacccctgcagcgccttcttcgcgccggactcgacggcggccgacgacgacggcggctgctgctgggcctgggaggaggacggcggcggcattgcgctctggagcttctccgctacactggactgctgaagtgtgggcgtcaggggaagcggaagcgattcgagtcagtcactgactatagtcgccgatcgatcaagtgacagaattccatatatatatatacacgtgataattattcaattnccgnagaaagc

SEQ ID NO: 399 - DNA, 1569 bp, Zea mays
  Clone ID: TF_ZmC7961_3
aacccaaattcggcacgaggcacaatccccttcaacaaacgcaccgcactccacggcagccagaaaacacaatccacagagtctccgtgaggtctgagcgaggtaggactagctctgagcgagttcttccgtcttccaggtataatccttgcaactctcactatcctcttcgcatcgctcgtctctttttgagactagttggatttctcttctttttccttggatcctactacctactagaacagagctccggagccttttagtttctggtctctgatctactcattttcttttcttccccttttggtgacataggtaggtctagttaagatctgtcgtgcctgttctttgattttagctaagaaccaggcgatttagtcttcttcttccttacaaaaaaaaaaaatccccagaaaaaaaaagttgtgagtagtatattcttgtaccatttgatggccgctgctataaatctccccgggcccagcgaggatctgatgcgagcgatggagtccttcatgcaagacgacacgacccatccccttcaacaaacgcaccgcactccacggcagccagaaaacacagcccacggggcccagtacccggcgacccacctgagcccggcgcagatgcagttcatccaggcccagctccacctgcagcggaacccggggctgggcccgcgggcgcagcccatgaagcccgccgtcccagtgccgccggcgccggcgccgcagcggcctgtgaagctgtaccgcggcgtgcggcagcgtcactggggcaagtgggtggccgagatccggctcccccggaaccgcacccgcctgtggctcgggaccttcgacaccgccgagcaggcagcgctggcctacgaccaggcggcgtaccgcctccgcggggacgcggcgcggctcaacttccccgacaacgcggagtccagggcgccgctcgaccccgccgtggacgccaagctgcaggccatctgcgccaccatcgccgccgcgtcgtcgtcatccaagaattccaaggccaagagcaaggcgatgccaatcaacgcgtccgttctggaagcggcagcggcgtctccgagcaacagctcctccgacgaaggttccggctccgggttcgggtcggacgacgagatgtcctcgtcttccccgacgccggtggtggcgccgccggtggcggacatgggacagttggatttcagcgaggttccgtgggacgaggacgagagcttcgtgctccgcaagtacccgtcctacgagatcgactgggacgcgctgctctccaactagtcgcccttcgccgacagatgtgctgttgtagttcagtagtggcagtatctctggccgccgcagatgaggttttaggcaatctgcaggccgccggcccatgtgtattaagtaggttttgctcagttgttggccccggacttcgccggcgtttttgtgaccggcgtccccgagtgcactgcattggtgtactggtctgtctgtaaaaaaaaatggatctgtgtacttctatagtgtgtattcaaccattgttcttaaaaaaaaaaaaaaaaaaaaa

SEQ ID NO: 400 - DNA, 1426 bp, Zea mays
  Clone ID: TF_ZmC983_2
ataaaaccagtcgtgaactatattattaaacttgctctaaagttacatcaacaaaaatgatatcacacacccatagtcccacaccaacacatgttcttgatttcccaagccgcaagtaaactttttcttgcatccccactcgtgataaaaaaggtcctcccaccacatacagacagaggcagcagcaagcaagcagctaccaaccaacctctgcatcacttgatcctcctgcacaccactgcccgtcagtgcacagagctagctatcttccatggctcaagagctccaagaaacgtcctcttcctctgccaccaccaccacctcgtcgtgtaccacctcttgctgctcgtccactgtcacggactcgtcctcgtcgcccccgtcaccggcggcggccaatgccgcgcccgcgccacggaaggcggaggccgagactggcggggacgaggacggttgtgctggtaaggcggcgccggcgaagaagcgggagcggagcagcgaggggaagcacccgacgtaccgcggcgtgcggatgcgggcgtggggcaagtgggtgtcagagatccgcgagccgcgcaagaagtcgcgcatatggctcggcacgttcccgaccgccgagatggccgcgcgcgcccacgacgccgccgcgctcgccatcaagggccgcgccacgcgaagtgcccgccacaagagcggcagctgttcgacttgccggacctgctcctcgacgtccgggacgggttcgggcgcttcccgccgatgtgggccccgttccatgacgtgttggaggtcaatgcggaggaggagccgctgctttgggaatagcagtcttgcaattacaaagagggtctaaacaatagtaccagtggtatcccatttcctcatctttgttctccccctctctttctttcttttttctttggaaaagcagctagttttttttcttcttatctttaatttggttaaataagtataaacatatataaacaagagagatataagctgtgtacttataagtgtaagacgagtaagtaccgaacagttaattattaaaaaaaaaaaaaaaaaaaaaaaaaaaaaaaaaaaaaaaaaaaaccaaaaaaaaaaaaaaaaaaaaaaaaaaaaaaaaaaaaaaaaaaaagggggcgcccctttaaaggaaccaaacttacctaccccgtccttccaactaaaaactttttttatggggcccctaaattaaattcaatggcccgcgttttaaaacctccgaactggaaaaaccctggggttacccaaattaaatcccttggaaaaaaacccccttttccccagtggggtaaaaacaaaaaagccccacccgaatcccctttccaaaaattggccaaccctaatgggaaatgggaccccccctttaacgggccaataaaccccgcgggtggggggg

SEQ ID NO: 401 - DNA, 1419 bp, Zea mays
  Clone ID: TF_ZmC484_48
gtcgccgcgtgcaccagcggcggggcgccggagcgctaccgcggagtgaggctccgcaagtggggcaagtgggcggcggagatccgcaacccgttcaccggcaagaggcagtggcttggcaccttcgacaccgctggcgcggcctccgcggcctacctgtccgcctcccggagcttcgccgacgagaagcggcgccgccgcgggctgcccgtggccgcgtcctcagcagacactccggcaagcggcagcaccccgacggcttcctcctcgtcgtccgcctcgaccgctccattcgcgcacccgtcgccgtcgtccgtgcttgaaccgagcaaggaagcgcggaacacgcagtccccagaggcgacgcccgcccggccgtcgaccgactcagcgcagctgccggaggacccagagttctaccaggaccttctgcgcggcctgcagctgcccgacatcgacccgctggacttccgcgccgggctggacgctctggatctctccgatgcggacttcggcctggacgacgaacatgacctcctgctcggggacttcggggacgaggagatggagatcgacctcgacctcgacgacatcaacgacgtcttcccggagatgcccggctgcgacctcggccgcggcatggacgacttcctgcaaaccgttgatttctgcgtgtgaattaaaagggagtgtgcccttgatatgttagggttgtttggtttcataaacgagcccctgagagtgtgcttggaaaggggagatgagatatcttgggttttttccccgggcaagttggatctgctcgtgcccaggagatttcctctttgccctcatttaccccatcaggtaacacagagaaatcagtgatcactctagtgtatttacccatggccttagtgacaaagacgaaggggcagacggtcttgcagatgcaacacttgttgtcgcccatcacgaaacggaggcggacgatgcatgtggagcacacgtcgcggtgcccgcacgacccataggccacccactccagcgtatctgcgcacaccgcacaaaagtcttccatggctatctgcgcagctctaatctccgaagtccgaatatatcttcaaatctggtaagatagggatcgattcttttgggatcggattccactgttaattcgaactcgagtaggggaaggcgccgccgcggcgccggcagccgcgcctgcgcgggtttcggccggtacatcggcggagggggcacgcggccgcccggcagcatggacggcggcgcgtacgggaaccggcttcgcggccgccgcgtacgcccggtcccccattacgcgctttctattctctctctctcgttcggttcttggctggctgctcggggaagggaagggttcggttcttggctggtcgacagcaacggaattcgagc

SEQ ID NO: 402 - DNA, 1042 bp, Zea mays
  Clone ID: TF_ZmC484_74
tgtcgccgcgtgcaccatcggcggggcgccggagcgctaccgcggagtgaggctccgcaagtggggcaagtgggcggcggagatccgcaacccgttcaccggcaagaggcagtggcttggcaccttcgacaccgctggtgcggcctccgcggcctacctgtccgcctcccgtagcttcgccgacgagaagcgccgccgccgcgggctgcccgtggccgcgtccacaccagacactccggcaagcggcagcaccccgacggcttcctcctcgtcgtccgcctcgaccgctccgttcgcgcacccgtcgccgtcgtccgtgcttgaaccgagcaaggaagcgcggaacacgcagtccccagaggcgacgcccgccccgccgtcggccgaatcagcgcagctgccggaggacccagagttctaccaggaccttctgcgcggcctgcagctgcccgacatcgaccctctggacttccgcgccgggctggacgccctggatctctccgatgcggacttcggcctggacgacgaacatgacctcctgctcggggacttcggggacgaggagatggagatcgacctcgacctcgacgacatcaacgacgtcttcccggagatgcccggctgtgacctcggccgcggcatggacgacttcctgcaaaccgttgatttctgcgtgtgaattgaaagggagtgtgcccttgatatgttagggttgtttggtttcataaacgagcccctgagagtgtgcttggaaaggggagatgagatatcttgggttttttccccgggcaagttggatctgctcgtgcccaggagatttcctctttgccgaacacaccaccattagcggccggagagaggtaattttggtaggttatattatgtttaaggtatagtgcctaagtgtttgctttgttatttggtaatgcttgtcaaagacattgtagtggacaagttcattgagctgttactgttaagcaatgaaaggggaaaaaataagtttcgtggtaaaaaaaaaaaaaaaaactcgaagagggggggc

SEQ ID NO: 403 - DNA, 1063 bp, Zea mays
  Clone ID: TF_ZmC484_77
tgtcgccgcgtgcaccagcggcggggcgccggagcgctaccgcggagtgaggctccgcaagtggggcaagtgggcggcggagatccgcaacccgttcaccggcaagaggcagtggcttggcaccttcgacaccgctggcgcggcctccgcggcctacctgtccgcctcccggagcttcgccgacgagaagcggcgccgccgcgggctgcccgtggccgcgtcctcagcagacactccggcaagcggcagcaccccgacggcttcctcctcgtcgtccgcctcgaccgctccattcgcgcacccgtcgccgtcgtccgtgcttgaaccgagcaaggaagcgcggaacacgcagtccccagaggcgacgcccgcccggccgtcgaccgactcagcgcagctgccggaggacccagagttctaccaggaccttctgcgcggcctgcagctgcccgacatcgacccgctggacttccgcgccgggctggacgctctggatctctccgatgcggacttcggcctggacgacgaacatgacctcctgctcggggacttcggggacgaggagatggagatcgacctcgacctcgacgacatcaacgacgtcttcccggagatgcccggctgcgacctcggccgcggcatggacgacttcctgcaaaccgttgatttctgcgtgtgaattaaaagggagtgtgcccttgatatgttagggttgtttggtttcataaacgagcccctgagagtgtgcttggaaaggggagatgagatatcttgggttttttccccgggcaagttggatctgctcgtgcccaggagatttcctctttgccgaacacaccaccattagcggccggagagaagaggtaattttggtaggttatattatgtttaaggtttaaggtatagtgcctaagtgtttgctttgttatttggtaattggtaatgcttgtcaaagacattgtagtggacaagttcattgagctgttactattaagcaatgaaagggaaaaaaataagtttcgtggtaaaaaaaaaaaaaaaaaaaaaaaaactcgaggggggg

SEQ ID NO: 404 - DNA, 399 bp, Zea mays
  Clone ID: TF_ZmC214275_2
gtcgtgcgcgcgcgccgccatctccgggcacgggaaggtgcccagccagatgcgcgacttcttgcggggctccctgatctccgacacccatttgccccacgcgcgcatgcggacgccgcggtacgccggggcggagctggagctggacccgccgtcgtctgagcgcggacgtttcttgccgccgcccgatgcggcggcggcggcggcggagggcgccgcgcgcgggctggtggacgtggagggtccggacgagcaggaggacgtgcacgaggtgtcggagctcggctcgctcattgccatatacactactatacgacaccgagctggaggctggagcagtcgatcgggtatgtgtgtatgatgatcgagcaagagatggagacagcccgggaattccgg

SEQ ID NO: 405 - DNA, 375 bp, Zea mays
  Clone ID: TF_LIB3117-035-P1-K1-G4
accagccatgcacgcagcgtagctagagctgacatgcatgcatactgcaccgcagagccgccggcccggaagcgggagcgcaagaccatgtaccgcggcatccggcgccgcccctggggcaagtgggcggcggagatccgggacccggccaagggcgcgcgcgtctggctcggcaccttcgccaccgccgaggccgccgagcgagcctacgaccgagccgcgcgccgtatacacggggacaaggccaaggtcaacttccccaacgaggacccgacggccgagtacgactacgactacgacggacactcccacgcccacgcccacgccggcggggaacaggggatgctcgccatgtacaacagcggaggcagggac

SEQ ID NO: 406 - DNA, 1111 bp, Zea mays
  Clone ID: TF_ZmC15341_1
aattcggcacgggccggcaccaaaaccacgcgctactacaccagcctagctagccctttcgccgtcgctgcggctcctgcccactgactcgtaggtttcgttgtttcgacaatgtgcggcggagccatcatcgccgacttcgtccccgccggcgcccggcgcccggcaacagacgacaccatgtccgcctccatcctctccggcgaggaccatccggagctgccgctgccgctgccggcgccggcgccggggcgcaagacggcgtaccgcgggatccggcgccgcccgtggggccggtgggcggcggagatccgcgacccgcggaagggcgcccgcgtgtggctcggcacctacgccaccccggaggacgcggcgcgcgcctacgacgtggcggcgcgcgagatccgcgggcccaaggccaagctcaacttcccgcccgccgtgggcggcggcggcggcgcgcgcgcgccggcgccggctgcggccaagaggcgccgcaagtccgcggcggccgaggagagctcggcctcgtctcctccggcggccgtcgtcgtggcgggcggcggggaggaggcgctgcgcgactgcatgtccgggctcgaggcgttcctggggctgcaggacgccgatgagggtggcggcgtcgaggcgtgggacgccgtgaggctcatgttggcgtaggccggagtacgccgtagcagggctgcaggggggcccagccccagccccagcgcgcgcgtgccgtcgctgtgaacggccgccgcagctgttttggatcgagtaataatattattagtagtataatgtttctccaagcagctaagataattgcaagccttgctgggtggtattactagcactgctatctaggagtatgtactagcaggatgggtttatctagcttgttgctaaacagaaaattaatctaagaaaacagagatatggtctgttaattgccggctctaactaatgcccggcgataatctgttaggctacctcagattgaccatctccatttcttattttaaactcattttcctcgtttattattttgaactccattatataaatgcagtctacatattgtacaaaaaaaaaaaaaaaaaaaaaa

SEQ ID NO: 407 - DNA, 1082 bp, Zea mays
  Clone ID: TF_ZmC15341_2
caaaaccacgcgctactacaccagcctagctagccctttcgccgtcgctgcggctcctgtctagtgactcgtagatttcgttgtttccgacaatgtgcggcggagccatcatcgccgacttcgtccccgccggcgcccggcgcccggcaacagacgacaccatgtccgcctccatcctctccggtactacgttgcgaggaccatccggagctgccgctgccggccccggggcgcaagacggcgtaccgcgggatccggcgccgcccctggggccggtgggcggcggagatccgcgacccgcggaagggcgcccgcgtgtggctcggcacctacgccaccccggaggacgcggcgcgcgcctacgacgtggcggcgcgcgagatccgcgggcccaaggccaagctcaacttcccgcccgccgtgggcggcggcggcggcggcgcgcgcgcgccggcgccggctgctgccaagaggcgccgcaagtccgcggcggccgaggcacgagggagagctcggcctcgtctcctccggcggcggcggcggcggccgtcgtggcgggcggcggggaggaggcgctgcgcgactgcatgtccgggctcgaggcgttcctggggctgcaggacgccgacgagggtggcggcgtcgaggcgtgggacgccgtggacctcatgttggcgtaggccgtacgccgtagcaggggggctctgggccccagccccagccccagcgcgcgcgtgccgtcgctgtgaacggccgccgcagctgttttggatcgagtaataatattattagtagtataatgtttctccaagcagctaagataattgcaagccttgctgggtggtattactagcactgctatctaggagtatgtactagcaggatgggtttatctagcttgttgctaaacagaaaattaatctaagaaaacagagatatggtctgttaattgccgggtctaactaatggctggcgataatctgttaggctacctcagattgaccatctctatttcttattataaactcattttcctcgtttattattttgaactccattatataaatgcagtcacatattgt

SEQ ID NO: 408 - DNA, 690 bp, Zea mays
  unsure (1)..(690): unsure at all n locations
  Clone ID: TF_LIB4767-027-Q2-K1-E2
ggaccctcgaggccggccgggcccgcctcgccgccagtcagattcaccaccggctcccctgacaaccgcgtccgcgctgcaccaccaccgttcatcgaggaggaggggggacggagaccacggacatggagagatctcaacggcagcagcagccgtctcctccgccaccgtcgccgtcctcctcctcgtcctccgtctccgcggacaccgtcctcgtcccgcccggnaaagaggcggagggcggcgacggccaaggccggcgccgagcctaataagaggatccgcaaggaccccgccgccgccgcggggaagagaagctccgtctacaggggagtcaccagtctacctgggggcgtatgacagcgaggaggcagctgctcgtgcctatgacctcgcagctctcaagtactggggtcctgagactctgctcaacttccctgtggaggattactccagcgagatgccggagatggaggccgtttcccgggaggagtacctggcctccctccgccgcaggagcagcggcttctccaggggcgtctccaagtacagaggcgtcgccaggcatcccacaacgggaggtgggaggcacggattgggcgagtctttgggaacaagtacctctacttgggaacatttgacactcaagaagaggcagccaaggccaatgaccttgcggccattgaatac

SEQ ID NO: 409 - DNA, 1434 bp, Zea mays
  Clone ID: TF_ZmC21952_1
cctcgaggccggccgggcacaaaaagacataagccagttgtagggaagggccaagggaaacttcaagatagtatggcgaagaactatcgagagcgccgcttaaagagggcgatgaagatagatgagggagaggacgactttgaagctgattaccaagcattctctaagaagtacgatgagaaggatgagtgccactataagttcatggctttattaccattcaagaatggtcttcctaatgtctcaccgccaacaaaagagaaagttggacttcattttgccatgaaagatgttgtgattagtcaaaaaccaaccaccaccaatgaaggtatcattgtaaggccgaagtgcaagcgaaagaccccatataggggcatccgccgacgcccttggggaaaatgggctgctgaaatccgcgatcctacaaagggtgttcgtgtttggttaggcacgtataaaacaccagaagatgcagctagagcatatgacgctgaggcccgcaagattaggggcaataaagcaaaggtgaatttccctaatgaaccaccaaacatggtgagcaatgcaccaaaactaattgttactgcaatgactacaatggctatcccagcagacaagttgaatgccaatgaattgatgtgccataaaaactactcaaatgaggattttttctcaatggtgaactttagtggaaacaatggtaactttatttctactgcggcctttggcttacaatgtatcaaaaagcctcgtgttccttatgacatcccaaggatgggtgagtgttcaaatcaaaacagaatgacatatggtttaagtaatggattgggcaatgaagctagtaggaacctgaatggatgctctttcttaccacaagctggcatgccaattttcattcaacctacttttgatggtccttcaaggatgataggaagaaatgatggcgtgattgttcctactttgactaatgcaacacccatggctggtgttgatgctgcgaaaaagatgaatcaacaacctattttccaagagatggaaagtgaagatattccttctattttgcaaggtgatgtcagtgaggacgtggcagctgagattagtatgtgggagttttatgacaacctattagataataaggaaaattgatggatcttgacatcatgcatggtccatatggcttctgtcttgatgatactagcaagtggttcgaagcatgcatgatggggatgtagtcgcaaatgacatattcgttttataatgtcaagtaaaatgcagccatttgttatccatgtgtatcagtttggactgtttatttatgctttgttgtaagcttacaggcaacggaacctgattgacattgtgggtgttattgtaatgtattgataattttcaaaaaaaaaaaaaaaaagggcgccgctcgcgttctagaactag

SEQ ID NO: 410 - DNA, 1228 bp, Zea mays
  Clone ID: TF_ZmC172_1
gtatcatacacaaccgtaagacaaggacgagagttcaagcgttcccacgcgtacggccaaacacacgcgaagaaaaggagatagagtacaggttacagacaggcagagagcaaagatgtgtggtggtgcgatcctcgccgagctcatcccgaccacgccggcgcgccgcggcggcgcggcgtggcccgccggcaagtgcaagcggcggaaggcgaacgacttcgaggccgcgttccgggagttcgacgaggactccgaggaggaggaggaggacgacgagggggtggtggagagcaagcccgccttcgtcgtccgcgcctcgtccgcggcgacgcagcccagggcgcgccaggagcagcggagccggcgccgggcgcccgaccagcagtacaggggcgtccggcgccgcccgtggggcaagtgggccgccgagatccgcgaccccgtcaagggcgtccgcgtctggctcggcaccttcccttccgccgaggccgccgcgcgcgcctacgaccacgccgcgcgccacatccgcgggcccagggccaagctcaacttcccctcctcctcctccgcctccgctgccggggcccccgccagccgcaagcgcgcccgcaccgccgacgccgacgccgtcatcgacctcgaggaacaagagcagcgtccggccgcggcggccctgaagcacgaggccgccgagtgctccggatccgacgcgctcccggacttctcgtggcaaggcgtgtcggcggcgtacgacgaggcctccgcgccgcgcccggccttcgacttcgaggcgcgcccggagagcgccgcggacgaggcgtcgccccgggcctccgactccgagtcggacgcgatgttcgactcgctcctcttcggcgaccagttcgccttcttcgacgccggcgcgtacgagtcgctggacagcctgttcagcgccgacgccgtgcagagcaacgccgccgccgcggcggaccaggacatgccgctgtggagcttcgacgacggctgcctcgtcgaggacaacctctcgttttaagcttcggcgactgttgctgtgtcttgagttttgtaaattacgatctgtttttttttttttgagtttctgctcatgtatatctgtatcgatggtgagctgaatgaaatcatccttctcaggaagtaaaacaaaaaaaaaaaaaaaaaaaaaaaaatgttctcgaggtcgacggtatcggcgagtcttgat

SEQ ID NO: 411 - DNA, 1565 bp, Zea mays
  unsure (1)..(1565): unsure at all n locations
  Clone ID: TF_ZmC8601_1
ccgggctggccgcttttttttttttttttttttggggaacagccgaacacagattgtttatacaacaataaaccatacaatagtagcaccaacagtagcagttcatcaaattacaactcctggacacagctagctagctgattttacaacatacatcatacggagcactactgcttgacaagcatctcctcacatcacaccgtgctgctctttacaacctgtagagcacagcacaccatctagcacaacaaaaacagctaccaggacaacggacacctgaacggccgggggggtggggtcactgaccagtgtgacacgtaccggccaccaccggagaacgccggacacaaaaacgccggcttcccgtcggttgtggttctctcctcctccggagaaccaaaccctaaataacccgagatctacaactgactcaccagtgacaaggaccaaacgaatcggacggacatctacacagaaccaaccaacgaacggacggacggggattagcactaatgatccaactagtgcccgcgcaggatgtctaaaatcccatctgcgcgacggccgttaaccttctttaaccctcctcctgctgcacgacggcagtgtgggtaggatgggagccagccagccagccagccaacaaggggcgacgattaattggcgaggagggagtcccagtcgatctcgtacgacgggtacttggtgagcgcgaagccggcggcctcgtcccacggcgcctcgctgaagtccagctgctgcatctccggcaccgtcggcccgggcgaggcggacggcgacggggaccgggacgggcacgaggactcggtggcggactcgaggcaggacgaggtcgcgtcgtcggacgacggcgaggagcagcagttgctggtgggggcggacgacgacgcagcagctgcggcggaggctggcttcttggcgcccttcttggacgcggcgatgctctggcacaggctctggagcttggcgtcgacggaggcgtggagcgggccgcgggaggcggcgttgtcggggaagttgaggcgcgccgcgtcgccgcggaggcggtaggcggcctggtcgtaggccagcgccgcctcctcggcggtgtcgaaggtgccgagccagagccgggtgcggttgcgcgggagccggatctccgccacccacttgccccagtgccgctgccgcacgccgcggtacagcttctggccggcctcgaggtaccccatctgggaagggctcagctggcccgcctcgtcggccgcggcgaacgggtagttccctccgtaggaggaggcggcggcgacggcttggtggaaggagaacggcgacgaggggctaagtggctggtgcgggtggaggagcggactggatccgtgagcagaggcatcccggataaaaggctcgacgtgctctcatcagctcctcccctgacagatctatagtagcagccatctagactgtttttttttgttttttttgttttttttcctctctctctagcaaaccaagaacaaacgaaganactggcggaacccnacagccacagtaaaaaacagatc

SEQ ID NO: 412 - DNA, 1187 bp, Zea mays
  unsure (1)..(1187): unsure at all n locations
  Clone ID: TF_ZmC3662_1
caagccgcacgagaaggcaggcaggcaggcagagaggaaggaagaggaggaagaggaggagaagcgcgtggaggagcgggatgcggcgggcgaggctgccgccggtcccggtcccgacggcgccgggggacgcggggccggaggtgaagtaccgcggggtgaggcggcggccgtcggggcggtacgcggccgagatccgggacccggctaggaagaccccgatctggctgggcaccttcgactcggccgaggccgcggcccgcgcctacgacgccgcagccaggaccatccgcggcgccgccgcgcggaccaacttcccctccgcgcccacctccgccgcggtcgcgccgccgctgccactccccgcctcaaccgccgccgcggcgggtgcggcgacgtccagcctcagcagcgccgttgccgttcgatctgaacgtgccggacccggcggccgacgacatggactggcgctgcgacacgctgctccgcctctagccgccgcagggccgcaaccactcctccccagactggtgcccccaggatactcgctcgcttcgtgtggccgacgctgatccggcggaacggagcggagcaatgcgtgcgtgcgtaccccaccgccatgaagtgctatcgtgctattttgctattctctccatagaaattgataattttagtctctctcttttttttttaccactgccaagactcggtaattactctgtgataatgtgaataactcattatgtaatccgtggggagtggagggagcctggtctcgcgaaaccttcctgtctcctcctgctgtgtgtgtatctgtagcagcagcagcagcagcacgatgtaatactgtctgtcttgctgtaattctcaagagataatggaattaagagtgatttacagaaaaaaaaaaaaaaaaaaaaaaaaaaaaaaaaaaaaaaaaaaaaaaaaaaaaaaaaaaaaaaaaaaaggccgctcggaaaaaaaaacttccgtcgttcaatggggaaaaggggggttgaacctttaattgaaatttttttgctgggtttccgggcnaaaaaaaaaaaaaaaaaaanaccnnnaaccccggcggggaaaaaaatcttccctttttcattggccaaatgggggaaaaaacttttatagaaatttttttgtcgggttaccccccccgttcaaaattaaaa

SEQ ID NO: 413 - DNA, 537 bp, Zea mays
  unsure (1)..(537): unsure at all n locations
  Clone ID: TF_ZmC3662_2
agtggttggagtaggtcgccgaggaggaggaggaggacaaggcacaacaagccgcacgagaaggcaggcagggcagggcagggcagggcagaggggaattcgaaagaggggaggaggagaagaagcgcgtggaggagcgggatgcggcgggcgaggctgccgccggtcccagtcccgacggcgccgggggacgcggggccggaggtgaagtaccgcggggtgaggcggcggccgtcggggcggtacgcggccgagatccgggacccggccaggaagaccccgatctggctgggcacgttcgactcggccgaggccgcggcccgcgcctacgacgccgcagccaggaccatccgcggcgccgccgcgcggaccaacttcccctccgcgcccacctccgccgcggtcgcgccgccgccgccgctgccactccccgcgtcaaccgccgccgcggcgggcgcggcgacgtccagcctcagcagcaccgtggagtcctggagcggcggcggcggcggcggcgcgcccgccgggatccnccgc

SEQ ID NO: 414 - DNA, 1889 bp, Zea mays
  Clone ID: TF_21208780
gcacgagccgcctcccaactcccaagtcccacccccactccctcgctcaccagaggaactagcggccaggcaaagccgagccgcaaccgcgaagatcttgcgtggcctccttttcccagctcgtcactgtgccgctcgtgtccttcactcccggtccgcccaaccaataatccatcgatccatccaccaccaccaccccgctgcggcgatgtgcggcggcgccatcctctcgggtttcatcccgccgtccggggtggcggcggcggcggcggcggccaagaagcagcagcagcagcagcagcggtgccgtgtgactgcggacctgctatggccggggcccggcagtaagggagctccccaggacaaggaggaggacttcgaggccgacttccgcgagttcgagcgcggcctcggcgaggatgacgtggacagcgccggcgaaggcggcgaccccgaggtccaggagcttcctccgccggagccgacgaggtttgccttcgccaccgcggccaaggcagcagttgatggcgtgatgacgacgactccaaaggatgtgcaaggagatagagcagtaaaaaagcgcggccggaagaaccagtacaggggaatcaggcagcggccttggggcaaatgggcagctgagatcagggaccccaacaagggcgtccgcgtctggctcggaacctacaacaccgccgaggaggcagctagggcatacgacgccgaagctcgcaagatccgcggcaagaaagcgaaggtgaatttccccgatgacgacgcgacaggcactcgtcacaggccaacgaacgccgcgaacgcagcgaggctagtagctccacccccacccccgaaggcctgcgccgatgagatgtttaacaacctgaagaacgacgacggcgacaacaacaacaacgatgatctgtttgcgatgtttgcgttcggtgacaataagaagaaggttcctgcagcgaagccagccgccgacgaggttggcagtggcagtggcagcttcctcgtccctgcgcctgcggtggcggcggtgcccggtaacaagaggaggtcgtccgcgaccaacattatgctctccgtctccgacgaccagagcagcaactcctacggctccggctcctccgccgacttggtggggtcgtggtcgtgggacgacgacgacgccgccgccgccgccgccgccgccgccatgacctcggtcttcgctcccgataacgccgtgctgccggcggcgtcttactcttacatgcaaggcggagcgccgaagagaatgaggaggagctacggcggcgcgccgcccagcctcgcacatgacgcggccatgcctggctttggccttgataaagtgagctaccactaccaggcgttgcctccttattacgtcgggagcagcaacgcgtcggtgggcaacctcggtcttctgcagcaggctgatgatgctccagctccacaggatggggcgagcgccggggatatctggagcctcgacgagctgctcatgctggcagcagctggtgcttattgagaaccgcaagaaaaaaaaaatgtgttggcgctgctagctggagacgagacgagagggcgagaggcagttgcatccgccatccgctatcgttttgtctctcctatatctagtatatatatgcttctggcagtcgaactctatggcaatgcgtgtgtatagtgtgttgctgccgtctatgattggaagcgagctcgagactggttcaataattcacctttgcctaccgtcgtaccgccggcctgctggactgtagtgtgcgtactgcatatatatgccatagttatgtatgcactcctcctatatatactatatattattatgaaaaaaaaaaaaaaaaaaactcgagacctcgtgc

SEQ ID NO: 415 - DNA, 663 bp, Zea mays
  unsure (1)..(663): unsure at all n locations
  Clone ID: TF_LIB5023-004-R1-XP1-G5
gccggccgggccgggatcgaactgcttgcttcagccttcaatctctgcgctgtgctgtgccccgcgaattgtttacgctcgctctcgagatctctctctagattctctcggctaccctcttctctctgtctcctgcaagaacccatggcggctacgacgatagattggcacgcccgcaacaacgccgcgcttcccgccgccatgtatggcgtggccgtgccggacagcaaggagctcgtgcgcgcgcttattgctccgccgatgcagcaggccccgaccatctcgttcgcgtacccctgctccggcgtggagcagcagagcgcggcgggctcgtttctgggtgccggcggtggtggcctgacccccgcgcagatcctccaggtgcagtcgcggctccagttcctgcgccggccggcgggggccgcggtcgccacccagccgatgaagcggcagggcgtgccgctgccgcaggcgccggcggtgtccaagctgtaccgcggcgtccggcagcggcattgggggaagtggggtggcgnagatccgcctgccgcgaaaccgcacccgcctctggctcggcaccttcgacaccgccgaggaagctgcgctcgcctacgacagcgccgcgttccgcctccgcgggggactcgccaggctcaacttccc

SEQ ID NO: 416 - DNA, 543 bp, Zea mays
  Clone ID: TF_ZmC27868_1
gacccacgcgtccgcccacgcgtccgagcagcgaaggtagccacaacatccactcgactgactactcgagagctaagaaactgttcaacaggtgatccagaacaagatgtgtccaaccaagaaggagatgagtgccgagtcgtcgggctcggcgagcagctggacttcggcctcgacctcgacctcgccggagcaccagaccgtgtggacgtcgccgccgaagcggcccgcggggcggaccaagttccgcgagacgcggcaccccgtgttccgtggcgtccggcgccgcggcagcgccgggcggtgggtgtgcgaggtgcgcgtgcccgggaggcgcgggtgcaggctctggctcggcacgttcgacgccgccgaggccgccgcgcgcgcgcacgacgccgccatgctcgccatcgccggcgcgagcgcgtgcctcaacttcgccgactccgcgtggctgctcgcggtccccgcctcgtacgccagccttgccgaggtccgccgtgcggtcgccgaggccgtggaggactttcagcgccgcga

SEQ ID NO: 417 - DNA, 523 bp, Zea mays
  Clone ID: TF_ZmC28357_4
ataccgccgaaccaatccaacgtccgcagaaccacactcccgtcgagggggaggcgtcgacttcccatagtttccattccacttcgatcctaatcctatcctccccaaacactccaccaagaaccttttcccccctccaatagtccaagttactcggaggaatccatgtgcggcggtgcaatcatcttggactacatcccggcgcggcgccgggtgtccgccgccgacttctggcctgactccgaagccgacgccgaggactccgactcgcacgcccctgaccctgagagagccccgcgcccgcgcgggaaggcgaagcgtgggcgcaagaaccagtaccgcggcatccggcagcggccgtggggcaagtgggcggcggagatccgcgaccccgtgaagggcgtgcgcgtctggctcggtacctaccccaccgccgtggccgccgcgcgcgcgtacgaccgcgctgtcaggcgcatctggggcgcctatgctgaggtcttcttccccgtcgggacctcctcct

SEQ ID NO: 418 - DNA, 740 bp, Zea mays
  unsure (1)..(740): unsure at all n locations
  Clone ID: TF_LIB4763-018-R1-K2-F11
taccaatctaccacctccccaactccgcctcccaactcccaagtcccacccccactccctcgctcaccagaggaactagcggccaggcaaagccgagccgcaaccgcgaagatcttgcgtggcctccttttcccagctcgtcactgtgccgctcgtgtccttcactcccggtccgcccaaccaataatccatcgatccatccaccaccaccaccccgctgcggcgatgtgcggcggcgccatcctctcgggtttcatcccgccgtccggggtggcggcggcggcggcggcggcggccaagaagaagcagcagcagcggtgccgtgtgactgcggacctgctatggccggggcccggcagtaagggagctccccaggacaaggaggaggacttcgaggccgacttccgcgagttcgagcgcggcctcggcgaggatgacgtggacagcgccggcgaaggcggcgaccccgaggtccaggagcttcctccgccggagccgacgaggtttgccttcgccaccgcggccaaggcagcagttgatggcgtgatgacgacgactccaaaggatgtgcaaggagatagagcagtaaaaaagcgcggccggaaggggaccccaacaagggcgtncgcgtctggctcggaacctacaacaccgccgaggaggcagctagggcatacgacgccgaagctcgcaagatccgcgggaagaaagcgaaggggaatttccccgatgacgacgcg

SEQ ID NO: 419 - DNA, 346 bp, Zea mays
  Clone ID: TF_LIB3356-035-Q5-K1-A6
ccaagttccgcggcgtccggaggcggccgtggggcaagttcgccgcggagatccgtgacccgtggcgcggcgtgcgcgtgtggctcggcaccttcgacaccgcggaggaggccgcccgcgtctacgacaccgccgccatccagctccgcggggccaacgccaccaccaacttctccgccgccgctaactccggctccagggccggccagcgggacccggcgacccccggctacgagtccggcacggagtcctcgccggcggcgtcgtcgccgacgtccgtgctccgcaaggtcccctccctgtcctccctcgccgaggacgactcctgcgcggccccgtgcgagcc

SEQ ID NO: 420 - DNA, 515 bp, Zea mays
  Clone ID: TF_ZmC103_1
ccggccgggaccggaagcggggcaagacagggctacagcctacacgagcacggggaccggggaggagaggaggaaccgaagcggaaaagaagatcaaaaaatcggggagaaaccagaactggagagaagaaaataaataaatttatggccaaaccctagccgagacccgccccgcttgcgctctccgccgagcgccccaccccctctccgtccgcgatgcgccgggcgaagccgccgccgcagcagccctcgccgtcgccggagattcggtaccgcggcgtgcggaggcggccgtcggggcgctacgccgccgagatccgggacccggccaagaagaccccgatctggctcggcacctacgactgcgccgaggccgccgcgcacgcctacgacgccgctgcccgatctctccgcgggcccaccgcccgcaccaacttccccagcgctgcggtccgtgcgccgcggcacagggctccctccgcctccgccgcagctcccacggcgccggcggccgc

SEQ ID NO: 421 - DNA, 730 bp, Zea mays
  Clone ID: TF_LIB4978-024-A1-K1-G5
atcttctcttgctgtttgcctgtgcccctctccctccccccagcatgatgcccgtagcccccctcccccggtgccatggtgccctcgcctccgcccccgagcattgtccggtcccgtcccccggccctcgcccgagatcgtcgccgagcgcccacccctcattcccgtaccctcgcccaagatcgcggatctacgcccgatgtgggcgtggggctgcgtccgagatcgcggatctacgcccgatgtgccctcgcccgagatctcccctcgccggtcccgcagccgcgtcccggcggcgctcatcgtgttcgcgctcgggctggtgctctgcttcgtgcgtgacccatcgattctgtagggccttcgcttcgggccgacgcctctacagctcgtcgggatcacctgggacgatttcaagatcgggttctgtgtatctaggtggacatgataaagaagagaaagctgccagggcttacgatttagctgctctcaagtactggggaactacaacgactacaaattttccaatcagcaactatgagaaggacctagaagagatgaataatatgtcacgacaagaatatgttgtgtcacttagaaggcacgcgcggtcaaaatcaagatttcatgaaaagcagtggattttctcgtggtgcatcgatttaccaaggtgttaccagattagcagcctcattgccttatggtggaatgaactctgggtcgctctctc

SEQ ID NO: 422 - DNA, 532 bp, Zea mays
  Clone ID: TF_LIB3060-069-Q1-N6-H3
gtgcagggtgacgcctctgtacctggagctgcctctcgagaagccggtgctctgacggcgcaggacgtgcacgaactcctccttggacaggctccccatctgcttcatgtcgtcctcgtagtcgctgaggttgaagttgatgtcggcgtcgacgccgcggaacttgatcgccgcccggtcgtacgccctgcgagttccaggagccagagactcgttaatcaatcaattcggtcagagactcacatgacgaagaattctgggcgtccagtccagtgcgtgccttgcagcggcgtgagcggtgtcgaatccacctaggtacacctgcttgccgcaatcccagatgtgggactcccagcggcctgtgcggcggtagaaggtgacgccgcggtactgcgagctgcgggagcgcgggccgcggcggctcttcttggccggcggcggcgcggcgtgtgggtgcggcacgatcctggggcccggcgcctgttgctgctgcaggtcggcgcggaagaagccgagctcggcccaatgccgc

SEQ ID NO: 423 - DNA, 506 bp, Zea mays
  Clone ID: TF_18649690
cgttgctgtcgggtgaagaacccaagcagcaatggcgttctcacggcggcggccgccttttccgacagcaaggccatgcgggagagcggcaaggcggcggcggcgaggccgtacaagggggtgcggatgcggagctgggggtcgtgggtgtcggagatcagggcgcccaaccagaagcgccggatctggctcggctcctacgccactcccgaggccgcggcgcgcgcctacgacgccgcgctgctgtgcctcaagggctccgacgccgtcctcaacttcccttcctcgtccgcgtcctcgactcaccggcgtgctgatgacagcagcggcggccgcccggacgacgacgacccgggtgccagcggcggcatgtcgccgaggtccatccagcgcgccgcggccgcggctgccgcggcgttcggcgacgccgccggcatcggcgccagcgcgacgacgacgccgacgcctgcctcgctgtcgacgcagggcagcaccgatcacgccca

SEQ ID NO: 424 - DNA, 933 bp, Zea mays
  Clone ID: TF_ZmC653806_1
ctcgagatggagctccacttccaagcgcagccaccagtgttccagctcgagaactacagcagcagcagcagctactactactaccagcagcaagaggcggcggctcaggccaagccgtccaagccacggggccggaagaagggcagcaacaaccacagcaagttcgtcggcgtccggcagcgcccgtcgggccggtgggtggcggagatcaaggacaccacgcagaagatccgcatgtggctcggcaccttcgagaccgccgaggccgcggccaaggcctacgacgaggccgcccgcctcctccgcggcaccgacgcccgcaccaacttcgcgccgcgcatctctcccgactgcccgctcgccgtccgcatccgcggactcctccaccacaagaagatcaagaaggccaaggccgccgccgcagccgccaagcagcaggcgtcgtcgagctcccctgcatccaccacaagcaacagcaacagcaatagtcatagcacgaatagtgctcgtggtggtggctctagcatcaccaccaccaccaccagcagcagcagcagctccagctccagcagcgcagtcagctgcgacgacgacatggccacgcagggcggcggcaccggcgcactggacgccggcgaggtgtaccggccggggttcgccaccgcgggcaccgaggaggagttcgactcttggatgttcgactcggcgttcccggcgctggacagcttcgcggccgtcgacagcgccgtcccagctgctggcaccacggaggaaccgggcgccgagatggccgagttcgagcggatcaaggtggagcggcgcatctcggcgtcgctgtacgccatgaacggcctgcaggagtacttcgaccgggtgctcgacgcctccgcctgcgactcgctctgggacctgtctccgctctgccaccattag

SEQ ID NO: 425 - DNA, 406 bp, Zea mays
  Clone ID: TF_ZmC25962_2
gagctactagtcggcggccgcagcagtgaagatggaggcggagcaggcggcgatggcgagcgcggctgcgccgcagctggggtcggcgcaccagcaccagcaccagcaccagcagatgcagccgcggcggcagtaccgcggcgtgcgcatgcgcaagtggggcaagtgggtggcggagatccgggagccgcacaagcgcacgcgcatctggctggggtcctacgccacggccgtggcggcggcgcgcgcctacgacacggccgtgttctacctgcgcggccggtcggcgcggctcaactttcccgacgagatcccgtcgctggcgccgtcggagggcgagggcgacggcgacggcggagagcccgcgcgcgaccccgtcgacagcggcggctgtggcacgcttgcc

SEQ ID NO: 426 - DNA, 936 bp, Zea mays
  Clone ID: TF_ZmC3836_1
tcgcgggacgacgcacgcgtccggcgagatcgaggcagtgcgcacgccgtgcagccgtgcaggcctctcctccactcaaccgcgcgtcatggccatgttgcgcgagcatctcgacctcatccgcgctcacctcctcgacgacaaccacgacgccgtcagctccgatgactcggcgccatcgccatccccatcgccgccggggcgtaggccgctgccagcgctttccgtctcgctgcccccgaggccggcagtcgtcctgcagcagcagcacctgagggcggcggcgccgccgttgcagattcctcagcaggagcagcactgctgcccggaacccgaggaggacgatttccggcggtaccgcggcgtgcggcagcggccgtggggcaagtacgcggccgagattcgggacccggcgcggaagggcgcgcgcgtgtggctgggcacctacgacaccgccgtggaggccgctcgtgcctacgaccgcgccgcgttccgcctgcgcgggtccaaggccatcctcaacttccctaacgaggtcgcgttaagcaccgctgcatggtgggcgacgcctgctcctcctcctcagcccagcgcgaccgtggccggtaacaagagggcgaggtcgccgcaggagcaggacgctaggtgcatggttagggaggtgaagaaggagcggattcaggagcccgcaagcggaggggcggactacttctgggaggatgagtcgctgaagggggcgatctgcagcctgccgccgctctcaccgttgtcgccgcacccgcacctggccgtgccgcagctctacgtcagctgactgcctgacttgatgtcgtagcaagacagggacggtggtcttactcttacctgatgatagtcttctgagttctttgatatgctagaggagtatagctccaaatattctttcgttctttattt

SEQ ID NO: 427 - DNA, 1357 bp, Zea mays
  Clone ID: TF_ZmC5658_1
gttgatacatactaccttccctttccagcctcggctccgtccgtccccaatctcccctttcgtcttctcttcccgctcccgtcccgaaattagcccaccgattagcttgcttgccctagcagatcgaagccgtagccctagccgaggagcgcccatggccgctgcgatcgtggcctgaggcggcggggctcttcccatggggtgaggggatggaccctagcctgaaggaggaggtgatgaaggcggtggaggaggcgaggtccgcggcggcgccgcggtgccgggtggtgcggatcatcgtgcacgacgaggacgccaccgactcgtcttccagcgacgacgagggagaggaggcgggggagcgcgccgcggcgcacccggccgcggcgccggcggggagcgtgaagcgcagccgcgtgctgctccagtccgctgggtgcggggcggaggaggacggcgagggggccaggttcacgggcgtgcggcggcggccgtggggccggtgggcggcggagattcgcgacccgctgctccgccgccgcgtctggctcggcactttcgacaccgccgaggaggccgcggcggcctacgtcgcagcgcgcctccgcatccgcgggcccagcaactcgctccctccgcccgagcaccgcccggccttgcccccacgtcccccgccgccacctcagcagcgggagaagaagctgccgctgccgccgccgccgccgcctctccttccgcttccgccgaagaagcagcagtatccgccaccgcctctgcttccgccgaagaagcagctgtatccgccaccgcttcccctcctcccaccaaagaagcagcagcagcatcaccatcacccgtcaccgcctctgcccacgcttccgccgaagaagcggctgccgtcgccgcctctgctgcgcgaaagcaagaagcagtgcgtcgcctcctccccagcggagccgcgtttcatgccgctgccggtgtgggcgctgatgtccggctccgggaagcgcaagaagcggtcgggctgtggcgggcgcgtccccgccctccacacccccgccgccgaggagacggggcgcgcctgagaaggctgagacgactgggacctccctgcttctggtatccatcccctaccgcttcttgatcatgccatgccaatctgaattgccgctcaatcggtgctgatgtgaagagcctgtaacctctctgattcatgaactgatgaatttgtgtacatatgctgctgctgctgctgctggaaccgcagcgggtgatgaactgatctgtaaaacccgacgtattattcatatgtaataaataagtatctgttgacaatttcaaaaaaaaaaaagcggcc

SEQ ID NO: 428 - DNA, 1042 bp, Zea mays
  Clone ID: TF_ZmC8439_3
ccggccgggccgggtgtcttccttcccctgaaaacccacacgctcgcgcctccgcgaagaaaaacaccgaggcccatggcgccgagaacgtcagagagagcgatgacatcggcggccgcggggctcgcgcgtggcgccggcccgcactacagaggcgtcaggaagcggccgtggggccggtacgccgcggagatccgcgacccggccaagaagagccgcgtgtggctcggcacgttcgacacgcccgaggacgccgcgcgggcctacgacgccgccgcgcgcgagtaccgcggcgccaaggccaagaccaacttctccttccctgcgtgcctgccgctcgccgccgcggacgtggccggcgcctgccggagcggcaacagcagcagcaccaccaccaccaccaccgtcgactccttcggcggcgacgtgcaggcgccgcccatgcaggccatgccgctcccaccgtccttctgcgccagcggcgccgtacgcttccctttcagcagctaccccgtgacgcacccgtattacttcttcgggcaggccgcagcagggtgccatatgctgaagctgccaccgacgacggtgactgtggctcagagcgactcacactcctcgtcggtcgcctctctgtcggcgtcgccgtcgccgtcgccgccggccggcgtgtcagcgacgagatccgccgcgtttgatctcgacctaaactgcccaccgccggccgaggcggaggcatagtcgccggagttttgctgaatgactgcctgtagtttctttcgtcttttacccgtagagagaaaatcggtaggcttagggcccctttgtattcacacggtgtcacgggcacacccacctccgaactctggtactctgatctttagagtgaaactacgaacatgtggtttaaatagttcaaagttaactctatgatttatggttcaaagttaactctatgatttatagccgtttctcgctgttgcagatgttcgtacttgtacaactataatctataaatacaaaatactatagaagcattagttgg

SEQ ID NO: 429 - DNA, 1524 bp, Zea mays
  Clone ID: TF_ZmC3465_6
aaaaggtccggttcaagaggctcttctgttgggtttttttattatccttaagagaagcttgttcttgggttagggagtttgggttctcacctcataacacctctcctaggaggaacagagatccagagaaccttttttctcttctggatccttgccgccttttggccttcgaaagggttgttttgcaataccctctctctgtttttttcttcttcgcacaaacccacctcgtttctctacttttattgaggaacagagctggttttccaaaacaaattctgctttgattttctataaagaaaacctctcagcctctttcttctagctccatccaagctttagtcctaatggccgcagccatcgacatgcacaagaacaccaataccaccgcacatccatctccacggtgaggcttgagcgatccgagcaaaaaaaatcatgcgcgacgcagcgacgcagctacgccacctcgcctcttcccactcccgccgccgcctcctcctcgcagcttccgccgctctactcgtcgccttatgcggcgccgtgcatggccggtcagatgggcctgaaccagctcggcccggcccagatccagcagatccaggcccagttcatgttccagcagcagcagcagcagcagaggggcctgcacgcggcgttcctgggcccgcgggcgcagccgatgaagcagtcagggtcgccgtcgccgccgccgccgctggcgccggcgcagtcgaagctgtaccgcggcgtgcggcagcgccactggggcaagtgggtggcggagatccggctcccgaagaaccgcacgcggctgtggctcggcaccttcgacaccgtggaggacgcggcgctcgcctacgacaaggcggtcttccgtctccgcggcgacacggtgcgcctcaacttcccggtcctccggcgcggcggcgcgcacctcgccggcccgttgcacgcctccgtggacgccaagctgaccggcatctgccagtccctggcggagtccaagtaacggcggctcctccggcgacgagtcggccgggtcccccccggactcccccaagtgctcggcgtcggcgtcgacggagggggaggaggagtcgggctccgccggctcccctccttccccgacgctggcgccgcccgtgccggagatggcgaagctggacttcaccgaggcgccgtgggacgagacggagaccttccacctgcgcaagtacccgtcctgggagatcgactgggattccatcctctcgtgaacgatcaactacaactgctatagtagtagcagcagcaagattcagtcagtgtcagctcaatggtagctctgtgtaattttcgatttggggtttgcagtggcggtggctcgatggcattttagacatcggccatggcggctgcgagtagcaatgagtaaactagtagctagtacatcgtcgtccagtgttgtgatgcagcagtaagtatgtgctaatctcctggttgagctgccggttgttttttctcacggcacggccagtcgag

SEQ ID NO: 430 - DNA, 1598 bp, Zea mays
  Clone ID: TF_ZmC660_2
ggtaccctcgggttcggccgggagtccactccaccaccgttcatgcatgaccatggagagatctcaaccgcagcaccagcagtctcctccgtcgccgtcgtcctcctcgtcctgcgtctccgcggacaccgtcctcgtccctccgggaaagaggcggcggagggcggcgacagccaaggccaataagagggcccgcaaggacccctctgatcctcctcccgccgccggggagaggagctccgtatacagaggagtcaccaggcacaggtggacgggcaggttcgaggcgcatctctgggacaagcactacctcgccgcgctccacaacaagaagaaaggcaggcaagtctatctgggggcgtacgacggcgaggaggcagcggctcgtgcctatgaccttgcagctctcaagtactggggtcctgaggctctgctcaacttccctgtggaggattactccagcgagatgccggagatggaggcagcgtcccgggaggagtacctggcctccctccgccgcaggagcagcggcttctccaggggggtctccaagtacagaggcgtcgccaggcatcaccacgacgggagatgggaggcacggatcgggcgagttttagggaacaagtacctctacttgggaacattcgacactcaagaagaggcagccaaggcctatgatcttgcggccatcgaataccgaggtgccaatgctgtaaccaacttcgacatcagctgctacctggaccacccactgttcctggcgcagctccagcaggagcagccacaggtggtgccagcgctcgaccaagaacctcaggctgatcagagagaacctgaaaccacagcccaagagcctgtgtcaagccaagccaagacaccggcggatgacaatgcagagcctgatgacatcgcggagcccctcatcacggtcgacaacagcgtcgaggagagcttatggagtccttgcatggattatgagctagacaccatgtcgagatctaactttggcagctcgatcaacctgagcgagtggttcactgacgcagacttcgacagcgacttgggatgcctgttcgacgggcgctctgcagttgatggaggaagcaagggtggcgtaggtgtggcggatttcagtttgtttgaagcaggtgatggtcagctgaaggatgttctttcggatatggaagaggggatacaacctccaacgataatcagtgtgtgcaattgattctgagacctatgcgtggcgtgcgacaagtgtcctgtctttgggtatacttggtttgtccaatgccacggtgccactgctgcgagtcagctgaacttcttgtagaaagcacatggcagcttggcattagacaagtgtgttggtgttccttaattctttggatatgctttaggcattgactaaccttaagggttcgtcactgtctcgcttagcttagattagactaatcacatccttgaatctgaagtagttgtgcagtatcacagtttcacatggcaattctgccaatgcagcatagatttgttcgtttgaacagctgtaactgtaaccctatagctccagattaaggaacagtttgtttttcatccat

SEQ ID NO: 431 - DNA, 1933 bp, Zea mays
  unsure (1)..(1933): unsure at all n locations
  Clone ID: TF_ZmC3465_1
nnnnnnnnnnnnnnnnnnnnnnnnnnnnnnnnnnnnnnntttaacaacctaccaattgggtacctcgaggccggccgggagagaggcgcctcaactcaaccccacccccccacaagaacaacaagccacatcccatcccaactccacggtgaggtttgagcgatccgagcaaaaaaaatcaaccgaggcgcagcaacgcaggttcgttctctgaactctctggttcttttagcagcagggacgcgcagcacaagaaaggtccggttcaagaggctcttcttttgggtttattagaatcctcaaaggaagcgtgttcttgggttaggattttttttttctcacctcatcacacctctcctaggaggagcagagatccagagaaccttttttctcttctggattctcaccgcttcttttttttttctctgcacaaacacaccctcgtttctctacttttattgaggaacagggctgatttccaaactttttcctacccctgttttcataaacaagctccttttatttcttcccgttttaagttctgcccagcctcttcttctagctccatccaagctttctccatctagtagttccaatggccgcagccatagacatgtacaagtactgcaataccagcgcacaccttatcgcctcctcgtccccctcggatcaggagctcgcgaaagcactcgagccttttataacgagtgcttcctccccctaccatcgctactcgttggccccagattcttacatgcctacaccctcctcctacaccacctcgcctcttcccacccccacctcctcgcctttctcgcagcttccgccactctactcgtcgccttacgcggcttcgacggcgtcgggcgtggctgggccgatgggcctgaaccagctcggcccggcccagatccagcagatccaggcccagctcatgttccagcaccagcagcagaggggcctgcacgcggcgttcctgggcccgcgggcgcagccgatgaagcagtccgggtcgccgccggcgcagtcgaagctgtaccgcggcgtgcgccagcgccactggggcaagtgggtggcggagatccgcctccccaagaaccgcacgcggctgtggctcggcaccttcgacaccgccgagggcgcggcgctggcctacgacgaggcggccttccgcctccgcggcgacacggcgcgcctcaacttcccgtccctccgccgcggcggcggcgcgcgcctcgccggcccgctccacgcctccgtggacgccaagctcaccgccatctgccagtccctggcggggtccaagaacagctcgtccagcgacgagtcggccgcgtccctgccggactcccccaagtgctcagcgtcgacggagggggatgaggactcggcctccgccggctcccctccttccccgacgcaggcgccgcccgtgccggagatggcgaagctggacttcaccgaggcgccgtgggacgaaacggaggccttccacctgcgcaagtacccgtcctgggagatcgactgggattccatcctctcatgaacgatcaactacaactagtattttagtagtagtagcagcagcagcagcaaggttcagtcagtgatagctctgtgtaattttcgatttggggtttgcagctgcggtggatcgatggcattttagacatcggccatggcggctgtgttgtgatgcagaagtaaacgtacgtgctaatctcctggttgagctgccggttgttttttctcacggcacggccagtcgagaaagtcagtgtaatcccctgtcatgatctctctgttgcaacttaattaactcttctggcgtatgtatgtaaccatgtgtgttcatcttgaacgtatcgtgatgatgtgcgtctttttggtcaaaaaaaaaaaaaaaagtgtgcgcacttgtgatttgtgatct

SEQ ID NO: 432 - DNA, 1291 bp, Zea mays
  Clone ID: TF_ZmC74396_1
ctccagggaccagaactagggtttgcgaaatcgtgacgcgagcacttgaagattcgcgaaagacagcgcgaccgacccacggcgatggccaccgtccaccctcaatccccggcgggtcccacccatctcccgcaggaggagcgacacggggacgccccggtaccgcccgccgtctccggcgaacccgccgccgcagcggaggcgggcggcgagatcgccgcgctcgacaagcagctcgccgtcgtcggcggcggcgaggagaggaggccggccggggccggggccggggccccagcgcaggcgggggagggaagctggtggcggaggccatgcgcaagtacgctgccccgcggtcgtcgcgcttccacggcgtcaccaggctcaagtggagcggcaagtacgaggcgcacctttgggacaacaccagccaggtcgaaggccggaagcgcatgtggtcgcacgtgtacttaggcagctatgtcgatgaagagcaggctgcaaaggcacatgatttggctgcccttaaatattggggcacagggccaaacaccaaactgaacttcaatatttctgattatgagaaagaaattgaggttatgaagaccatgtcccaagatgaatttgtggcctacataaggagacaaagcagttgtttctcaagaggtacttcatcataccggggtgtaaccagacggaaggatggtaaatggcaagcaagaattggtaggatcggtgagagtagagacaccaaagacatttaccttgggacctttgaaactgaagaagaggcagcagaagcttatgacatcgcagcgatcgagcttcggggtgttcatgcagtcaccaactttgacattagtaattactgtgaagatggtttgagaaaattagaaggcccatcagaggtggctaagcttggaagtccgtcggaggttgtgaagctcgctgggcaatagatactagattagcaacgtgtaaattagtttctatttcgtttcttttgtcttcatattctctcccttttgtattcctggttttttttgccgttttgtgatttcctccttgccttattggcaagccagtatttacccgattcgaaaggacaatgtgatgttgtattttagcctcacagaaaggtattactaacctttgatgtcactgcagaagtcgacaccatgttagaaatttagttcattcgtcgatgagcatgtctagtgttattatataattgtaagctactgtttctaatgggggaggaatgaaaacagaacatgaacataagttgcattgt

SEQ ID NO: 433 - DNA, 933 bp, Zea mays
  Clone ID: TF_ZmC2532_1
tcgtccacctcgaacacaaactcaggcaaggcaaaaggaacccgcaccatccgaggctcaagcagggaagtgatcatcatcatcatcagaagaagatgtgcccaaccaagaaggggatgaccggagagccgagctcgccatgcagctcggcatcagcctcgaccttaccggagcaccaccagacggtgtggacgtcgccgccgaagcggccagcggggcggaccaagttccgggagacgcggcacccggtgttccgcggcgtccggcgccggggcagcgccgggcggtgggtgtgcgaggtgcgcgtgccggggaggcgcggctgcaggctctggctcggcaccttcgacacggccgaggcggcggcccgcgcgcacgacgccgccatgctcgccctcgccggcgcgggcgcctgctgcctcaacttcgccgactcggcctggctcctcgcggtcccggcctcgtgcgccagcctcgccgaggtccgccacgcggtcgcggacgccgtggacgacttcctgcgccatcagctggtcccggaggacgacgccctcgcggccacgccgtcgtcgccttccagcgaagacggcaacacctctgatggcggggagtcatcctctgattcctctccgcccaccggggcctcgccgttcgaatttgatgtgttcaacgacatgagctgggacctgcactacgcgagcttggcgcagggattgcttgtggagccaccgtccgcggtcacggcgttcatggacgaaggcttcgccgatgtgccgctctggagctactagagactgaaaatttccgtttctttccttggcctctggcgcctaattttggcagtgtaaaacggttacttattttggtaatgagatcgatcaagtttgcgaaacatgaaaacagaaaaaaaaaaaaaaaaaacccacgcggccg

SEQ ID NO: 434 - DNA, 1954 bp, Zea mays
  Clone ID: TF_ZmC6700_6
acctcgcctcctccgggctccggcccactccttccctccctcgctcaccgagagccagagccagtggggcagccaaagccgagccgcaaccgcaaagatctcgcgcggcctcctttccccagctcgcgtcactcactgtgccgctcgtgccatccaccctcggttcacccgacccaaccaacaatccatccgccaccagcaccccgctgcggcgatgtgcggcggcgccatcctctcgggtctcatcccgccgtccggggtgccggcggcggcagcggcggccaagaagaaacagcagcggcgtgcgacggcggacctgctgtggccggggcccggcaagaagggagcgccccgggaggaggacttcgaggccgacttccgcgagttcgagcgcggcctcggagaggatgacgtagacggggccggcgacgaggtccaggagcttgctctgccggagccggcgaggcttgccttcgccgccgcggttggggcgccgcgcactgcagttgacggcgtgatgactccaaaggatggtgaaggagacatgcctactaccgctaacaactcagcagcaaataagcgcaggcggaagaaccagtacaggggaatccggcggcggccctggggcaagtgggcggccgagatcagagaccccagcaagggcgtccgcgtctggctcggcacatacagcaccgccgaggaggcggccagggcgtacgacgccgaggctcgcaggatacgcgggatccatgtcaaggtcaatttcgccgtctgacgggctgctctcgacgacataaggcaacggctggtactggtagttcgtctcagggtcaaagccgcccggcatggccgcaccgtagccgtagctgctcctcgttctcttcgacaccggtccaccttgcgtgtaccatgctggctcttgtgacttggggtgggagtgggactgggacgatgacaccatgacctcagactacgcctcagtctttgctccagctgctcccagtaacgttgtgccagcatggtacacgcaaggtggaccggtgtcgaagagaacgaggagcagctacggctacggtgcggccatgccgggcggctttgaccctgagacgaactaccagtaccagccgttgccttatgtcgtcgagagcagcccgtcagacggcgcgtcgacggacgacatggactgccttcaaatgatgcgggctggtgatgttccacaggatggggcgagcagtggtggtggtggcggcgacggcggcgatatctggagccttgacgagctgctcatggccgctggcgcttactgagaaaagctatgtgcatcgcattcgcatgtgctagacggctacttgctgtgccgtgaatggagtgtttctcagcttcgttttgcttttaattttttgttatgccaggtctcctgcttgtgcttgtggtgatgatgcaggagagccatggtgggtactatgcttttgctgccagtggaactgtaagacaatgtttatatagtatctatactatgttggtgcgtcgatggttcatggttggttggaagcgagtttgagactgattcagtaatttaccttgtctaaaaaaaaaaaaaaaaaactcgagactagttctctcctcgtgcggagcaagcatgtgtatagggcatgcctgtgcagtggataatattgacacacctgtatttctctgcagcttgtttactgtgtaggtcttcggctattctcctagattgtgtgcctagaaggcattggccccattattagtactgatttgggtgtatatgtgactatgtcagctgttcacttattgctgtcctaattgttaagaagctatcatgcactagtgatttttcttagtttgtcataaaacaaaaaaaaaaaaaaaaagggcggccgccgactagtgagctcgtcgacccgggaattaattccggaccggtacctgcagg

SEQ ID NO: 435 - DNA, 1069 bp, Zea mays
  unsure (1)..(1069): unsure at all n locations
  Clone ID: TF_ZmC28197_2
cgggnccagcccttcttctacccccaaccctcccccaacaccacaccagcgcagcgcccgccctcacgtggccgactcccagctagcccctcacgcgctcgtcggcgccctgtcgagtcgagcccgcatctcgcccgatcgagagcgagcgcatccgcgcgccggggagagctttgctttcggtggtctgtaacgactcaacgacgacggcaggcggtagataaaggcgcgcgatgtgcgacgcggcgccgaggtacaggggcgtgcggaagcggccgtggggccggttcgcggcggagatccgggacccggcgaagcgcgcgcgcgtctggctcggcaccttcgactcggccgaggccgcggcgcgcgcctacgacgtggccgcgcgggccctgcgcggcccgctcgccaggaccaacttccccgcgctcgccaccacctcccgccgccccgcgcccacgtgcagctccggctccaccgtcgagtcctccagcgggccccgcgccggggaccccagggcaggcggcgcatcgcggccgtgctgctgcgaagccgcggcggcccccacggcaggcgccaccgccgtccaccgacgccgactgccacagcgactgcgcgtcgtcggcctccgtcgtggacgacggcgacgacgcgtccacggtccggtcgcgcgcgcgcccgtcgctcgatctcaacctcccggcgccgctcgacttggacggtggccacgacctcgggttctgcacggacctgcggctctgtctctgagcgatcggaatcggatccacggacgaggcggattctgctttgacttgtcgtgaacttgtagcagtagtgccatgtactacgcgatacgaatggcaatagaattggatgatggttccttttctttaacgctctccggattcattcagaggtcagtcagatcgtcgagagtttcagcctttttctcatgtcttgatctgatttgtatcttgctatcattctgtatgtactttgtacaccagaaaacatctaaaagggagatgttgacgaactaacacgaatctctaccgcaattctgagtttt

SEQ ID NO: 436 - DNA, 1719 bp, Zea mays
  unsure (1)..(1719): unsure at all n locations
  Clone ID: TF_ZmC660_3
cggccgggcccgccttgccgccagtcagattcaccaccggttcccctgacaaccgcgtccgcgctgcaccaccaccgttcatcgaggaggaggggggacggagaccacggacatggagagatctcaacggcagtctcctccgccaccgtcgccgtcctcctcctcgtcctccgtctccgcggacaccgtcctcgttcctcccggaaagaggcggagggcggcgacggccaaggccggcgccgagcctaataagaggatccgcaaggaccccgccgccgccgccgcggggaagaggagctccgtctacaggggagtcaccaggttcgtccatctgcaaacaagcatccaatcaggtgctgctgagcagtcaacgcacgcacacagcctggctgccgagcagcaggcatccaatcacgtagttcgtcgaagaacggttggttggtgcggntcctccatctccttttttttcttcaatctttggcgatggtggtccccttggcgccggtgatctgcatgtgcctgtgatctactgctggctgcatcacctcaatagtctacctgggggcgtatgacagcgaggaggcagctgctcgtgcctatgacctcgcagctctcaagtactggggtcctgagactctgctcaacttccctgtggaggattactccagcgagatgccggagatggaggccgtgtcccgggaggagtacctggcctccctccgccgcaggagcagcggcttctccaggggcgtctccaagtacagaggcgtcgccaggcatcaccacaacgggaggtgggaggcacggattgggcgagtctttgggaacaagtacctctacttgggaacatttgacactcaagaagaggcagccaaggcctatgaccttgcggccattgaataccgtggcgtcaatgctgtaaccaacttcgacatcagctgctacctggaccacccgctgttcctggcacagctccaacaggagccacaggtggtgccggcactcaaccaagaacctcaacctgatcagagcgaaaccggaactacagagcaagagccggagtcaagcgaagccaagacaccggatggcagtgcagaacccgatgagaacgcggtgcctgacgacaccgcggagcccctcaccacagtcgacgacagcatcgaagagggcttatggagcccttgcatggattacgagctagacaccatgtcgagaccaaactttggcagctcaatcaatctgagcgagtggttcgctgacgcagacttcgactgcaacatcggatgcctgttcgatgggtgttctgcggctgacgaaggaagcaaggatggtgtaggtctggcagatttcagtctgtttgaggcaggtgatgtccagctgaaggatgttctttcggatatggaagaggggatacaacctccagcgatgatcagtgtgtgcaactaattctggaacccgaggaggttttcgctttccaggtgtcctgtcttgggtaatccttgatctgtctaatgccacagtgccactgcaccagagcagctgagaactttcttgtagaaagcccatggcagtttggcgttagacaagtgtgtcgatgttctttaattctttgaatttgcccctaggctgcttggctaacgttaagggtttgtcattgtctcacttagcctagattcaactaatcacatcctgaatctgaagtggttgtgcttgtgcagt

SEQ ID NO: 437 - DNA, 1433 bp, Zea mays
  Clone ID: TF_ZmC8413_1
cgctgagctcgatcgggctactacatccatggcgaggaagcgcaaggcctccgactccgccgcgggtatcgacggcgtccactcgctgccaccaccgctggctctggcttcaacagacgcgtgtgcatgggcatcgtcgggcggtactagcatggccgcggtggctgaggcggcggcggcgcagcagcagcggcggggaaggaagcggttcgtgggtgtgcggcagcggccgtcggggcggtgggtggcggagataaaggacaccatccagaagatccgcgtgtggctaggcaccttcgacacggccgaggaagccgcccgcgcctacgacgaggccgcgtgcctcctccgcggcgccaacacgcgcaccaacttctggccgcgcccctcgccggcttcctccgtcgcagtagccgccgccgcgcatcccgcgccgcctcctccgacgccgccgccgctgccggggctgatggggtctccaacgcagccgccggctcttccgtccaaggtcaccaacctcctgctcctgcggctcagggcccgcaacaaccagcagcagctcctcctcaacgccaccccagctcggcagcaggaggccgcggcggcggcgctgctgcaggggccgctgtgcgcggaaccgtacggcggcggcgaggagtgcgccttccaagtcgacgacttcttgagctacgactgcggcagcgacgagaacagctcacaagaaatagaggacgaggaagaagaggaggaagaggaggaggaggaggaggaggagctggacttccagttcatggaccagcagaccgcgtcgccgggcgcggggtgcgagggcgggctctgctcgccgttcgaggtggtggcggcagagctcggcggcgcggtggaggccggcggcggcgagccggccacggccgttcaggagctgatgatgagcaggatggactacgagaggaagatctcggcgtcgctctacgcgctcagcggcgtctcggagtgcatcaagatgcgcctcggcgccgccgccggtggccacgccgtgcgtgatcagctctccgggctgagggaggcgtgccggaagaagcagcgagagatagttcagcagcagcacgagcaggaaccatcaatggatacagcagaggatgtcaagccgcctcgtgaggagcgttcacccggtgacggcgccccggaggcgacaagctcgtcgtctgaggcgagccatggtgacagtgacggcgacatgctgctgtggagctccctggacttggctcccatctgttgaatgagacatggttgatcagcttagagattggttgagtttgttattcgtgtacttcgttacgttcatggcagatcactaagatcagaaagccctggtgataacgtgcttacccatttgttttatctaaggaattcctagtaaattatagttcatc

SEQ ID NO: 438 - DNA, 876 bp, Zea mays
  Clone ID: TF_ZmC313467_1
ccggccgggataaatccttcttgacctccgccctgctacaactacagtctgttctgttgaaatggaacagggcgatcctactcccgccgcctctgcctgcaactgcgaccctgccgccgcaccacccgcgtggatcccgctccacgaccacgacgacacgctactacagcagctcgacgcaattctcctcggcatggacgacgacgacgttgccaccgccgacgaccgctgctgctccggctggctctcctcctcgccctcgccctcgccctcgtcctcctccgaggcgacgacaacggcgtcaccaccgccaagcacgcgggagcagcacaggcggcacccggcgaaagacgacaccgccttggcgggaggaggcgacgagaagcgggcggtgacgacggcggccttcatcggggtgcggaagcggccgtggggtaagttcgcggccgagatccgcgactcgacgcgcaagggcgcccgcgtgtggctcggcaccttcgacacccccgaggccgccgcgctggcctacgaccaggccgccctggccgcgcgcggcgccgccgccgtgctcaacttccccgtggagcgcgtggtggagtcgctgggcgcgctcgcgctcgccggcgccggctcccccgtcctcgcgctgaagcgccggcactccaagcgcacgcgcaggcgcaagccctccgccgtggcgacgaccgacggcgacggcaaagacacgatgatgaagcagccgcgacggcgacagcctgctgcggcgccgcgccaatgctctgggctgcccggcgccgtgccttcgtacaccaccgtggcggcggtgccgccgccaccgcagcagcatgcgacggcgcgcggccagagccacacgcg

SEQ ID NO: 439 - DNA, 1200 bp, Zea mays
  Clone ID: TF_ZmC2464_1
cattgggtacctcgaggccggccggggcactcaagccctgcccatcagcacaaccaccaccaccgcctggccgtcgtcacacgctcgcctccttccatggcgcccaggaacgctctccccgccgccagcgccgtggccaacggcatggtgatggagccgaggttccgcggcgtccggaagcgcccgtggggcaggttcgcggcggagatccgggacccggccaggaaggcgcgcgtgtggctcggcaccttcgacaccgccgaggccgcggcgcgcgcctacgacgccgccgcgctccacttccgcgggcccaaggccaagaccaacttccccgtcgcgttcgccgcgcttccgccgccgccgccgcccaagaagccggccgccgtgaccgtgagccccagcagcagcagcaccgtggagtcctcctcctcctcctcctcccgggactcgcccgccacgccgcccagggccgcgtctccgtcccagcaggccccgtcgctcgacctcagcctaggcggcacaccggccatggtggccgcccagccgttcctcttcctggacccgaggctcgcggtgaccgtggccgtgccggcgcccgtgccctaccggccgaccgcggtcgccgccggtgccaacaagcatgctgcggcatcctgccgtgaagaggagcagagcgacaccgggtcgtcgtcatccgtggtggacgcctccccggcggtcggcgtggggttcgacctcaacatgccgccgccggccgaggtggcgtaggtggagcgcccggtgacacgtatagatgtccaaacgggccacccggcacggacccggcccgaacccgtttcggcccggtacgaatagggccgggccaggcacggcccgttgatgcttcgggccgggtcgggctggcccacgtgcctagagacatgcccaaacccggcacgcacagggaaaaatcgtgccgggccggcccgttggcccggtgggcctcaacggaccgggccggacactggcccgaaccaacagtagaacggtatataaatacatatatttaacataattaatcatatataataacatattatttatatatattaagacaacaaaatatttatgtatgcattttatatttatgtatgcattttatatatgtttggccgcgtatttagtatttacatactatgagagaattaaatgtatttacat

SEQ ID NO: 440 - DNA, 1409 bp, Zea mays
  Clone ID: TF_ZmC28197_1
gacgtagagatcgacgctaacatatagctcaagtttacagtacaatgatgataacatggggtcttttttcgacgctgttacttgtcttctccctcgactcactgcgctgcagctaatatcatatcactgcttatctggcaccatctacagttctacacgtagtagcgcggggactccgttccggccaaaaaaaatcctaaggaaacgcggccgaggacgagagtgggccagcggggtcgaggaggtaaagaaaactaatggcagcgaaggagggaggcagtggggaaggtgggaagcggctgcccaaagccacctccaccaccaggccttcttctacccccatcccaacgcccaggccacaccagcgctgcgagctctctcctcgtagtcgtagcggagtcccagcccctcacgccctcccgatcgcgctcgtcggcgccctgtcgactcgagcccgcttctgggccgatcgacagcgagaggagcgagcgcagcggcgcgccgaggagagctctttcggtgctgtataacgacgacgacagcaggcggcagataacacataaaggcgcgcgatgtgcgacgcggcggccgtggcggctccgcggtacaggggcgtgcggaagcggccgtggggccggttcgcggcggagatccgggacccggcgaagcgcgcgcgcgtctggctcggcaccttcgactccgccgaggccgcggcgcgcgcctacgacgtggccgcgcgggccctgcgcggcccgctcgccaggaccaacttccccgcgctcacctcccgccctcccgccgccccgcgcccacgtgcagctccggctccaccgtcgagtcctccagcgggccccgcgccggggaccccagggccagggcggcgcatcgcggccgtgctgctgcgaagccgcggcccccacggcaggcgccaccgccgcccaccgacgccgactgccacagcgactgcgcgtcgtcggcctccgtcgtggacgacggcgacgacgcgtccacggtccggtcgcgcgcgcgcccgtcgctcgatctcaacctcccggcgccgctcgacttggacggtggccacgacctcgggttctgctcggacctgcggctctgtctctgagcgatcggatccacggacgaggcggattctgctttgacttgtcgtgagcttgtagcagtagtgccatgtactacgcgatacgaatgacaaattggcaatagaattgaatgatggttcctttttgttatcgtcgagagtttccgtccttttttcctcatgtcttgatctgatttgtatctttgctctcattctgtatgtactttgtaccccagaaaacatctaaaagggagttgttgacgaaaaaacatctaaagagagatgttggcgaactaacacgaatctctaccgc

SEQ ID NO: 441 - DNA, 642 bp, Zea mays
  unsure (1)..(642): unsure at all n locations
  Clone ID: TF_ZmC7732_3
ntagtataggccacggccacctacgctacgctcaggcccgtatatggcccagtgcaactgggccgacggaaccaggccaccaatatcagtaggtctccaattatgaaatctccatatacacgtggtccatatatgctggtccaggatatacttggcctccaaatttgtgcattacgattggaattctaggctttgtttcttccttccgtagttccgccaatctcgctagctgaaacgacgccgatctgggagtgcgccgccaccacaaacgctccatcgccagtcatcacgccatcgatgccgagctactatggggccgtgatctcgccgttgccgacgctttgacctttgccgcacctggacgttgcaaggtcgacgcaacaagccaatcgagactgcaggaaggcgcggatatggctgggcaccttcgagacggcggaggacgcggcgcgcgcctacgacgaggcggcgcggatcatgtgcgggccccgcgcgcgcaccaacttccccgcggacgccaacggcccgccgccgtcgttcctctccgcggcgctcgtcgacaagctgcaccggttcaacctggcgtccgtgcaggccgcgcagcggcagaaagaggcggcggcggcggcggcggcagcagca

SEQ ID NO: 442 - DNA, 833 bp, Zea mays
  Clone ID: TF_LIB5116-007-A1-PF1-B3
ctccctcccccactccgcccgcaaagctcccccgcctcctccttcactgtgccgcccgtgcttcccctccgctccccgcgccgatccaaagcccagaccctcgccttgatccgcatctcgccatgtgcggcggagccatcctcgcgggcttcatcccgccgtcggcggccgccgcggcggccaaggcggcggcagccaagaagcagcagcagcagcagcagcagcagcagcgcagcgtgacggcggactcgctctggccgggcctgcggaagaagccggccgaagaggaggacttcgaggccgacttccgcgacttcgagcgggactccaacgacgacgacgacgcggtcgaggaggtccccccaccgccggccacggcgggcttcgccttcgccgccgcggccgaggtcgcgctcccggctccgacccgcctagatgctattcaacatgatggacctgctgccaaatcagtgaagcgcgttcggaagaatcagtacagagggatccgccagcgtccctgggggaaatgggcagctgaaatccgtgaccctagcaagggtgtccgggtttggctcgggacatacgacactgctgaggaggcagccagggcatatgacgctgaagcccgcaagatccgtggcaagaaggccaaggtcaattttcctgaggaggctccaactgttcagaagtccaccctgaagccaactgctgtgaaatcagcaaagctggctccacctccgaagacctgcgaggatgagcccttcaatcacctgagcagaggagacaatgatttgttcgcgatgtttgcccttcatgacaagaagggttctgca

SEQ ID NO: 443 - DNA, 708 bp, Zea mays
  Clone ID: TF_LIB4767-056-R1-K1-D10
cattgggacctcgagccggcgggagctaccatctacacctccccactccgcctcccaactcccaagtcccacccccactccctcgctcaccagaggaactagcggccaggcaaagccgagccgcaaccgcgaagatcttgcgtggcctccttttcccagctcgtcactgtgccgctcgtgtccttcactcccggtccgcccaaccaataatccatcgatccatccaccaccaccaccccgctgcggcgatgtgcggcggcggcggccaagaagaagcagcagcagcggtgccgtgtgactgcggacctgctatggccggggcccggcagtaagggagctccccaggacaaggaggaggacttcgaggccgacttccgcgagttcgagcgcggcctcggcgaggatgacgtggacagcgccggcgaaggcggcgaccccgaggtccaggagcttcctccgccggagccgacgaggtttgccttcgccaccgcggccaaggcagcagttgatggcgtgatgacgacgactccaaaggatgtgcaaggagatagagcagtaaaaaagcgcggccggaagaaccagtacaggggaatcaggcagcgcccttggggcaaatgggcagctgagatcagggaccccaacaagggcgtccgcgtctggctcggaacctacaacaccgcccgaggaagcagctagggcatacgacgc

SEQ ID NO: 444 - DNA, 685 bp, Zea mays
  unsure (1)..(685): unsure at all n locations
  Clone ID: TF_LIB4977-007-R1-K1-C8
gcttcgcacagcaccgcttccacggcccccgggtgcagtgtgcccccctgccttgtctcgtagctctctaagaaagagccatggaagctgacgcactactccatgcgcccatgacttcctcttcctcctcttcttcctcctcctccgactccgtcggcggctcgtgcgtcgtcaatggcgcgcaggagctaccgtccaataccggcaagccgcacaagaacgtgaaacggaagagaaccgcgtccccgtccgctgctccaggtggcggcgtggcgccggcgccgcccgaggccgccatagcggacgacgactgcggcggccggcggcgcaagagggggagcgccggcaccaggcacccgacgttccgcggcgtgcgcatgcgcgtctggggcaagtgggtgtccgagatcagggagccgcgcaagaagtcgcgcatctggctcggcacgttcccgaccgccgagatggccgcgcgcgcccacgacgtggcggcgcttgccatcaagggccgcggcgcgcacctcaacttcccgcacctcgcgcacgacctccctcgcccggngtccacctcgcccgncgacatccaggnncgcgcagccaaggctgctgccgccgccgccgatgccgacgtanaggtagagcaatgcgagtcctcccatgcggtcgagacgccatcgtcgtcagc

SEQ ID NO: 445 - DNA, 1714 bp, Zea mays
  Clone ID: TF_ZmC203909_1
gcgcgcgccgcgccgcgccgccctcttcccccggctcctcgtgtttgtttctcttctcttcttatccgccgaaggagaaaaacacccaccagaaacccaggacgaggaagagtctgcggccgatcgtggatgtcgccaccgacgaacggcgccatctcgctcgcctacgcgccgtccatgatgctgggggcgggcgccctgacgaacccgccgctcctccccttcgacggcttcacggatgaggacttcctcgcctccgccgacgccgctctccttggcggggctgacaccgaccagaccctcctcctgctgccctcgtgccccggggcgaactgctgcggcggcagtagctccgaccagggtctcggagccctagcgtgtgaggtcacaaccgccggatccttctcgctcttgggccagcctgcgcctgggcaggtttcgtgggaggtgacgactgccgtcgctgcggaccgcaacaccttctcgcgcacgcgcgaccctgcgccctcaccaccaccgtccccggcgctgccgctcgtgcaaaccacctcccagtcccagaggacctccatctaccgcggggtgaccaggcacaggtggacagggcggtacgaggcgcacctgtgggacaacacgtgccgtaaggaaggtcagaagcgcaaggggcgccaagtgtttctgcacattccatcttttgcactttactcgattttggtgtatgcatctttcttcgacgccaagggtggctacgacaaagaagataaggctgcaagggcatatgacattgccgctctgaagtattggggtgataatgctactactaacttccctagagagaactacatcagagagattcaggatatgcagaacatgaacaggcgtgatgttgtagcatcactgaggaggaagagcagtggcttttctagaggagcatcaatctacagaggagtaacaaagcaccaccaacatggacgctggcaggcaagaatcggccgtgttgcagggaacaaggatctgtatcttggaactttcgcaaccgagcaagaggctgcagaggcgtacgacatcgcggcactgaagttcaggggcgagaatgccgtgaccaacttcgagcccagccggtacaacctgctagcaatcgctcaacgagacatccccatcctggggaggaagttgattcagaagccagctccggaggcagaagaccaggccgctctgagcgctcgttcgttctcccagtcccagcagtcgagcaacagcttgccaccgtatttcctcaccaacctcctgcagccgctgccgtcgcagcactcactagctcaggctctgccgagctacaacaacttggggttcggggagcccagcttgtactggccctgcccctgcggtgacccgggggagcagaaggtgcagcttggcagcaagctggaaatcgtggacggtctcgtgcagctggccaactctgctgcgaactgacagtgctatctgaaatgctggttgttttgcttgtgtggctcggggtcgggggtacgttcatgaaactgatagcctgagccctgaagatagcggggtataacatacattgtgccgtttgtttgtcgtattttggtgtatcgtattttggtgtacaaaggcatccaagagtctagtcaagctaactagatgatattatcgggtgtatgatctctctaccggaatggcttaaggcattcac

SEQ ID NO: 446 - DNA, 1218 bp, Zea mays
  Clone ID: TF_ZmC441_1
cgggcgcgtgggcacccacgccatcagccatcgcgttccgcatcgaaccagcacatcgcaagacaagcagcagcagccaccactgccatcacatggagtacgccgccgtcggctacggctacgggtacgggtacgacgagcgccaggagccggcggagtccgcggacggcggcggcggcggcgacgacgagtacgcgacggtgctgtcggcgccacccaagcggccggcggggcggaccaagttccgggagacgcggcaccccgtgtaccgcggcgtgcggcggcgcgggcccgcggggcgctgggtgtgcgaggtccgcgagcccaacaagaagtcgcgcatctggctcggcaccttcgccacccccgaggccgccgcgcgcgcgcacgacgtggccgcgctggccctgcggggccgcgccgcgtgcctcaacttcgccgactcggcgcgcctgctccaggtcgaccccgccacgctcgccacccccgacgacatccgccgcgccgccatccagctcgccgacgccgcctcgcagcaggatgagactgccgccgttgccgctgacgtggtcgcgccctcgcaggcggacgacgtcgccgccgccgccgccgccgccgcggcgatgtacggcggcggcatggagttcgaccactcgtattgctacgacgacgggatggtgagcgggagcagcgactgctggcaaagcggcgccggcgccggcggatggcatagcatcgtggacggcgacgacgacgacggcgccagcgacatgacgctctggagctactgagctgtagagtctgtctccagcgcaggaggttgggagaggagaccacgctctggagctactactggacagggaagaaagtgggggtgccgggagcgagttcgaatttgaattcagaaactctgtactggcactggcacacgcggggaacgcgccacgcaagggcgagcgctatttccctccctttttgggtgctgggagaataataaaaagaccaacaatgaaggcattagtactacactttgtgcgaacttgaattaggccttgttcgtttgtgccggtttggtgggtcggaacgatttctagtctgattaatttaggtcttattcgtttgtgtcggattggtgggtcggaacgatttctaaccggattacttctctaatttatataaactttattaccggaaaaaaaaaaaaaaaaactatatcat

SEQ ID NO: 447 - DNA, 496 bp, Zea mays
  Clone ID: TF_ZmC8692_1
cgcccatctccgggtccaagtcttctagctaagtctctagctcttacgggaccaagcggcaggcccgcccagcatccgcgtcgaccgcgcgcgcacactgcagtacgccggccgcgcgcacttgacgctgacaatgccggcggactccgacgacgtcgccagcccggcgtcgacgctgggcagcgtgcacaagaggggcgggggcgggggcgggggtgggaaaagcggcgggcacggaggcgggcggcggcgtccgggcccggcgtaccgcggcgtgcggatgcgggcgtgggggaagtgggtgtcggagatccgcgagccgcgcaagaagtcgcgcatctggctcggcaccttcccgacggccgagatggcggcgcgcgcccacgacgccgccgcgctggtcgtcaagggccgcggtgcggtgctcaacttccccgagatggcggcgcgcctgccgcgcccggcctccgccgcgccgcgggacgtgcaggccgcg

SEQ ID NO: 448 - DNA, 1043 bp, Zea mays
  Clone ID: TF_ZmC9628_2
gccgtgtccgtgtgcgcgacttgctagctagtgctgtgcacagtgtactcatctcatctctatctatccgcgcacgcaggaggagagcaggcggcccacgacgtgcagggcgcggcggccatggagggccactactcgcccacggcctccgccgccgaggcggccggagagcggcggttccgcggggtgcggcagcggccgtggggcaagtgggccgccgagatccgggacccgcacaaggcggcccgcgtctggctcggcacgttcgacaccgcggaggccgcggcgcgcgcctacgacgaggccgcgctccgcttccgcggcagccgcgccaagctcaacttccccgaggacgcgcgcctcaccacggcgccatccactgcgggcgcgggcggcggcgggatccacgacgacgatggccgtggcggcctcggcgggcggacgtcgacccagcaggaggccagcgccgccgtcgtctctgctgactacctgcagtaccagatgatgcttctgcagggggccgccaccagcggccaaggcagcagcagcagtcatggcggatatcctctgtactacgactatggcggccacggcggggctggcgctggcgctggcggtggtgccatgagcagtttttcgggctcctactcttttccggcctccacggttaccgtggcttttgtgccctcctctgctccgagatacgacgaggcggcgcagtggacaagctggccggagagtagtgctagtgcgtggagctatccggcgagcacgggttcttggtctgcttcaagccagtatccaccgtcaactcgtccacctcagtagtccatgctcaatgttttatttcataacacgttcgtggcctccctaagaagacatatagattgatgattttgttcaagatgcatgcttccgtgcaagatccaatagaaggttgcaatattgtgtttcttcttcgcttggtggtgttgaatcctgtatttgatcatgggataatgattttggttgcaacttccaaaaaaaaaaaaaaaaaggaaggt

SEQ ID NO: 449 - DNA, 326 bp, Zea mays
  Clone ID: TF_LIB3279-008-P1-K1-H11
gcgcaggctgaagaaccagtacagggcaatctctgctgcggccctggggcaagtgggcggccgggatcagagacccctgcaagggcgtccacttctggctcgccacatacaggacggttcattttggacgccgacggccggaggcacacggtcgcggtactcgtgagatgaaagccaacctaagtgctcgacacgatgctgcggcccaaagtgctcaaaatccaccttttgaatctactacatctgatatcaccatcgcatacaggctagctcctccaccttcaccacctaatttccgtgctgacgaggttgtcggtaacatggac

SEQ ID NO: 450 - DNA, 2047 bp, Zea mays
  Clone ID: TF_ZmC2239_1
gatacccttcaccctcctcgacgtcgcatctccctggcacgagctcccactgcactgctgctccgctgccgctaccctttccctctcccttctcgtcctcggtcctccccaacccatggccacggccaccaccacccactgccccttctcccaccacgctatttatcgcggctgcacgactcctgcccatcaggcgccatagagacgcgtgggaccgaagccgccgatcaagcgctgctcggggcggagcagcggccggcggtggtgagtgctggcagacaggccggcaggtcaggcagagtgaccagctggtgagtcgaagcttgagcggggagctggactttggcgggttccggcgggctccggagcggagatggtgctggatctcaatgtagcgtcgccggcggactcgggcacgtcgagctcgtccgtcctcaactccgcggacggcggcttccggttcggcctgctcgggagccccgtcgacgacgacgactgctccggtgagatggcgcctggcgcgtccacggggttcatgacgcggcagctcttcccgtccccgaccccgccggccgagccggagccggagccggtggcggcgccggtgccggtgtggcagccgcagcgcgccgaggatctcggcatggcccagaggccggtggcgccagcgaagaagaccaggcgcgggcctaggtcgcggagctcgcagtacaggggcgtcaccttctacaggaggacgggccgctgggaatcgcacatctgggattgcgggaagcaagtctacctaggtggttttgacactgcgcacgcagccgcgagggcatacgatcgagctgcgatcaagttccgcggcctcgacgctgacatcaacttcagtctgagcgactacgaggatgatttgaagcagatgaggaattggaccaaggaggagttcgtgcacatactccggcgccagagcacggggttcgcgaggggaagctccaagtaccgtggcgtgacgctgcacaagtgcggccgctgggaagctaggatggggcaacttcttggcaagaagtacatctatcttgggctctttgacagcgaagttgaggcggcaagggcttatgacagggctgcccttcgcttcaatgggagggaagctgttactaactttgagcctagctcctacaatgcaggagataataacctgcgtgacaccgaaaccgaggcaattgatgatggtgatgccattgatttggatttgcggatttcacagcctaatgtgcaagaccccaaaagggacaataccttagctggcctccagccaacatgtgattcccctgaatcttcaaatacgatggcttctcagccaatgagctcatcatccccttggcccgggtatcaccaaaacccagcagtgtcatttcaccatcagcgcttgtactcgtcagcttgtcatggcttctttccgaaccaccaggtccaggaaaggccggtggagcgaaggcctgagctgggcgcccagccattcccctcatgggcatggcaagcgcagggctcccctcacgtgccgttgcaccactctgcagcatcatcaggattctctaccgccgccggggccaacggcggcatgcccctgccgtctcacccgccggcgcagttcccgactactacaaacccgttcttcttcccctagaccgcttttgacatgacagcttgctgttccggctcagctctcggcgtctgggatggcagctggtcttgcgtgtggcgtctagcagctctggtgatggaagaaagtgattgtgttttgtgtgtgtgtgtgtgagagagagagagagccataataagaagcgacatggctggtctccctctggtatgtgcctgttaggatatgggatatctccatgcatggattgtttccgagacagtagtagtattttgttgtagtcgaccatgcgtgtacatcagtataactggatctttgaagagctgagattttatgactcaacaagcattgacataatggcatgcactccaggaccactaagcaaaaaaaaaaaaaaaa

SEQ ID NO: 451 - DNA, 663 bp, Zea mays
  Clone ID: TF_LIB4605-003-R1-N1-G8
aaagtttcgtccccatttcgctctcgcaagtcgccaagccaccgatttgtttacaggcgccggagctcccgacgacgactgagccatgtgcggcggcgcgatccttgccgagctccgcgagccggcgccgcgccggctcacggagcgggacatctggcagcagaagaagaagcccaagagtactttctccagagatggcttaagcaccatgactactgctggttatgatgcccctgcagcaaggttggccaaaaggaagaggaagaatcaatacaggggtatccgccagcgcccttggggtaagtgggctgctgagatcagagatccccagaagggcgttcgtgtttggcttggtactttcaatagtcccgaggaagctgcaagagcttatgatgctgaagcgcgcaggattcgtggcaagaaggccaaggttaactttcctgatgcaccagcagttggtcagaagtgccgttctagttcagcttctgctaaagcactcaagtcatgtgttgaacagaagccaattgtcaaaacagatatgaacacccttgccaacacaaatgcacccttctaccaatctgttaactacgcatccaacaatccatttgttccagcaatgaactctactgtttcttttgaggatcctatcatgaatctgcactc

SEQ ID NO: 452 - DNA, 805 bp, Zea mays
  Clone ID: TF_LIB5117-065-A1-PF1-F12
acctccgtagagtactactactcaactactccgtcactattagcctcgatcgatctccttcctctcttgctcagttaccttcttgtggtcgtcggtctgccgatatcgatccatccgcccgttgtgctgatgcgtatgtgtgtgcatgtgcaggtgagatggaggaggaggagcggggagcggccgccgagctggccgccatcgccggggccgggccgccgcccaagctcgaggacttcctcgggggcggcgccaacggcaaccacaacgggaggaataatagtgacgccggtagcggcgaccaggttgtgtctgcagcgaccgccgagatgtacgactcggagctcaagttcttggccgccggattcctgagcggcgctactggaaccacggcacccactatctccccggcggccgctcctcaggagcaggccgacccgaagatgccggtcccggcgccggagcagaagaaggccgtcgactccttcggccagaggacctccatctaccgtggcgtcacgcggtaccgttggacgggtagatacgaggcgcatctgtgggacaacagctgccggcgtgaaggccagagccgcaagggccgccaagtctacctcggtggctatgataaggaggagaaggcggcaagggcgtacgatctcgccgcgctgaagtactgggggtctagcaccaccaccaacttcccggttgccgactatgaaaaggaggtggaggagatgaagcacatgacacgccaggaggttgtagcttcactttagaggaagagcagtggattctctcgtggcgc

SEQ ID NO: 453 - DNA, 503 bp, Zea mays
  Clone ID: TF_LIB4738-100-Q1-K1-H9
ctagacgccacacaccacatcgcttctccacacgacctcgctgaaccggaagacccgcgcacacacgccacttgtgcaccatggcgccccgggtggcggacaagacgccattgccgctggccaccggcctgaagctgggcgtaggcggaggcatgggcctgggtccacactaccgaggcgtgaggaagcggccgtggggacgttacgccgcggagatccgcgacccagccaagaagagtcgcgtgtggctgggcacgtacgacacggccgaggaggccgccaaggcctacgacgtcgccgcccgcgagttccgcggcgccaaggccaagactaacttcccgttccccctcgccgtcgccgtcgccggcggtgctggtagccccagcagcgacagcaccaccgtggaatcgagctgcggcggcagcgggtgtggcgtcgaagcgccggctgtgcaggcggccatgccgctgacgccggccctcgacctcgatctcttccaccgg

SEQ ID NO: 454 - DNA, 561 bp, Zea mays
  unsure (1)..(561): unsure at all n locations
  Clone ID: TF_LIB3732-049-Q1-K6-F2
cccagcgtccgcggacgcgtgggcagcaacatcactgatcgccgtgcagcctggtacgtaccacacacacacacacatacagaagaagaagaacgtaccttgcgctacaaccccgtcgccgccgactacgccgatcgtgtccacgggaaccaagcaaagcaaagcaagcgacgcatcggaagaagccggagaccgaccgaccgaccgaccgagctagctacagctcatcagcccatggtgaagacggcgacggccacggcgacggcggcggcgaggcacggcggcgctaataagaggacgtacaagggcgtgcggatgcggagctggggctcctgggtgtggagggtgtccggncgccgggccagaagacgaggatctggctcggctcgcactccaccgccgaggccgcggcgcgcgcctacgacgccgcgctgctctgcctcaggggctgggccgccgcgccggacctcaacttgccgccccgccgcccgctcgcccacgggctncacccgctgccccccgccgacatgtcgaccaaggccatacagcgcgtggccgtcg

SEQ ID NO: 455 - DNA, 722 bp, Zea mays
  Clone ID: TF_LIB4740-070-R1-K1-H6
gccgggactgatccagagcttactacatagtacaccaagaaagttgcgttgcaaaccatcgtgtcgtcgatcgtgtctccaagagcaagcgacgacgacgtctgggaacgacgaagccgaagccggagagctatactatacttgtcatccagccagccaagccatcatggtgaagacggcggcgagcagcagcagcgacgacgccgccgccgccaagaggaggacgtacaagggcgtgcggatgcggagctggggctcgtgggtgtcggaggtgcgggcgcccggccagaagacgcggatatggctcggctcccacgccaccgccgaggccgcggtgcgcgcgcacgacgccgcgctgctctgcctccggggctcggcggccgacctcaacttcccgctccgcctcccgttcgacctgccccccgcggccaccatgtcgcccaaggccatccagcgcgtggccgccgccgctgccgccgctgccagcggcagcgcctcctcctgcggcggcttgcgcgcgccgcccttcgcgccaccagacgagaacagcggcaccagtgcctgcagcgacggcgacgccaccccggcgtcgagcaccaccagctcgcccaccagcgacttcaccccggcctggagcaccaccagcttgcccaccagccacgccgacgacgtctgctccccggagtgcaccgtcagcagtgccggcgacgaggactactaca

SEQ ID NO: 456 - DNA, 2006 bp, Zea mays
  Clone ID: TF_ZmC3711_1
gattgttgacctcgaggccggccgggacgtcccccgggagcagtagccccagcccccagtgccgcagttgcgctcagctatctctgctgagccgattagataaatccggcggaggaagagggaagaattatcgtgcgatatttcccccctcccactccctctctctctctctcgatttgcccgagaaatttttttggttgtttcccgcatcactctccactaggccgccgtctcccccgctggtgctcgtcgcttcctgcccaattcggcgccattcgcccggcgcactccctattaattccctgcctcggtagtcactggccgattgccacgtgaaatttcctgttccgttgcctttcgggtgcgcctgaagtacccacacgctactagggttcaatcgtcgtcagcaggcttacctctcaatcactgcggggcggcggctcgagagtttgtggacagttggcgaagagatagttaggtttttttttttgtctcccgtgtccgatggaggaatcggacttgggaggtaatctgggtaagcaaacggaagaggataaggctgcgggagaatcaggggatgagggtaagatcgagaggagccaatctatcaatctgaatagagtgccagcagttgctgtagaggcgatgagcacccagggaaactgtgagacgcacggtgcagcagtgccaggaactaaggatgcaggcacaggaaaggcagggcaatccagtggcgatcgacaggaggagaagttacccaagtgtgagcaggtcgactatggaagtgaagttgaaggctgcgcagatgatgagaaccctggcaagagggctgctttagttactttggttggaaatgaatactgcggcgacgaggatgagagagttcaagtgctcaccattgtcaagaaggacgagcatgcagatgacattgtcgaccgtattaatcctggcacagttgcagggtacagtgaagtgaagggtgctgtaggtgcttctgccgccacttctgcggtgcgacctgctggctcccgatcgtcaagtttccatggtgtgactaggcatagatggagtgggaaatatgaagctcatttgtgggacagttcttgcagagtagagggacgtagaaggaaagggaaacaagtttatctaggaagttatgataccgaggaaaaagcggccagggcttatgatgttgctgctattaaatactggggcgaaaataccagactgaactttccgatttcacaatacggcaaggagttggaggacataagggatttgtctcgagaggaatgtgtgacatacttgagaaggaggagcagctgcttttcaagaggagcttctatttatagaggagtgacaagaaggcagaaagacgggagatggcaagcacgcataggactggttgctggaactagagacatttacctgggaacattcaaaacagaggaagaagctgcagaggcttatgatattgctgccattgagatacgtggcaaaaacgctgtgaccaattttgaccgaagcaactatgtcgataagggtatgcactgtatagaaggcgaaggcttgaggctgcttgcatccaagccagaagaatgacttccaagttcaatgcagtgattgtcgatcgagcagatttggccagacgtatatgcagcttagttggtacatatacagataggagaaccggttgcagtttgtcaatattcctgctttacatgacttgggattacagttaaatcgacccgctagcaaaaaaaagtgtgcaaatgttagtagatttggccagacatatatgaagattttggggttgtatcataaggcctcgtaggatagatctttctgcaaatgttagcgaagccagtgtttatgttctgtttgctagattagcgttatcagtttgcacgttccccttttttttctgaataattgtccttgtatgatcttgagggaatgcgtttacctggtcgtttgccattcttttaaaaaaaaaaaaaaaaaac

SEQ ID NO: 457 - DNA, 1066 bp, Zea mays
  Clone ID: TF_ZmC184128_1
aattcccatccatcagtaacttggcgggactgcgggacatcgacgcatcccatatctataggcataatggagcactacgactcctatctatgcagcggcagcatgcatagctacggcggcgttggcggagccacggacgcggcgttggacgccggcggtgacgacatgcagcgcctgctcaacgcgctcatggacgacatggctgccgagtccgactccttctccgacgacatggaggcagcctcctccgagtcctcgtcctccgcctgctcggccaacagccagcaggaggccacccggcggccacagcagcaaccggacggtggccacagcaacggtagcaacaagagctccaagaagcagcatcagcagcagccgccggctccctacatcggcgtgcgcaagcgtccctggggcaagttcgcggccgagatccgcgactccacgcgcaagggcgcccgcgtctggctgggcaccttcgacagcccggaggccgccgcgatggcctacgaccaggccgccttctccgtgcgcggcgccgccgccgtgctcaactttcccgtggagcgcgtgcaggagtcgctgcgcgcgctggcgctctcttccgcctcctctgccgcgggctcccctgtcctggcgctcaagtgccgccactccatacgcaagcgctccccgaacaagaacaagaacaagaagaagcaggagcggcagcaacaggtggccgtggccgccgccgcaccacagcagccgccgtgccccaccagcgttgtggagctggaggacctgggcgccgattatctggacgagctcctccgggtgtcatccgagttccattggcaataacccatagcgaatggcggtcctgcgaggtgcaagcgatagcgaggttgatgggttggggatcgagttcagttgtcatcacaaatacagaatgcctgcagattgttgctctgctctgtccttgctcgccaattgcgaatcgacgacgagttgcaactcttctttaaaaaaaaaaaataaaaaaaaaaaaaaaaaaaaaaataaaaaaaaaaaaaaaaaataaaaa

SEQ ID NO: 458 - DNA, 566 bp, Zea mays
  Clone ID: TF_LIB3597-065-Q1-K6-E10
acttcgcactactcttacattaattttcaaaacgtactggttggtggtggtagtagctactagctactataaacgatggaccagatgctgggcaagcacctgcagatgccttccgtgactacgagcgccgcctgccagcagccgcagtcgccgccgccgtcgccgcagcagcagtaccggggcgtgcggaagcgcaagtggggcaagtgggtgtcggagatccggcagccgggcaccaagacgcgcatctggctcggcagcttcgagtcggccgagatggccgcggtggcgcacgacgtggcggcgctgcgcctgcggggccgcgacgcgcagctcaacttcccgggctgcgtcgcctggctgccgcgcccggcgacctcgcacgcgcgcgacgtccgcgccgcggcggccgaggccgcagaccgcgtgcgctgcgacccggcgctgctgctgctccagcaggcggcggcagcgcggtgccacgactacgaccacgaccacgagttcggggccgggccggcgccggtggtcgagctcgggagcgacgaggagttcgagctggacct

SEQ ID NO: 459 - DNA, 968 bp, Zea mays
  unsure (1)..(968): unsure at all n locations
  Clone ID: TF_ZmC220222_1
tttngcatgcagactgctagtgtaatgtaatttcaccaaaacaatacagatgagtgagacatgtgtcctggcaatgccgttaaaaaaccaagcagagcagggttgatgctagacatgatcaaacccgagacctaaacaaacaagtacctaaaaaccaagacagtgcaccactttaatcctttgatctgtgaagtacagagcaagcaagaacaggttgatcgagggagacaagacgagcagagccatcgcattatgaaatcagtatcgagtcccagtcgatctccagggaggggtacttgcgaaggtggaagctgtctgactcgtcccatggcgcttccgagaagtcgagcagctgcatctccggcaccacgtcggaagacccagtggaggacacgtcgccgtctgcagagaacgagctctctgagacggagcagcccggctcactcttgacgtgtgggctcaccgaggagaaggggctcggggtggctgtagtcgccgccgccggggcgtggctctggctctggccctgcggcagcggcgcgccgacgtccgcgccgctgcagatggcgtggagcttggcgtcgaccgcggcgtggagcggcgggccgaggtgctgcccgccgcgcctgagctcggggaagttgagcttggcggagtccccgcggaggcggaacgcggcgccgtcgtaggcgagcgcgatctcctcggcggtgtcgaaggtgccgagccagaggcgggtgcggttgcgcggcaggcggatctccgccacccacttgccccaatgccgctgccggacgccgcggtacagcttggacacccccgcccgcgcgggaaccggagcctgctgcggcacgccctgccgcttcatcggctgcgcggcgccgcccgctgccgccggccggcgcaggaaccggagccgcgactgcaccggaaaagctgcgccggggnccggacgctgggtcgaccgg

SEQ ID NO: 460 - DNA, 400 bp, Zea mays
  unsure (1)..(400): unsure at all n locations
  Clone ID: TF_LIB3062-015-Q1-K1-F11
gagctcgcacgcttggggcccggcggccgtgccgctggaggcacctggcgcggcggtgctggacgcgaacgacttccgcaagtaccgcggcgtgcggcagcggccctggggcaagttcgcggcggagatccgcgaccccaagaagcgggggtcccgcgtgtggctcggcacctacgacaccgccatcgaggccgcgcgcgcctacgaccgcgccgcgttccgcatgcgcggcgccaaggccatcctgaacttccccaacgaggtgggcacccgcggcgcggacttcctcgcgccgccgccgccgccgccgcatgccgcggcaacgtcccagaacaaacggaagctgatgcacgacgccgaggccacggncacggccggggccggagccggagccgagcca

SEQ ID NO: 461 - DNA, 767 bp, Zea mays
  Clone ID: TF_LIB4740-108-A1-K1-A6
ctcccacgatcaacagcagtccgcatcacgcaccccactccaccgcccgcaaccgcaagctcagattccctcccaccccaccccaccgtcccgctcactccagcccagcccgcgtccccacagcccagcgacagcgagcaccggctgcatccagccgccgcggcgggtcacggcgggccacctctggcccgagagcaagaagccgaggagggctgcagccggcaggaggagagcccccgtggagcaggagcaggaggaggatttcgaggccgacttcgaggagttcgaggtggagtccggcgagtcggagctcgagtccgaggacgagcccaagcccaagtccttcgccgcccccagcagcgcgctcgccagaggtggactaaacactggtgcagctggtgtcgatggccctgctgcaaattcagttaaaaggaagaggaagaaccagttcaggggtatccgccggcgcccgtggggcaaatgggctgctgagatcagagatcctcgcaagggcgtgcgcgtctggctcggtacattcaactctcccgaagaagctgccagagcttacgacgccgaggcacgcaggatccgcggcaagaaggctaaagtcaacttcccggatgaggttcctacggcggtttctcagaagcgccgtgctgctgagcttgcctctctgaaagcgcctaagatggacgttgaggaggagaagccgatcatcaagccggcagtgaacaatatgaccaactcaaacgcatatctctaccctg

SEQ ID NO: 462 - DNA, 2594 bp, Zea mays
  Clone ID: TF_ZmC1960_1
aggatatgatgaccctttccccagatgatcgacatgaacatactgagcgctataatttcgcatggagacagtggggccctcgcgtcgggccgggcgggacaccagggcacgacgtgcgttgcgtcgtgagtgtttgtgtttcagagctgagagtctgagactgagagagatagaggtgatgatggctctgcaggcgcaggggacgcgggtgccgctggtcctggcgctcttcctcctcctggccggttgcggcagcgaggcgcagccgctggtgccggcgctgtttacgttcggtgactcgtcggtggacgtcgggaacaacgactacctccacaccatcatcaaggccaacttcccgccatacggcagggacttcgccaaccacgtcgccaccgggaggttctgcaatggcaagctggcgaccgacatcaccgccgacacgctggggttcactacctaccctgccgcgtacctcagcccacaggcgtcggggcagaacctcctcatcggcgccaacttcgcgtccgcggggtctgggtactacgaccacacggcacttatgtatcacgcgatcccgctgtcccagcagctggagtacttcagggagtaccagacgaagctggcgggcggtggccggcgccgggcaggcgcgctccatcctcagcggcgcgctgtacatcgtcagtgccggcgccagcgacttcgtgcagaactactacataaacccgctgctgttcaagacgcagacggccgaccagttctccgaccgcctcgtggccatcttcggccgcaccgtgcaggagctctacggcatggggggcgcccccgcggacgggcgggctctcccacgcactccgcaattccgcatcacgcagaggcagagcgaccaacccagaaccccaccccaccgcccgcaaccgcaagctcagattccctccccaccccaccccaccccaccgtcccgctcactccagcccagcccgcgtccccacagcccagcgacagcgggcaccggcggcatccagccatgtgcggcggcgccatcctgtcggacatcatcccgccgccgccaccgcggcgggtcacggctggccacctctggcccgagagcaagaagccgaggagggctgcatccggcaggaggggagcccccgtggagcagcatgagcaggaggaggatttcgaggccgacttcgaggagttcgaggtggagtccggcgagtcggagctcgagtccgaggacgagcccaagcccttcgccgcccccaggagcgcgctcgccagaggtggactaaacactggtgcagctggtgtcgatggccctgctgcaaattcagttaaaaggaagaggaagaaccagttcaggggtatccgccggcgcccgtggggcaaatgggctgctgagatcagagatcctcgcaagggcgtgcgcgtctggctcggtactttcaactcccccgaagaagctgccagagcttacgacgccgaggcacgcaggatccgcggcaagaaggctaaagtcaacttcccggatgaggttcctacggcggtttctcagaagcgccgtgctgctgggcctgcctctctgaaagcgcctaagatggacgttgaggaggagaagccgatcatcaagctcgcagtgaacaatatgaccaactcaaacgcatatcactaccctgccgtcgtcggccacaacatcatacccgagccattcatgcagactcagaacatgccattcgctcctctggtgaattatgctgccctagtgaacctgtcttcagaccaaggcagcaactcgttcggttgctcggacttcagcctcgagaacgactccaggacccctgacataacttcggtgcctgcgcccgttgccaccttggccgccgttggcgagtctgtgttcgtccagaacaccgccggccatgctgtggcgcctcctgcgacggggaacactggtgttgatctcgccgagttggagccgtatatgaatttcctgatggacggtggttcagacgactcgatcagcactctcttgagctgtgatggatcccaggacgtggtcagcaacatggacctttggagcttcgaggacatgcccatgtctgctggtttctactgaggctgaggcccagcgactggtgcttgtgtacatagggggggacaaagggtaagagcctgcagtaacagagattggctctttctggtacttgcaatttctatcccttcaactctttcttccgcccccgtgtttcaggaataatgttctggagatgaagaaacgcttgcgtgggcgtgcctgcaggcacgcgtgtagtagctgcggtattagtatatatgcttagatgttcagtcactttctttaagtacaatttggcgctggacatgtaccttattttactatgtatccgtgacaacagctatgtgtctgctccttttattttcttgtctttgcttcaaaaaaatggctctgaacattgcgagtttgtactttgtagacaatatatatatatgattgtgtgtatgtgcttggtttgcttcaaaaaaaaaaaaaaaaaagcggcctcatccttctatgcaaaaaacccacgcgtccg

SEQ ID NO: 463 - DNA, 3025 bp, Zea mays
  Clone ID: TF_ZmC1960_2
cggacgcgtgggttcttacacaccaatgcaaacaaacaaacacacacacacagcacgcgatcccgctgtcccagcagctggagtacttcagggagtaccagacgaagctggcggcggtggccggcgccgggcaggcgcgctccatcctcagcggcgcgctgtacatcgtcagtgccggcgccagcgacttcgtgcagaactactacataaacccgctgctgttcaagacgcagacggccgaccagttctccgaccgcctcgtggccatcttcggccgcaccgtgcaggagctctacggcatgggggccgattgggtacctcgccggccgggactacttcgcgcccgtgccatccgcccactcctctcccacgcagtccgcaattccgcatcacgcagaggcagagcgaccaacccagaaccccaccccaccgcccgcaaccgcaagctcagattccctccccaccccaccccaccccaccgtcccgctcactccagcccagcccgcgtccccacagcccagcgacagcgggcaccggcggcatccagccatgtgcggcggcgccatcctgtcggacatcatcccgccgccgccaccgcggcgggtcacggctggccacctctggcccgagagcaagaagccgaggagggctgcatccggcaggaggggagcccccgtggagcagcatgagcaggaggaggatttcgaggccgacttcgaggagttcgaggtggagtccggcgagtcggagctcgagtccgaggccgagcccaagcccttcgccgcccccaggagcgcgctcgccagaggtggactaaacactggtgcagctggtgtcgatggccctgctgcaaattcagttaaaaggaagaggaagaaccagttcaggggtatccgccggcgcccgtggggcaaatgggctgctgagatcagagatcctcgcaagggcgtgcgcgtctggctcggtactttcaactcccccgaagaagctgccagagcttacgacgccgaggcacgcaggatccgcggcaagaaggctaaagtcaacttcccggatgaggttcctacggcggtttctcagaagcgccgtgctgctgggcctgcctctctgaaagcgcctaagatggacgttgaggaggagaagccgatcatcaagctcgcagtgaacaatatgaccaactcaaacgcatatcactaccctgccgtcgtcggccacaacatcatacccgagccattcatgcagactcagaacatgccattcgctcctctggtgaattatgctgccctagtgaacctgtcttcagaccaaggcagcaactcgttcggttgctcggacttcagcctcgagaacgactccaggacccctgacataacttcggtgcctgcgcccgttgccaccttggccgccgttggcgagtctgtgttcgtccagaacaccgccggccatgctgtggcgtctcctgcgacggggaacactggtgttgatctcgccgagttggagccgtatatgaatttcctgatggacggtggttcagacgactcgatcagcactctcttgagctgtgatggatcccaggacgtggtcagcaacatggacctttggagcttcgaggacatgcccatgtctgctggtttctactgaggctgaggcccagcgactggtgcttgtgtacatagggggggacaaagggtaagagcctgcagtaacagagattggctctttctggtacttgcaatttctatcccttcaactctttcttccgcccccgtgtttcaggaataatgttctggagatgaagaaacgcttgcgtgggcgtgcctgcaggcacgcgtgtagtagctgcggtattagtatatatgcttagatgttcagtcacttcctttaagtacaatttggcgctggacatgtaccttattttactatgtatccgtgacaacagctatgtgtctgcgtccgcccggtctgggtactaccaccacacggcacttatgtatcacgcgatcccgctgtcccagcagctggagtacttcagggagtaccagacgaagctggcggcggtggccggcgccgggcaggcgcgctccatcctcagcggcgcgctgtacatcgtcagtgccggcgccagcgacttcgtgcagaactactacataaacccgctgctgttcaagacgcagacggccgaccagttctccgaccgcctcgtggccatcttcggccgcaccgtgcaggagctctacggcatgggggcgcgccgcgtcggcgtcacgtcgctgccgccgctgggctgcctgccggcgtccatcacgctgttcgggcacggcgccgccgggtgcgtgtccaggctcaacagcgacgcgcagagcttcaaccggaagatgaacggcaccgtggacgcgctggcgcggcggtacccggacctcaagatcgccgtcttcgacatctacacgccgctgtacgacctggccacggacccccagtcgcagggcttcgcggaggcccggcggggatgctgcgggacgggcacggtggagaccaccgtgctcctctgcaaccccaagtccgtcgggacgtgccccaacgccacgtcctacgtcttctgggacgccgtccacccgtccgaggcggccaaccaggtcatcgctgactcgctcatcaccgagggcctcatcctcgtcacgtaatcatgcttttgttttggcttcaaatcgatcagactacacaaaagtcgtcgttcctaaacgtatactatgcctgtaaatttattcctcttgtttttcttatttgcgttgattaatgttttcggaagtataagcaacaacatgaatgaatgaatgaatgaatgaatggactcctattgttgtcaagttcaacgtcacataaaaaaaaaaaaaaagcccgacgcaacacacgtacaagaggcagattttactcaagtcaaatgtagaaaaagttcatcgactgatgttttggtatcatccgagaaaagtaagacaggtttgtcgtggtcatctcaccacaccgtatt

SEQ ID NO: 464 - DNA, 1503 bp, Zea mays
  unsure (1)..(1503): unsure at all n locations
  Clone ID: TF_ZmC1960_3
ttggggtacccctcgagggcancggcacaagggggaactcgaggccggccgggctctcccacgcactccgcaattccgcatcacgcaccccaccccaccgcccgcaaccgcaagctcagattccctcccaccccaccccaccgtcccgctcactccagcccagcccgcgtccccacagcccagcgacagcgagcaccggcggcatccagccatgtgcggcggcgccatcctgtcggacatcatcccgccgccgccgccgcggcgggtcacggcgggccacctctggcccgagagcaagaagccgaggagggctgcagccggcaggaggagagcccccgtggagcaggagcaggaggaggatttcgaggccgacttcgaggagttcgaggtggagtccggcgagtcggagctcgagtccgaggacgagcccaagcccaagcccttcgccgcccccagcagcgcgctcgccagaggtggactaaacactggtgcagctggtgtcgatggccctgctgcaaattcagttaaaaggaagaggaagaaccagttcaggggtatccgccggcgcccgtggggcaaatgggctgctgagatcagagatcctcgcaagggcgtgcgcgtctggctcggtacattcaactctcccgaagaagctgccagagcttacgacgccgaggcacgcaggatccgcggcaagaaggctaaagtcaacttcccggatgaggttcctacggcggtttctcagaagcgccgtgctgctgggcttgcctctctgaaagcgcctaagatggacgttgaggaggagaagccgatcatcaagccggcagtgaacaatatgaccaactcaaacgcatatcactaccctgccgtcgtcggccacaacatcatacccgagccattcatgcagactcagaacatgccattcgctcctctggtgaattatgctgccctcgtgaacctgtcttcagaccaaggcagcaactcgttcggttgctcggacttcagcctcgagaacgactccaggacccctgacataacttcggtgcctgcacccgttgctaccttggccgccgttggtgagtctgcgttcgtccagaacaccgccggccatgctgtggcgcctcctgcgacggggaacgctggtgttgatctcgccgagttggagccgtatatgaatttcctgatggacggtggttcagacggctcgatcagcactctcttgagctgtgatggatcccaggacgtggtcagcaacatggacctttggagcttcgacgacatgcccatgtctgctggtttctactgaggctgaggcccagcgactggtgcttgtgtacatagggggggacaaagggtaagagcctgcagtaacagagattggctctttctggtacttgcaatttctatcccttcaactctttcttccgcccccgtgtttcaggaataatgttctggagatgaagaaacgcttgcgtgggcgtgcctgcaggcacgcgtgtagtt

SEQ ID NO: 465 - DNA, 1874 bp, Zea mays
  Clone ID: TF_ZmC1960_6
ccggccgggggacaggctccgccacgctccatcgcccacccaatcatccacgagcccgttgtcggcttgtcgccgcgcccgcacctcagcgtctactctactacttaacacgcgcccgtgccatccgcccactcctctcccacgcactccgcaattccgcccacgcaccccaccccaccgcccgcaaccgcaagctcagattccctcccaccccaccgtcccgctcactccagcccagcccgcgtccccacagcccagcgacagcgagcaccggcggcatccagccatgtgcggcggcgccatcctgtcggacatcatcccgccgccgccgccgcggcgggtcacggcgggccacctctggcccgagagcaagaagccgaggagggctgcagccggcaggaggagagcccccgtggagcaggagcaggaggaggatttcgaggccgacttcgaggagttcgaggtggagtccggcgagtcggagctcgagtccgaggacgagcccaaacccaagcccttcgccgcccccagcagcgcgctcgccagaggtggactaaacactggtgcagctggtgtcgatggccctgctgcaaattcagttaaaaggaagaggaagaaccagttcaggggtatccgccggcgcccgtggggcaaatgggctgctgagatcagagatcctcgcaagggcgtgcgcgtctggctcggtactttcaactcccccgaagaagctgccagagcttacgacgccgaggcacgcaggatccgcggcaagaaggctaaagtcaacttcccggatgaggttcctacggcggtttctcagaagcgccgtgctgctgggcttgcctctctgaaagcgcctaagatggacgttgaggaggagaagccgatcatcaagctcgcagtgaacaatatgaccaactcaaacgcatatcactaccctgccgtcgtcggccaccacaacatcatacccgagccattcatgcagactcagaacatgccattcgctcctctggtgaattatgctgccctcgtgaacctgtcttcagaccaaggcagcaactcgttcggttgctcggacttcagcctcgagaacgactccaggacccctgacataacttcggtgcctgcgcccgttgccaccttggccgccgttggagagtctgcgttcgtccagaacacggccggccatgctgtggcgcctcctgcgacggggaacactggtgttgatctcgctgagttggagccgtatatggatttcctgatggacggtggttcagacgactcgatcagcactctcttgagctgtgatggatcccaggacgtggtcagcaacatggacctttggagcttcgacgacatgcccatgtctgctggtttctactgaggctgaggcccagcgactggtgcttgactgcttgtgtacatagggggggacaaagggaataatgttctggagatgaagaatcgcttgcgtgggcgtgcctgcaggcacgcgtgtagtagctgcggtattagtatatatgcttagatgttcagtcactttctttaagtacaatttggcgctggacatgtaccttattttactatgtatccgtgacaacagctatgtgtctgctccttttattttcttgtctttgcttcaaaaaaatggctctgaacattgcgagtttgtactttgtagacaatatatatatatgtgtgtgttgcttggtttgcttcatccttcgatgcaatgtgagtagtgttctgtatgcaggcttgcatgtgctgatatgcgtgcagcacacgtctatgaaaaagcattcatgcgaagtagatggataatagcaaacaaattttcttcataatggatgcataatccacttctttttgag

SEQ ID NO: 466 - DNA, 2039 bp, Zea mays
  unsure (1)..(2039): unsure at all n locations
  Clone ID: TF_ZmC660_1
gtgaggcgccacgcaacaacaatggcagttggcacagaggcgcaacgcaaaaaccccccaccgccaccgctctataaaaaccccgtcctcctcctcctcctcctcctcccccgcctcgccgccagtcagattcaccaccggctcccctgcacaaccgcgtccgcgctgcaccaccaccgttcatcgaggaggaggggggacggagaccacggacatggagagatctcaacggcagtctcctccgccaccgtcgccgtcctcctcctcgtcctccgtctccgcggacaccgtcctcgtccctcccggaaagaggcggagggcggcgacggccaaggccggcgccgagcctaataagaggatccgcaaggaccccgccgccgccgccgcggggaagaggagctccgtctacaggggagtcaccaggcacaggtggacgggcaggttcgaggcgcatctctgggacaagcactgcctcgccgcgctccacaacaagaagaaaggcaggcaagtctacctgggggcgtatgacagcgaggaggcagctgctcgtgcctatgacctcgcagctctcaagtactggggtcctgagactctgctcaacttccctgtggaggattactccagcgagatgccggagatggaggccgtgtcccgggaggagtacctggcctccctccgccgcaggagcagcggcttctccaggggcgtctccaagtacagaggcgtcgccaggcatcaccacaacgggaggtgggaggcacggattgggcgagtctttgggaacaagtacctctacttgggaacatttgacactcaagaagaggcagccaaggcctatgaccttgcggccattgaataccgtggcgtcaatgctgtaaccaacttcgacatcagctgctacctggaccacccgctgttcctggcacagctccaacaggagccacaggtggtgccggcactcaaccaagaacctcaacctgatcagagcgaaaccggaactacagagcaagagccggagtcaagcgaagccaagacaccggatggcagtgcagaacccgatgagaacgcggtgcctgacgacaccgcggagcccctcaccacagtcgacgacagcatcgaagagggcttgtggagcccttgcatggattacgagctagacaccatgtcgagaccaaactttggcagctcaatcaatctgagcgagtggttcgctgacgcagacttcgactgcaacatcggatgcctgttcgatgggtgttctgcggctgacgaaggaagcaaggatggtgtaggtctggcagatttcagtctgtttgaggcaggtgatgtccagctgaaggatgttctttcggatatggaagaggggatacaacctccagcgatgatcagtgtgtgcaactaattctggaacccgaggaggttttcgctttccaggtgtcctgtcttgggtaatccttgatctgtctaatgccacagtgccactgcaccagagcagctgagaactttcttgtagaaagcccatggcagtttggcgttagacaagtgtgtcgatgttctttaattctttgaatttgcccctaggctgcttggctaacgttaagggtttgtcattgtctcacttagcctagattcaactaatcacatcctgaatctgaagtggttgtgcttgtgcagtttatcactgagtttacatggcatgatcatggtaacgcagccagtgcagcatagatttgttcgtttgaacagtttaccaaggctgtaaccctagtaagctccagattaaggaacctttgttttcaccattctatatttactagatgaatgcccgtatgttgcaacgggaatatataatattagtatactacaataacttatatacaaaatgtgtgttataccattatgagaaaaaaaaaaaaatgggcaaattctgagattgggcaaattttgagcggattactaaaattattacctgcatcaccattccctgcatcatctgaacttgttgagatagttgttgancttgttgttgttgttgtctt

SEQ ID NO: 467 - DNA, 1286 bp, Zea mays
  Clone ID: TF_ZmC118_3
caccatttcgctcccgcaagcaccgatttgtttactgctctctccgacgcgcggcggcggagctccctacgacgactgaaccatgtgcggcggcgcgatccttgccaaccttcgcgagccggcgccgcgccggctcacagagcgggacatctggcagcagaaaaagaagctcaagaggggcggcggcggcgggaggcgctcgttcgcggcggaggacgatgaggacttcgaggccgactttgaggtcttcgaggccgactccagtgattcagatttggagctcagggagcggactgacgacgacgtcgtcgagatcaagcccttcactgccaagaggactttctccagcgatggcttaagcaccatgactagtgctgtagcaaggtcagccaagaggaagagaaagaatctatacaggggtatccgccagcggccttggggcaagtgggctgctgagatcagagatcctcagaagggtgttcgtgtttggcttggtactttcaatagtcctgaggaagctgcaagagcttatgatgccgaagcgcgcaggattcgtggcaagaaggccaagggaagtaactcctttggctgctcagacttgggctgggagaatgataccaagacaccagacatcacttccattgctcccatttccactattgcggaaggcgacgagtctgcatttgtcgacagcaattcaaacagctcatttgtgcttcctgccctggagaacagtgctgttgatctcactgatgggctgacagatttagaatcctatatgaggtttcttctggatggtggtccaagtgattcagttgatagccttctgaaccttgatggatcgcaggatgttggtagcaatatggacctctggagcttcgacgacatgcccatcgccggcgatttcttttgaggaatttgaagcttggccataggactatgtacatagggactagggaataaagactgggagattgggaagcacctgcttggcaccttggggtagcatatgctcgtgtctagctcagatgcagaagtcgcattctgaaactctttggttatcgacctgttccctattttaactatctctgtatgagagccatttatgagactgaaccattttgttttgttttcccccttctttcgttgttacagtatatggtttaacattatgatttatggatatgtgccaaatatggtgctcaacagtggtcaaacatgccttttatatgcgctttgtgcttggttgaaattgagttaactagttatctgctgaagcttttgcg

SEQ ID NO: 468 - DNA, 458 bp, Zea mays
  Clone ID: TF_ZmC840720_1
ccactccccgcggccggctcctctgcagccccagtcccaacagcagctccaccaccgccgctccgtaggcagtcaaaagctgccatggacacggacgacgcgcaggagccggcctccccaacctccgtccccgtcttcctcctcctcctcctcctcttcctcgtcggtccccgaagaagcgggcgcgcagggacggcgggcggcacccgacgtaccgcggcgtgcgcatgcggagctggggcaagtgggtgtcggagatcagggagccacgcaagaagtcccgcatctggctgggcaccttcgccaccgcggagatggccgcgcgcgcgcacgacgtggccgcgctggccatcaagggcgcccgcgacgcgcacctcaacttcccgggcctcgcgcgcctgctcccgcgcccggccaccgccgcgcccagggacgtgcaggccgcggcggcgctcgcc

SEQ ID NO: 469 - DNA, 1419 bp, Zea mays
  Clone ID: TF_ZmC19431_1
cggaagcgtgggcggacgcgtgggcggaggcgtcggcgtcggcgtgaggaaaaacttggggaaaaatacacagggcacaatgtgcggaggcgccatcctcgcggagctgatcccgccgacgcggcgcgtggcgtcgaagccggtgacagaaggccacctctggtcggcgagctccaagaaagccggcagcggcagggacaagaggcaccagcacgaatacgccgacgatgacttcgaggccgccttcgaggacttcgacgacgactttgacgtgcatgaagacgacgaggacggccacttcgtattctcgtccaaatccgccttgtccccagccctgcacgacgggcgcgcggcgagccagaagaagcagcgcgggcgccagttccgcggcatccggcagcggccctggggcaagtgggcggcggagatccgcgacccgcacaagggcacccgcgtctggctcggcaccttcagcaccgccgaggacgccgcccgggcctacgacgtggaggcgcgccgcctccgcggcagcaaggccaaggtcaacttccccgcagccagcggtcgcgctcgcggtcgcgcgcgcccacgccgcggcgacgacggcaacccacgaaccgcgccggaaacgcagcacccagcacagcccgctctgctgcctcgaggagagagagagacgcagaggaaggaagggatcgccgccgtgaagccagaagctacggagtcgttcgacgtgggcggcggtctcttcttcgacatggccttccccaccttcccagcctcgccgccgccgcaggccgtggatacgtccttcgccggcagcaccgccacgtcggagaccgggagccccgcgaagaggccgagatgcgacgaagactcgtccgagggcggcagcggctccgcgctggagctcgctgacgagctggcgttcgacccgtttgtgctgctgcagatgccctactcgggtgggtacgacgacgactcactggacggccttttcgccgcagatgaggccgtgcagcaggacgtgggcaacggcatggacggcgtccgcctgtggagcttcgacgagttccccgccgtcgacggttctgttttctgacgtttgcttactacgtactactactattttctgcctggtggaatcatatgtgatagtgctgcatgtgtctgcctgatcgtcagattgtactccactctggatatttgtgctacgtactcgtctggtatttcctactgtgggtcaatggttcctatgaatttgttcacgtcggcgaaactctgtattgtacggtcgtgattgatgtgccaaattaaataagcctgtgaacctggttctatgtatatatggtatcttgattatgagtcaccggcctcctaaccttcccctgccatgtttgggttggagcatcctcgtgc

SEQ ID NO: 470 - DNA, 990 bp, Zea mays
  Clone ID: TF_ZmC19431_2
ccggccgggattggtatcaagaaaaacttgtcgaaaaatacacagggcacaatgtgcggaggcgccatcctcgcggagctgatcccgccgacgcggcgcgtggcgtcgaagccggtgacagaaggccacctctggtcggcgagctccaagaaagccggcagcggcagggacaagaggcaccagcacgaatacgccgacgatgacttcgaggccgccttcgaggacttcgacgacgactttgacgtgcatgaagacgacgaggacggccacttcgtattctcgtccaaatccgccttgtccccaggtaatccgttcgttcgagggtgcaagtgcaataatctgcacgggcagaatgttattcacgtacgcgcgtccatgggtttgggtttgggtctggccatgacgacgttggcaagaactgcatgctagactgctagtgtaatctcaagggaaagagcccgtcttgtgtatagccctgcacgacgggcgcgcggcgagccagaagaagcagcgcgggcgccagttccgaggcatccggcagcggccctggggcaagtgggcggcggagatccgcgacccgcacaagggcacccgcgtctggctcggcaccttcagcaccgccgaggacgccgcccgggcctacgacgtggaggcgcgccgcctccgcggcagcaaggccaaggtcaacttccccgcagccagcggtcgcgctcgcgcgcgcccacgccgcggcgacgacggcaacccacgaaccgcgccggaaccgtagcaccctgctgctgctgctgctgctgcagcacagcccgctctgctgcctcgaggggggagagtcagagagacgcagaggaaggaagggaacgccgccgtgaagcctgaagctacgcagtcgttcgacgtgggcgctctcttcttcaacatggccttccccaccttcccagcctcgtcgccgccgcaggacgtggaggcgtcctttctcggcagtaccgccac

SEQ ID NO: 471 - DNA, 1645 bp, Zea mays
  Clone ID: TF_ZmC7298_1
ccgtagcctatatagcttgctcgcataaacgtcaaaaaggagactttgtcggccctcttccggcaccggcaccggcaccagcgccaatctagctagtcagtttagcttcgctccttcgcttgcttgcaagtaacagcctctctcgtgtccaaaaagaaagtctttctctggaaaggagagaaggatcatcatcaccaggatcaagaaagaactcgtcgattccttaccccttccgtcttcttctgatctcagctctatccactagctaggagatggacatgaacaacgggtggcttggcttctccttgtctccttcggcagcgagcaggggcggctacggctacggcgacggaggcggcggagcgagcgcgagcgcgtgcggggatggagagggctcttgcccctcgcctgccgcggctgcctcgcctctccctctcgtggccatgccgctcgatgactctctgcactatagctctgctccagattggaggcacggcgcagcagaagccaaagggcccaagctcgaggacttcatgagcatcacttgcagcaacaagagcagtggccgcagcctctacgacagctgcggccaccacgacgacgagcaggccagcaagtaccacgaggtccacggcatccaccccctctcgtgcgggtcgtactaccacggctgcatcagcagcggcggcggcggcggaggcggcattggcctggggatcaacatgaacgcgccgccctgcaccggcgggttcccggaccaccagcaccaccagttcgtgccgtcgtcgcaccacggccagtacttcctgggcgccccagccgcaagcgcgggcccgccagcaggcgcagcaatgccgatgtacaacgccggcggcggcagcgttgtcggcggctccatgtccatctccggcatcaagtcctggctccgggaggccatgtacgtgcctccggagcgaccggcggcggctgcgctgtcgctcgccgtgacggatgacgtcccgccggccgagccgccgcagctgctgccggcgccgttgccggtgcaccgcaagcccgcgcagacgttcgggcagcggacgtcgcagttccgtggcgtcaccaggcacagatggaccgggcggtacgaggctcacctgtgggacaacacttgcaggaaggaaggccagactaggaaagggaggcaagtctacctaggcggctatgacagggaggagaaggctgcgagggcttatgacctggcagctctcaagtactggggcccctcgactcacataaatttcccgctgagccactacgagaaggagctggaggagatgaagcacatgtcgaggcaggagttcattgcacacctgagaaggaacagcagcggcttctcgaggggagcatccatgtacagaggagtgacaaggcatcaccagcacgggagatggcaggccaggattgggagggtcgctggcaataaggacctgtaccttggcacattcagcacgcaggaggaagcggcggaggcgtacgacatcgcggcgatcaagttccgtggcctcaacgcggtgaccaacttcgacatcagcaagtacgacgtgaagcgcatctgcgccagcacccacctcatcggcggcggcgacgcgtgcaggcgctccccgac

SEQ ID NO: 472 - DNA, 257 bp, Zea mays
  Clone ID: TF_LIB3066-002-Q1-K1-D7
cggacgcgtgggcgagggggtggtggagagcaagcccgccttcgtcgtcgtcgcctcgtccgcggcgacgcagtccagggcgcgccaggaagcaccggacccggcgccggcggcccgaccagaaccaatccaggggcgtccgcggccgcccgtggggcaggtgggccgccaggatccgggacccggtcaagggcgtccgcgtttggttgggaactttcccttcggccgaggccgcgcggcgcgcttacaaccacgcg

SEQ ID NO: 473 - DNA, 1262 bp, Zea mays
  unsure (1)..(1262): unsure at all n locations
  Clone ID: TF_ZmC74396_2
cccacgcgtccgcccacgcgtccgcccacgcgtccgcccacgcgtccgcccacgcgtccgcggacgcgtgggtgcgcaagtacgctgccccgcggtcgtcgcgcttccacggcgtcaccaggctcaagtggagcggcaagtacgaggcgcacctttgggacaacaccagccaggtcgaaggccgcaagcgcaagggcaagcacgtgtacttaggcagctatgtcgatgaagagcaggctgcaaaggcacatgatttggctgcccttaaatattggggcacagggccaaacaccaaactgaacttcaatatttctgattatgagaaagaaattgaggttatgaagaccatgtcccaagatgaatttgtggcctacataaggagacaaagcagttgtttctcaagaggtacttcatcataccggggtgtaaccagaggcaaggatggcaaatggcaagcaagaattggtaggatcggtgagagtagagacaccaaagacatttaccttgggacctttggtgagtgaagttctgtaatataccatgtcgaccttgtgggacttccaaaggttttctatcaactagaaagcaactgtcagctgatgcagttatctttaattgaaattgactatcggtttgcagaaactgaagaagaggcagcagaagcttatgacattgcagcgatcgagcttcggggtgttcatgcagtcaccaactttgacattagtaattactgtgaagatggtttgagaaaattagaaggcccatcagaggtggctaagcttggaagtccgtcggaggttgtgaagctcgctgggcaatagatactagattagcaacgtgtaaattagtttctatttcgtttcttttgtcttcatattctctcccttttgtattcctgattttttttgccgttttgtgagttccctccttgccttattggcaagccagtatttacccgattcgaaaggacaatgtgatgttgtattttagcctcacagaaaggtattacttgtcttcanattctctcccttttggattcctggttttttttgccgttttgtgatttcccccctgccttattggcaagccagtatttacccgattcgaaaggacaatgtgatgttgtattttagcctcccagaaaggtattactaacctttgatgtccctgcagaagtcgaccccatgttagaaatttagttccttccaaaaaaaaaaaaaaaaaaaaaaaaaaaaaaaaaaaaaaaaaaaaaagggcggccg

SEQ ID NO: 474 - DNA, 353 bp, Zea mays
  Clone ID: TF_ZmC390422_1
agatttggaaacccttctgctgaaagagaactattattatgtatttattgtggtggtggaagagaagaagagcatgtgtagtaggagctgatgaagaagtggaattattgttatttgtttgtggttgtattggcataacaacacgttcaggaaaattgagtttggctttgtttcctttgaacctcaatgcagcagcatcataagccatagctgcagcctctgccgtgtcaaaggtgccaagccacactctagctgctttcttagggtctcttatttctgctgcccatttgccccatggtctctgcctaactcctctatagtgctttttcctaatatcatcactcgagccgaat

SEQ ID NO: 475 - DNA, 798 bp, Zea mays
  Clone ID: TF_ZmC5960_3
atcgacacgttcgggcaaaggacctctatatatcgaggtgtaacaaggcatagatggacagggcggtatgaggctcatctatgggataatagttgtagaagggaagggcagagtcgcaagggtaggcaagtttaccttggtggctatgacaaggaggacaaggcagcaagggcttacgatttggcagctctcaagtattggggcactacgacaacaacaaatttccctataagcaactacgaaaaagagctagaagaaatgaaacatatgactagacaggagtacattgcatacctaagaagaaatagcagtggattttctcgtggggcatcaaagtatcgtggagtaactagacatcatcagcatgggagatggcaagcaaggatagggagagttgcaggaaacaaggatctttacttgggcacattcagcaccgaggaggaggcggcggaggcctacgacatcgccgcgatcaagttccgcggtctcaacgccgtcaccaacttcgacatgagccgctacgacgtgaagagcatcctcgagagcagcacactgcctgtcggcggtgcggccaggcgcctcaaggacgccgtggaccacgtggaggccggcgccaccatctggcgcgccgacatggacggcgccgtgatctcccagctggccgaagccgggatgggcggctacgcctcgtacggccaccacggctggccgaccatcgcgttccagcagccgtcgccgctctccgtccactacccgtacggccagccgtcccgcgggtggtgcaaacccgagcaggac

SEQ ID NO: 476 - DNA, 397 bp, Zea mays
  Clone ID: TF_LIB3279-060-P1-K1-B7
cagctctggtatgtatccatcaatggcgtagcgtgttgctcaccatcgtctccctccatggtctccatgcaggcgcgtacgacgacgaggacgcagcggcgcgcgcgtatgacttggcggcattgaagtactggggccccgacaccatcctcaacttcccggcgtctgcatatgaagcggagttgaaagaaatggaggggcagtccagggaagagtatattgggtccttaaggaggaaaagcagtgggttctcgagaggtgtttccaaatatcgaggtgtcgcgaggcatcaccacaacgggagatgggaagcgaggattggtcgcgtctttggaaacaagtatctctacctcgggacttacgggacgcaggaggaggcggcgatggcgtacgacat

SEQ ID NO: 477 - DNA, 461 bp, Zea mays
  Clone ID: TF_ZmC214275_1
agaccggacgcaggagtcgacacgcgagggccgagaaattgagcagggcgcgcgcgcccttgacgctgagcgcggcggcgtcgtgcgcgcgcgccgccatctccgggcgcgggaaggtgcccagccagatgcgcgacttcttgcggggctccctgatctccgacacccacttgccccacgcgcgcatgcggacgccgcggtacgccggggcggcggcggcgtgcgggcgcgggcgcttcttgccgctggtggtggacgacgtggaggaggggtcggacgagtaggaggacgtggacgaggtgtcggagctgtgctggctcattgccatatccatacagatacagggttgttagtcgatcgtgtgcgtgtgtgtgtggtcgagcaagagagatcgaggacagaggtggtgcaatgcaatggcgggtagatactagctaggtagctgtcggaacccggccggc

SEQ ID NO: 478 - DNA, 4594 bp, Zea mays
  Clone ID: TF_ZmC6822_1
gccggccgggttcccaattgggttcgccggccgggagcgcatacacccagagccgcggctctataaagccgcacgcgcgcggagggggggcggggagagcaaaattcactgctccctgcccgtcgaaccagccgagcaagccgcaaacccagcgagccgcggcgcctcgtcgcgcgcgccttgcttgtccgcttcttcgtccgaccgtccgccggtccggtccgagccgagccccccgaaggatggcggagcccgcggcggcggggaggaagacgcgggtggggccgtacgaggtcggcaagaccatcggggagggcagcttcgccaaggtgaagcacgcccacgactcccgcacgggcgccgtccgcgccatcaaggtgctcgaccgcaaccacgttctccgccacaagatggtcgagcagatcaaacgggagatttcgactttgaagctaatcaaacatcccaacgtggttcagctgcatgaggttatggcgagtaggacgaagatatacatggttcttgaatttgttgatggaggcgagttattcgataagatcgtcaattctggaaggctaggagaggatgaagctaggatatactttcatcaacttataaatgcggttgattattgtcatagccgaggagtgtaccatagagatctgaagccagagaatctacttctggactcacatggaacccttaaagtttcagactttggcctaagtgcatttgcaccacaaacaaaagaggatgggcttctgcatactacctgtggaactccaaactatgtagcacctgaggtgcttgctgataaaggttatgatggtatggctgcagatgtatggtcctgtggcataatcttatttgttcttatggctggatacttaccctttgatgatcggcacatgtggggggttccgcggccccacgcgcccggcagcggtgactgttgcggtgttgccgcatccacgccctagtcgaccacgccgcccccagcagcccgctgctgccgcggctcgcgcccccaggagcccccgccgtcgcggctcgcgcctcgtatccgtaacagctacaccgcgccgcctacccccgcttcctgctggctgcatcgtcctcaggtcttccgaaggcgagctccaatccccaaccactattcacaagatgactacaaaacttgagcaatcttctgcggagcatcgcccagcaaaattcgcagcaccatcgtctttgacccccaagatctcaatgtttggggcaaaagctggattcatcatacctaagaacaagctggccggctcactcgtaatccggagcaccagtgacaagaatgaaacaccaactgcatccaacgaagatagcagcaggcatgttcacagaaagacaaagtgggggcctgaccttgctttggaccctgtcgtgtgcaaaggaagggctttggcctaccagactcgagtggagcaaatttccaagcagctgaagtctggagctttggacacgtccgaaattgatggttcagtgtctgctggaaatgaattgaattctattggtcctgacatcttgaaagagaacgagctgggaaatgttgaactattggaacttgaaagacgagagcttatcggtgaaatactccgtttgaatccgggatataagacacctgagaactacaaaccagtacttagggagacaaaaatccctgttccggcagaagcacacccaggaaataatattattggagttcttctaggatctgagagcaatacccagaagagactacatgaagaaactggtgctgtcattcgagtgtatgggactaagaaaatcaatggagagaagagtgagattcgtcatcaagacataaatgaaacacaagatgcttatgaagacctatacatcaatgtatcggctgactcttatgataaagtagatgctgcagttgtgttgattgagctgcttcttgctcctgtttccgtaaagtcgacagctacttcaacagctgctactgtttcttcagcagatacatccaaggatgcagtttcagctaatgtgcaactggagcagaataccacgtcacagccagatctacttcattaccaatcacacaacgcaccttggctgcccacaccccagaccaatgctccatcaattccttccacggggcctgttttgagtacattacctaacaatccatcgcagccacaaccgcctgctggttctttcagtatgcctccatatactggtcaacctcctcacatgaatagcatgccagcaaatccatttcctgttcctgggcctcagcaaccagtaccaagcaatcaacaacatccacctcaatttcgagctaactcctcgattgggccttttttcggtcaaccacctggtattgtaagccaacaaatgccaccatcttcctcaatgccaccgccagttagaccccttcaaataccccatgcctctggtggctggccccctttctctcctgttacatcacaatctcataggcctctgcaagctccaccgacttttatggcagtgagacctcctatttccgtctctcctcttggtgcaactccaccgcaaggtcccattgcattgacaccaccaaatatgcccaccatgtaccgcggccagcatccaccagtaccaaatttcactggttcagcgccattggtttccaggcctcctggtggtggggctcagtcttttcctacagctgcgcctcaaggcccttcctcagtagcatttcccggtggaccatcgctgcggccaccttaccctccggcgcctgatcaagcgagggggccacctccagctttctctccagttggatcaactcctggcatggtgcctccacctattgcatcttccggcctgcctgccccgcgtcctgcgaacacgagctgcatccagacacaagtagtagcccctttgagacctccgctcccagccgcgggcgattttactttccggcctgccataccaccggcgcatgctccagagttcgcagcaccaggcagtcaaatgggagcaatacatggcagaactcaccaccctggaccattctcctcccatcctggtgaccagaagaaccccagccaaggtttccaagggccgtttgatggcagcaggcccatgtacacgacgaatcaggctcggatgcacgctccacctcctccacacttccacggagccttccccaggaacgcatctcctcttgagttcccagcggggttccggggagcctggccgtccgtgcaggcacctccgatgccggcaccgtcacatccatcgtctttcccgccgtttcagttgaggccaccgccaccgccgcagcaggatatgtctggcgcaggcggcaccaggtggcccggtggcaatcaaatctacaacccttttgcaccaacggctgcggcggcggctcagagagcggaggctgaccctgagtacgaggatctcatggcatcagttggcatgaagtagcgaagactgctggctggcccctgatctgtctgtggcacaaacacagaggcttcttcctattgcttgccaagatgtgcgggttactaatctcctccaatgtatctctagatggtactgaattccgttccatcatagacaggtgccatgcttgaacgaaaaacaaaaataaaaaataaactagtggaccttgtttgagacatgctgttgggtgccgaggttgtgctctgatgacatccctctcctcgctccgtgcctggaatcctttccccctttctctccccttcgctgaccgctggaatcaatttagtcgggggaatttaaaaatcctggagctgccacaggaagatctcttaatttataatttgttcgcattcgaaaaaaaaaaaaaactagccgcgggctcttgagatgcttgactacgacgaagagttcgaggccgagttccagcttttcgacgacgatgacgagtgcgaggccgagttccagcttctcgacgaccaccaaccatctcccgcagcttcgcctgaggccagcggctgcaagcggaagcctgcccttgctcctcctgctggtgcccccgcttccacggatccggcgaccccgtgctccaggaagtacaggggcgtccggtaccgccggtcaggcaggtgggccgcggagatcagggacccgcggcaggggcgccgcgcctggctcggcacgtaccgcaccgccgaggaggccgccctggcgtacgaccgcgaggcccgccggatccgcgggaagagcgcgcggctcaacttcccgctgctcatcccgcacgagggtcccggccgtcacgcgcgcacgccggtggccatcgacctcaacttgccgcccgtctccgacggtctcggcgtcccggctccggctggcgtcggcgacgacggcacggcgaatgccgacggagatgcagatatggccagtactaagactcagagcacgctagcgcgggtcaaggaactgatcgcgcagggacctcacgacgagcggctggcggcgaggatcgtgcctgagctgatgatgcacgggagcagggacgaggctgcggcgttgatcgccgagttcagccgtcagatggaggagatcgctgcgttgc

SEQ ID NO: 479 - DNA, 872 bp, Zea mays
  Clone ID: TF_ZmC6822_4
atccggttcatctatttttagagttgccacgcgcgagacttcccgcctccctgtcctatccctctctagtctctacccccatctgtagtgcggtctgcggccaagagcccggggaaacgatcgagacgatatgtgcgggggagcaatccttgccgaactcatcccagcacgggtgcaccggccgctgaccgccgccacgctctgggcggcggccctgagtgggaccactaccgtcggcaagtggaaggccgatgcagccgccgctaccgacgacgacgacgacgaagagttcgaggccgagttccagcttttcgacgacgatgacgagtgcgaggccgagttccagcttctcgacgaccaccaaccatctcccgcagcttcgcctgaggccagcggctgcaagcggaagcctgcccttgctcctcctgctggtgcccccgcttccacggatccggcgaccccgtgctccaggaagtacaggggcgtccggtaccgccggtcaggcaggtgggccgcggagatcagggacccgcggcaggggcgccgcgcctggctcggcacgtaccgcaccgccgaggaggccgccctggcgtacgaccgcgaggcccgccggatccgcgggaagagcgcgcggctcaacttcccgctgctcatcccgcacgagggtcccggccgtcacgcgcgcacgccggtggccatcgacctcaacttgccgcccgtctccgacgggtctcggcgtccgggctcccggctggcgtccggcgacgacggcacggcgaatgcccgacggaggatgcagatatggccagtactaagactcagaagcacgctagtgcgggtcaaggaactgatcgcgcagggacctcacgaca

SEQ ID NO: 480 - DNA, 777 bp, Zea mays
  Clone ID: TF_ZmC2464_2
cactccagccctgcccagcgcaccaccaacacctggcaccgtcctcctccgccgtcgtcactcgctcgatcgctcctccatccatggcgcccaagaacgctctccccgccgccagcggcatgacgctggagccgaggtaccgcggcgtccggaagcgcccctggggacgctacgcggcggagatccgggacccggccaggaaggcccgcgtgtggctcggcaccttcgacaccgccgaggccgcggcgcgcgcctacgacgccgccgcgctccacttccgcgggcccaaggccaagaccaacttccccgtcgcgttcgccacggccacggccacggacacgcgcgcgctcccgctcccgctccggctcccgctgccgccgccgccgcccaagaagctgtccgtgagcccgagcggcagcaccgtggagtcgtcgtcccgggactcgcccgccgcgccggcccccgcgccgtcgctcgacctgagcctcggcatgccgcccatggtggccgcccagccgttcctgttcctggacccgaggctcgcggtgaccgtggccgtggcggcgcccgtgcctcgccggccgaccgctgctgccgcgggcgcgggcgccagcaagcaggcagcatactcctgctgccgtgaagacgagcagagcgacaccgggtcgtcgtcatccgtggtggacgcctccccggcggtcggcgtggggttcgacctcaacatgccgccgccgggcgaggtggcgtagctggaccgcgcggccgctttaaaggatc

SEQ ID NO: 481 - DNA, 517 bp, Zea mays
  Clone ID: TF_LIB4827-035-A1-N1-F3
ccggccggcaccaaaactataccagcctagctagccctttcgacgtcgctccggctcctgcctagtgactcgtacgtttcggtgtttcgacaatgtgcggtggagccatcatcgccgacttcgtccccgccggctcccggcgtccggcgacagacgacaccatgtccgcctccatcctctccggcgaggaccatccggagctgccgctgccgctgccggcgccggcgccggggcgcaagacggcggaccgcgggatccggcgccgtccgtggggccggtgggcggcggatatccgcgacccgcggaagggcgcccgcgagtggctcggtacctacgccaccccggaggacgctgagcgcgcctactacgaggcggagcgcgagatccgcgtgcccaaagtcaagctcaacttcacgtccgccggctggggacggtacgcgcgcgccggcggcggcgcggccaagacgcgccgcaagtccgcggcggacgatgagagctcagtctcgtctcctccggc

SEQ ID NO: 482 - DNA, 810 bp, Zea mays
  unsure (1)..(810): unsure at all n locations
  Clone ID: TF_LIB4746-091-R1-K1-F6
ttgggtacctcgaggccggccgggatccttatttccgtcaccgattgcttccgactctattaatttctgacacaaactctgcgtcctcctcctcttctcccgcgacgcagggattgcggcaggtgtacctagccgatacatgcaggtggattcgaccccgctcacgccgctgcaagggcgtacgaccgcccgaccgggaggtgatcaagttccacggcgtggacgccgacatcaacttcaacctcagcgactacgaggacgacatgaagcagatggggagcctgtccaaggaagagttcgtgcatgtcctgcgccgccagagcaccggcttctcgagagacagctccaggtacatatacattggactattcgacagcgaagtagaggctgcaagagcttacgacaaggccgtcatcaaatgcaatggcagagaggccgtgacgaacttcgagccgagcacgtatcacggggagctgccgactgaagttgctgatgtcgatctgaacctgagcatatctcagccgagcccccaaagagacaagaacagctacctaggtctgcagctccaccacggaccattcgagggctccgaactgaagaaaaccaaggcaagcgctaacgatagatataccttgacaagctaggcagctgaagggccccttgaatgaagggccgtcgcaacgcactttagtaatgataaaaaataaaaaacattatatggacatacgttactggggtaagtttgtttgcaatcaataatatattaatatattgtatctatacatataanaaaaaaaaaaaaaagcggcc

SEQ ID NO: 483 - DNA, 700 bp, Zea mays
  Clone ID: TF_ZmC3711_3
ggaggacataagggatttgtctcgagaggaatgtgtgacatacttgagaaggaggagcagctgcttttcaagaggagcttctatttatagaggagtgacaagaaggcagaaagacgggagatggcaagcacgcataggactggttgctggaactagagacatttacctgggaacattcaaaacagaggaagaagctgcagaggcttatgatattgctgccattgagatacgtggcaaaaacgctgtgaccaattttgaccgaagcaactatgtcgataagggtatgcactgtatagaaggcgaaggcttgaggctgcttgcatccaagccagaagaatgacttccaagttcaatgcagtgattgtcgatcgagcagatttggccagacgtatatgcagcttagttggtacatatacagataggagaaccggttgcagtttgtcaatattcctgctttacatgacttgggattacagttaaatcgacccgctagcaaaaaaaagtgtgcaaatgttagtagatttggccagacatatatgaagattggcctcgtaggatagatctttctgcaaatgttagcgaagccagtgtttatgttctgtttgctagattagcgttatcagtttgcacgttccccttttttttctgaataattgtccttgtatgatcttgagggaatgcgtttacctggtcgtttgcc

SEQ ID NO: 484 - DNA, 113 bp, Zea mays
  Clone ID: TF_LIB3592-083-Q1-K6-H12
tgctacgcgtgccaggtgccgagccacatgcgcgtacgggtactgggcaggcggatctccagcacccacttgccccagtgccactgccgaacgccggggctcagctacgtggt

SEQ ID NO: 485 - DNA, 1029 bp, Zea mays
  Clone ID: TF_ZmC25015_1
gaaactagggtgggggagccctgagcaggggaggaaaaataaactagtggccaaaccctagcccgccgagctcccgcgtgcgctctccgccgcccgcctactcctctctgtccgcgatgcgccgggcgaagccgcagcagccctcgccgtcgcccgagatccggtaccgcggcgtgcggaggcggccgtcggggcgctacgccgccgagatccgggacccggccaagaagaccccgatctggctcggcaccttcgactccgccgaggccgccgcgcgcgcctacgacgccgccgcccgatccctccgtgggcccaccgcccgcaccaacttccccggcgccgcggcttccgcgccgcggcacagggcccgctccgcctccgcctccgccgccgccgcagcccccgcggcggtgccggccacgtctagccacagcagcaccgtcgagtcgtggagcggcggcgcgccccgcgtcgccgccccgccgcggagcgccgccgcgcccatggaggaggacgacgacgaggactgccacagctactgcggatcctcgtcgtccgtgctctgcgaagacgcccgcggggacgacgacgacgacgcggcggcgtcccacgcgcccctgccgttcgatctgaacctgccgccgccgatcgacgcggctgctgaggccgatcagatgggtgcccgctacgacacgctactccacctctagctcgcgacgacggccaggaattagaggaaggaatcgagaccgtctgtccttcttcggctgctgatccggtggtgttctatcgctagatggataattcttgcctttttcccccttcttttcttctgctactttttttgttttcttctcttaccaccacgatgatgatgattcgatattatgtgaataattcagttatgtccatgtaagctgtgaggaaggaaatctgagcttttccttatcttcctatggtgtttctgctggtgctgctctttcatttgttggaaagataatggaagaaatcaagagaaattatttacac

SEQ ID NO: 486 - DNA, 1459 bp, Zea mays
  Clone ID: TF_ZmC983_1
cccaccctcatttgacgctgatgataaaaaggccctcgcggtcgcaccacatacaggcaaccagcctcttgatcacttgatcctcctgcacaccagagtaccagacaccactgcgcatcagtgcaaaagaggtagctaccctatctgccatggctcaagagctccacgaaacgtcctcttgctctgccaccaccacctcgtcgtgcaccacatcctgctgctcgtccactgtcacagactcgtcctcttcgcccccgtcaccggcggcggccaatgccgcgcccgcgacacggaagcggcaggcgttggaggccgaggccgaggccgaggcgggcggtgaggaggaggaggaggaggaggaaggctgtgctggtaataaggcggcgccggccaagaagcgaccgcggggcagcgaggggaagcacccgacgttccgcggcgtgcggatgcgggcgtggggcaagtgggtgtcggagatccgcgagccgcgcaagaagtcgcgcatatggctcggcacgttccccaccgccgagatggccgcgcgcgcccacgacgtcgcggcgctcgccatcaagggccgcgccgcgcacctcaacttcccggacctcgccggcgcgctcccgcgcgccgcgtccgcggcgcccaaggacgtccaggcagccgccgcattggccgctgcgttcacgtcgccgtcatcggagcccggcgccggcgcgcacgaggagcccgctgccaaggacggcgccgcgcccgaggaggcagccgccgacgcacaggcaccagtaccagtagcactaccaccgccggcggcctctcggccagggacgccgtcgagcggcgtggaggacgagcggcagctgttcgacctgccggacctgctcctcgacatccgggacgggttcgggcgcttcccgccgatgtgggccccgctcactgacgtggaggaggtggtcaatgcggagctgcgcctcgaggagccgctgctttgggagtagcggtcagagatgctcgttgcctgcattgcaaacgaggtctaaacaatagtagcagtggtatcccatttcttcttcgttttgcttctcgccctctcctttttttctctctttcttgcttactttggggggaaaacagctagttctttttttcttcttcttcttcttcttttattaaattgagttttaataagtataaacatatataaacgagagagagatataagctgtgtacttaaaagtgtaagacgagtacctatcagttcattattacgtatctactagtggtaccagtagtgatcatgttgtcccggccgtgtgtgaattccagcggtagttgttgaccttgctagatttttatagttgcttgtgttgtgtgctgtaccaaaattccccagggaaaaagggcaggaagcaaacgaatgtaacgggaacacaagcagcatctaatctctattactgctgac

SEQ ID NO: 487 - DNA, 1069 bp, Zea mays
  Clone ID: TF_ZmC3831_1
ctgggtacctcgaggccggccggggccggagacgcaacacacatacagcccctcttgcccacaccacctcgctgaaccggaagacccgcacacacacgccacttgtagaccatggcgccccgggtggcggacaagtcgcctctaccgccggccaccggcctggggctgggcgttggcggaggagtcggaggcgtgggcatgggcccgcactacagaggcgtgaggaagcgtccatggggacgctacgccgccgagatccgcgaccctgccaagaaaagccgcgtgtggctcggcacgtacgacacggccgaggaggccgccaaggcgtacgattccgccgcccgcgagttccgaggcgccaaggccaagacgaacttcccgttcccctcccagtgctccgtcgcctccggtgctgccggtagcgccagtagcaacagcaccgtggattcgagcggtggcggtagcggctgtggcatccaggcgcctatgcaggccatgccgcttcctccggctctcgatctcgacctcttccatcgggcggccgccgtgaacgcagtctccaccggcatgcggtttccgttcaagggctatcctgtcgcctgcccgacgccacagcagtactttttctacgagcaggcggctgccgcggcatccggataccggatgctcaaggtcgctccaccggccgtgactgtggccgcggttgcgcagagcgactccgactcgtcgtctgtggttgatcactccccttcgcctcccgcggtgacggcaaacaaggtgggcttcgaactggatctgaactggcccccgccggcagagaactaggcaggccggagtttttggctgacgacttagtagcttccttttcccttttgccttcatcaggaatgttacttgtggttgttttggtcctgtatggctgtattcttgttctgtagactaagagatggggagtcttgtaaatattttttttccgtcgagacggaaatgaactgagatctgttcgtctgtctgatcaagccggcgttgatatgggcttaagctatggggtattgattagtaattgcca

SEQ ID NO: 488 - DNA, 1703 bp, Zea mays
  Clone ID: TF_ZmC21463_1
cccagcgtccggttctacgcttggcttggctgcgctgcgcacaccgaacccctcgccgtcgcggctcgcctcggctccgccccgaccgaccgatcgatccggccggcggtgggcgccatggcctcccccaaccccgaggccgcggggctgcaggccgtggctgtggcgggggcaggggagggcggctcgtcctcgtcgctcagcgccgttgcgggagcggctgcgttgtccggggagctggtgcccaggagggcgttggcgctgcgcaaggagcgcgtgtgcacggccaaggagcgcatcagccgcatgcctccctgtgcggcggggaagcggagctccatctaccgcggggtcacccggcataggtggacaggtcgatatgaggctcacctttgggacaaaagcacgtggaatcagaatcagaacaaaaagggcaaacaggtatatctaggtgcatatgatgatgaagaggctgcagcaagggcctatgaccttgctgcattaaaatactggggagctggaacacaaataaatttcccagtatctgactatgcaagagaccttgaagagatgcagatgatatccaaggaggattatctcgtgtctcttaggagaaagagcagtgccttctacagggggttaccaaaatatcgtgggcttcttaggcaacttcataattccagatgggatacatctttgggactcggtaatgactacatgagccttagttgtggcaaggatatcatgttggatgggaaatttgcaggaagctttggtctagagaggaaaattgatcttacaaattacatccggtggtggctaccaaagaagacaaggcagtcagatacatctaaaacagaagaaattgctgatgaaattcgagctattgaaagttcaatgcaacagactgaaccctataagttgccttctcttggcttcagttctccatcaaagccctcttcaatgggcttatcagcatgcagcatattatctcagtctgatgcctttaaaagcttcttggagaagtctacaaaattatctgaagaatgtagtcttagcaaagaaattgttgaaggaaagactgttgcctcggtacctgctactggatatgatacaggggcaattaatattaacatgaatgagttgctagtacaaagatctacttactcaatggcccctgttatgcctacaccaatgaagagtacctggagccctgctgatccttccgtggatccacttttttggagcaactttgttttgccatcgagtcaacctgttacaatggcgacaataacaacaacaacgtttgcaaagaatgaggtaagttcaagtgatccattccagagccaagagtgactgcacgagcttactgaagcaggatattttagattgttaataaagctttggacatttcaatcgatgaacaacaggtcaaagacagcatcccgtgcgtcaactagattctttttgtcaagcttttgatgtcgcaacttgtgagcaatactccttgtttatccatacttcataggacatgaatagaaggtatgacaagtgcaagcatagttatgtaatatacagtggctagttgccagaaaatgagatttagttgtgtagagctgtttgtacatattgagatggttgtttcagttcaatctcaacaggtttgaggaaaatatccaacgaaatgatacagttttaatgct

SEQ ID NO: 489 - DNA, 490 bp, Zea mays
  Clone ID: TF_ZmC8688_1
gccgggcttccttcacggattcccaaatactcgcttccaataccaattctccgatccacgttcgttcccgcaccctcgcgctccgctgatccggcggcatgcggcgccgcggcgtggcggcggctgatgcggacggtgacgtggagttgcggttccgcggggtgcggaagaggccgtggggccggtacgcagcggagatccgggacccggcgaagaaggcgcgcgtctggctcggcacattcgactccgccgaggacgccgcccgcgcctacgacgccgcagcgcggatgctgcgcgggcccaaggccaggaccaacttcccgctccccgccgcagccgccctccaccacccccacatgcccgctgctgccgccgcagcagctccaccatacacaacatatcccaccgccacgggcgtcgtctcgacgccgccggtcgccagaccggcttgcagcagcctcagctccaccgtggagtccttcagcggcgc

SEQ ID NO: 490 - DNA, 1173 bp, Zea mays
  Clone ID: TF_ZmC8439_1
cgggtcaacccacggatcaagtgagatccgccgcttgggcggacgcatgggccgaggccggccgggccgggaaaatcccagacgccacgccacccaacacatacaaacacacgcacgcgcgcgcgcgcgcctcccgctgttccgcaaaacaaaggaaacgaaggagaggaggccatggcgccgagaacgtcagagaaaaccatggcaccggcggcggccgctgccacggggctcgcgctcagcgtcggcggcggcggcggggccggcggcccgcactacagaggcgtgaggaagcggccgtggggccggtacgcggcggagatccgcgacccggcgaagaagagccgggtgtggctcggcacctacgacacggccgaggacgccgcgcgggcctacgacgccgccgcgcgcgagtaccgcggcgccaaggccaagaccaacttcccttacccctcgtgcgtgcccctctccgcagccggttgccggagcagcaacagcagcaccgtcgagtccttcagcagcgacgcgcaggcgcccatgcaggccatgccgctcccgccgtcgctcgagctggacctgttccaccgcgcggcggccgcggccacgggcacgggcgctgccgccgtacgcttccctttcggcagcatccccgttacgcacccgtactacttcttcgggcaggccgcagccgcagccgcggaagcagggtgccgtgtgctcaagctggcgccggcggtcaccgtggcgcagagcgactccgactgttcgtcggtagtggatctgtcgccgtcgccaccggccgctgtgtcggcgaggaagcccgccgcgttcgatctcgacctgaactgctcaccgccgacggaggcggaagcctagtcgtcgaagcttttaatgactgtctgtcttcttagttctttcttctcctttttctcgaggaaaattcggtactactaagctgagagacgctctcctccgacagacgacgtcgacgacgggcatttttgtaaatagtttttgcgccgggacctttttagtttatgatgaaagctgtattgtcaccgaagacaggtcctgccggcgttgttatggaccggattactatattatattatgcactactagtattttgatagccaaaaaaaaaaaaaaaaaaaaaaaaaactcgactcgtgc

SEQ ID NO: 491 - DNA, 165 bp, Zea mays
  unsure (1)..(165): unsure at all n locations
  Clone ID: TF_LIB3607-059-Q6-K6-A10
ggcgtccggnaacccccgtggggacgtacgggggggnagaccaaanacccngccaggaaggcccgcgtgtggctcggcaccttcgacaccgccgaggccgcggcgcgcgcctacnacgccgccgcgctccacttccgcgggcccaaggcggaagaccaacttccc

SEQ ID NO: 492 - DNA, 1175 bp, Zea mays
  Clone ID: TF_ZmC278_1
ttggtggagaattttgtaagataaacatctcgggctgaattgggcgagacggctcaaaattatttcatactggaattgccttggagaaatcagcagggctcgtttttaactctttcctcttgacgcggattagatatatgaccttgtatatatcttatgacgatggattgccttgttgggtcaggaagaagaggatgcggaggaagagcactggccctgactccattgccgagacgatcaagtggtggaaagagcagaaccagaagctccaggacgagagcggctccaggaaggcgccggccaagggttccaagaaagggtgcatgatgggcaaaggagggcctgagaacgtcaactgcgtgtaccgcggcgtgaggcagcggacatggggcaagtgggtggcggagatccgcgagcccaaccgtggccggcggctatggctgggctccttccctaccgccgtggaggccgcccatgcatacgacgaggcggcgaaggcgatgtacggccccaaggcacgcgtcaacttctcggagagctctgctgatgccaactccggctgcacgtcggcgctttcgctgctggcgtctagtgtgccggctgccgcgttgcaacggtctgatgagaaagtggagaccgaggtggaatccgtggagactgaggaggtggtacatgaggtgaagacggaagcgaagaatggtgacttgggaagcgtcaaggtcacctgcgtcattcagtccgcggaggagactgtgctacacaaggaaggggacgtaagttatgattacttcaacgtggaagacgtcgttgagatgataattgtagaattgaacgctgataaaaaatttgaggcacatgaagaataccttgatggagatgatgggtttagcctttttgcatattagaaagcacggtcatggggggggggggggagtagtaggaatagcttcattctagatgatgctgatgagacatagctttatactatgagccaaccggtacaacaagttgtcctgtgtgttgagttcctgtactatagtagggatgagttcgtgtttaatgagctctcttggctgttaatattgcacatttgttcgggtggggtgaaccctaaattagctcaaggaaaaaggaatggttacactgtacaccgaataaatttttaggattgcatt

SEQ ID NO: 493 - DNA, 301 bp, Zea mays
  unsure (1)..(301): unsure at all n locations
  Clone ID: TF_LIB5116-044-A1-PF1-F11
aagtgggccgccgagatccgcgaccccgtcaagggcgtccgcgtctggctcggcaccttcccctccgccgaggccgccgcgctcgcctacgacgaagccgcgcgcgccatccgcgggcccagggccaagctcaacttctcctcctcctctgccgtcgccgccgcggccccgggagcgcgcaagcgcggncgcgccgcgccccccgctgccaagccagcgccggtcatcaccctcgtcgacgatgaggaggagcacgcgacgagccttcgtcaagcacgaggacgaggcgagcgagggctcc

SEQ ID NO: 494 - DNA, 540 bp, Zea mays
  unsure (1)..(540): unsure at all n locations
  Clone ID: TF_LIB3606-042-Q1-N6-C4
gcgncggccatggcgagctgggtggcggcggcgcgcgccgagagcggcgtgctgtccgcagccgcggggcaccaccacgcgctggccctgtccatgagctccgggtcgctgtcgagctgcgtgaccgcgcaccccgcggcgcccgagtacggcgcggcggcggcggcgctggacggcgggcgcaagcgcggcggcgcggcggggcagaagcagcccgtgcaccaccgcaagtccatcgacacgttcgggcagaggacgtcgcagtaccgcggcgtgaccaggcataggtggacggggaggtacgaggcgcacctgtgggacaacagctgcaagaaggaaggccagactaggaagggcaggcaagtctatctcggcgggtacgacgtggaggagaaggcggcgagagcctacgacctggcggcgctcaagtactggggcccttccacgcacatcaacttcccgctggaggactaccaggaggagctggaggagatgaagaacatgacgcggcaggagtacgtggcgcacctcaggaggaag

SEQ ID NO: 495 - DNA, 1305 bp, Zea mays
  unsure (1)..(1305): unsure at all n locations
  Clone ID: TF_ZmC16163_2
ttgggtacctcgaggccggccgggctcctcagcccgttctcttttcccccaccctatcaacacaatttacccttcgtcttcccgcttccagcgcacccccatcttgagtctcgccgccgcaagcttgtgtaaggtgtaaccctaaccctaaaacacttaccttcgcctccagcaccacacttccatggaggggcgcggaggctaagtatagccaacctctacaccatatccccatggattgagcggattcccaaggcatgggtacaaaccctcacctgcaagagctggccgcttcggcggtggcggcttctgaaccaccaccgcgggcgcgcgtggtgcggatcctagtgcacgatgctgacgccaccgattcgtcctccagcgaggatgaggcaccgccacttcttcctcggcggaggtcgaggggtggtagcagcagcctgagcgtgaggcgccgtgttatggaaccggctggggcaagctcggccgttcggttccgtggcgtccgtcgtaggccgtgggggcgctgggctgcggagatccgcgacccgcacaaccgccgcagactgtggctcggcaccttcgacaccgctgaggaggctgccaacgcctacgacgctgcgaacatccgctctcgcggccggagcggcactaccaacttccctgcggcccgctactcgccccctccaaagccagcgaagcctatcatctcgctgactcctgaacccggaaaggtgatcaccttgccaccggtacctgtgaagccaaccttccctgttcaggtgaaggaagtgggtgggagctggggcggcctggtcaagggagctaggtcggaggtcaaggcgtttgcaccgaagccagtatggaagatgatccccagggtgcaccagaagtttccgggttgtgccgatggctctggcctgcgtgccgtccatgctgcctccatctacgtggaggaggttggcggtggctgatggtccaagtatctgcaattactatcgctagaggttttattgtctatctccatggcatcattataacctggtactgtattattttggttagtgttaaactgttgatgtggaaacctatgactcttgctgtgttatgatcggtggtaatataatgtgtatatggtgacatttggtaatatgttcctgatctatgtgatgcaatgtgctgtgctttgattgtgggatcaaacctgtcatatagtagtacaatctagatcctttcacatgaacagtgatacctagatgtatttgatggttatttcagttgaattaaacaaaattgctcnccnnc

SEQ ID NO: 496 - DNA, 550 bp, Zea mays
  Clone ID: TF_ZmC7298_2
gcttagcatccaattccattttctagcctcctcaatgtttggctgaatgcattcgattcgaacgttaactcaccttcttgttcttgcaatgccaatgcaatgtcaacaacgacgagcagtctacctaggcggctatgacagggaggagaaggctgcgagggcttatgacctggcagctctcaagtactggggcccctcgactcacataaatttcccgctgagccactacgagaaggagctggaggagatgaagcacatgtcgaggcaggagttcattgcacacctgagaaggcatcaccagcacgggagatggcaggccaggattgggagggtcgctggcaataaggacctgtaccttggcacattcagcacgcaggaggaagcggcggaggcgtacgacatcgcggcgatcaagttccgtggcctcaacgcggtgaccaacttcgacatcagcaagtacgacgtgaagcgcatctgcgccagcacccacctcatcggcggcggcgacgcgtgcaggcgctccccgacgcggcaaccgactagtgagctc

SEQ ID NO: 497 - DNA, 2323 bp, Zea mays
  unsure (1)..(2323): unsure at all n locations
  Clone ID: TF_ZmC67_1
agtttctgaacttgctgctgctcaagactgcgcataatatcaccggtctggcccnaccctagagagctcggtcggacaaacccaccacccacaccggccggccgggagagccacgaagttactgcgcgcgtacgtcgccggttccctttctcaccgcacgtcgtcgtcatggacacctcgcaccactatcatccatggctcaacttctccctcgcccaccactgtgacctcgaggaggaggagaggggcgcggccgccgagctggccgcgatagccggcgccgcgccgccgccgaagctggaggacttcctcggcggaggcgtcgccaccggtggtccggaggcggtggcgcccgcggagatgtacgactcggacctcaagttcatagccgccgccgggttccttggcggctcggcggcggcggcggcgacgtcgccgctgtcctccctcgaccaggccggttccaagctggccttgcctgcggcggcggctgctccggcgccggagcagaggaaggccgtcgactcctttgggcagcgcacgtccatctaccgcggcgtcacacggcaccggtggactggcaggtacgaggcacatctgtgggacaacagctgccgacgcgaagggcagagccgcaagggccgccaagtatatttgggtggctatgataaggaggagaaggctgccagggcgtatgatcttgcagctttgaagtactggggttctagcaccaccaccaactttccggttgctgagtatgagaaggaggtcgaggagatgaagaacatgacgcgacaagagtttgttgcttcccttcgaaggaagagcagtggattctctcggggtgcttccatctaccgaggtgtaaccagacatcaccagcatggacggtggcaggcgaggatcggaagggtggccggtaacaaggacctctaccttgggacgttcagcaccgaggaggaagctgcagaggcctacgacatagcggccatcaagttcagaggcctgaacgccgtcacaaacttcgagatcagccggtacaacgtggagaccataatgagcagcaaccttccagtcgcgagcatgtcgtcgtcggcggcggcggcggcgggtggccggagcagcaaggcgctggagtcccctccgtccggctcgcttgacggcggcggcggcatgccagtcgtcgaagccagcacggcaccgccgctgttcattccggtgaagtacgaccagcagcagcaggagtacctgtcgatgctcgcgttgcagcagcaccaccagcagcaacaagcagggaacctgttgcaggggccgctagtagggttcggcggcctctactcctccggggtgaacctggatttcgccaactcccacggcacggcggctccgtcgtcgatggcccaccactgctacgccaatggcaccgcctccgcctcgcatgagcaccagcaccagcaccagatgcagcagggcggcgagaacgagacgcagccgcagccgcagcagagctccagcagctgctcctccctgccattcgccaccccggtcgctttcaatgggtcctatgaaagctccatcacggcggcaggcccctttggatactcctacccaaatgtggcagcctttcagacgccgatctatggaatggaatgattcgggccgcccggtcgtggctgctggtcggcctccgctcgccgctggcgtctcgcatgtgcgaaaagggtggggagaagccatgagaacacgagactgacatgggcgctctcgcacaaaagacataaagcggggggactgaaagatcagaggtaccagtagacagtagtagtatgatggaagagacagtaagcagcgagtagtgtgctgcaggatacactgaccatcgatctgctaacaacaaaatgatcgttgcagctagctatagcatatttgcctttgcccttttgtagctttggtctggtctctctctctctctctctctttttttcagctttgttgctccccagcgtcctgcactgcatgccagctgctttgaagctttctctttctactgacatggttctgcaagtgccatcatagctttagtcagccctgtacaatggatgcaggaacgtcgtctttgaattggatctctgtagctcatctctccccctagctcccccactttgttttcttttttgtgctttcctttctgctgcctctgctagcgttatgtgtactgaacaagttcatcaaacagatatagcacccttgcaactaaaaaaaaaaaaaaaaaaaatttggagagtttctttaaataagactttttttttattttatttttttt

SEQ ID NO: 498 - DNA, 1198 bp, Zea mays
  Clone ID: TF_ZmC16163_1
acccctcactcagcccgatctcttttccgccattgggtcctcggaggcgggccggcgtcttcccgcttccagcgcacccccatcttgagtctcgccgccgcaagcttgtgtaaggtgtaaccctaaccctaaaacacttaccttcgcctccagcaccacgcttccatggaggggcgcggaggctaagtatagccaacctctacaccatatccccatggattgagcggattcccaaggcatgggtacaaaccctcacctgcaagagctggccgcttcggcggtggcggcttctgaaccaccaccgcgggcgcgcgtggtgcggatcctagtgcacgatgctgacgccaccgattcgtcctccagcgaggatgaggcaccgccacttcttcctcggcggaggtcgaggggtggtagcagcagcctgagcgtgaggcgccgtgttatggaaccggctggggcaagctcggccgttcggttccgtggcgtccgtcgtaggccgtgggggcgctgggctgcggagatccgcgacccgcacaaccgccgcagactgtggctcggcaccttcgacaccgctgaggaggctgccaacgcctacgacgctgcgaacatccgcttccgcggtgtcagcgccactaccaacttccctgcggcccgctactcgccccctccaaagccagcgaagcctatcatctcgctgactcctgaacccggaaaggtgatcaccttgccaccggtacctgtgaagccaaccttccctgttcaggtgaaggaagtgggtgggagctggggcggcctggtcaagggagctaggtcggaggtcaaggcgtttgcaccgaagccagtatggaagatgatccccagggtgcaccagaagtttccgggttgtgccgatggctctggcctgcgtgccgtccatgctgcctccatctacgtggaggaggttggcggtggctgatggtccaagtatctgcaattactatcgctagaggttttattgtctatctccatggcatcattataacctggtactgtattattttggttagtgttaaactgttgatgtggaaacctatgactcttgctgtgttatgatcggtggtaatataatgtgtatatggtgacatttggtaataaaaaaaaaaaaaaagcggcccaatgtgctggctttgattggggatcaaaaaaaaaaaaaaaaaaa

SEQ ID NO: 499 - DNA, 672 bp, Zea mays
  Clone ID: TF_ZmC587761_1
ctccttccctccgcgttcttatcagtacgttgtccgcgcctaggcaccaaagtccaaagcaacagccatagctcgatctcgatccccggcgcgacgaaagagaaagaagcggcggcaggtcgacaggtcgatcaactaaggtggatccccggaggcatgggaagaggcccctacccgccgacgaggaggaggaacagccgccaccgccgccgtcagcacccaagcacgagcaggtggaggagcagccgtatcaccccctcatcgcgcgcgctctgcagcagcaaggagctgccagcgccggcggaagcccgggagcagatgtggccgacccttccccgtcaccggaggcgtacgcgcagtactactactcggcgcgcgccgaccacgacgccaccgccatggtctccgctctgtcccacgtcatccgcgccacaccggaccagcaacaagcctactaccccgccggatccgccgctgtctcaggagaacagcagcatcagcacgatgcggcggctgcagcggccatcgctgaggaacaagggaggaagcggcactacagaggggtgaggcagcggccatggggaaagtgggcggcggagatccgggaccccaagaaagcggctcgtgtgtggctcggcacctttgacacggctgaggacgccgccatcgcct

SEQ ID NO: 500 - DNA, 964 bp, Zea mays
  Clone ID: TF_ZmC4601_1
attcggcctcagctcaatcccgagacaaaggaacccacctccactcccaccagcaagctcaagcaagcagccaccaccagcagcgatcagcggcagccatggacatgggccggcaccagctccagctccagcacgcggcctcctcgtcctccacctcggcgtcgtcctcgtccgagcaggacaagccgctctgctgctctggtcccaagaagcgccccgcggggcgcaccaagttccgggagacgcggcacccggtgttccgcggcgtgcggcggcggggcgccgcggggcggtgggtgtgcgaggtgcgcgtccccgggcggcgcggcgcgcggctgtggctcggcacctacctcggcgccgaggcggcggcgcgcgcgcacgacgccgcgatgctcgccctgggccgcggcgcggcctgcctcaacttccccgactccgcgtggctgctcgccgtgccgcccccgcccgcgctctcgggcggcctggacggcgcccgccgggccgcgctcgaggccgtcgcggagttccagagacgccgcttcggggcggcagccgccgacgaagcgacctcgggcacgtctcctccctcctcctcctcctcggcgacgaagccggcgccggcgattgagcgcgtgcctgtggaggccagtgagacggtggcgttggacggcgccgtgttcgagcccgactggttcggggacatggacttggacttgtactatgccagcctcgcggaagggctgctcgtggagccgccgccaccgccaccgcccgccgcctgggatcatggtgactgctgcgactccggagctgacgtcgcgctctggagctactagcaagctatagcagcaataagctccaccaactcatctgtactgtagtgtacttgtaccttgtaccttgtaccaaaatccaaattgatttgtagcgaattaacttaccaatcccccttggcaactcc

SEQ ID NO: 501 - DNA, 1002 bp, Zea mays
  Clone ID: TF_ZmC4601_2
tcgcgatctagaactagtctcagctcaatcccgagacaaaggagccctcctccacctccactcccagcagcaagctcaagcaagcagccaccacaccaccagcagtgaacagcggcagccatggacatgggccggctccagctccagctccagcacgcggcctcctcgtcctccacctcggcgtcgtcctcgtcctcgtccgagcagaacaagctggcctggtccccgtcctccccgcagccgcccaagaagcgccccgcggggcgcaccaagttccgggagacgcggcacccggtgttccgcggcgtgcggcggcggggcgccgcgggccggtgggtgtgcgaggtgcgcgtccccgggcggcgcggcgcgcggctgtggctcggcacctacctcggcgccgaggcggcggcgcgcgcgcacgacgccgcgatgctcgccctgggccgcggcgccgcctgcctcaacttccccgactccgcgtggctgctcgccgtgccgcccccgcccgcgctctcgggcggcctggacggcgcccgccgggccgcgctcgaggccgtcgcggagttccagcgacgccgcttcggggcggtagccgccgacgaagcgacctcgggcacgtctcctccctcctcctcctcgtcgccgtcgggcacttatgtctcgcaggcgccggcgccggcgattgagcgcgtgcctgtggaggccagtgagacggcggcgttggacggcgccgtgttcgagcccgactggttcggggacatggacttggacttgtactatgccagcctcgcggaagggctgctcgtggagccgccgccaccgcccgccgcctgggatcatggtgactgctgcgactccggagctgacgtcgcgctctggagctactagcaagctatagcagcaataagcttggcaatgccaccaactcatctgtactgtactgtacttgtaccctgtaccaaaatcaaaattgatttccagcaaattaacttaccaatc

SEQ ID NO: 502 - DNA, 1220 bp, Zea mays
  Clone ID: TF_ZmC21315_1
atagccagccacagccacacacaacgactgacctaccccatgctatctctgcatatttgcgttcttgatcgcgctcttattactcctcaccgtcgacatcacgcgcacgcatcgaactttgtatagcagctagagcaccagagccaggagcggcgcggcacgggacatggtgaagggcgcgcatttccaggacgcggcggtcgacggcggcgccggcggcaatgcggaggcggcgatgcagggcggcgccaagcggcagtacaagggcgtgcggatgcggagctggggctcgtgggtgtcggaggtccgggcgcccagccagaagacgcggatatggctcggctcctactccaccgccgaggccgccgcgcgcgcctacgacgccgccctgctctgcctcaagggctccgccgccgccgacctcaacttccccgtgcacctccccttccacgtccccgccgccgccgccatgtcgcccaagtccatccagcgcgtcgccgccgccgccgccgccgccagtggcggcgccacatgcagcccgccggcgccactcctccgtgcagctacggcgacgcgtcgtcgtcgtctggcgttagctccccggagaccggccggaacgctggcctgtgctacggcacgacgcactacgacgacatggacatggacttggcgggcgacgccgacgcggacctcgccgcgctcgcggacatcgaggccttcttccagtcgcctaagtgcatggagtacgccatgatggacccgtgcagcacgttcttcgcaccggcgcccgtggctacggacgcggccagcgagtgggcggaggaaggcgagatcgacctctggagcttctcgtccctcaactgatccaaccatcgtcagctcctccacagacatcagtttagaggtgaagcaaaagcaagcctcacgtgatcatcgtccatccactcaacacttagcgattaattacagctgcaacctacgtgatcaagaattggtcacggtataaataagcattaaggattaattgattcatactagtattagttagttattttactatactactagtgtctcatggagctacatgttttaaggcagctttccatggagtcaacgacctcccctcagttgcattgcatggcatgctatgggtaggggtaggaagctgtgtgtttctgcaagtgcaagtaatggattataaattatgatgatgtactcct

SEQ ID NO: 503 - DNA, 1217 bp, Zea mays
  Clone ID: TF_ZmC21315_2
gcgttcttgatcgcgctcttattactcctcaccgtcgacatcacgcgcacgcatcgaactttgtatagcagctagagcaccagagccaggagcggcgcggcacgggacatggtgaagggcgcgcatttccaggacgcggcggtcgacggcggcgccggcggcaatgcggaggcggcgatgcagggcggcgccaagcggcagtacaagggcgtgcggatgcggagctggggctcgtgggtgtcggaggtccgggcgcccagccagaagacgcggatatggctcggctcctactccaccgccgaggccgccgcgcgcgcctacgacgccgccctgctctgcctcaagggctccgccgccgccgacctcaacttccccgtgcacctccccttccacgtccccgccgccgccgccatgtcgcccaagtccatccagcgcgtcgccgccgccgccgccgccgccagtggcggcgccacatgcagcccgccgcaactgcaagccggcgccgccgcgtcggcgccctactcggccggcggtggcgccggcgccactcctccgtgcagctacggcgacgcgtcgtcgtcgtctggcgttagctccccggagaccggccggaacgctggcctgtgctacggcacggcgcactacgacgacatggacatggacttggcgggcgacgccgacgcggacctcgccgcgctcgcggacatcgaggccttcttccagtcgcctaagtgcatggagtacgccatgatggacccgtgcagcacgttcttcgcaccggcgcccgtggctacggacgcggccagcgagtgggcggaggaaggcgagatcgacctctggagcttctcgtccctcaactgatccaaccatcgtcagctcctccacagacatcagtttagaggtgaagcaaaagcaagcctcacgtgatcatcgtccatccactcaacacttagcgattaattacagctgcaacctacgtgatcaagaattggtcacggtataaataagcattaaggattaattgattcatactagtattagttagttattttactatactactagtgtctcatggagctacatgttttaaggcagctttccatggagtcaacgacctcccctcagttgcattgcatggcatgctatgggtaggggtaggaagctgtgtgtttctgcaagtgcaagtaatggattataaattatgatgatgtactcct

SEQ ID NO: 504 - DNA, 499 bp, Zea mays
  Clone ID: TF_ZmC21315_7
gccagccacagccacacacaacgactgacctaccccatgctatctctgcatatttgcgttcttgatcgcgctcttattactcctcaccgtcgacatcacgcgcacgcatcgaactttgtatagcagccagagcaccagagccaggagcggcgcggcgcgcgacatggtgaagggcgcgcggctccaggacgcggcggtcgccggcggcaatgcggagacggcgatgcagggcgccgggggcggcgccaagcggcagtacaagggcgtgcggatgcggagctggggctcgtgggtgtcggaggtccgggcgcccagccagaagacgcggatatggctcggctcctactccaccgccgaggccgccgcgcgcgcctacgacgccgccctgctctgcctcaagggctccgccgccgccgacctcaacttccccgtgcacctccccttccacgtccccgccgccgccgccatgtcgcccaagtccatccagcgcgtcgccgcc

SEQ ID NO: 505 - DNA, 710 bp, Zea mays
  unsure (1)..(710): unsure at all n locations
  Clone ID: TF_ZmC444_1
ctcgaggccggccgggccgggattcctattcccacccgtccatccatcctccgaagctcctcggcagacaagcagcagcgagagaaagcaagcaaggcagaggcagttgtgttgctggtcggtccgtccatggcgcccaagagaccagtgtcggcggcggcggcggcggagcagccgaggctgcgcggcgtgcggaagcggccgtggggccggtacgcggcggagatccgcgacccggtgcggaaggcgcgcgtgtggctgggcaccttcgacacgccggagcaggcggcgcgggcgtacgacgccgccgcgcgcaagctccgcgggcccggcgccgccaccaactaccccgccccggagccgacggcggaggcgttggcggaggctccagcggcgagcgggagcgggagcgccgtggtgtacgagtcgtcgtcggcgtcggcgtcggcgtcgtcgtgctccctgccgctggcggccccgtcgctggacctcagcctggcgctgccggctgcggcggcggccgcagagccgtaccagctgttcgcggacccggcggcggcggccgccgtgacgccggcgctgctgcacttcttgccgcccaanagcgaggagcagcagagctactctgggtcatcgtcnctgtcctcgtcgtcggcgtctgtantgttcgacgcggcgccgcccgtgggcctgcggctggacctcaacct

SEQ ID NO: 506 - DNA, 1020 bp, Zea mays
  Clone ID: TF_ZmC2282_9
aactcggcaactccgcctcccaagtacacccccactccctcgctcaccagaggaactagcggaccgggcaaagccgagccgcaaccgcgaagatcttgcgtggcctccttttcccagctcgtcactgtgccgctcgtgccctccactcccggtccgcccaaccaataatccatcgatccatccaccaccaccaccccgctgcggcgatgtgcggcggcgccatcctctcgggtttcatcccgccgtccggggtggcggcggcggcggcggcggccaagaagaagcagcagcagcagcggtgccgtgtgactgcggacctgctgtggccggggcccggcagtaagggagctccccaggaccaggaggaggacttcgaggccgacttccgcgagttcgagcgcggcctcggcgaggatgacgtggacagcgccggcgaaggcggcgaccccgaggtccaggagcttcctccgccggagccgacgagatggcgtgatgacgacgactccaaaggatgtcaaaggagatagaccagtaaagcgcggccggaagaaccagtacaggggaatccggcagcgcccttggggcaaatgggcagctgagatcagggaccctaacaagggcgtccgcgtctggctcggaacctacaacaccgccgaggaggcagctagggcatacgacgccgaaccgggcaagatccgcggcaagaaagcgaaggtgaatttccccgatgacgacgcgccaggcactggtcacaggccagcgaacgcagcgcctaggctagtagctccacccccaccccccaaggcctgcgccgatgagatctttaacaacctgaagaacgacgacgacgacaacaacaacaacaacgatgatctgtttgcgatgtttgcgttcggtgacaataagaggaggtcgtccgcgaccaacactatgctctccgtctccgacgaccagcgcagcaactcctacggctccggctcctccgacttggtggggtcgtggtcgtgggacgacgacgcg

SEQ ID NO: 507 - DNA, 837 bp, Zea mays
  Clone ID: TF_LIB4742-133-A1-K1-G3
ctcgaggccggccgggatagggtaatggaggtttgtttctcaactcggcaactccgcctcccaagtcacacccccactccctcgctcaccagaggaactagcggaccaggcaaagccgagccgcaaccgcgaagatcttgcgtggcctccttttcccagctcgtcactgtgccgctcgtgccctccactcccggtccgcccaaccaataatccatcgatccatccaccaccaccaccccgctgcggcgatgtgcggcggcgccatcctctcgggtttcatcccgccgtccggggtggcggcggcggcggcggcggccaagaagaagcagcagcagcagcggtgccgtgtgactgcggacctgctgtggccggggcccggcagtaagggagctccccaggaccaggaggaggacttcgaggccgacttccgcgagttcgagcgcggcctcggcgaggatgacgtggacagcgccggcgaaggcggcgaccccgaggtccaggagcttcctccgccggagccgacgaggtttgccttcgccaccgcggccaaggcggcagttgatggcgtgatgacgacgactccaaaggatgtcaaaggagatagaccagtaaagcgcggccggaagaaccagtacaggggaatccggcagcgcccttggggcaaatgggcagctgagatcagggaccctaacaagggcgtccgcgtctggctcggaacctacaacaccgccgaggaggcagctagggcatacgacgccgaagctcgcaagatccgcgggaagaaagcgaaggtgaatttccccgatgacgcgacaggcactcgtcacaggccaacga

SEQ ID NO: 508 - DNA, 1854 bp, Zea mays
  Clone ID: TF_ZmC2282_2
cattggaccctcggagccgcgccgggatctcccaactccgcctcccaagtcccacccccactccctcgctcaccagaggaactagcggaccaggcaaagccgagccgcaccgcaaccgcgaagatcttgcgtggcctccttttcccagctcgtcactgtgccgctcgtgccctacactcccggtccgcccaaccaataatccatccatccatccatccaccaccaccccgctgcggcgatgtgcggcggcgccatcctctcgggtttcatcccgccgtccggggtggcggcggcggcggcggcggccaagaagcagcagcagcagcagcagcggtgccgtgtgactgcggacctgctatggccggggcccggcagtaagggagctccccaggacaaggaggaggacttcgaggccgacttccgcgagttcgagcgcggcctcggcgaggatgacgtggacagcgccggcgaaggcggcgaccccgaggtccaggagcttcctccgccggagccgacgaggtttgccttcgccaccgcggccaaggcggcagttgatggcgtgatgactcctcctccaaaggatgtccaaggagatagagcagtaaaaaagcgcggccggaagaaccagtacaggggaatcaggcagcggccttggggcaaatgggcagctgagatcagggaccctaacaagggcgtccgcgtctggctcggaacctacaacaccgccgaggaggcagctagggcatacgacgccgaagctcgcaagatccgcggcaagaaagcgaaggtgaattttcccgatgacgcgacaggcactcgtcacaggccaacgaccgatgagatctttaacaacctgaagaacgacgacaacaacaacaacgatgatctgtttgcgatgtttgcgttcggtgacaataagaagaaggttcctgcagcgaagccagccgccgccgagggtggcagtggcagtggcagcttcctcgtccctgcgcctgcggtggcggtggtgcccggtaataagaggaggtcgtccgcgaccaacactatgctctccgtctccgacgaccagcgcagcaactcctacggctccggctcctccgacttggtggggtcgtggtcgtgggacgacgacgcggccgcagccgccatgacctcggactacacctcctcggtcttcgctcccgataacgccgtgctgccggcggcgtcttactcttacatgcaaggcggagcgccgaagagaatgaggagcagctacggcggcgcgccgcccagcctcgcacatgacgcggccatgcctggctttggccttgataaagtgagctaccactaccaggcgttgcctccttattacgtcgggagcagcaacgcgtcggtgggcagcctcggtcttctgcaggctgatgatgctccgcaggatggagcgagcgccggggatatctggagcctcgacgagctgctcatgctggcagctgctggtgcttattgagaaccgcaagagaaaaaaaatgtgttggcgctgctagctggagacgagacgagggcgagaggcagttgcatcatccgccatccgctatcgttttgtctctcctatatctagtagtatacatgcttctggcagtcgaactctatggcaatgtgtgtatagtgtgttgctgccgtctatgattggaagcgagctcgagactggttcaataattcacctttgcctaccgtaccgccggcctgctggactgtagtgtgcgtactgcatatatatgccataattatgtatgccctcctcctatatatactatatattattatgatgtgcttaaaaaaaaaaaaaaaaaaaaaaaaaaaaaaaaagcggcc

SEQ ID NO: 509 - DNA, 908 bp, Zea mays
  Clone ID: TF_ZmC2282_8
gcctcccaagtcccacccccactccctcgctcaccagaggaactagcggaccaggcaaagccgagccgcaccgcaaccgcgaagatcttgcgtggcctccttttcccagctcgtcactgtgccgctcgtgccctacactcccggtccgcccaaccaataatccatccatccatccatccaccaccaccccgctgcggcgatgtgcggcggcgccatcctctcgggtttcatcccgccgtccggggtggcggcggcggcggcggcggccaagaagcagcagcagcagcagcagcggtgccgtgtgactgcggacctgctatggccggggcccggcagtaagggagctcctccaaaggatgtccaaggagatagagcagtaaaaaagcgcggccggaagaaccagtacaggggaatcaggcagcggccttggggcaaatgggcagctgagatcagggaccctaacaagggcgtccgcgtctggctcggaacctacaacaccgccgaggaggcagctagggcatacgacgccgaagctcgcaagatccgcggcaagaaagcgaaggtgaattttcccgatgacgcgacaggcactcgtcacaggccaacgaccgatgagatctttaacaacctgaagaacgacgacaacaacaacaacgatgatctgtttgcgatgtttgcgttcggtgacaataagaagaaggttcctgcagcgaagccagccgccgccgagggtggcagtggcagtggcagcttcctcgtccctgcgcctgcggtggcggtggtgcccggtaataagaggaggtcgtccgcgaccaacactatgctctccgtctccgacgaccagcgcagcaactcctacggctccggctcctccgacttggtggggtcgtggtcgtgggacgacgacg

SEQ ID NO: 510 - DNA, 410 bp, Zea mays
  Clone ID: TF_LIB3356-023-P1-K1-B12
gccaaaataaactcaggtacgggcctggctacgctacgctacgcgcgccgcccggtgggctcacctcgcatcgggccggtcccggagctgaccgtgcccggctggggctgttgatttgcatgcaggaaggcgcggatatggctgggcaccttcgagacggcggaggacgcggcgcgcgcctacgacgaggcggcgcggatcatgtgcgggccccgcgcgcgcaccaacttccccgcggacgccaacggcccgccgccgtcgttcctcttcgcggcgcttgtcgacaagctgcaccggttcaacctggcgttcgtgcaagccgcgcagcggcagaaagaggcggcagcggtcgctgcggcagcaacaagaacctccgtgcccgcgacgccttcgacgcctgcgggcacgca

SEQ ID NO: 511 - DNA, 933 bp, Zea mays
  Clone ID: TF_ZmC7732_1
ccccgcgtccgccccgcgtccgctcgcacacactcccctgccgctgtgccgcacccgcacccctccagcgcgcgcgggcacgagcacgagtacgaggctccatcgccggacgaccaggtagttgcactgccgccaccgtcgacgacgaccgaaggcgacgatggccaggccgcagcaacggtaccgcggcgtgcggcagcgccactggggctcctgggtctccgagatccgccaccctctcctctgaccgcgcccggctggggctgttgatttgcatgcaggaaggcgcggatatggctgggcaccttcgagacggcggaggacgcggcgcgcgcctacgacgaggcggcgcggatcatgtgcgggccccgcgcgcgcaccaacttccccgccgacgccaacggcccgccgccgtcgttcctctccgcggcgctcgtcgacaagctgcaccggttcaacctggcgtccgtgcaggccgcgcagcggcagagagaggcggcggcggcggcggcggcagcagcagcaacctccgcgcccgcgacgcctccgacgccgccggccacgcagtggggcggcggcggtaggtccctggaggagcagcacgtggagcagatgatcgaggaactgctggactccgacttctccatggagatttgctgctagtgctaggctagccgcgacgcgacctgcctagcgactggctagcgcccccggccggcccgtcaccgccgcgctccgctccacctctcctctgttcttgttcttgcacttgcaccatgcgtcgcgctcgcgctcttctttgtactcgtgccgacgtgcgtagtatcgctcagccgctgcagcgtgcgtaggagcctgatttgtgtacgccacgtgtatagctgtagctgtacgtataagtatatatatgtaatcgagcattctcattcttgc

SEQ ID NO: 512 - DNA, 520 bp, Zea mays
  Clone ID: TF_21393791
ttttttttttttttttttcgatagaaggagttatgtattatgtaaggaataatgatgaagggggacgaggggaggaactcgggcccagttgcatctagcttgcggtggactcgtcgtgtaacaccacgatacccttcgagtgctgggagtagcgctcaaccccgatccatactagtgttcttacacatggcagcaaggcgtgcagcgacagcgccggaagcgggacacgataatcaagcgtcgcaaggaagttggtgttctccgacggcccgcggagtcggcacgcctcactgtcgtacctcctggccgcctcctcagcagtgtcgaacgtgcctagccacagccacacgcccttatgttgatcgcggatctccgccgagtaccgccccctaggccgtctcctctgcgcgtccctgtacctcggctccgtcggcacgcccgccgtcgtcactttcctcttgccaccgtcgacaacactccccttgggcaccgtggcattgcagcacggctgatgctccac

SEQ ID NO: 513 - DNA, 1842 bp, Zea mays
  Clone ID: TF_ZmC5960_2
agttctaacattcccctccttgcaccggtgctacccttcttctagcttagacttctatcaaggcacgcggccgccatggatatggacatgagctccgctacccaccccgctcaccactggctctccttctccctctccaacaactaccaccacggcctcctcgaggccctctccagctcctcctccgcccaccagatcgccggagatgaggcgccggtggatgaggcgcctaagatggaggacttcctcggctgcgtcggcagcgctgggacgggatcgacggctgtggtggaccacggcgagctgggcagcatcgccgcgggtttcttacaccggtatccggcgcacgacgggatgacggatcagaactctggcgcggtgaccgtcgcggcggcgacgatggaggttgccgagtccgatcaggcgaggaggcccgccgagacatttggccagcggacctccatctaccgtggcgtcaccaggcaccggtggacggggaggtacgaggcgcacctgtgggacaacagctgccgccgggagggccaaagccgcaaaggccgccaagtctacctaggaggctatgacaaggaggagaaggcggctagagcttacgacctcgccgcgctcaagtactgggggcctacaaccacgaccaacttcccggtaaagagaactcaaagtcaatctcgggcggcaacacatatttgctgcgagagatggctagctttacctgaatgatccatgcatgcatggcgtaggtgtccaactacgagaaggagctggaggagatgaagtccatgacgcggcaggagttcatcgcgtcgttgcgcaggaagagcagcggcttctcacgaggcgcctccatctacagaggagtcacaaggcatcatcagcacggccggtggcaggcgaggatcggcagggtggccggaaacaaggacctgtacttgggcactttcagtactcaggaagaggcggcggaggcgtacgacatcgctgcgatcaagttccgcgggctcaacgccgtcaccaacttcgacatgagccgctacgacgtggagagcatcctcagcagcgacctccccgtcgggggcggagccaccgggcgcgccgccaagttcccgttggactcgctgcagccggggagcgctgctgcgatgatgctcgccggggctgctgccgcttcgcaggccaccatgccgccgtccgagaaggactactggtctctgctcgccctgcactaccagcagcagcaggagcaggagcggcagttcccggcttctgcttacgaggcttacggctccggcggcgtgaacgtggacttcacgatgggcaccagcagcggcagcaacaacaacaccggcagcggcgtcatgtggggcgccacctctggtgcagtagtgggccagcaagacagcagcagcaagcagggcaacggctatgccagtaacattccttatgctgctgctatggtttctggatctgctggctacgagggctccaccggcgacaatggaacctgggttactacgactaccagcagcaacaccggcacggctccccactactacaactatctcttcgggatggagtaggtgcatgcgctgacaagctagctagctgaaatcaggtggtaggcctaggaagaagctaggactgacatcgaactgatcacaattttggctgctacatataccatgcatgccccatgtatggatgggggtgcgtgtgcttccttctgcttgctattcacgacacttgctgacttactgtggcagagccgcagagggctcgtgtaccatcagcatttctaaattctaattatcaagctcgtttcaagct

SEQ ID NO: 514 - DNA, 1232 bp, Zea mays
  Clone ID: TF_ZmC3047_1
ctcgtctgtctctccttgcctgtgcgcttcggttattagctagctagcttgggtctagtctagtgtaactcccggccgccatctttgctgtacttcgttcgtccatgtcgcgctcgcgcacggtgcggatcttctgggacgatcctgacctgaccgattcctccggcgacgacgagggctgcggagcccggagggtcggcagaatggtgagggagctggcaccagcaccagcaccggcaccagcggctcttcccgtgccggatcagtgcaacgccggggacggcgaccgcgggaggaaggccggcgtcgctggtcccggcgtgtgcagcggggcgcggagacgggtggccaagggcgccggtggcccggcgagcaccaagttccgcggcgtgcggaggaggccgtggggcaagttcgcggcggagatccgcgacccgtggcgcggcgtgcgcgtctggctcggcaccttcgacaccgcggaggaggccgcgcgcgtctacgacaccgccgccgtccagctccgcggggccaacgccaccaccaacttcgccgcgtccgccgccactaacagcggctccggggccggggccgggcaggacccggcgacgacaccggcagcgggctacgagtccggcgcggagtcgtcgccgacgtccgtgctccgcaaggtcccctccctgtcctccctcgccgaggacgactccgacgcgccggccgccgagcgccgcagcctggccgtcctcgaggaggaggagctgggcgagttcgtgccgttcgaggacgcgcccgtctacgccaccagcggcttctgggacttcgagcccgacgcggggttcctctacgccgagccgtcgtcgccggaggcgtcgtggaatgccgccgccgccgtcgccgagcccgcctcgtctgacgacgcgcccagctgggccgcgtcgccggtgcaggagaacgactacttccaggacctgcgcgacctcttcccgctcaaccggcttcccgcgattttctgaacaggtggacggggaacgccggaaccgggaacggcgccgctggttcgtctaccgggatgttattttggacgtcgagagtgcgctgtgtctgtgtctgtgtctgtgtcgtgcctacgcgcaccgtgtacttgtacgcctttccccacgccgtttttgttactatcttcgagtcgatgagaaatgtggaaatatgctgccgaacgatgagcacgtagagttttg

SEQ ID NO: 515 - DNA, 1111 bp, Zea mays
  Clone ID: TF_ZmC6700_3
cattgggtacctcgaggccggccgggtgtttttaaaaaaaaaaaaaaaaaaaaaaaaaaaaaattagttacctcgacgagggccgggaacctcgcctccccccactccttccctccctccctcgctcacccagtggggcagccaaagccgagccgcaaccgcaaagatcttgcgcggcctcctttccccagctcgtcactgtgccgctcgtgccatccaccctcggttcacccaaccaacaatccatccgccaccacaccccgctgcggcgatgtgcggcggcgccatcctctcgggtttcatcccgccgtccggggtgccggcggcggcagcggcggccaagaagaaacagcagcggcgtgcgacggcggacctgctgtggccggggcccggcaagaagggagcgccccgggaggaggacttcgaggccgacttccgcgagttcgagcgcggcctcggagaggatgacgacgtggacggggccggcgacgaggtccaggagcttcctctgccggagccggcgaggcttgccttcgccgccgcggttggggcgccgcgcactgcagttgacggcgtgatgactccaaaggatggtgaaggagacatgcctactaccgctaccaactcagcagcaaataagcgcaggcggaagaaccagtacaggggaatccggcggcggccctggggcaagtgggcggccgagatcagagaccccagcaagggcgtgcgcgtctggctcggcacatacagcaccgccgaggaggcggccagggcgtacgacgccgaggctcgcaggatacgcgggaagaaagccaggtcaatttccgggacgaagcggcggcagcagcgtgctcagaagccaccagccgcaactactccaactgcttgtcgccagcgcagcgaggctagctcctcgtccgcgcactgcagttgacggcgtgatgactccaaaggatggtgaaggagacatgcctactaccgctaacaactcagcagcaaataagcgcaggcggaaggaccagtacaggggaatccggcggcggccctggggcaagtgggcggccgagatcagagaccccagcaagggcgtccgcgtctggctcggcacata

SEQ ID NO: 516 - DNA, 610 bp, Zea mays
  Clone ID: TF_LIB4073-022-Q6-K1-D12
cggacgcgtgggcggacgcgtgggcggacgcgtgggcgcgcgcgcctcccgctgttctctccacaaagaaagaagagcaacgaagccatggcgccgagaacgtcagagaaaacgatgacaccggcggcggcggctgccgccacggggctcgcgcttagcgtcagcggcggagccggagccagcggcccgcacttcagaggcgtcaggaagcggccgtggggccggtacgccgcggagatccgcgacccggccaagaagagccgcgtgtggctcggcacgttcgacacggccgaggaggctgcgcgggcctacgacgccgccgcgcgcgactaccgcggcccaaaggccaagaccaacttccctttcccttcgtcgtgcatgccactcgccgccggcgccggcgccggcagcttgcctgcggcgaaggccgtcaccggtggcggcggcagccggagcagcaacagcagcaccgtcgagtctttcagcagcggcagcgacgtgcaggcggcgcccatgcaggccatgccgctcccaccgtctctggagctcgacctgttccaccgcgcggcggctgcgggcacgggcacgggcggcgccgccgtacggttcc

SEQ ID NO: 517 - DNA, 131 bp, Zea mays
  Clone ID: TF_uC-zmflteosinte001a02b2
cactggctaaccacgacggcatcttttgcagagtggctggagtgttcctgctagtgccaaacgtattgatgcagaccatgccttcatctatctcagacgggagagaggcgagctcggccgaggagatgatc

SEQ ID NO: 518 - DNA, 1348 bp, Zea mays
  Clone ID: TF_ZmC258_3
agtcaacgtgggaactacgggccgaagctgattcagatgaagtttatgctcaaattatgttgcagccagaagctgatcaaaatgaactcaccagcctggacgctgaaccacagacgtgaaaaagcactgcccattccttctgcaagacactgacagcttgggatacgagcactcacggcgggttttctgttcttcggaggcatgctgaggaagaagtattacctgaggttactgctccaggtgttggttatgagcagactgctgcctctgtagagttgaactcggataagctctcacagccatctgatgtcaacaattctgatgccctagcagctagcagtgaacgttcacctcttgaatcccaaagccggcaagtgaggagctgtaccaaggtaattatgcaaggaatggcagtaggaagggctgtagacctgacaaagcttagtggctacagcgatctttgccagaagctggaggagatgtttgacatccagggggagctgggttccacactaaagaaatggcgggtcattttcactgatgatgaggatgacatgatgcttgttggagatgatccttgggagtaagaaccctttgtctctgtattaacgagtgcatgttttccattattggaagtcctaatccctgtgcaatgcatcttccttcagtgagttttgcaggatggtgaaaaggatttacatttacacatacgaggaggcaaagaagctgacatccaagtcaaagttaccggttagcagtgacagcagcaagctgagcgctgcgaactcactgtctgaatgactatgaacaaaaactgcagagtgctaacgtccctctaattttgttatttccatcatttgattatgggggtgaatgctcacggttgctccgtgggctgaagttgtggttggcattcaactgccttgagttttggaggcttttggactgccttgccagcatgagcctcctggaagaggcaccctggcatctgcgtgccatttcccatttgttcgtgccgtttggtaggagtatccattggcttatttagcaggtccctggtttgaagaaagaagcggtcagctgcaagatggacggtgccttgcctcttcttcgactacttagctagtaattaggactatgtatgtaatgaatgtatatagtgccattaagacgcccatgccctggtattgaggtcccggcatttgtatgaatcaattgttcggaaattgttacctttagcagcaacgaacctgagggtgtagggtggccaggtgggagaagttgtatgtttctttcagtaacaatctttgtgcaagtgatctgtatatagtctactgttttaataagc

SEQ ID NO: 519 - DNA, 276 bp, Zea mays
  unsure (1)..(276): unsure at all n locations
  Clone ID: TF_LIB3180-047-P2-G3
ctcaagaccttgactgcttcagatacaagggcccatggtggattgtgtgtggtcatgaggcattctttagaatgtttgtctcaactggacatgtcttataattcaccatgnattgatctggtttttataggatctttatggaaatgattggcatttatgtcacattttttgaggcccacctagggtgcatgtactttattacaggttgaagttgttattatagtttttttttttccctcgcttggggacgtgtttttatttttattagtggttgtc

SEQ ID NO: 520 - DNA, 603 bp, Zea mays
  Clone ID: TF_LIB4757-020-Q1-K1-H5
gggctccttccccgcaaatcgcccgggtgcctgccaggtgcgcggcgcagggaggtcgcgacggattccgggcaagtgcatgtgagatccgatggtggcggctgtccagcgtgccgctactcggggagaaggtctactacttcccgcagggccacatcgagcaggtggaggcatcgacgaaccatcttgccgagcatcagggcacgcccctctacaacctgccatggaagataccctgcaagctcatgaacatggagctgaaggctgagccggatactgatgaggtgtacgcccagctcaccctgctccctgataagaagcaagatgagaatacatctgcaagagtggagaatgaggaggcagaggaggagggtggtgcctcatgtgccaccagccacaagtgaggaggggcttcgcatccattccttctgcaagacattgactgcctcagacacaagcacacattggtggtttctcagtgttgcgccggcatgcagatgagtgcctcccaccactggatatgggtcaacatcccccaaatcaagaatttggtggccaaggacctgcatgggggttgaggtggcggttccgtcacatctttcg

SEQ ID NO: 521 - DNA, 669 bp, Zea mays
  unsure (1)..(669): unsure at all n locations
  Clone ID: TF_LIB3689-215-Q6-K6-B9
ccgctgngnaggggtaagcgnntcccggcccggncccggnaacccagtacagtacctttgccagcctctggtgaatgagcgtcgcctcgtctcgctgcagaatgcggccgatttgaggaaggctgtgggcgcgatggatgcggtttcgggcggattcgcgaggaggctgtagaggttaggttccggtgtcccccggcccggccggtcgtgggagatgagctcctcgtccgcggccagcatcgggcagccgccgccgcccgcgccgccgccggaagaagagaagaagtgcctcaactcggagctgtggcacgcctgcgccggcccgctcgtctgcctccccaccgtcggtacgcgcgtcgtctacttcccgcagggccacagcgagcaggtggcagcgtcgacgaacaaggaggtggacgggcacatccccaactaccccaacctgccgccgcagctgatctgccagctccatgatgtcacaatgcatgncggatgtggagaccagacgaagtgtacgcgcagatgacgctgcagccgctcaatccacaagagcagacggacgcgtacctgcctgccgagatgggaatcatgagcaagcagccgacgaattacttctgcaagacgctgactgcgagcgacaccagcacgcacggcgggttctctgtgccc

SEQ ID NO: 522 - DNA, 1689 bp, Zea mays
  unsure (1)..(1689): unsure at all n locations
  Clone ID: TF_ZmC37547_1
tttttttttgttcccaaactggcgatagataaccggccacaagtatgctgatgaaatgaataagtgttgtcaaactgtaataacagatacacgcattttaactaaatcgacagtgacaactgaattgccatgttgccatggcacttaccataacacaacaactcgaactttattccaagctaattcgtcaaagaggttattcatcaacttcgaccaagcaaaacacaactgaccacgacagagttctaacgaccaagtcacgaagcgtacaccaaggttttccacacgaccagacaagcatcgcgattctgcttcggcggcagacaaacacaaatgaaaacacacagcagttacttcgctctaagctcagtcttgcacaagtttcagattgccttgtccgaaccaccatgcaatcaagcccgctcgaccatgtattccacgagaggtttctgcagtctcccctccgtgccctctataatggtgagcctccgtgctactttcatgaagtcattgaacggctcttcaccagtatgcctgacagcaccagcagcatcacggtagcaaaggtgcctcattatttccgccttctcaattccaaacatgtccgctaactggccgtacagctcttcgtacgaaccaaagacagataggtcaatggtgcggccaacatcctctgattccataaacaccttgcagtgcccgtcttctagcccaagctcagaagccttgcggtcttgggataggccttccctcgatcctccagaatccatctgctgctcagtaaggataggctttccgaacagcattatgtggggtctctttatgtcatcagatttctctgtggcctgtggtgtgccgattgtcagcaagcaagagacactctcactggctggtgcgctgctgatcacaaaacccttggatatacggggcgtcggagtcatagcaccaagccggttgaaaccgaggtgcagctggttaagctggtagtctgttaggggtaaaccaaattgagcatgcctggctccctgtatgcctgcaggagcgatgtccgagaaacagcgaagtgggctgttgcttggaccaagtgggttgccatggaaaattggattcaacagctgaccctcaaatggaaagtctggatgttgggccacccgcaacttctttctaggtggagaaaatgtccctaggtgaatcggtggaatgcttgatacaatctccacaagccatggattgacacatttcacattctgcagcaagtctggttcatcccatgacacctgaagaagcctccacggtgaatttggccatctgattgggtcagcaacctgagcagaagctatcgtccccataaaccagctgatccttgacgaatcctctgtctcaaatgccatcttgaacctcatcccagggcaccactggttcctcatcgcgttctgtaccgatgcagccttcacaacaaactctggagtgctagctctcgggtagtacaccacctcaaatggctgcccgctcgcggctaagcttgcggcctcaacaacgtccgtgatctccaccttccccctgccactcatgtacccaccaggacccttagtgatcttaccggcctcgtccttcaagaacgccgacaaggccccgtacaccggggcgttccagccagagatgcacnccggacgctgggcggacgctggg

SEQ ID NO: 523 - DNA, 203 bp, Zea mays
  unsure (1)..(203): unsure at all n locations
  Clone ID: TF_LIB3245-352-P1-K1-E12
acccacgcgtccgcccactcgtccgcccacgtctttctgactcttgccggatcatctgggtcgggggcactgtctcctgcgcgcgacttcnctgaccccatccgatggtccaattcaccctggaggcttgtccaggtctcctgggatgacccggacctgttacatatcgtgaagagggcgagcccatggcttgttgagctgat

SEQ ID NO: 524 - DNA, 588 bp, Zea mays
  Clone ID: TF_5555419
cccctacgcccgggtggcatcattacgccggccttatgcgaggtaatgtgagcccttgcgcggctgccaaggcacggggcaaggtgcgaccagaggacgtggccgaggcggcgaggctggcggctgccgggcagtcgtttgaggtggtgtactaccctcgcgcgagcacgcccgagttctgcgttcgcgccgccgcggtccgcgcggcgatgagggtgcagtggtccccagggatgcggttcaagatggcgttcgagaccgaggactcctccaggatcagctggttcatgggcaccgtcgccggcgtccaggtcaccgaccccatccgctggccgcagtcgccgtggcgccttcttcaggtgacctgggacgagccggaccttctgcagaacgtgaagcgggtgagcccatggctggtcgagctggtgtcaagcatgccggccatccacctcgcctccttctcgccgccgcggaagaagccccgcatcccagcgtaccccgagttccccttcgaagggcagctccttaacccggcgttcccgcccagcccactgccacacggccagcaacaccaccacaatttcctta

SEQ ID NO: 525 - DNA, 2129 bp, Zea mays
  Clone ID: TF_ZmC15491_1
tacaatgttgagtgttggtctcactccaaatatagtaacctacaattctcttatatatggtctctgcaagtctggggagttatccagggctgtcagtctttttaagaagttgtggacaaagggtatatcccctaatgctatcacatataatacattaattgataagcattgcaaggatggttacataaccgaggcctttaaactaaagcaaaggatgatagaggaaggtattcatcctactgtgttcacctattctatactgattaatggtctctgtactcaaggctatatggaagaagcaatcaagcttcttgatcaaatgattgagaataatgtggatccaaattatgtcacatattggacactgattcaaggttatgttagatgtggtaacatgatagagatttcaaagatttatgataagatgcatatccatggacttctgcccaccaatgtttctggggatgtaaaacaatcatgtcctgctatacacaacccgaatagagaaacatgtcagatgaagatgcacagccagtgctagctgctatcacattctttgcatgtctacttcttttgaaagatggcagtgacttatgtttgtatgaggagcaaatcatgggacccatttctatcttgggatgatatccaatataattgtctaattgtcttctgcgaaggggcctggtcatatcatgagaaatgtttccaacctccctcacatgtcagccaagtggtatcttctaactacaggctggattggctttctaagtgcagagacttgttgctggtgactttgccccttttatctggacttaggaatggcaatactcagcttctgctgggaatttgctgggtatatcggctacaaactgtcaagccatcttaagtcttatcaagtgatagcatgcatatcggtcttctcgctgcagctgttcatgccgtttaaacaattagtcggcttacaattttctacagcccaaggcaagcccttcagattttgtcataccgcttgcaaagtctgttaagactgtatactataccagtgtatctgtggggatgtgtttcaagatgctttttgagacaggagagtctagcgtgaggagataagttcaaatctgtttgcaacatcacctcgttattgaagtgggagaaacgaaagacgactagtctttttcgtggtctcgatccacattctattccagcagaagaactgtcggcatctttgaggtacacgctacattccatcaatattgcagtccgtatcctatccacgattgttcttcatggatcaggctttaagtatggttcatgctcaaatatatggcagcagagttcctactgaagtatatgacagtcccagaggtggtgaagaaaccccattgacagaaagtggttcgagttactttggagctgactctggattctgtcaagaaacagtcttttggttccaagagaagcaatagttttagtttctctggtgcatcttctcactccatggagaggcatcgatatttgcagagaggaatgttgtcgtcatcaaaggcccttcgaactgcttttgaatcgaacattgcttcaaggtcagaaaagcaagcgcagccgctaaacagattgatttgaagtgaagttcagccgtatcatcagacatcatgcacacaaccatcatggtaaattcctgttcagcacgcacagtaggtctccgtgtgctctgtacggcctagtgctgctgcgctagctggttgggtgcgtccgtgcgtggacgcgctgtagcaaccagggcacccctgtccatggtcgcgatcgcggcctccgctggcctggcccttggcgtgtgcggggcgtagagacggaggagaatgttgtactatgtgcgggcgcggcgagcgaagccggctggaccagaccagaccacaccagggccagagccagggccacgtggcattggctcggcgtagagaacgtcctcccaatatctatgaatttactacaatatacgtctcattatttttagattcatatatgtatccatcacgggggcctccggcctcgttatagcaagtatgggctgactgtaatataatatccaactccgattcaaaactgtaatgtttattacaaaatttgacttt

SEQ ID NO: 526 - DNA, 420 bp, Zea mays
  Clone ID: TF_uC-zmflb73175c11b1
cttacgcgtgggccagaaggcactgtatagtgaccaaatatctttaggaatgcgattccggatgatgtttgagaccgaggaattagggatgagaaggtacatgggtacaataactgggataactgatctagatcctgtaagatggaaaaactcccagtggcgcaacttacaggttggttgggatgaatctgccgcaggggaaaggagaaacagagtttcaatgtgggagattgaaccaattgctgctcctttcttcatatgcccccagcctttctttggcgtaaagcgccctaggcaaatagatgacgagtcatcagagatggaaaaccttttcaagagggcaatgccttggcttggtgaggagatatgcataaaggacgctcagacccataacaccacaatgcctggtttgagcttggt

SEQ ID NO: 527 - DNA, 656 bp, Zea mays
  Clone ID: TF_LIB3245-093-P1-K1-H4
acgagggggaaggccgccagggtgtgggtgcggccagaggaggtcgtcgaggcgcgctaacctggccgtgagcgggcagccgttcgaggtggtgtactacccgagggcgagcacgccagagttctgcgtcaaggcggggggggtgcgcgccgccatgcgcacccagtggtgccccgggatgaggttcaagatggccttcgagacggaggactcgtcccggatcagctggttcatgggcactgtctccgccgtgcacgtcgctgaccccatccgatggcccaattcaccctggaggcttctccaggtcgcctgggatgagccggacctgttacagaacgtgaagagggtgagcccatggctggttgagctggtgtcgaacatgccggtcatccatcacctcacagccacgcccttctcgccgcccaggaagaagctgtgcgtcccactgtacccggagcttccgctggagggccagttcccggcgccgatgttccacggaagccccctcctcggccgtggcggcgccggtggcccgatgtgctacttcccggacggcacttctgcaggcatacagggagccaggcatgctcaattcggcatatccttatcagatctccacctgaacaagctgcagccgggcctgtcaccgtacgggc

SEQ ID NO: 528 - DNA, 690 bp, Zea mays
  unsure (1)..(690): unsure at all n locations
  Clone ID: TF_ZmC84987_1
aatattttacatgccatagcccccgtataggcctgcctctcgtctgcgccctactccccaccacttcccttccccgcctacaagcaagccgccccagccattcatggccatccggacccgtgggtgtcgccgccactccacctccacctcccacccactcctctcaccgcaccactaaacccgcctccctcgctcctcacccgctccctgtccatccacccatcgcctcgccgccgctctgctgccgtttgctccagctgcggccgaccggggccatggctggcatcgacctcaacaccgtggaggaggaggacgaggaggaggcggaggcgctgcctttgcccggacccggtggccgtggcgccgtgtgcctggagctgtggcacgcgtgcgcgggccccgtcccgccgctgccgcggaagggcagcgccgtcgtgtacctgccgcagggccacctcgagcacatcggcggcgacgcggcgcgaggagcagcagctgcggcggtgccgccgcacgtgctctgccgcgtcgtcgacgtcaccctccacgcggacggcgcgacagacgaggtgtacgcgcgggtgtcgctgctgcccgaggacgaggacgcggagaagcgggcgcaggcgcaggcgcgggtcccggaggacgaggaccgccgcgacggcgaggacggnggcgccatgaggc

SEQ ID NO: 529 - DNA, 373 bp, Zea mays
  Clone ID: TF_LIB4730-133-A1-K1-C7
ctcgcctcggtgcgttccgatgatacgttcgcggacctgacggagccggcagcggccggcgccgaacggtgcgtggaccggcagctgtggctggcgtgcgcgggcggcatgtgcaccgtgccgcccgtgggcgccagcgtctactacttcccgcaggggcactcggagcacgcgctcggcctcgccggtgcggccgacctctccgcggcgcgcgtcccggcgctggtcccctgccgcgtcacggcagtgcgctacatggctgacccagacaccgatgaggtcttcgccaggatccgcctcgtcccgctgcgcggcggggacgcggacgcggacgcgttttttttttttacaccccctcccctccatctccacc

SEQ ID NO: 530 - DNA, 1764 bp, Zea mays
  unsure (1)..(1764): unsure at all n locations
  Clone ID: TF_ZmC952_2
ccnnggccgggttataccacaccataagttcctgaagagcctaaatcttccattctgtattggagcaaggatcaacttacagtgccataatgaagatgttagtgaaaggcgatctggaatggttgttcatgtcagtgaaatagatcccatgaaatggccaggctcgaagtggagaagcctgctggtaagatgggaggatggtgttgaatgtaacggccaagatagagtatctccatgggagattgagatagctggtggctctgtctctgttgctcattctctgtccgcatctagctctaaaagaaccaagttgtgtcctcagggaaatttggacgttccaacaatgtatgttacagggaatgggaatggttgtactgactccgtggaaactggaaagtttcccagggtcttgcaaggtcaagatttgatgagttttaggactcgtcatgttccgtctgctcctcaaactgttgaggctgcaaaacttcaatcttctggtgctagtaggttcctcagtaatgcatgtggctgcgcgttgggtggtccaacaagcagactcgcagtgcataactctgattttacctaccaatctgtaggcttcaatgaatctattggattctcagaggtcttgcaaggtcaagaaatttctcgggcagttcctatgttccaaggaatgatgtctgaggcttgttcactaaaaggaggatatgggctgcatagttatatgcgtaccccagttgctgttactggattgtcagccacaactcaagagtgttctctcacactatctactccgccaggagcacaagttccttctgtctaccctgataatatttttaaccgaactgtggttcgacagcttggactggcaagcaagtttgatggtggagctacaaatgcccagcagtctggcccatttgataggccgagggaaatttggagcaagccacagcatgaaatatctgatcaaacgaaaatggatcactttgagactagaagagcttcagcacctggagatgatgctgctaagcatgggtctggtggagaggtggttcgcaaaactagctgcagactttttggtttctcgttgactgagaagatcttgccagcagatgatgatggcatcaaggaagtgacctatgagcctgagtgccagaatccacggatgctggacctgttcgggtacaactgctcagccccaagtgctgctcttccagctctgtgtgctgccccctttggaatgtgatgctacttcaataacgctgctgagtatttccatgtactcttagaagttttactttcctaatacccaagtgtatgtcataagctgccttttgacatcattccccctgttggtctgcctcaagcgaagcagtcatttgcacaagtaaacaaaggatcgttgatgatccacttctcgccatgcctcaccctatcgctaagatattgtaattagtcttaggatacgaagaggcagtacattgtaactgactaacttctgtggctgatccttcagaaaagttgtgcgatgaagcaaacaattttctttagaagttcttcgctggcagattttagattcatgtggggaggtttgtcagctcagctttaatgtactggttatgtatctttaaatcagctgctgtacgacttttttttagctccaagccctggttgcagtcgcctaggccgtgtgattgtatcagtatgtaagacatgctatattttaatattcttatcgatatttattctgatgcattgtgtgtg

SEQ ID NO: 531 - DNA, 2091 bp, Zea mays
  unsure (1)..(2091): unsure at all n locations
  Clone ID: TF_ZmC500_1
gggccgcacatgggttctgcaagacgctcacggcctccgacaccagcacgcacggcggcttctccgtgccacgccgcgccgccgaggactgcttcccgcctctggactacagccagcagcgaccgtcgcaggagcttgtggccaaggatttgcacggaaccgagtggaggttccgccacatttatcgagggcagccccgcagacaccttttaaccactggatggagtgcctttgtcaacaagaagaagcttgtctcaggggacgccgtactatttttgaggggtgataatggggagctaagacttggagtgcgccgtgcagctcagcttaaaaatggatctgcttttccagctctttataaccagtgcttaaatcttggttcactacctaatgttgcacatgctgtggccaccaaaagtgtgttccacatctactacaaccccagattaagccaatctgaattcattataccattttcgaagtttatcaagagcttcagtcaaccattttctgctggttcgaggttcaaagtgaaatatgagagtgatgatgcttctgaaagaagatgcacagggatcatagcaggaattggtgatgctgaccccatgtggcgtggttcgaaatggaaatgtttgatggttcgatgggatgacgatgtagattttcgtcaaccaaacaggatttctccttgggagattgagctgactagttcagtttcaggatctcacatgtctgcaccaaatgcaaagagactgaaaccatgtcttccccatgttaatccagactacctagttccaaatggaagcggtcgtcctgattttgcggaatctgcccaattccacaaggtcttgcaaggtcaagaattactgggttatagaactcatgacaatgctgctgttgcaacttctcagccatgcgaagcaacgaacatgcagtacattgatgaacgaagttgctccaacgatgcgagtaacattatcccgggggttccaagaattggtgtcagaacaccactcggaagccctaggttttcctaccgttgctcaggctttggggagtctccaagattccaaaaggtcttgcaaggtcaagaagtatttcatccctacagaggaactctggtcgatgcaagcttgagtaatagtggcttccatcagcaagatggttctcatgtgcctactcaggccagcaagtggcacgcacagctacatggatgtgcttttcgtggccaacaagcaccagctgttccatctcaatcctcatccccaccatctgtcctgatgtttcaacgaggtgatccaaagatgtccccatttgaatttgggcatttccacgtgaataagaaagaggatagacgcgcaatgtttgtccatgctggaggcatcggaggaactgagcaaacgacgatgctccaggctcatcatgtttctggaggaacgggaaacagagatgtgaccgttgagaaatctcatcccgctgttgccgctgcttcagacaacagggaagttagcaaaaacagttgcaaaatatttggcatatctttgaccgagaaggttccagcaatgaaagaaaagggctgtggtgacatcaacaccaactatccatcccccttcctgtctttgaagcaacaagtgccgaaatcgctgggcaacagctgtgccaccgttcatgagcagaggcctgttgttgctagggtgattgacgtttcaacagtggatatgatgatctgatgtattggaaaactgtcctggaggctgtgttgcgtagtgtggacagtgtcggtttgatggttcggtatcgtgaagacgggatttgattgaggatctggccagatttgtatcctagttgtagctgttagagcactttgtatgacaaccgtgagtgctccgtgttatcagcactagttgctgctcacaacttgcctctatgttcataatctgtatgccatgtcagacccatttatagagggtttgtttgcttggcatagttctagacttaaagcattattatgagaacaaatttgctctgcaccgtaaaaaaaaaaaaaactcgaggggggggccgaaaaaannnnnnnnnnnnnnnnnnnnn

SEQ ID NO: 532 - DNA, 4211 bp, Zea mays
  Clone ID: TF_ZmC1173_1
ccacgcgtccgctcacgcacaggagatcaatgcaaaagatcttcatgtgaccattgaaaaagacagcatatatgtagagggcagagaaaacggtatattctgatctcagggtggagtgtatttgttagagcaaagagactggttgctggcgactctgtcctttttatctggaatgacaacaaccagctgattgtggtaattcgactggcaaacagaccacataccgtcatgccatcatcagtactttctagtgatagcatgcatattggtctgctcgatgctgtagctcatgctgcatcaacaaatagtcggtttactatcttctataatccaagagcaagcccttgtgaatttgtcatacccatggctaagtatgtgaaagctgtgtaccatacccgtctatatatgtccatcaagtttcaatctaaattgcttaagtgcccttgcagttatatggggacaattacaggaataagtgatcttgatcctgttcgctggccaaactcgcactggcgctcagtaaaggtaggtctcgaaacaaacacagctttgtttttcttaatgccattctacatgccttcacacttctttaactgcgtcatgagtgaattccgagttagatggtggtctctactttcatacatatagtagtaagcatgcaaccaattttcgcctgaatcatgcaggttggatgggacgagtcaactgctggagagaagcagccaagggtatctctttgggagattgaaccgttgacaacttttccaatgtatccatctccttttgctcttggattaaagcgcccatggcctgcaggcctgccttctttatacggtacaagtgacagttacacacttagcaactcttccagtatacagcattgaacaatggattatattgatactgcttatgtgctaatgtcactagtcttgtttctgattgttttggtaggtggaacaagtgatggcttgacctcttctctaatgtggcttcgagacagggcaaacccgggtttccagtcactgaatttcagcgggcttggtatgagtccctggatgcagcctaggctggataattccttacttggtctccaatctgacatgtaccagaccatagcagcagcagcagcatttcaaagcactacgaagcaagttccaccttcagcaatgcagttccaacagcctcagaacattgctgatagatctgctcttctatcaagtcagattctgcagcaagtacaacctcggtttcagcaaatttaccctcaaaatctcaacgaaaacaaaattcaaggccatacacaacctgagtacctccaagtccaacagcagcttcaacgctgccaatcatttaatgagcagaagcctccgatgcatccacagcaacaacagcaggaaccacagaagcagcaatgcgtccaaacaccacaggatcaacaaatgcaagaacagaagcatctgcacaacttccactccttgccagatgcattatcggccttttctcagctttccccagccactcactccccaccttccgcattgcagacagttccagcattctcgcatcaacaaaacttcccagatacaaacattagctctctctcaccatctactggcccttcaatgcatggcatgttggggagattaccttccgaagcagcttcgagcctcccatgtgtggcaatgaacgcccctgtatcggtatctgacccatggtcatccaagagagttgcagtggagtctgttaacccttgtcgaccccgttgcttccacagcatcaacgacggggactccgtaagcgaggatggggcgatctgctttggcctcgagggccgagctggaagacccttctgagatcaggctggcagcttgtatttgttgaacagggaggacgatgtcctttctggttggcgatgacccatggcaggaattcgtgaacagtgtgtcctgtataaagatactttcaccggaggaggtccagcggatgggaaagccgggcatccagctcctgagctcggctccttcaagaaggctgggcaatggctgcgacagctacgcgagcatgcaggagccgagaggcctggacgctgggatggcgccggtgggttcggtcgagttctgaagacggcggagggaagcccaccatggccctcgggtcgaggattactctccctcctgtatgtttctgcagcacttgctagctctgcgacttggaacaaagcacgtagatcaaatggagctctgtgctgctccccgtctgatgatgtcttatggtatagactcgtagcagtaactactacatgttgtatacatgccggcacttcagttcttatcgagtagcaataccgctagtttagtccatccaatcaactacgttcttgttcctatgatcctgttgttgcgatgcagtaaaactttttttttggtcatataaatcgcaccaacaagacaaaaaagttactaaccgccttctgttttcgctgtccgtctcctgtttctcatacgtttgttgggctcggtggtttacaaatccgggaccgtcagtgtgtcctgtataaagatactttcaccggaggaggtccagcggatgggcaagccgggcatccagctcctgagctcggctccttcaagaaggctgggcaatggctgcgacagctacgcgagcatgcaggagccgagaggcctggacgctgggatggcgccggtgggttcggtcgagttctgaagacggcggaggggagcccatggccctcggctcgaggattactctccctcctgtatgtttctgcagcacttgctagctctgcgacttggaacaaagcacgtagatcaaatggagctctgtgctgctccccgtctgatgatgtcttatggtatagactcgtagcagtaactactacatgttgtatacatgccgggcacttcagttcttatcgagtagcaataccgctagtttagtccatccaatcaactacgttcttgttcctatgatcctgttgttgcgatgcagtaaaactttttttttcataataacctgtatattgaaactgttcttggctcccacggtatgctgctgacgacgactgacgaggaaaactggaatttggggggatttcacagaattgaaactactgataattccaacttaccgatgcaattccaattccaacttggtcagaccaacattgccgttgctgtcaatgtcacgataattgctaaagctaccttcagtaaaagcaaaaggcagtttgttatgatcctggaaaagttgagagatagatatatagatatgatctctgagggaattcattcaggtgcacctttatgcttgcataatttggcaccacttggtgcagacaacgacgccatggaccggtcctcttcctctcatagtctcatgtgctccctgggtccctatctgactgaaacccctgagtgcggccctcccctggcgaagaagaaaaggatggcctcccgttccctgaggtcagtggtgcatcggtgagctgaatgcgacgccgctctcgccatcacagttcacggatccactatccctgctccgatccacctcacctggggccgccgccgccgcgccgggccttctgggatcgaccggtttggtggctgcctgctccgcctccgcgcggtggatcgtgacaagattctgagtgggagcacgtggagtgcgacggcaatggcggcgtgacacgcgggcgagcacagctcgcccgttcttgtcgacgctctgcgactctgggcaggtcgtccgtaggagcgaaccccggtagcttctctggtgatctctccatcgctttcatcatatcttcggctgggcccccgggtttggatcccggacgggtattgccatccccgccaatcttggccggcttttcgcggtggggaaggtagaaatctctgttgcctcccaaaaatctgtgccctttttggatgtctatcgacaacagtaacacgagcagagaccgtcagctcacacatatctatcgacgacagctcgagatgcacgaggctttgacttgttgcagccttgcaggtacatcaggtaaagtaccagccgtatctggaaaattgttggtcacctgctggcgatgggtgatcatggtcatggaaccctgagaagagattcaactgagaacacaaggaaaacgacggctctggacacgctcctgtccagctctggaaccgtgcggccgc

SEQ ID NO: 533 - DNA, 786 bp, Zea mays
  Clone ID: TF_ZmC1113_2
gcggccgcggctgctgccgcccaggtggcgggaggaggtggaggcggcgagggagatgccgccgctgcggcgcgaggcggaggcggaacggaggacggcatgtacacggagctgtggaacctctgcgccggcccgctggtcacggtgcccagggtcggggacaaggtgtactacttcccgcagggccatatcgagcaggtggaggcgtcgaccaaccaggtggctgagcagcacatgcaattttacgatctcccgtggaagatcctgtgtgaggtcatgaacgttgaattgaaggctgagccagacaatgatgaggtttatgcccagctcactctgctacctgaatcaaagccagaggagaatggctctagtgaggagatgcctgcttcacctcctgctgcacttgcaaggccacgcgtgcactccttctgcaagacattgacagcctctgataccagcactcatggtggattctcggtgctgcggcgccatgcagatgagtgtcttccgccactggtagcttgctggattcttgacttgatattgccagtgcatcagttgtaggtttgctatttgttgctttactggtagtggtaatctttgctttggctttctggtcaggatatgacccgtcaacctccaacacaagagcttgtagccaaggacctgcatggtgtggaatggcgctttcgccacatattcagaggtcaaccacgaaggcatcttttgcagagtggctggagtgtttttgttagtgccaaacgtcttgttgctggcgatgccttc

SEQ ID NO: 534 - DNA, 612 bp, Zea mays
  Clone ID: TF_LIB3279-211-Q6-N6-B2
tcgcgatctagaacctgttgacttcggacgagaacgccaccggccccgacgggggcaaccgtaggcgtgagttcctcctgaacgctccgtcgccggagcgcgcgaccaaggggagcatccggcttcgttccgaggccgcagccggtggctccaggaagagcgacggtagcagccatgcccctgaggggaaccgtgagaagctggggaaggtgaagctcaagattcgtaatgtgctaccgaaaccgaaccctgatacgtcgcctgtgaagcccccacggcctgtagattcgcggcaccagcaaaagcatggccatctgaaggaaggcacaaaagattctgacaggccaacctcttcacgagacaagaaagccagaaaggagaggtcgattcaagaaacaatggcacaggagcaagcagacaaatttcagagagaacctacttcagatcctcgcactcatttgtcgccgcactcaacgccacatcgccctcttcaatcttcatcgagccattctctagctgggcaaccaagggagcatctacttttgacagactggagtatttttgttagctcaaaaagactggtttctggtgacacatttattttcttgagtg

SEQ ID NO: 535 - DNA, 373 bp, Zea mays
  Clone ID: TF_LIB4171-034-R1-L1-C6
aggggggggccttttttgggtggggactcccccaccgtgggggggggcgctctctatcattagagcgcccccccgctctgcagaatttccgcaggagggttgtactgcggcttaagatgagattttaaggtgatgatgctcctgaaagaaggtccagcgtaacagtcataggcatcgtgaggttgccggcaatgtcaaactctctgtgggcagattctgagtggagatctctaataggctaatgggatgaaccttcatccattcttcttccagatagaatctcaccatgggaagtggagccattgcatgcatctaatccacaatcctctcaacctgcactaagggctgaggcgtccagcgacccccagcttca

SEQ ID NO: 536 - DNA, 750 bp, Zea mays
  Clone ID: TF_ZmC952_3
tgtcagctcattccttctcaagagctggttgccaaggagttgcatggagccaagtggaagtttcgtcatatatataggggtcagcctcgtaggcatctcttgactactggatggagttcatttgtcaataaaaagaaactggtttctggggatgcggtcttatttctccgaggtgatgatggtgaactaaggctgggcgtacggagggccattcagcttaaaaatgaggccctttttgacgatttcagttgcgacagtacaaaacggcatacattgttggctgtagctgattccttgaagcacaaaagtgtttttcacatttcttacaatccaagagctactgcttcagaatatattataccataccataagttcctgaagagcctcaatcttccagtctgtattggagcaaggatcaactttcagtgccataatgaagatgttagtgaaaggcgatctggagtggttgttcgcattagtgaaatagatcccatgaaatggcctggctcgaagtggagaagcctgctggtaagatgggaggacggtgctgaatgtaatggccaagatagagtatctccatgggaaatcgagatagctggtggttctgtctctgtttctcattccctttctgcatctagttctaaaagaaccaagttgtgtcctcagggaaatttggacgttccagcaatgtgtaagctctcatagcacaagactaatgcctgtatatgtatgctgctatccttttacctc

SEQ ID NO: 537 - DNA, 718 bp, Zea mays
  Clone ID: TF_ZmC425960_1
aattcggcacgagggggctctggggaggaggaggagggtagctaggtagtagctgcctataggcctcggcccccattcatggccattaccacgatgtgtcaccccaccacaccgccctctccgatgctgcctccctcatgataaccctctccctggtggttgttctttgccttgttgccgtgcagctcggcacgaggccctcctcattaatcacttgctagctccctgcctccctcccggctcccgctcccccttctcgtgcttcgcgcccccgcagcagccatggcggggatcgacctcaacgacaccgtggaggaggacgaggaggaggcggagcccggcaacgcctgctcccagcagagccggaccagctccgcggccacgttcccgccgccgccgccgaaccagccgaggccgagcgccgcggtgtgcctcgagctgtggcacgcctgcgccggccccgtcgcgccgctgccgaggaaagggagcgtcgtggtgtacctcccgcagggacacatcgagcacctcggcgacgccgcggccgccggcggaggcgcgccgccgcccgtcgccctgccgccccacgtcttctgccgcgtcgtcgacgtcactctccatgcggacgcgtccacggacgaggtgtacgcccagctcgccctcgtcgccgagaacgaggatgtcgcgaggcggctgcgcggacggtcggaggacggcagcg

SEQ ID NO: 538 - DNA, 2370 bp, Zea mays
  unsure (1)..(2370): unsure at all n locations
  Clone ID: TF_ZmC12351_3
gtaccctcgngggcttgccgggnagcagcctttggctgtacacagccaactctccacttcttttcttttcttcttcttttctgttcttcacacttgaacaagatattagtacacaaaaccaatgcactgaggcttagaaacatacctttacttgtgatttgcactttgttcatccatgggcatattttcacatttaagcacttgtgtttgcactcaatcaccaaaatacttagaaatggcccaagggcacatttccctttcaatcctttcctaccccctggtgcttatcgcagggagactcagctgcgtgctttctattcaaccacagaagaaatctcttctctgtttgcgaaacagcaggaacagctgaaagctatgcagagaactttggaggatgaagagaactatgagagcaccttaatgggtgtggatcttaataaagtgcctctagccactgataatgctggtatgaagccagtagactgctcaaaaaatacagtgggagcttcaagtgcttcaccagaaaatactcaggtaagtgaacatgattccagtgacgaagatgccaacatgactgagcagcaggatgatgatggtactgccattggtggcagcactcaaggtctagaatgcaccagtccagaaaggtcagaggggaggaggtcaggttttcatggcaatcctgtttctacagctcctgagagagaggttacagataccgagcaagttcccgagacagatagccaagctggtaatgctggttgcgatgaccaaagatgtgacaacacaggaggagagactatgccactagaagatgatatgctgctcccagataacgaggaacctactgcattgctgaaagatgcagggcagccacaagcaaatgtggttcctattccaatccccggtgatggcgttgggcactgttccgaagaaaaacatgagggtgcctgctctgagagcaaacgggaggacacacatgctggagccatcagaacggctgatctgttggcctcagaagtcgctgggagctgggcagtggaaacagctccgtctgtcaatggggagaacgaatctccaaggagcttgggcgatgctacagagcacgatgaagctggaggcagcgtggcaggcgatgctttggtaactctggtgaactcagagggccaggcggctgggagccagaacaatgttgagcgtggcagctccaaaataacccatcatcatcatcatcatcgtcatcaccatcgtgttcttagtgccatgattggaattgttgatcctgagttcaggaagcaaatgtccggcagaagcggagttggaaacgaggaacccatgtctgacgccgagacgggtgagggcatcgaggaaggcgattcagattcaggttcagacggcagtgacagcgaggaggctatggttgaggattctgtcgtttagcttaaacagaagtgactgctcactgtaaatatacctcaattcgttttgtgtacctttcgttgtatcatcatgcgtagcgtaagcccctcgtgtgcatttgattattttattcgttaggtgtcctcagcagctcgtggtgcatgttgtacgaaatcgaggccttttggtcttcaacacaaataaatatatgtactcacttggtttacaattataaaccgttttggttttttagcatgagacaatagacttcatctcagtctaaactacaatttgaacccaaaacgtgtcgcgcccgctacaaatgataatgtgatatgaaactgaacttaattccaggaacctgtcattcaacttgtccctcattttttcatgacaagccttggattttagaccagatgaagatgacccatctctacccctgctcactgtggccttgaagaaaatacatcactcgactatcgaccgcaggcaatgaaacaagagagccggcacatgcatgccacaactcagaattcaggcacttgtgctcttcagcttctcgagggtcgcacctgctctggcaccacgttggcagcaaccatcatcatcacagcataggcaccagcaggccggcgatgaccgcacaggctctggcaccacgaggccgtggacggaaatcgacgctggccatggacggaaatcgacgctgcgaggtggtctggcagagtggagcctcgttggagggttgaaggcgacacagttgtggtatagacaccggaagtggttatgcggagatagaacttaggagccgaagtgaaggaggcggatgtggcgcggaggagcacggagggcggtgccatggatggggatgaggaatgggagaacgtgtgctagggttgccgcagggaatgcgaattgaccgggtaggtgagacgtccccggccggcctcg

SEQ ID NO: 539 - DNA, 827 bp, Zea mays
  Clone ID: TF_ZmC13783_3
gagtccctctgccctctctgccctctctctctctctccgtgccccccaggccctcctcccaggctcccagcccccctcccgtccctctctctgtctctctccacgcaccatggcgatctccgagctcgggtgagcggacaaggtgggcgtcccgtacctagtaccgttgcctgcctcgggtgaacgagcgtcggttcggctcggtgcagaatgcggccgatttgagcgaggacgggagggcgcgatggatgcgggttcgggcggattcgcgaggaggctctagaggaggttaggtttcggccccggccccggcccggctgtgggagatgagctgctcgtccgcggccagcatcgggcagccgccgccggaggaagagaagaagtgcctcaactcggagctgtggcacgcgtgcgccggcccgctcgtctgcctccccaccgtcgccacgcgcgtcgtctacttcccgcagggccacagcgagcaggtggcggcgtcgacgaacaaggaggtggacgggcacatccccaactaccccaacctgccgccgcagctgatctgccagctgcacgatgtcacaatgcatgcggatgtggagacggatgaagtgtacgcgcagatgacgctgcagccgctcaacccacaagagcagaacgacccgtacctgcctgcggagatgggaatcatgagcaagcagccgacgaactacttctgcaagacgctgactgcgagcgacaccagcacgcacggcgggttctctgtgccccgtcgcgcgggcgagcgtgtcttccccccactggatttcacacagcagccttcagcacaggag

SEQ ID NO: 540 - DNA, 3403 bp, Zea mays
  Clone ID: TF_ZmC965_1
cgagcaaagattcactggcacaatagttggaatatgtgtttctgatccatctggctggcggacgcgtgggcgacacgctgcgagagggggaaagaacttagaagggcaattcggcacgagggagcgacacaggaaactgacgtcgcttttgacggcctgctacttaataaatcccctcgcctgcctcccttcccatctccttcccgcaaaaatcgcccgggtgccaggtgcgcggcgcagggaggtcgcgacggattccgggcaagtgcatgtgagatccgatggtggcggctgcagcggcggccggcggcggcgccgacgcgggatgcggaggcggaggcggaggcggagggaaggacgcgctgttcgtggagctgtggaaggcctgcgcggggccgctgtccagcgtgccgctactcggggagaaggtctactacttcccgcagggccacatcgagcaggtggaggcatcgacgaaccatcttgccgagcatcagggcacgcccctctacaacctgccatggaagataccctgcaagctcatgaacatggagctgaaggctgagccggatactgatgaggtgtacgcccagctcaccctgctccctgataagaagcaagatgagaatacatctgcaagagtggagaatgaggaggcagaggaggaggtggtgcctcatgtgccaccagccacaagtgaggggcttcgcatccattccttctgcaagacattgactgcctcagacacaagcacacatggtggtttctcagtgttgcgccggcatgcagatgagtgcctcccaccactggatatgagtcaacatcccccaaatcaagaattggtggccaaggacctgcatggggttgagtggcggttccgtcacatctttcgaggtcagccacggagacacctccttcagagtggttggagtgtttttgttagtgccaagcgtcttgttgcgggggatgcattcatatttctcagaggtgagaatggggagttacgtgttggagttcggcgtgcactgaggcaccaaaccactatcccatcttcagtcatatcaagccacagtatgcatcttggtgttcttgcaacagcatggcatgcagtgaacactgggagtatgttcactgtctactacaaaccaaggactagtccagctgaatttgtggtctcgcgagctaggtactgtgaatcactgaaacgaaattattcaatagggatgaggtttaggatgagatttgaaggtgaagaagcggcagagcaaagattcactggcacaatagttggaatatgtgtttctgatccatctggctgggctgactcaaaatggcgttcccttaaggtgagatgggatgaagcttcttctgttcctcgtcctgaaagagtttctccttggcaaatagaacctgctgttagcccatctcctgtgaaccctcttccagtcagattcaagaggtctcgttcaagtgttaatgcttcaccatctgatgtgtctactgtaaacagagaagttgcttctaaagtcatggtagactcgcaacaaaataatctcccaagggccttgcacaatcaaggaaggacacaattgacaggtcgataccgtgatagcactgatgtgaagactgctcaggatcttaccatgtggtcttcaggaactgagcaacagagaaacaatattgctgcccagacaaaacgatgtctggagggttggacgcaatctagaactcccgaaggttacaatcaactgttctcggcatttcaaccactgaaagatgcacataatccacttcgtccttttcctaataaaatatctgggactcgctcaagtacctgggtcacagccgatgcccgttatccagctcaacaagccaatcacaacatgttacatggcacattgtcttttatgcctcatagcagtggttttaggatgattcaacagaataatctagtgatgcctgaagctgcaaattttactgggaaatcagctttcacttcacttcagggccatgtcactgatcagtgctccacaggttggtttggacctattgagtcaaattcccacacagaccatgcatcgtcaagtttgatcaggtcccagcctttggttattggaaatgatgttcagaaaaccaaaggcacttcattcaaactatttgggattcctcttggcagtccagaaaaatctgaacctctggtatccccaccaagtgtcgcatatgacgggaaacttcaaacttctccaacagacaacaatgagccttgttcagaagctacccagaatatccagaacaaagtgccaagtagttcaaccagaagctgcaagaaggtccataagcaaggcagcgcccttggcagatcgatcgatctaacaaagttcgcttgctacgatgagctgatcgctgaactggaccagatgtttgacttcgatggtgagctgaagagtccttgcaggaactggttggtcgtctacactgacaacgaaggcgacatgatgctggtcggcgacgacccctggaatgagttctgtgacatggtccacaagatcttcatctacacaagggaggaagtggagaggatgaacccaggcgccctaaactcgaggctcgaagactgcctgtctgactcgctgggaagagggctggcttccaaagagccccggagcggcccctcgacttcggctgtcgattctgagaaccgcgctaacttgtccagtcagtgagcccttttgaaagtggtgaagcagacaaaaggccacgtgtcagagtgaccggaagaacgagaaaggggtgtgtttcagtggtgtgtagtaggtaggtaattttgtgtgtatgcctccgggtaaaagccccgcggtacccagtttgtagatggtgcttctcctggtgctagtttcccgtcgtaagctggatttttttggggggtgtgtgccctgctctgtgtgctgacccgcctgggggtaagttgtagcagagcaggagaaagcaggcaagaaaccgctggtgcgcctgcttggccaatccttttccttgcggagcgctgtaaatagccttggatctgaagcgtagtaatgtattgtcatggtactcgaagtcatgctccagtttgtgttgggtatgacctgcaactgtcggttcgatgggtgcggaccatatctggcccctttttcttttctagtcatccccttgatacataaacgcatcctaggctcctaagcatgcttcaatcaagttatgtgctgttggtctcttttggcaacatgttttatgcatgtataagcgccagtccaataaaatcggcgagatctgaaatccttcgtgttgatagatggctttcagtttttaaaaaaaaaaaaaaaccaaaacaaaaaaaaaaaaagggcggcccccgaatagtaagctc

SEQ ID NO: 541 - DNA, 1596 bp, Zea mays
  Clone ID: TF_ZmC488_2
gaaatttattgtgaagtacagttaagtgctcttcaaaatttggatctctgcaccgccaaggtcatctagtgatgcctgacatgctttgaattattaatgcatttttattgtttgaatgcacatttgtctgtactgcttaactcatgcgcatttgtaaatttcaaggaacatgcaacctccaaaaaccaatgtctacttcgagtattggtatagtttcgcttaactaatttcagtgttttgtcattaaacagggttggtgcatcagaatttattgtgccgtattgcaagttcttgaagagcttgaactatcccttttcagttggaaccagatttaaagttggctgcgagaatgaagatgctaacgagaggtcctttggattgatcataggtattagtgaagttgatcccatacactggcctggatcaaaatggaaatctctcctgataaagtgggatggtgctactaagtacagccaccagaatagagtatctccatgggacatcgagggagttggcagctcagttttagttactcaccgtctttcctcttctgtttcgaagcgaacaaaactgtgcttccctccaagcgatttggacacaccaattctagatggaaatggtcgtccagactccgtggaaactgaacgtttccacagggtcttgcaaggtcaagaattggtgcaccctagtattcatggtgctgcatgctctcattcatcagatagccccagatgtcaaggctcttatggcaggagattctctgctgatgtgtggaactgcaagatgaatgatgtaatgagtgggcctcgacacctaaatgccactgggtttgcttaccagcccctaggcttcagtgaatctgtcaaattctcagaggtcttgcaaggtcaagaaatatctcaggcggttccttccttcatgagatctgcattcaacgctggcacacagaatggcagggttcgaccatttgattatgtgcagagatcagatgcaactcaaggatacgctctccagcagtttaatctgccagcaacagaagtgcattcgccctcttctgttcttatgtttaaccaaaccatggcaccacatgctgagctagatggtgcgaccaaccgtgaagaagtacatggcagcaggtacttgtcatccaatgcaatagggagagaagctgaaccatggccatccatgcagcagcaaagagcgagtgtaaatggaagcgagcctctcgacaactgaagcctcagctcctgcaaggaacgctgaatctggatcggtcggcaggggcgcggggcgaagcaactgtaagctttttggtttctccctgactgagaagatccttggaacggatggtggtggtgtgaaagaagggaactacgaagtggaccgtcaaactccccgggtgctagacttgtttgggcacggttctacgcctggagctctgcatgctctctgtgctgctcccttgggaatatgatgctgttctgcctagttttacagcagttagatttatgtaatccttcaaccattttcatcgcgttgtacttgaccaatatgtccagcgtatgatttccagttttaattgtatgctgatgctac

SEQ ID NO: 542 - DNA, 811 bp, Zea mays
  Clone ID: TF_ZmC499146_1
gccggccgtggctcgttaccgtgagaacacgcagctccgtagctcagttacacacgacacccgctcgtcttcgtcagttcgtctcctccacctctgtatccctctcactccaccggccgccggccctcgcatcggcgcgttcccaatgatcacatttgcggacctgacggagccggccgcggccggcgccgagcggtgcgtggaccggcaactgtggctggcgtgcgcgggcagcatgtgcaccgtgccgcttgttggcgccagcgtctgctacttcccgcaggggcacgcggagcacgcgctcggtctcgacggtgcggccgacctctccgcggcgcgcgtaccggcgctggtcccctgccgcgtcacggcagtgcgctacatggctgatccagacaccgacgaggtcttcgccaggatccgcctcgtcccgctacgcggcggggaggcgcacgcgggtggcctcgatgacgatgtggccgcggcggacgagcaggagaagccggcgtcgttcgccaagacgctgacacagtccgacgccaacaacggcggcgggttctccgtgccgaggtactgcgcggagaccatcttcccgcggcttgactacgccgccgacccgcccgtgcagaacgtcgtcgccaaggatgtgcacggaccccgcctggaagttccgccacatctaccggggcacgccgcgccggcacctgctcaccactgggtgggagcacgtttgtcaaccagaagaagctcatcgccggggactccatcgggttcctccgcggtgacagcggggaactgcacgtcggcatcg

SEQ ID NO: 543 - DNA, 4859 bp, Zea mays
  Clone ID: TF_ZmC2665_1
gcactcataccattccatcatcccccttgcaagtatagttctcggcggcatctagaagacgatgggcaaggacgacgtgatcgagagcggcgctggcggcggcgagttcgctgccaaggactacacggaccctcccccggcgccgctgatcgacgcggctgagctggggtcctggtcgctgtaccgcgccgtgatcgccgagttcatcgccacgctgctgtgcctgtacatcacggcggccaccgtgatcgggtacagctcaattcggcacgaggcttgctagttgctcctttctctgccgcccgccgctgccgagtgccgggtcttcgctttctttctcctcttcgggcgcttcgctgcttgcctgctctgctcgcgacctgcttctcagacccgccctcctcgccgcccgcccggcgatgcctcctggccagaggcggcggtggcggcggcggcgacggagatagttagctcttcagattgagtgactggtggtcgccggcggcggggacgcggagtatggaggcgccggggacgagctcgggcggcgccggaggcgagggggccgggggcaccaaggtcaacgaggagctgtggtacgcgtgcgcgggaccgctcgtggcgctgccgccggcggggagcctcgttgtctacttcccgcagggacacagcgagcaggtagcagcatctatgcgaaaggatgcagatgccaaaattccgagctatccaaatctctcatctaagcttatatgcatactccgtagtgtcactatgcttgctgatcctgacacagatgaggtttacgctcgaatgactctccagcccgttagcaatgtgacgcattgtgacaaggagacgttgctggcaacagagcttgcactgaaacaaaccagaccacagacagagttcttttgtaaaacactgactgcaagtgatacaagcactcatggaggtttctctgtgccacggcgtgctgcagagcgaattttcccccatcttgacttctcagtgcagcctcctgctcaggaactgcaggccagggatttgcacgatgcaatttggacattccgtcatatatatcgaggccagcctaaaaggcatttgctgactactggctggagcctatttgtcagtggaaagagactccttgctggtgattcagtcctgtttattagggacggaagacagcaactcctcttggggataaggcgggcaaataggcagcccgttaacctctcatcatctgttttgtctagcgacagtatgcatattggaattcttgctgctgcagcccatgcagcagccaataacagccaattcacagtattctataacccaagggctagtccttcagaatttgttattccttttgccaagtaccagaaggccgtctatagcaaccaactatcacttggcatgcggtttagaatgatgtttgaaactgaagaatctgcaacaagaaggtacatgggaacaataactggtataagtgatatggatcctttaaggtggaaaaactcccaatggcgcaatattcaggttgcatgggatgaagcagcaccaagtgagagacgcaccagggtttccctttgggaggttgaacctgttatcgctccattcttcatttatccctcgccattgttcactgcaaaacgtccgaggcaacctggggtaacagatgatgatagctcagaaatggacaatctttttaagcggaccatgccatggtttggtgaggaggttggcaagagagatctgagtactcaaaacggtttagttcctggattaagtttggttcagtggatgaatatgcaacacaacccctctcttgccaacacggttatgcaaccggaattgctaaattcgttagctggaaaacctgtacaaactctggctgcggctgatctatctaggcaaattagcttccagccccagttcctgcaacaaaataacatccagttcaacacttcgctgctacctccccaaaaccaacagaccgaacagttagcaaatgtaatagctacaccaaaccaattgggaagtgttatagtaccacaaaaggcagttcaaaattgcagttctgaacagaaacagaatctggttacacaaccactgcaagtcagccaaccaatggttagtgtggcacagcctcaacttgtccatactcaactccagcaacctcaagtagttctccaggctcagcctcagcaacctcaagtcattgtccaagctcaactacaacaacagcaacctctggttcaaaatcacaccaccatacaaggtggccttcaacaaatccagcttctgcagcaacagcaagttcagcagtcagtgcaggaacaacagcaaataaagatacagccttttcaggtacctaatgatgccaacatggtaacacagttatctgatcagatgaaaatacaactattgaaggctctacagccacagcagcctctggtcatggaacagcagaaaatgatatttgatttgcagcaacaagcagtaaattctcagtcaactgctcagcagtgctcacaggtagctacccaagtggttggtttgcatagcagtagcactaatcagtacccgacgcagcaaaagactcaacctctcaaaacatttcaagattttcctgggaatgctgtttctattgtaaaaccagaaattgtcacctccgtgggtgctcgctctttgcatgtgcctggtggggtgcagtcaatgaagatggatgaagttccctcttcttcaacatcgccatccacaaacaacaatcctgttattttgcgatcaactccaagtagctccaagaaccaatgtttacctactgcagcaaaggctcctcagtcatctgttgtattgggttctacacttgaacagggtatgaagccttgtgacagtacacaacacccaatggtgattcccaagctggctgaagaaaggccagctactggacaagactacatgaacaacaatcagctggattatttggatacatcatcttcagcgacttcagtttgcctttcacaggctgatggatcgctgcaacaaagttttccaccttcatccttcaatcaacatcaaccgttgagagaagcagttccagatagtgagtttgaggttacagatgcaggaaataactttctatttggggcaaatatcgatggccatatggagcctcttaacgaagacgatttgcttggaactgccttcgaagctgacaagtacatggaacagatgccaggaaacggcatctctaactacatttcatcaaaggattctcagcaagagttatcatcttcaatgatctcacatccatttggcgttgctgatatcgcgttcaattccatagattcatcgatcaatgatatccaattcttaaacagaaattcccgggctccaggtcctgttcaacaacgtatgcgaacatacaccaaggtgcacaagcgtggcgctgttggaagatctatcgacatcaacagatattctggttacgatgaactgaagcatgacgttgcccgtatgtttggaattgaggggcagctcagcgaccaaaacagagttggctggaaactggtttacgaagatcacgagaaggatgtcctattagttggtgatgacccatgggaggacttcgtgaactgcgtgcggtgcatcaggattctttcgccgcaggaagagaggcaaatgaggctggccagcgactacggagacagctttcttggcaaccaagcgtgtagcagctcggacgggggtcgtccgtggagggtcaccggcgactagaaatagcaggctatgcctgagcacaaatgtttgatataatccgtcccacgatagcaagaaaatgatacgcgatttctgagcacaaacttttgcactcagatgatcgtgcaaacagttagcattttaagaaaaatgttgcagttcaatgtaactgcaggaatgtctctgatgtagcctcttcgatgtggcagccttaacaatcgatgtgctacagttactctgcctatgtatttactatactaccttggccttgtatatccttttgatgtaggcgcagctggatgctgaaccccccggaggctgttagggacaattacaaccgttcataatttgccacagatacagatctgagtggacaaatggattcagtttacgtaaaaaatcaacaacgtatgcgaacatacaccaaggtgcacaagcgcggcgctgttggaagatctatcgacatcaacagatattctgggtacgatgaactgaagcatgacgttgcccgtatgtttggaattgaggggcagctcagcgaccagaacagagttggctggaaactggtttatgaagatcacgagaaggatgtcctattagttggtgatgacccatgggaggacttcgtgaactgcgtgcggtgcatcaggattctttcgccgcaggaagagaggcaaatgaggctggccagcgactacggagacagcttcgttggcaaccaagcgtgcagcagctcggacggaggtcgcccgtggagggtcaccggcgactagaaatagcaggcgatgtctgagcacaaatgtttggtataatccgtccaacgatagcaagaaaatgatacgcgatttctgagcacaaacttttgcactcagatgatcgtgcaaacagttagcaattagcatttaaaaaaaatgttgcagttcaatgtaactgcaggaatgtctctgatgtagcctcttcgatgtggcgcttctgtcttgctatgttttggcagccttaacaatcgatgtgctacagttgctctgcctatgtatttactatactacctaaaaaaaaaaaaaaaaaaaaaaactggagcagctggacgctgaacgtgg

SEQ ID NO: 544 - DNA, 2816 bp, Zea mays
  Clone ID: TF_ZmC1173_2
gtctacctccgcagcttatatgccaactgcataatgtgactatgcatgctgatgctgagacagatgaggtgtatgcacagatgacactgcagccactcagtccacaagagctcaaggacccatttttgctcgctgagttaggcactgccagcaaccagccaacaaattatttttgtaaaacactaactgcaagtgatacgagtacacatggtgggttctctgttccacgccgagcagctgagaaggtgtttcctccactggatttcaatcagcaacctcccgcacaggagttgattgcaaaagatcttcatggcaacgactggaaatttcgccatattttccgaggtcagccaaagcggcatcttctgacaacaggttggagtgtctttgttagtgcaaagagactggttgctggcgactctgtcctttttatctggaatgacaacaaccagctgcttctgggaattcgacgggcaaacagaccacaaaccgtcatgccatcatcagtactttctagtgatagcatgcatattggcctgctcgctgctgcagctcatgctgcatcaacaaatagtcggtttactatcttctataatccaagagcaagcccttgtgaatttgtcatacccatggctaagtatgtgaaagctgtgtaccatacccgtatatctgtgggcatgcgtttccggatgctttttgagacggaggaatctagtgtaaggcgttatatggggacaattacaggaataagtgatcttgatcctgttcgctggccaaactcgcactggcgctcagtaaaggttggatgggacgagtcaactgctggagagaagcagccaagggtatctctttgggagattgaaccgttgacaacttttccaatgtatccatctccttttgctcttggattaaagcgcccatggcctgcaggcctgccttctttatacggtggaaggggtgatggcttgacctcttctcttatgtggcttcgagacagggcaaacccgggtttccagtcactgaatttcagcgggcttggtatgagtccctggatgcagcctaggctggataattccttacttggtctccaatctgacatgtaccagaccatagcagcagcagcagcattacaaagcactacgaagcaagttccaccttcagcaatgcagttccaacagcctcagaacattgctgatagatctgctcttctatcaagtcagattctgcagcaagtacaacctcggtttcagcaaatttaccctcaaaatctcaacgaaaacaaaattcaaggtcatacacaacctgagtacctccaacagcagcttcaacgctgccaatcatttaatgagcagaagcctccgatgcatccacagcaacaacagcaggaaccacagcagcagcaatgcgtccaaacaccacaggatcaacaaatgcaagaacagaagcatctgcacaacttccactccttgccagatgcattatcggccttttctcagctttccccagccactcactccccaccttccgcattgcagacagttccagcattctcgcatcaacaaaacttcccagatacaaacattagctctctctcaccatctactggcccttcaatgcatggcatgttggggagattaccttccgaagcagcttcgagcctcccatgtgtggcaataaacgcccatgtatcggtatctgacccatggtcatccaagagagttgcagtggagtctgttaacccttgtcgacctcatgtttcaccacagatagaacatttggatatggcaacgtgtaacatgccgcagagctctgcactagcaccattacctggacgagaatgcctagtggatgaagatgggtgctctgatcctcaaaatcacctcttgtttggtgttcacatagactcacattcacttctgatgcaagggggcattccagcccttcagaatgataacagttcaggcactattccatactcaacctccaatttcctgagcccttctgataacgatttccccttgaatcaaccgctacgcagcgctggctgcttagatgagtcggattatcttccatgtgcagagaatgccgaacaggcaaatcaacagtttgcaacctttgtgaaggtttacaaatccgggaccgtcggaaggttgctcgacatcactagattcagcagctacgacgagctccgtagcgaggtggggcgtctgtttggcctcgagggccagctggaagaccctttgagatcaggctggcagcttgtatttgttgacagggaggacgatgtccttctggttggcgatgacccatggcaggaattcgtgaacagtgtgtcctgtataaagatactttcaccggaggaggtccagcggatgggcaagccgggcatccagctcctgagctcggctccttcaagaaggctgggcaatggctgcgacagctacgcgagcatgcaggagccgagaggcctggacgctgggatggcgccggtgggttcggtcgagttctgaagacggcggaggggagcccatggccctcggctcgaggattactctccctcctgtatgtttctgcagcacttgctagctctgcgacttggaacaaagcacgtagatcaaatggagctctgtgctgctccccgtctgatgatgtcttatggtatagactcgtagcagtaactactacatgttgtatacatgccgggcacttcagttcttatcgagtagcaataccgctagtttagtccatccaatcaactacgttcttgttcctatgatcctgttgttgcgatgcagtaaaactttttttttcatcat

SEQ ID NO: 545 - DNA, 3174 bp, Zea mays
  Clone ID: TF_ZmC1113_1
aattcggcacgaggatttttttttggggaaggtgaagcgagaggagcaggaggagagaaaggggaacgaggccggccgcgaatcggaggggaattcggggggcggggctcggtccggccggaaattcgcgcgattcgggcgcgggttagcggaaggggagggtgagcgcgcgcgcggaggcgccgcgaatgtgaagatctggtgctcggcgggatgacttcttcggcggcggccgcggctgctgccgcccaggtggcgggaggaggtggaggcggcgagggggatgccgccgctgcggcgcgaggcggaggcggaacggaggacggcatgtacacggagctgtggaacctctgcgccggcccgctggtcacggtgcccagggtcggggacaaggtgtactacttcccgcagggccatatcgagcaggtggaggcgtcgaccaaccaggtggctgagcagcacatgcaattttacgatctcccgtggaagatcctgtgtgaggtcatgaacgttgaattgaaggctgagccagacaatgatgaggtttatgcccagctcactctgctacctgaatcaaagcagccagaggagaatggctctagtgaggagatgcctgcttcacctcctgctgcacttgcaaggccacgcgtgcactccttctgcaagacattgacagcctctgataccagcactcatggtggattctcggtgctgcggcgccatgcagatgagtgtcttccgccactggatatgacccgtcaacctccaacacaagagcttgtagccaaggacctgcatggtgtggaatggcgctttcgccacatattcagaggtcaaccacgaaggcatcttttgcagagtggctggagtgtttttgttagtgccaaacgtcttgttgctggcgatgccttcatctttctaagaggtgatagtggggagcttcgtgtaggagtcaggcgtgccatgaggcagcaagcaaatgttccgtcttcagtaatatcaagccacagcatgcatcttggtgttcttgctacagcatggcatgctgttaacactgggaccatgtttactgtctactacaagcctaggacaagtccagctgagtttgttgttccctgtgatcgctatatggaatcactgaaacgaaattaccctatagggatgagatttaaaatgaggtttgaaggtgaagaggctccagaacaaaggttcactgggaccattgttggaaatgtggatcctgatcaagctggatgggctgaatctaaatggcgttacctcaaggtgaggtgggatgaagcttcctccattccacgtcctgaaagggtttctccctggcaaatagaacctgcagtcagccctccccctatcaacccacttccagtgcacagacccaagagacctcgctctaatgctgtagcttctctgcccgagtcttcagctccaacaaaagaagctgctccaaaggtcacattagagactcaacaacatgccctgcaaaggcccttgcagacccaggataatgtggccccgaaaagtgtttttggtgataacagtgaattggactctgctcataagtcctccctgcgaccgtcaggttttgatctggacaagagcaccattggcatgcagaggaagctgggttcagatatttggatgcgaatgaacagacctgatggttacagtgaaatgttatcgggatatcaaccacctaatgaaggtgcacggaattcgcagggtttctgttctttacctgatcagattgccgctggacgtcctaatttctggcacactgtaaacgctcattaccaagaccagcaaggcaatcacaatctgttccctggttcatggtccatgatgccttcaagtactggctttgggatgaacagacagagctatccaatgatccaggaagtcggtgggatgtctcagagttgtacaaacaccaagtttgggaatggagtttatgctgcactacctggccgaggcattgatcgatacccatctggatggtttgggcacacgacacccggtggtcgcgtggacgatgcccagccacgcgtgattaagcctcaacctttggtccttgctcacggcgaagctctgaaaatgaagggcaactcgtgcaagctttttggaatccatctcgacagcccagccaaatctgaacctttgaagtctccgccaagcgttgccacaccggcagctgagaagtggatggcagacggaatcgacgcagacaaaagccctgagccgcacaagacgccaaagcaactcggtgctacacaggtggatcctgtcccagagagatgcccacaagcttcaaggggcacacagtgcaaatcacaaggcgggtcgactaggagctgcaagaaggtccacaagcaaggaatggcgctgggcaggtccgtggaccttaccaagttcaacggctacacggagctggtggcggagctggacgagatgttcgacttcaacggcgagctgaaaggctgtagcaaggagtggatggtcgtgtacaccgactacgaaggcgacatgatgctggtcggggacgacccctggaatgagttctgcagcatggtgcacaagatcttcgtgtacacgagggaggaggtccagcgcatgaacccgggcgccctgaactcgaggccggaggacagcggcctcgccaattcgacggagaggggctccgcatctactgctgctgctagagaggcacccggctaccagtccgcctcgtcgcttaactccgacaactgctgatgccttggcagctagctggtcgtcccaagtagtagagaacaaggcaaatgtatccatagatctccttgtagcggagcttaatgcctttttttcccctttctaatatgcattggatgagcccgtagcgcaccgtagtagtatctaaagctggtgttctgagttggttggaccttcctgcagttttggtttctccttctgatgtggcaagttttagctggtcgcacctacctaatgtatgcttagcaaacgaagtcccactaagcgctgtacataactgcccctccctgcatcaactctaatatatcatctgcttaatcgtcaaaaaaaaaaaaaaaaaaaaaaaagaaaaaaaaaaaaaaaaaaaaaaaaaaaaaagggcggcccggacgcgtggaggcacacaaagat

SEQ ID NO: 546 - DNA, 734 bp, Zea mays
  unsure (1)..(734): unsure at all n locations
  Clone ID: TF_LIB5046-008-R1-K1-E10
atctttaatctgttgcacttccttccttctcaccgacgaatcctccatcccgcgcagcatctcctccctccctccctccgctccgtccgcgtcgccaaaccctagtagtacgttgtacaggacaatggggccacagccaccgcttcaccttcccgccgccaacggcgacagcatcgtcgaccgcgacgtttggctcgcctgcgccgtcccgctctcccgcctccccgccgtcggtgccgaggtctactacttcccgcacggccacgccgagcagtgccccgcgcatctcccggcgccgctcccggcgccgcacctcttcccttgcaccgtcgccggcgtcagccttggcgcggacgacgagaccaacgaggtgttcgccaaaatctccctcagcccaggcccccaccgcgggcccgccgccgcttgtcgtaccgaccccaccagcgactgcccgccgcaggagctcagttacttcaccaaggagctcacgcagagcgacgccaacaacggcggcggattctccgtcccgcgctactgcgccgaccacatcttccccacgctcgacttcgacgccaacccgcccgtgcagaagcttttcatgcgcgacaccaggggcaacccgtggcagttccgccacatctaccgcggnacgccacgccgccacctgcttaccacggctggagcaggttcgtcaacgccaagctgctcgtcgcgggggacatcgtcgtcttcat

SEQ ID NO: 547 - DNA, 638 bp, Zea mays
  Clone ID: TF_ZmC2665_4
gaccgctcgtggcgctgccgccggcggggagcctcgttgtctacttcccgcagggacacagcgagcaggtagcagcatctatgcgaaaggatgcagatgccaaaattccgagctatccaaatctctcatcatctgttttgtctagcgacagtatgcatattggaattcttgctgctgcagcccatgcagcagccaataacagccaattcacagtattctataacccaagggctagtccttcagaatttgttattccttttgccaagtaccagaaggccgtctatagcaaccaactatcacttggcatgcggtttagaatgatgtttgaaactgaagaatctgcaacaagaaggtacatgggaacaataactggtataagtgatatggatcctttaaggtggaaaaactcccaatggcgcaatattcaggttgcatgggatgaagcagcaccaagtgagagacgcaccagggtttccctttgggaggttgaacctgttatcgctccattcttcatttatccctcgccattgttcactgcaaaacgtccgaggcaacctggggtaacagatgatgatagctcagaaatggacaatctttttaagcggaccatgccatggtttggtgaggaagttggcaag

SEQ ID NO: 548 - DNA, 873 bp, Zea mays
  Clone ID: TF_ZmC371412_1
ccggccggggaaaatcaaaacaactgtgtgtgccgctgtagcagcgcgcgccaccaccgtcaacttctccccacctcgccgccgtctagatttcgtctcctgggctcgagcaaccgaagcaggcttggggtgttctcggagagaatcgttgcctcggccgatgccggccctgatgtaggtttctgctctgctttgcccggtgccaacgtctctcccggagtagcggttccgccgccccatgatctgccagttggaacacatgggcgttcacggaggaggttgctctgctggacagtgaccgcatttggtagcggtggaggaagacgacgaagaggaggaggagtaggccatgaaggaggtggccgaggaaaggtgccttgacccgcagctgtggcacgcgtgcgctggcggcatggtgcagatgccgcccgtgcgctcccgtgtctactacttcccgcagggtcacgcggagcacgcgcatggcggcggggccgcggacctcgccggggcgcgagcgctcccgtcgctcgtgctctgcagcgtcaccggggtgcgcttcctggccgatccggagaccgacgaggtcttcgccaagatccgcctggtgccggtcgcgcccggcgaggtggagttccgagagccccgtgagttcagcgtcgaccccgaggacgcccgggagaagctttcttccttcgccaagacgctgacgcagtccgacgccaacaacggtggcggcttctcggtgccgcgctactgcgccgagaccatcttccccaagctcgactaccgggccgacccgccggtgcagacggtgcttgccaagacgtgcacgggaaggtctggaagttcgcccatttaccggggcacgccgcg

SEQ ID NO: 549 - DNA, 884 bp, Zea mays
  Clone ID: TF_ZmC13783_2
aattcgacttcggcatgccttctcctaccaccccacaccctctccccatctctctctctctccccgtgccctcctccccccagtccgccccacccttccggccctccccctcttttatatccagtaccatggtgatctccgagctcgggtgagctgatgagaatgcggccgatttgaggaaggctgtgggcgcgatggatgcggtttcgggcggattcgcgaggaggctgtagaggttaggttccggtgtcccccggcccggccggtcgtgggagatgagctcctcgtccgcggccagcatcgggcagccgccgccgcccgcgccgccgccggaagaagagaagaagtgcctcaactcggagctgtggcacgcctgcgccggcccgctcgtctgcctccccaccgtcggtacgcgcgtcgtctacttcccgcagggccacagcgagcaggtggcagcgtcgacgaacaaggaggtggacgggcacatccccaactaccccaacctgccgccgcagctgatctgccagctccatgatgtcacaatgcatgcggatgtggagacagacgaagtgtacgcgcagatgacgctgcagccgctcaatccacaagagcagaacgacgcgtacctgcctgccgagatgggaatcatgagcaagcagccgacgaattacttctgcaagacgctgactgcgagcgacaccagcacgcacggcgggttctctgtgccccgtcgtgcggccgagcgcgtcttccccccgctggatttcacacagcagcctccagcacaggagcttattgcacgggatattcatgatgttgagtggaagttcaggcatatctttcgaggccagcccaaaagacacctgctgacgactggctggagt

SEQ ID NO: 550 - DNA, 3310 bp, Zea mays
  Clone ID: TF_ZmC1206_1
ccgggacggagccacaccgcacaccccatcccgcccggagcagcaaagcataggtgctcgagcgctccctccagagctccccgcctgacgccccgtccaccccctcctccggcgccccccgcctacgctcggctcccttccctagccggtacgcgcgacctccccttccccctacgtgcgagccaactccttgctccctacccggacttcggcggctctcggtccctacatcggcgtggggccgcgggcctgacgcctaccagccgaatgctgcgcgcgccgatcgccgtaggtagacaaggggtcccgtgccggctggtcaggagctgaagtcagtgcgcgggtcgtctcgtaggcagcggtgtgggctacccctgccgtgacgacgtactcagggcctcaccatgatgctctgtttagacaactcaggatggcttgtacggggtgcatggtcatgcagcgtcggctaggcgagctgtttttcgtcttccctcagggttgtttccaccagcgttacacagctacggagtaatggtagaatgaggacttgcgtctgattgagctgccacctatgatcctctgcaaggtggtcaatgtagaacttagagctgaaactgattctgatgaagtttatgctcaaattatgctgcaaccagaagcagatcaaagtgagcccaccagcccagattctgagccaccggagcctgaaagatgcaacgtctattccttctgcaagaccttgactgcttcagatacaagtacccatggtggattctctgtcctcaggaggcatgctgaagaatgtttgccccaactggacatgactcagaatccaccatggcaagaactggtggctaaagatctccatggaaatgaatggcatttccgtcacatctttcgagggcaaccaaggaggcatctacttacgacaggttggagtgtttttgttagctcaaaaagattggttgctggtgacgcgtttatcttcttgagaggtgagaacggagagctgagagttggggtaaggaggctcatgaggcaactaaataacatgccatcttcggttatctcaagccacaacatgcatcttggagtcctagcaactgcatctcatgccatctccacaggaactctcttttctgttttctacaaacctagaacaagtcgatcggaatttgtcgttagtgtaaataagtaccttgaagctaagaatcacaaggtgtctgttggcatgaggtttaaaatgagatttgagggtgatgaatctcctgaaagaagattaagtgggacaattattggtatgggaagcatgccagctaactcaacatctccatgggctaactctgattggagatctttgagggtccaatgggacgagccttctgctattctgcgtccagatagagtttcaccatgggaactagaaccccttgatccaactaatccacagccacctcaacctcctttacggaataagcgagcacggcctcctgcttcaccttctattgctccagaacttgctccagtttttggtttttggaagtccccagctgagcctgcccaagctttctcattttcaagaccgcagcgaactcaggaattataccattcaaatcccagttcaatcttctcatcatcgttgaatgtaggattcagttcaaagaatgaccgttctactccaatcaacagtcatttgtactggacaatgaggcagacaagaactgaatcctactccgctagcattaacaaagctcctactgaaaagaagcaagaatctgctacttctggctgcagattgtttggcattgagataggttctgcagtatcaccagtggctactgttgctagtgttggccaggatcagccacctgctctctcagtagacgttgaatctgatcagctgtcacagccgtcccatgccaacaaaacggatgccccagtggcaagcagcgagcgctctcctaacgagtcagagagccggcaagtcaggagctgcaccaaggtaatcatgcaaggaatggcggttggcagggcagtggacttgacaaggttagatgggtacgatgacctccgccgcaagttggaggagatgttcgatatcccgggagagctttccgccagcctcaagaaatggaaggtgatctacacagatgacgaggacgatatgatgctggtcggggacgatccatggagtgaatttcgcaggatggtaaaaaggatatacatttactcttacgaggaggccaagtctttgactcgcaaggcgaagccgccggttgttggtgacaccatcaagccagacccaaacaaattgccaccggaatctgacgtgccacatgactcaaacaacaatgctcccgttgctgctgattatcaggactgatggatgctaacttggctcctaccttttctttcccctcttggatgtcggtcatgggaggcaatgcacgctccttgggacttgtaagagttatctgttttgttgcttcgcgggcccaaaggacgcttccctgcaccatctgcctttgtttggaacggcttggaccgccgtggtccttttacctgcagcaaggaaaggaatggctgggagggaatggatactggtatcgttccgtgtgtggcaccccgtgatctgtttgccgtgctttgtaggaggcatggcgtattgccgggtactttggttttggagactgctactgactgctgccgtcgtcgggccgctcctctcacctctggtaaataggactttgtacacaattattttgttagtagcagtatatgtacatcatcggtcgtgttgcttgctacatgtactcctatgtagcatcctcccctgcattttagtcctggctaggtatcagatgctctggtgcaaaaatgtctctgcttgttccaacggcatgctcttttcggcccgtgctgccttgctgggtgtcgtgtgtgccttttcggttggaacattgctgccaccgcccggcatttggtgctttcagcagttatgatcggctccatactgttccaaagggacgagggtttctaactctagtagccatggactcgctctgtcaagttgctccttgaccgggagagtcaggccacaggaggtggtattaatgtataataactcgttgaatcaattgcaataactggagtttgttagggagtatagcccccggcatgcattcgtcaaaaggcgaagttatgttctgcccctggcggttctgagacttgtgtttgctttgacactgcacttgaatttgttcatctgtaagtcagagatgagttatacaatcggccactgtcatatcaa

SEQ ID NO: 551 - DNA, 3140 bp, Zea mays
  Clone ID: TF_ZmC258_1
cgcgcagcgcagtccatccatccacgcacacgcgcacccgtccctctcggcgcccctctcccccctcctccactccgctgctgcctgcttgcctcctccttgccgccgcgaccgcgaccgccgttcgctgtcgaggccagaggagaggagtggtcaagtccgaggccacctgcccaggctcagacctcccccgccacaacgcgagccgcatcgcctcgtctcctccacgccatacacgcccgccttcccttccccggcgaccaggacccctcgcccgcggcgccagcgagctcccccggccagtcgtaggcctcccggagctcagcacgcacgcaggtgggtccagtgaggcctggttgtgcgcgttcctgcgggcgtcgtcggggcagatccatggaactcagccgcccgcagcgcggatagtactgcacttgtgcaccagccaccagcggatcgccaggactgcccacctgctgctgcttgtgtcgctagccatttttcgggcgtctggcttggaggatatggccgcggcgatggacgcgcccaaccctggagcggctgctggcccaggaatgcctagtgacgccctgtaccaggagctgtggcatgcgtgtgctggcccgttggtcacagtacctagacgaggcgagcgtgtctattacttccctcagggccatatggagcagctcgaggcgtctgcacaccaccagcagcttgatcagtacttaccgatgttcgatctaccacccaagatcctatgcagagtagtcaacgtggaactacgggccgaagctgattcagatgaagtttatgctcaaattatgttgcagccagaagctgatcaaaatgaactcaccagcctggacgctgaaccacaagaacgtgaaaaatgcactgcccattccttctgcaagacactgacagcttcagatacgagcactcacggcgggttttctgttcttcggaggcatgctgaggaatgtcttcctcagctggacatgtctcaaaatccactttgccaagaactggttgccaaagagctccatggcactgaatggcattttcggcacatttttcgagggcaacccaagaggcatctccttaccaccggctggagtgtctttgttagctcaaaaagattggtttctggggatgcattcatcttcatgagaggtgaaaatggtgagctacgggttggtgtaaggagcctcattttgtatgaatctaacatgctcggaaattgttacctttagcagcacatgcactgagggtgtagggtggccaggtgggagaacgtttccactggaaccctcttttctgttttctacaaaccaagaactagtcgctctgattttattgtgagtgtgaacaagtaccttgaagctaagaagcagaaaatatctgttggaatgaggtttaagatgagatttgaaggtgatgatgctcctgaaagaaggttcagcggaacaatcattggcatcgggagtttgccggcaatgtcaaaatctctgtgggcagattctgactggagatctctaaaggttcaatgggatgaaccttcatccattcttcgtccagatagaatctcaccatgggaagtggagccactggatgcagctaatccacaatcccctcaacctccactaagggctaagcgtccacgacccccagcttcaccttgtatggtttcggaactgccttcaggttttggactctggaaatccccaattgaatcatcctgtacactctcattttcggaacctcaacgggctcgagagttatttccttcaatccccacgtcaaccttgtcatcttcatcaaatgtcagttttaattcaaagaatgagccgtccatgctaaccagtcagttctactggtcagcaaggcatacaagagctgactcctgcgctgctagcaccaacacagtcgtaattgaaaagaagcaagagccaagttctggtggttgtagattgtttggaattaatatatgctcagctgaggaagaagtattacctgaggttactgctccaggtgttggttatgagcagactgctgcctctgtagagttgaactcggataagctctcacagccatctgatgtcaacaattctgatgccctagcagctagcagtgaacgttcacctcttgaatcccaaagccggcaagtgaggagctgtaccaaggtaattatgcaaggaatggcagtaggaagggctgtagacctgacaaagcttagtggctacagcgatctttgccagaagctggaggagatgtttgacatccagggggagctgggttccacactaaagaaatggcgggtcattttcactgatgatgaggatgacatgatgcttgttggagatgatccttgggatgagttttgcaggatggtgaaaaggatttacatttacacatacgaggaggcaaagaagctgacatccaagtcaaagttaccggttagcagtgacagcagcaagctgagcgctgcgaactcactgtctgaatgactatgaacaaaaactgcagagtgctaacgtccctctaattttgttatttccatcatttgattatgggggtgaatgctcacggttgctccgtgggctgaagttgtggttggcattcaactgccttgagttttggaggcttttggactgccttgccagcatgagcctcctggaagaggcaccctggcatctgcgtgccatttcccatttgttcgtgccgtttggtaggagtatccattggcttatttagcaggtccctggtttgaagaaagaagcggtcagctgcaagatggacggtgccttgcctcttcttcgactacttagctagtaattaggactatgtatgtaatgaatgtatatagtgccattaagacgcccatgccctggtattgaggtcccggcatttgtatgaatcaattgttcggaaattgttacctttagcagcaacgaacctgagggtgtagggtggccaggtgggagaagttgtatgtttctttcagtaacaatctttgtgcaagtgatctgtatatagtctactgttttaataagcaatgttgtgcaacttgcgctcctacaccctacagtacagtggggcttttcttgtgctaaaaaaaaaaaaaaaaaaaaaaaaaaaaa

SEQ ID NO: 552 - DNA, 4302 bp, Zea mays
  Clone ID: TF_ZmC965_2
gccggccgggctgggctcttcctcccctcgctctcttgcgaacttgatcacacagcacatagcacacacacgacacgctgcgagagggggaaagaacttagaagggcaggcaggagaagcgacacaggaaactgacgtcgccttcggcggcctgctacttaaataaatcccctcgcctcgcctccggctgcctcttccctttttccttccgcgcaaatcactcaggtgccagttgcgcggcggagatcgcgacgaattccggacggcagggaggtggtcgggggaactgggaagtgcatgtgagatccgatggcggcggctgcctgcgccggtgcggaagcaggacgcggatgcggagggaaggacgcgctgttcgtcgagctgtggaaggcctgcgcggggccgctgtcctgcgtgccgccgcttggggagaaggtctactacctcccgcagggccacatcgagcaggtggaggcatcgacgaaccagcttgccgagcagcagggcacgcccctctacaacctgccatggaagattccctgcaagctcatgaacatcgaactgaaggttgagccggatactgatgaggtgtacgcccagctcaccctgctccctgataagaagcaagatgagaatacatctacaacagtggaggaagaggaggtggtggtgcctcctgcgctaccagccacaaatgagggtcctcacatccattccttctgcaagacattgactgcctcagacacaagcacacatggtggtttctcagtgttgcgccggcatgcagatgagtgcctcccaccattggatatgagtcaacatcccccaaatcaagaattggtggccaaggacctgcatggggccgagtggcggttccgtcacatctttcgaggtcagccacggagacatctcctgcaaagtggttggagtgtttttgtgagcgccaagcgtcttgtcgcgggggatgccttcatatttctcagaggtgagaatggggagctccgtgttggagttcggcgtgcactgaggcaccaaaccactatcccatcttcagtcatatcaagccacaatatgcatcttggggttcttgcaacagcatggcatgcagtgaacactgatagtatgttcactgtctactacaagccaaggactagtccagctgaatttgtggtttcgcgagataggtactatgaatcactgaaacgaaattattcaatagggatgagatttaagatgagatttgaaggtgaagaggcagcagagcaaagattcactggcacaatagttggaataggtgcttctgatccatctggttgggctgactcaaaatggcgttcccttaaggtgagatgggatgaaccttcttctatttctcgtcctgaaagagtttctccttggcaaatagaaccttctgttagcccatgtcatgtgaaccctcttccagttagattcaagaggtctcgatcaagcgttaatgctttgccatctgacgtgtctactgtaaccagagaagtcacttctaaagtcatggcagactcgcagcaaaatagtctcacaagagccttgcacaatcaaggaaggacacaattgacagttcgataccatgataacagtgatgtgaagactactcaggatcttaccgtgtggtcttcaggaactgagcaacagagaaacaatattgctgcccagacaaagctatgtctggagggttggacgccaactagaagtcctgaaggctacaatcagatattctcggcatttaaaccactgaaagatatacataacccacttggtccttttcctagtcaaatatctgggactcactcaaatagctgggacacagctgatgctcgttatccagtccaacaagctaattacagcatgttacctggcacatggtctttgaggcctcataacagtggttttaggatgaatcaacaaaattatctagtgatgcctgaaggtgcaaattttacggggaaatcagctttcacttcacttcaggaccatggcactgataaatgctccacaggctgctttggtcatattgagtcaagttcccacacagaccatgcatcctcaagtttgatcaggccccagcctttggtccttggaaatggtgttcagaaaagcaaaggcacttcatttaaattatttgggattccccttggcagcccagaaaaatctgaacctctggtatccccaccaagtgtcgcatatgacgggaaacttcaaacttctccatcagaaaaagggaatcagctagacgtagttgaagtggataattgttctcatccttctaagactgtgaagccacttgatggtcctcagtcagattctattacagagaataatcagccttctccagaagctacccttaatatccagaacaaagtgcaaagtagttccaccagaagctgcaagaaggttcatcatatgttgcacctttttccttgctagtagtcattccttgatacataaatgcttactaggcccaaaccttcaattgaatacttctcaaagtatgctccaaagaagtttatgtactcttgatcccttttggcaacttgttttatgtatctagaagcaccggtccaataaaacctgctagttgtgtaacctactaacctttcatgctaataaattacttgagtttttcttgccccttcaagtgtcgtatttggatctgtttggcatcatcaaaagagctatttatccttaagtttggctgtcaagaaagaaaaaaaaagctgtgggaatcctgtgatgagactttttaatctttaagcagtatgccttttggatatatagtctagcattatgcaaatggttattaaatacaatgtggatgacaaatgtcacgttgtcattagattggtgacatgggctttgagaaatgttagctttctaatgataacggtcaaatgttctatctaattgcatccatttttctccggttgctttttattttattttatttatttgaggggaaggataggcctgacacaatataccgagtaaaggccttgggttcgacgcagcttttctgcaaaaatgtagggatatggcgtgcctcggttattacttcatcggactccactcaagtgttcataagcaagatgtttgacttcgatggtgagctgaagagtccatgcaaaagttggttagttgtctacactgacaatgaaggcgatataatgctggttggtgatgacccctggaatgaattctgcgatatggtccacaagatcttcatctacacgagagaggaagtcgaaaggatgaacccaggtgccctgaactcaaggtctgaagatagtctatctgactcgctgggaagaggggtagcttccagagatccccgaggaggcgggtctacttcggctctcgattccgagaactgctagtttgttcagtcagtgaggcctttggaagtgaagcagacaaaaggcgtgaatcttgcggtgtagagtgtagttggtacattgtgtgtatgcctccgggtaagccctgcggtacccagtttgtgtcctggcgccagtttaccatttaagctaagtttttgggtgtgccctgtgctggggtctgggctctagttattgtagcagagcaggcaatgcatgcaagaaactgatgatgcgcctgtttggccctctttcccttcccaagccatgtaaatagccttggctctgaagcgtagtattgtattgtcgacagccgtacttgagatagtactccaagaggcgcgcttgctcctgtcagttgggtgtgcgtatgtagatgtgcgtgtgaagccatgcaagcaagggtttgtggggttgatggcttttcatggtagcggatctgctttcatggtactgacaagcaggtcccaggcggcccgttgactgcggcggtttgctttgagaaccgcgctaacttgtccagtcagtgagcccttttgaaagtggtgaagaaaacaaaaggccccgtgtcagagtgaccggaagaacgaaaaaagggtgtgtttcagtggtgtgtagtaggtaggtaattttgtgtgtatgcctccgggtaaaagccccccggtacccagtttgtaaatggtgcttctcctggtgctagtttcccgtcgtaaactggatttttttggggggggtgtgccctgctctgtgtgctgacccgcctgggggtaagttgtagcaaagcaggagaaaacaggcaaaaaaccgctggtgggcctgcttggccaatccttttccctgcggagcgccgtaaataaccttggatttgaagcggaggaatgtattgtcccgggcctcc

SEQ ID NO: 553 - DNA, 839 bp, Zea mays
  unsure (1)..(839): unsure at all n locations
  Clone ID: TF_ZmC371412_2
gccgcgaggccggcctggcagtcatcaccattacaaggtagaggcgtccgaggcctcgccataattccaacccactgtgtgtgccgctgtagcagcgcagcgcagcgcgcgcgccaccaccgtcaacctcctgatctccccgcctcgccgccgtcgattcttcgccgtcttcctggggctcgggggcagccggagcaagcttgggggggtggtgtcctcggaccgacgacagagtcgttgcccgcgaagatgccggccctggtgtacattcctactccgctttgcccggtgccagagcgtttctcccggagtagcggttgcgccgcctcatgatctgccaattggaacccctgggcgtgcgcagaggaggttgctctgcagctggacagtgatcgcgtttggtgggtgtggcggcggtggaggaagacgacacgacgaagacgaggaggtcaggaggccatgaaggaggcgggcgaggagaggtgccttgacccgcagctgtggcacgcgtgcgccggcggcatggtgcagatgccccccgtgcgctcccgtgtctactacttcccgcagggccacgcggaacacgcgcacggcggcggcggcgccacggacctcgccggggcgcgggcgcgaccgctcccgccgctcgtgctctgcaccgtcgccgaggtgcgcttcctggccgatccggagaccgacgaggtcttcgccaagatccgcctcgtgccggccgcgcccggcgaggtggagttcggagagccccgcgagttcggcatcgaccccgaggacgcccgggagaagctgtcctccttcgncagacgctcacgcagtccgacgcc

SEQ ID NO: 554 - DNA, 305 bp, Zea mays
  Clone ID: TF_LIB3068-003-Q1-K1-F5
acgtccactcgtccgatttattatatcacaaacattgatgctatcataatgatttaggttactgtgactcttgacgtatttgttgttacttttatggcaaccaatgaggcatctacttatgacagactggagtatttttgttagctcaaaaagactggtttctggtgacacatttattttcttgagtgtgacatcattacatgttaaagttgtcttgtacgttacatttatttcctggctttactaaatttttggatcaaccttctaactgttcttcatctaattgatgtgagaacaaatagctg

SEQ ID NO: 555 - DNA, 742 bp, Zea mays
  Clone ID: TF_ZmC929401_1
gtcaagcaagcgcagatgcacaggtacaattgtgggaattagcgactatgaaccgatgcgatggccaaactcaaaaggcgcaacttgcaggtagaatgggatgaacatgggtatggagaaagacctgaaagagttagtctatgggatatcgaaactccagagaacatggttttctcttccccattgaattcgaaaaggcaatgtcttcctagttatggagtttctggcctacatgtgtcatcaatttcaaagccacaaggaagtccttttggtaacttgcagcacatgccagggatcagttcagacattgctttgctgcttctcaatcaatctgcccagaacctcgggagttcaattgcttgtcaacaatcatcattttccagcattattcaaaatgctaagcaaagctatttccctccaacgacattaggtgcttccactgggtggaatgaatctcagcagcagttaaacgcccttggtattcaaaaaggtgatcaagtaagctgtgatgttcagccaggtattgattcaatcactgcaccggagatgaatgttaaaccaagagtcccaagaagcacggattcatactcaagtcagagcatttcggatccaaacagcaagagtgaccctaaaacaaaaacgcgaaggagcaagaagagctcgtctcacaaaaccatttcggatagatctgagattcttcagtaccttctcagatctgtgacaaagcagagcatggttcaga

SEQ ID NO: 556 - DNA, 360 bp, Zea mays
  unsure (1)..(360): unsure at all n locations
  Clone ID: TF_cC-zmle189096f07d1
cgggggaaggaattccggggggctncacatanccngcattttgctaacggactcngacacaagcacgcatgggnnaggctgtgtttctaaccgtgctgctgaccacccccccccgcctatggattataatcagctcaggcctaaaaaaaaacctgcttgccaaggattagcatggagccaagtggaagattcgtcatatatataggggccagcctcgaaagcatctcttgactactggatggagttcatttgtcaaaaaaaagaaactgcttacaagggatgctgtgtaatttctccgacgagaaaactgtaaactaatgatggaagaacttacgcctattcagcataaaaaacacgccc

SEQ ID NO: 557 - DNA, 1873 bp, Zea mays
  Clone ID: TF_ZmC488_1
ttcataattgttccacatggtcttgtaatctgtcgatgcttgtcagaacttggggcaaaatgacaaggcccaaagagtgaatagccaaggatttgcatggcatgaaatggaggttccgtcatatctatagaggtcaacctcgaaggcatcttctgacaactggatggagttcatttatcaataagaagaaactagtctcaggggatgcagtcttgtttcttagaggtaatgatggtgagctaagattgggtgtgaggagagcagttcaactgaaaaatgaagctctacttgaagctgtcaactgtactgattcgaagctacttatgctgtctgctgtcgccaattctttggacaacagaagtatatttcacatctgtttcaacccaagggttggtgcatcagaatttattgtgccgtattgcaagttcttgaagagcttgaactatcccttttcagttggaaccagatttaaagttggctgcgagaatgaagatgctaaggaggcccacgcgtccgtgatcataggtattagtgaagttgatcccatacactggcctggatcaaaatggaaatctctcctgataaagtgggatggtgctactaagtacagccaccagaatagagtatctccatgggacatcgagggagttggcagctcagttttagttactcaccgtctttcctcttctgtttcgaagcgaacaaaactgtgcttccctccaagcgatttggacacaccaattctagatggaaatggtcgtccagactccgtggaaactgaacgtttccacagggtcttgcaaggtcaagaattggtgcaccctagtattcatggtgctgcatgctctcattcatcagatagccccagatgtcaaggctcttatggcaggagattctctgctgatgtgtggaactgcaagatgaatgatgtaatgagtgggcctcgacacctaaatgccactgggtttgcttaccagcccctaggcttcagtgaatctgtcaaattctcagaggtcttgcaaggtcaagaaatgtctcaggcggttccttccttcatgagatctgctttcaactctggcacgcagaatggcagggttcgaccatttgattatgtgcagagatcagatgcaactcaaggatacgctctccagcagtttaatctgccagcaacagaagtgcattcgccctcttctgttcttatgtttaaccaaaccatggtaccacatgctgagctagatggtgcgaccaaccgtgaagaagtacatggcagcaggtacttgtcatccaatgcaatagggagagaagctgaaccatggccatccatgcagcagcaaagagcgagtgtaaatggaagcgagcctctcgacacaactgaagcctcagctcctgcaaggaacgctgaatctggatcggtcggcaggggcgcggggcgaagcaactgtaagctttttggtttctccctgactgagaagatccttggaacggatggtggtggtgtgaaagaagggaactacgaagtggaccgtcaaactccccgggtgctagacttgtttgggcacggttctacgcctggagctctgcatgctctctgtgctgctcccttgggaatatgatgctgttctgcctagttttacaacagttagatttatgtaatccttcagccattttcatcgcgttgtacttgaccaatatgtccagcgtatgatttccagttttaattgtatgctgatgctacatatcctctcttgagatccatgcatgagaattctggcagaatgaacagaggtaaattgatgtccagctgttttctttatgaacaaataggtaaattgatgtttaatttcagaataaaaaccatggcgaatttgatagt

SEQ ID NO: 558 - DNA, 3511 bp, Zea mays
  Clone ID: TF_ZmC2734_1
ccgcttgtttccttgcccgcggtgggtagccgagttgtgtacttccctcagggccacagcgagcaggtagcagcatcaacaaacaaggaaatagagtctcagatccccaactatcctaatctgccgccacagcttatatgccaacttcataatgtgacgatgcatgctgatgcagagacagatgaggtatatgcacagatgacactacaaccactcaacccgcaagaactgaaggacccatatttacctgcagaattaggttcggccaataaacagccaacaaactatttctgcaaaacattaacagcaagtgataccagtacccatggtgggttctccgttccccgtcgagcagctgagaaagtgtttcctccactggatttcacccagcaacccccatgccaggagttgatggcaaaagatcttcatggcaatgagtggaaattccgtcacatctttcgtggccagccaaagcggcatcttctaactacaggttggagtgtctttgtaagtgcaaagagactcgttgctggcgactctgtcctttttatctggaatgacaataaccagcttctgctgggaattcgtcgtgcaaatcggccacaaactgtcatgccatcttcagtcttatcaagcgatagcatgcatatcggtcttcttgctgcagctgctcatgctgcttcgacaaatagccgatttacaattttttacaacccaagggcaagcccttcagagtttgtcataccactcgtaaagtatgttaaggctgtgtatcatacccgcatatctgtggggatgcgattcaggatgctttttgagacagaagagtctagcgttaggagatacatggggacaattaccggaatctgtgatcttgattctgttcggtggccaaattcacactggcgttctgttaaggttggctgggatgagtcaactgctggtgagcgacaaccaagggtgtcactatgggagattgaacccctgacaactttcccaatgtatccatctccttttccgctcaggctcaagcgtccatggccaacaggcttgccttctctgcatggtgggaaggatgatgacctggctaactctctcatgtggcttcgagataccgcaaatcctggttttcagtcgttaaattttggtggacttggtatgagcccttggatgcagccaaggctggatgctaccttacttggtctgcaacctgacatgtatcaggcgatggccacagctgcttttcaggatgcaacaaagcaggcatcgcccacaatgctgcagttccagcagccccagaacatagctggccgggcttccccgcttctttcaagtcagattttgcagcaagcacatcatcaatttcagcagcaaccgtaccttcaaaacatctctgagagcacaatccaagcacagggtcagtctgagttcctcaagcagcagatccaacgcagccagtcattcaatgagcagaagccccagatgcaacaccagcaagaatcacagcagcagcagcaaccacagtgtctgccagttcccccaaacatcagcaaatgcaaccaaccggattatgaccaactaccagtctatatctaatgcattatcaccgttttctcagcggtcgccaagtttctcagtcttcacctatggcgattgtagactatattaccgttctctgactttcctctggaccatacactaaattcttcaggctgcttagatgattctgggtacgtcccgccatgttcagataattctgacaaagtgaaccgaccaccagcgaccttcgtgaaggtttacaaatctggaacctacgggaggtcgcttgatatcactaggtttagcagctatcacgagctccgtagggaactggggcgcctatttggccttgagggccagttggaagacccattgagatcaggctggcagcttgtattcgtcgaccgtgaggaggacgtccttctcgtgggcgacgacccttggcaggaattcgtgagcacggtgtcctgcataaagatcctctccccgcaggaggtgcagcagatggggaagcagggcctggagctcctgagctcggcccccgcgcggaggctcggtagcagctgtgacgactacgtcagcaggcaggagtcgagaagcctgagcaccgggatcgcgtccgtcggttcggtcgagttgggatgagcagcaagatagcgcgcacgcagcagcagcagcagcaggttacgcatcctcagcctcagggtaggtaggggactgaagggttggtctgcgacttgatgacccacgagctcctcgttgcgcgcttcgttcgcctccatgcgatggatagaagttcagcgcagaccaagccttagctctgcgagctatgtaccatctaataattctgtccgtgtcgtaccatgtcaactcctaagtagaagaattgaagaaactaccagcagccgctgtctggtatacacgctgaaacattttttttcttgtatggagaaatactaatcatctggatgtagccaggcctatgcaggctaagtagcagctgtgacgactacgtcagcaggcaggagtcgagaagcctgagcaccgggatcgcgtccgtcggttcggtcgagttgggatgagcagcaagatagcgcgcacgcagcagcagcagcagcaggttacgcatcctcagcctcagggtaggtaggggactgaagggttggtctgcgacttgatgacccacgagctcctcgttgcgcgcttcgttcgcctccatgcgatggatagaagttcagcgcagaccaagccttagctctgcgagctatgtaccatctaataattctgtccgtgtcgtaccatgtcaactcctaagtagaagaattgaagaaactaccagcagccgctgtctggtatacacgctgaaacattttttttcttgtatggagaaatactaatcatctggatgtagccaggcctatgctctctaatggttgatcgggtaatacagcccctcgcacacaaattaaaaaaaccaggtgttggagtgggccaatagacaactatgaggctcacatcattgtttgtggggggatagtacaaactaacataaactgctaatgcaagggggcattcctggtctccaaaacgggaatgattcagctgctataccttattccacttacaatttcctcagcccttctcagaatgactttcctctggaccatacactaaattcttcaggctgcttagatgattctgggtacgtcccgccatgttcagataattctgacaaagtgaaccgaccaccagcgaccttcgtgaaggtttacaaatctggaacctacgggaggtcgcttgatatcactaggtttagcagctatcacgagctccgtagggaactggggcgcctatttggccttgagggccagttggaagacccattgagatcaggctggcagcttgtattcgtcgaccgtgaggaggacgtccttctcgtgggcgacgacccttggcaggaattcgtgagcac

SEQ ID NO: 559 - DNA, 454 bp, Zea mays
  unsure (1)..(454): unsure at all n locations
  Clone ID: TF_LIB3245-008-P2-N1-H10
actatcgaagagctatgacgtcgcatgcacgcgtacgtaagctcggaattcggctcgagcaaacgaacccgcccggagcagcaaagcataggcgctcgagcgctccctcctgagctcctccgcctcacggtcacgcctcgtgtgccccttccccctcctcggccggccgcctcacgccgtcacctncgctcggcgagtctcggctccgacagcagccgccacgtgcgacctcccctactcctgagagatctgcggngctcggcatggggtgaccagatcgggccgctgctcggtgctttccagctgaattctgcccgcagctcgtgtcggaggcagcggacatggcggaggccggcgtggcacgcggctcagggagcgctggcgatgacttgttcacggaactctggcatgcttgtgctgggcccgtggtcacagtgcctcggcaaggcgagct

SEQ ID NO: 560 - DNA, 586 bp, Zea mays
  unsure (1)..(586): unsure at all n locations
  Clone ID: TF_LIB3959-021-Q1-K6-B1
ccgnggtgatgatggtgaactaaggctgggcgtacggagggccattcagcttaaaatgaggccctttttgacgatttcagttgcgacagtacaaaacggcatacattgttggctgtagctgattccttgaagcacaaaagtgtttttcacatttcttacaatccaagagctacggcttcagaatatattataccacaccataagttcctgaagagcctaaatcttccattctgtattggagcaaggatcaacttacagtgccataatgaagatgttagtgaaaggcgatctggaatggttgttcatgtcagtgaaatagatcccatgaaatggccaggctcgaagtggagaagcctgctggtaagatgggaggatggtgttgaatgtaacggccaagatagagtatctccatgggagattgagatagctggtggctctgtctctgttgctcattctctgtccgcatctagctctaaaagaaccaagttgtgtcctcagggaaatttggacgttccaacaatgtatgttacagggaatgggaatggttgtactgactccgtggaaactggaaagttcccaaggtctt

SEQ ID NO: 561 - DNA, 2943 bp, Zea mays
  unsure (1)..(2943): unsure at all n locations
  Clone ID: TF_ZmC1206_6
ccgggttatgannttcttattttaccaaaaaaaaaaaaaaaaaaaaaaaaaaaaaaaaaaaaaaaaaaaggaaaaaactccccagacaaccaagagaaccccgcccggagcagcaaagcataggcgctcgagcgctccctcccgacctcctccgcctcacggtcacgcctcgtgtccccccaccccctcctcctcctcctcggccggccgcctcacgccgtcacctccgctcggcgagtctcggctccgacagcagccgccacgtgcgacctcccctactcctgagagatctgcggggctcggcatggggtgaccagatcgggccgctgctcggtgctctccagctgaattctgcccgcagctcgtgtcggaggcagcggagatggcggaggccggcgtggcacgcggctcagggagtgctggcgatgctttgttcagggaactctggcatgcttgtgctgggccattggtcacagtgcctcgccaaggcgagctggtttattacttcccgcagggtcatatggaacagcttgaagcatctacagatcaacaacttgatcagcacttgcctttgtttaatctaccgcacaagatcctctgcaaggtggtcaatgtagaacttagagctgaaactgattctgatgaagtttatgctcaaattatgctgcaaccacaaacagagcaaagtgagcccaccagcccagatcctgaaccacctgagcctgaaagatgcaacattcattccttctgcaagaccttgactgcttcagatacaagtacccatggtggattctctgtcctcaggaggcatgctgaagaatgtttgccccaactggacatgactcagaatccaccgtggcaagaactagtggctaaagatctccatggaaatgaatggcatttccgtcacatctttcgagggcaaccaaggaggcatctacttacgacaggctggagtgtttttgttagctcaaaaagattggttgcgggtgacgcgtttatcttcttgagaggtgagaacggagagctgcgagtcggggtaaggaggctcatgagacaactaaataacatgccgtcttcggttatctcaagccacagcatgcatcttggagtcctagcaactgcatctcatgccatctccactggaactctcttttctgttttctacaaacccagaacaagtagatctgaatttgtcgttagtgtaaacaagtacctcgaagctaagaatcacaagatgtctgttggtatgaggtttaaaatgagatttgagggtgatgaatcccctgaaagaagattcagtgggacaattattggtatgggatgcatgccagctaactccacatctccatgggctaactctgaatggagatcattgaaggtccaatgggacgagccttctgctattctgcgtccagatagagtttcaccatgggaagtagaaccccttgatcgaactaatccacagccacctcaacctcctttacggaataagcgagcacggcctcctgcttcaccttcgattgctccagaacttgctccagtttttggtttttggaagtccccagctgagcctgcccaagctttctcattctcaggactgcagcgaactcaggagctataccattcaagccccagttcaatgttctcatcgtcgttgaatgtgggattcaatccaaagtacgagggtcccactccaaacaccaaccatttgtactggacaatgagagagacaagaactgaatcctactccgctagcatcaacaaagctccaactgaaaagaagcaagaatccactacttctggctgcagattgttcggtatcgagataggttcttctgcagtgtcacccgtggttactgttgctagcgtcgggcatgatcctccgccacctgctctctcagtagacgctgaatcagaccagctgtcacagccgtcccatgccaacaaagcaatggatgccccagcggcaagcagcgatcgctctcctaacgagacagagagccggcaagccaggagctgcaccaaggtaatcatgcaaggggtggcggttggcagggcggtggacttgacgaggctagatgggtacgatgacctccgccgcaagttggaggagatgttcgatatcccgggagagctttgcgccagcatcaagaaatggaaggtgatctacacagatgacgaggacgatatgatgctggtcggggacgatccatggagtgaattttgcaggatggtaaaaaggatatacatttattcctacgaggaggccaagtctttgactcccaaggcgaagctgccggccatcggtggtgacaccggcgtcaagccggacccaagcaaactgccaccagaatctgacgtgccacagagcgactccgacaacagtgctcccgttgctgctgataaggactgatggacgctagctcggccgtaccttctctttggatgttggccatgggaggcaagtgcagtgcccatgctccttgagactgctaagagttgatcatctggttccatctgcctcggcttggaccagcgaggatggccgggagggagtgcatgccgttccgtgcgtgtttcgtttgccgtgtttggtaggagcccatggcttgttgccggctacttgggttctgtagactgttacactgactgctgccgtctcacctggccgtcggcgcgggccgccccctctcacctctctagtaatatatactagggcttatgtacacagctgttttggtagtggcatatgtatatcgtcggtcatgttgcttgcgacatttagcatcctccgtagctgctatttcctctcctgcattttaatcctgtcttggtatcagatgctctggcgcaatatgtgttccagcgggaaaaaaaaaaaaaaaaaaaaagaaaaaccgcagggcggcctgctatctatgcgtacgagcgcatgtacgc

SEQ ID NO: 562 - DNA, 832 bp, Zea mays
  unsure (1)..(832): unsure at all n locations
  Clone ID: TF_ZmC1249_3
gccggccgggtcgggatctcccccccgcctctgctctcctttctcccgtccccgcacaaaaacatttgcaccccctcccgactgctactgccgctgcctcctccccctttccgcctgccttcgctctcctcgtcgtctcctccgtctagggttctccaccccaccccgccccgccgccgcccgatccgaggcagatgccgcccgcagccatggcgctgccgtcccaggccccgtctaactcaggggatccgctgtacccggagctctggcgcgcctgcgccggcccgctcgtcaccgtcccccgcgtcggcgacctcgtcttctacttcccccagggacacatcgagcaggtggaggcgtccatgaaccaggttgccgggaacccgatgcgtctctacgatctgccctccaagctgctctgccgcgtgctcaacgtcgagctgaaggcggagacagacaccgacgaggtgtacgcgcagatcatgctcatgccggagcccgagcaaaacgatgtggcggccgagaagacgagctctgggtctgctgcgccaccgaggccagcggtcaggtcattctgcaagacgctcaccgcctccgacaccagcacacacggcggcttctctgtcctgcgccgccacgctgacgagtgcctccctgccctggatatgtcccagtcgcctcccactcaggagctggtggcgaaggatctgcatggcatggagtggcgattccgccacatcttccgcgggcaacccaggaggcatctccttcagagtggttggagtgtttttgtcagttccaaaggcttgntgctggagacgccttcattttc

SEQ ID NO: 563 - DNA, 1335 bp, Zea mays
  unsure (1)..(1335): unsure at all n locations
  Clone ID: TF_ZmC9734_2
gatggcccaattcaccctggaggcttctccaggtcgcctgggatgagccggacttgttacagaacgtgaagagagtgagcccatggctggtcgagcttgtctcaagcacgccggccatccaccacctcacgccgttctcgccgccaagcaggaagaagctgtgtatcccattgtacccggagggccaccagctcccggcgccgatgttccacggaagccctctggtgggccgtggtgttgggccgatgcgctacttcccggacggcggcactcctcctgcaggcatacagggagccaggcatgcgcaattcggcatatgtttaccagatctccaccacctcaccaggctgcagtcgagtctatcgccgcacgcgcacgggcttcgccaccagctcgaccacggcgcgcggccgaggatcgccggcggcctcatcgtcggccacccggcagctcgggacgacatctcgtgcttgctcaccattggcaccgccccgcacaagaaaccatcagacgtcaagtcggccgcggcggcgccggcgccgcagctgatgctgtttgggaaaccgattctcaccgagcagcagatatctctaggcttccggccgctgccggcgccgaagaagagcccgtccggcgacgttgctgagactgagataacgatgagcaacaactcggatgcctcgagcccagctgggactgggagtgggagcacgccgtccatcagtggaggcgccccgtcgtcgtgccaggacaacaaggcggcggcgacggcgactgatgacgacgatctcctcgggcactgcaaggtgttcatgcagtcggaggacgtcgggcgcacgctcgacctctcggctgtcgcgtcgtacgaggagctctaccagaggctggccgacatgttcggcgtcgacagggccgagctgacgagccatgtcttctaccgcgacggcgcttctggagcgctcaagcacgccggcgacgagcctttcagtgagttcaccaagaccgctcggaggctgaccatactaacggacgcgaggtagaagaaggcggcagacaatgaagctctcgtcgcctgtacaaccggggggagctagcgagtgtggcgcacccgttgngtgattgcccgatctttcgatgagagggtgtggaataactcgattggnggaggagacgacgttcacggcccgactacagcctttcaaagacgctgcgccttagcaaccgatacaccacctcctatggctgtcacgatcttgtggagcgtgacaccctggccactanggcactcgtcctgcaagcaatcgaaagactagcaagaaacagtagaaacagtac

SEQ ID NO: 564 - DNA, 736 bp, Zea mays
  unsure (1)..(736): unsure at all n locations
  Clone ID: TF_LIB5117-056-Q2-PF1-A3
gcttcccctttcctcatctccaccccatccctcgccccccgcctcgcgcagcggctagggttcctcccgccacgccgccggccagcagcagcagcagatgccgcccgccgccatggcgccgccgcaggccccctccgcaggggatccgctctacgacgagctctggcacgcctgcgccggcccgctcgtcaccgtcccgcgcgtcggggacctcgtcttctacttcccgcaggggcacatcgagcaggtggaggcctccatgaaccaggtcgccggcaaccagatgcgcctctacgatctgccctccaagctgctctgccgggtcatcaacgtcgagctcaaggcggaggcggacaccgacgaggtctacgcgcaggtcatgctcatgccggagccggagcaaaatgagatggcggtggacaagtcgacctctacgacgggcgccacgcctccgaggccggcggtacggtccttctgcaagaccctgacggcatccgacaccagcacgcatggcggtttctccgtgctgcgccgccacgctgacgagtgcctccctcccctggacatgacccagtcgcctccaacacaagagcttgtggcaaaggatctgcatggcatggactggcgcttccgccacatcttccgcgggcaacctaggaggcatctccttcagagcggntggagtgtgtttgtcagttccaaaaggcttgtaactggggatgccttcattttcctc

SEQ ID NO: 565 - DNA, 2830 bp, Zea mays
  Clone ID: TF_ZmC1206_4
cattgggtacctcgaggccgggactccaagccaaggcagcccacggagccacaccgcacaccccatcccgcccggagcagcaaagcataggtgctcgagcgctccctccagagctccccgcctgccgccccgtcctcaccctcctcggtcgcctcccgccgaggctcggctcccgtccgcagccaccacgtgcgacctcccctcccctgttcctgagaatctccgtaggtcggcatggggtgaccagatcggtgctctccagctgaattctgctcgcggctcgtctcggaggcagcggagatggcgagcgccggcgtggcgggctgctcagggagtgctggcgatgctttgttcagggaactctggcatgcttgtgctgggccgttggtcacagtgcctcgccaaggcgagctggtttactacttcccacagggtcatatggaacagcttgaagcatctacagatcaacaacttgatcagcacttacctttgtttgatctaccacccaagattctctgcaaggtggtcaatgtagaacttagagctgaaactgattctgatgaagtttatgctcaaattatgctgcaaccagaagcagatcaaagtgagcccaccagcccagattctgagccaccggagcctgaaagatgcaacgtctattccttctgcaagaccttgactgcttcagatacaagtacccatggtggattctctgtcctcaggaggcatgctgaagaatgtttgccccaactggacatgactcagaatccaccatggcaagaactgctggctaaagatctccatggaaatgattggcatttccgtcacatctttcgagggcaaccaaggaggcatctacttacgacaggttggagtgtttttgttagctcaaaaagattggttgctggtgacgcgtttatcttttttagaggtgagaacggagagctgagagttggggtaaggaggctcatgaggcaactaaataacatgccatcttcggttatctcaagccacaacatgcatcttggagtcctagcaactgcatctcatgccatctccacaggaactctcttttctgttttctacaaacctagaacaagtcgatcggaatttgtcgttagtgtaaataagtaccttgaagctaagaatcacaagatgtctgttggcatgaggtttaaaatgagatttgagggtgatgaatctcctgaaagaagattcagtgggacaattattggtctgggaagcatgccagctaactcaacttctccatgggctaactctgattggagatctttgaaggtccaatgggacgagccttctgctattctgcgtccagatagagtttcaccatgggaactagaaccccttgatgcaactaatccacaaccacctcaacctcatttacggaataagcgtgcacgaccccctgctttactttctattgctccagaacttcctcaagtttttggtttttggaaatccccagctgagcctgcccaagctttttcattttcaagaccacagcaaactcaggaattataccattcaaatcccagttcaatcttctcatcatcgttgaatgtaggattcagttcaaagaatgaccgttctactccaatcaacagtcatttgtactggacaatgaggcagacaagaactgaatcctactctgctagcattaacaaagctcctactgaaaagaagcaagaatctgctacttctggctgcagattgtttggcattgagataggttctgcagtatcaccagtggctactgttgctagtgttggccaggatcagccacctgctctctcagtagacgttgaatctgatcagctgtcacagccatccaatgccaacaaaacggatgccccagtggcaagcagcgagcgctctcttaacgagtcagagagccggcaagtcaggagctgcaccaaggtaatcatgcaaggaatggcggttggcagggcagtggacttgacgaggttagatgggtatgctgatctccaccgcaagttggaggagatgtttgatatccagggagagctttctgccaacctcaagaaatggaaggtcatttacacagatgatgaggatgatacgatgctggttggggacgatccatggaatgaattcctcaggatggtaaaaaggatatacatttactcttacgaggaggccaagtctttgactcgcaaggcgaagccgccggtcgttggtgacaccatcaagccagacccaaacaaattgccaccggaatctgacgtaatcaaacaacaatgctccgttgctgctgattatcaggactgatggatgctaacttggctcctaccttttctttcccctcttggatgtcggtcacgggtcatgggaggcaatgccacgctccttgggacttgtaagagttatctgttttgttgcttcacgggcccaaagggcgcttccctgcaccatctgccttggtttggaacggcttggaccgccgtggtccttttacctgcagcaaggaaaggaatggctgggagggaatggatactggtatcgttccgtgtgtggcaccccgtgatctgtttgccgtgctttgtaggaggcatggcgtattgccgggtactttggttttggagactgccactgactgctgccgtcgtcggggacgctcctctcacctctggtaaataggactttgtacacaattattttgttagtagcagtatatgtacatcatcggtcatgttgcttgctacatgtactcctatgtagcatcctcccctgcattttagtcctggctaggtatcagatgctctggtgcaaaaatgtctctgcttgttcc

SEQ ID NO: 566 - DNA, 341 bp, Zea mays
  Clone ID: TF_LIB4172-034-R1-L1-A5
aattcggcacgaggtgcgattcaggatgttgtttgagacagaggaatctagtgtccgcaggtacatggggacaataactgaagtgagtgatgctgacccagtgcgttggcctagttcctattggagatcagtgaaggttggctgggatgaatcaacagcaggagaaaggccacctagagtttctctgtgggaaattgagccactgacaacctttcctatgtatccatccctgttcccactgcgagttaagcatccatggtattcaggagttgctgctcttcatgatgacagcaatgctttgatgttgctgagagggagttgctgtgaagggggctttcagt

SEQ ID NO: 567 - DNA, 2903 bp, Zea mays
  Clone ID: TF_ZmC1284_1
gtttttccttctctttccgcttccgccgaggccactctctttctctctctgcgcctgcgcctttctcttctccttctccttctccctcctctcaaccccaacaatctctgtctctccatctcctctcgacaaggcggcctcaacaaagtcccaccgcacctttctttaatggagcgagggtgagcctaacaagcactctcgacacacaggaggaggtgctgcccgcttctcccctccctcagtctcactcgctccgctctcctccccgagaccaggaggccaagccaagaaccgcaaaccctcaggccgtggccatggcgcaaggagcaggacgggacccggaggagctcttcgaggagctgtggcgcgcctgcgcggggccgctcgtggagttgccccagaccaacgagagggtcttctacttcctccagggtcacctagaacagctgcaagagccgacggacccggcgctgctggctgagcagatcaagatgttccaggtgcccaacaagatcctctgcaaggtcgtcaacgtcgagctcaaggccgagacagaaacggacgagatgtacgcccagatcactctgcagccggaaccagatcaagtggatctaccccaattacctgaaccgcccctgcaggagacgtcaaggcccgtggtgcactccttctgcaagatcctcacaccatccgacaccagtactcatggcggtttctccgttcttcggcgtcatgcaaacgaatgcctcccagcactggatatgtcgatgccgaccccgacccaagagctcatcacaaaggacctacatggatctgaatggaggttcaagcacatatacaggggccaaccccgtcggcaccttctgactactggatggagcacgtttgtcacatcaaagaagctgattgctggtgacgcgtttgtctacctgaggagcgagaccggacagcagcgtgtgggagtgaggcgcctcgtgcagaagcaaagcacaatgccagcatctgttatatcaagccaaagcatgcatcttggggtgcttgcaagtgcatcacacgctattaggactcattccattttcctagtgtattatagaccaaggttaagccaaagccaatacatcgtcaggctgaacaagtacctggaatctagtaaaattggattcgatgtgggcatgaggtttaagatgagttttgaaggggatgacgtccctataaagaagttttctggaacagttgtcgataaaggagatctttctccacaatggcaaggttctgaatggaagacattgaaggtcaaatgggacgaagccacaaacttaaatggccctgagagggtttcctcctgggaaattgaaccattcgatgcatccgcacctgccatcaccatgcccgtgcaaccatcaatgaaaaacaaaaggcctagggagacagctgaaggcctggatattcatgcactggaacctgctcaagaattctggctctctggaaggcctgaacagcatgagaagacaagcgtaagctccagcgaacccaaacatcaagtcgcttggacaagtgaacgcgcaggatacagtgccatgagcagttcaatctgtcagaattctgcagtaactgggagctggttcaagggcttcaattcctccggctcacacccttccctgccagagatctcccagaaactgtttcaggtcaccagcaacgacgcgagggttcctccttggcctgggctctccgcttatcatgctgacgagccctcttccaagctgtcctgcaacactgctctgtgcagctaccagaccgaggaggtggctccaagattttccaatgccgtcgaagaggaaaagaaggagcccggcatgttccgtctgtttggcgtcaatttgattaaccatgctaggagtagtgctaccgctgacaaggcgagtgtgggagcaggggaagcatcggcgcgagctgctggttcttttgaagactctgctcagctatcaagagtgacgaaggatcatacgcacatggtgaacggaagcccccgagaaatccaaagccatcagagttgcagtggaaggagtcgtatcaaggttcaaatgcatggaaatgacgtgtgcagagctgtggatttgggaaatctggatgggtacgagcagctgatgggtgaggttggagtgatgtttgagatcaaagaccttggctccaaagagaaagaggaatggaaggttactttcactaacgacgagaatgagacaatggaagtcggagctgttccttggcaggagttttgccagatggtgaggaagatcgtgatccattccattggagacaggggccatatggaggcttgcccttgcctggggcaggatgggaagagggactattagaagaagggattttttttttggctggggcaggcaggagatggttgctgctgaaacatgatggcgtagcttgtcgatgacgaagaaggcaacagattggttgctggcgtcagttcttccttgagaaaaaaattcagtggaaggaagaagtgatgtaacataggatttgcagaaaagatttgataatgcgtcttttagaagtttggtttggtttaaagatgacaagttaatgtgtgtctagtgatctgcctaaagccttagcgacgggcaacaagcaataacaaggatggatgatgaccttaccttgggtatgttagctgtgtaaatattatgtatgtatgtatgggacattaaattggttggcatacttgactcctgatttatattgtacgtagtgtgttgcagtgctcaggattcagttgtgatgtaccactattacaagtagtagaaggaatctggtttttagtccaagaatcaacatcatatatgtcaatcacaggcacactagtgcgtaattttagtctttttctg

SEQ ID NO: 568 - DNA, 1124 bp, Zea mays
  Clone ID: TF_ZmC1206_11
ggccgggccgggatgcagcgccgcgcctccaccttgactccatggccaaggcagccagcctacccagacaaccaaacgaacccgcccggagcagcaaagcataggcgctcgagcgctccctcccgacctcctccgcctcacggtcacgcctcgtgtccccccaccccctcctcctcctcctcggccggccgcctcacgccgtcacctccgctcggcgagtctcggctccgacagcagccgccacgtgcgacctcccctactcctgagagatctgcggggctcggcatggggtgaccagatcgggccgctgctcggtgctctccagctgaattctgcccgcagctcgtgtcggaggcagcggagatggcggaggccggcgtggcacgcggctcagggagtgctggcgatgctttgttcagggaactctggcatgcttgtgctgggccattggtcacagtgcctcgccaaggcgagctggtttattacttcccgcagggtcatatggaacagcttgaagcatctacagatcaacaacttgatcagcacttgcctttgtttaatctaccgcacaagatcctctgcaaggtggtcaatgtagaacttagagctgaaactgattctgatgaagtttatgctcaaattatgctgcaaccacaaacagagtgcaattccagagagagaacaactacgaccgccgccgccgccagtgcgacaggcgcgaccagcacgtcctgcccacgcttcaccacacaagcggctcctctccacaatcgccgtcactggaatcgcctgcggtaccgcaatttcccacgcgagcagttatgatcggctccatactgttccaaagggacgagggtttctagctccagtggccatggacttactctgtctgccatgttgtttcttgaccgggagagtcatgccacaggaggtgtatttatgtataataactcctcgaatcagtgcataaatcgagtttgtttgagagcatagccccaggcgtgggtttgtggaaaatgcaaagtaaccgtggataaatgcgttcgcccttggcagttctggaaaaaaaaaaaaaaaaaaaaaaaaaaaaaaaaaaaaacaaaaaaaaaataaaaaaaaataat

SEQ ID NO: 569 - DNA, 3243 bp, Zea mays
  Clone ID: TF_ZmC1249_2
aattcggcacgacctcgaggccggctgggcccgtccccgcaaaaaacatttgcccccccaccccggccaacccctcccgagtcccgactgctactgccgctgcctcctctccctttccgcctgccttcgctctcctcgtcgtctcctccgtctagggttctccaccccacccgccccgccgccgcccgatccgaggcagatgccgcccgcagccatggcgctgccgtcccaggccccgtctaactcaggggatccgctgtacccggagctctggcgcgcctgcgccggcccgctcgtcaccgtcccccgcgtcggcgacctcgtcttctacttcccccagggacacatcgagcaggtggaggcgtccatgaaccaggttgccgggaacccgatgcgtctctacgatctgccttccaagctgctctgccgcgtgctcaacgtcgagctgaaggcggagaccgacaccgacgaggtgtacgcgcagatcatgctcatgccggagcccgagcaaaacgatgtggctgccgagaagacgagctctgggtctgctgcgccaccgaggccagcggtcaggtcattctgcaagacgctcaccgcctccgacaccagcacacacggcggcttctctgtcctgcgccgccacgctgacgagtgcctccctgccctggatatgtcccagtcgcctcccactcaggagctggtggcgaaggatctgcatggcatggagtggcgattccgccacatcttccgcgggcaacccaggaggcatctccttcagagtggttggagtgtttttgtcagttccaaaaggcttgttgctggagacgccttcattttcctcagaggagaaaacggtgaacttcgagttggtgttaggcgcgctatgaggcagttgtctaatgtaccttcttcggttatatctagccaaagcatgcatctcggggttcttgcgactgcatggcacgctattaacacaaagtccatgttcactgtctactacaaacctaggacgagcccttcagagttcatcattccatatgatcaatatatggagtcagtaaaaaacaattattctattgggatgagattcaggatgaggtttgaaggggaagaggcccccgagcagaggtttactggtacaatagttggctgtgaaaatcttgacccactatggcctgattccagttggagatacttgaaggtgcgctgggatgagccttctactatcccgcggccagataaggtctctccctggaagatagagcctgcttcatcacctcctgttaatcctctccctctttctagaggaaaaagacctagacaaaatgcacctccaccttcccctgaatcatctgttctcacaaaagaaggtgcaaccaagattgatactgattctgctcaaacaccacatcaaaattcggtcttgcaaagtcaagagcagatgagctttaggaacaacctgactgaaagcaccgactctgattccactgttcagaagcagatgatgtggtccccatcacccaatgggaaagttcacactaattttcagccgagacctgctatggataactggatgccattgggaaggcgtgaaactgacttcaaggacacccgttctgccttcaaggatgcccgcaccgcttctcaatcgtttggagatacacaggggttctttatgcaagcttatgatgacagtcgtcaccgtctttctttcaacaatcagtttcaagatcagggttcagctcatcgctttgcagatccatacttctatatgcctcaacaaccttctctgacggttgaatcaggcacaaggacgcaaacagcgaacaatgacttgcgtttttggagtgagcggaattcgatgtatggtaatccaagtgaccaacagcagggtttcagctttgggcaaaacacatcaagttggttgaaccagccacttccccaggttgaacagtcacgagtggtcaggccgcatgcaacggttgctccatttgatttagagaagactagagaaggcagtgggttcaaaatatttggtttccaagttgatacaaccaatccatcacctgtccaattgagctctccattgtctgctatccgagagcatgtggtacaaactcgaccatcggcaccagtgaatgaattgcaacctgtgcaaattgagtgcttgcctgaggtgtccgtaagcacagctggaactgcagctgagaacattcagcaagtccagcaaagttcgaaagatattcaaagcaagtcccagggcgcttcaacaaggagctgtacaaaggttcataagcaaggagttgcgcttggccggtccgtggacctctctaaattcaccgactacggtgagctcaaagcggaactagacaagatgtttgagttcgagggcgaattggtatctgctaaccggaactggcagatcgtttataccgacaacgagggtgatatgatgcttgtcggagatgacccgtgggaggagttctgcaacatagtgcgcaagatctacatctacacgaaggaggaggtccagaagatgaactcgaaatcatccgtgccgaggaaggaggaacccccagcagcaggcgaaggctgcgccgccgccgccgcaaacgagtaggatgtctgcctgcactgcagcaagcagttttagatgactaggtcgtgtggaggaagccgacgatgatgcatgcgtgatgaacccgttccttgtgcaggaggtggtgccagcccgggtcccagggaagtaaaaactcctgagatcttttgcttgtccgttgcagccccatcccccgtccgtttgggttttagttgggaacgtagaaactactgtctccgcctgcttctccgaagctcgctgttggtagcaagttttattgctagtattattgttattgctgatttgctcccctctgcctttgcgatgtaaatatttgtgtacccagccccagccccagccccagccccagcttgtagtgagcagtaacaagcagtagcggtaccttcggtattaaccggcagctagctatttcgcggcattttaatccctgtaagcgtagctctgtggcgtgagatagatgacaaacactgggtatatgtatgtctgatctttctcactgaatgtaccataagagagtttgtagagtacctgacctgtgaccaaccccgttcctgtcagctctctggtctcagcaacacgctgtgtgatgccgcatatggtcaatgcaagtccgtgtcgtttac

SEQ ID NO: 570 - DNA, 776 bp, Zea mays
  unsure (1)..(776): unsure at all n locations
  Clone ID: TF_ZmC172363_1
gcccgcctctaagaactaagtggaattcccccgggcctgcaggacattcggcacgatgcctctccctcacccgcacctcaccactcctcggcctcacttcttcacaagttcacatcagcagcagctcacgaaacaggagcgtcataaagacatggtcgtcgcaggatagcctcagacccagcgacgcagcggcagcgacccaggaagcaacagcgaccggcatcgatcgcggcagccgaggcggggggacgggaggagggagggagcggtcgccgcaggagcagagcggcacggcatggggtcctgagtgactgactgactgacgactgagtgtctgactgagaaggagatggctggagcgcgacggccccggagccattaatggggcgctcatcctcctcgtcctcccactcctcgcctcccccccgccaggtcgcggtcggctccgctttttaaccggcttgtcctggagcggggcgaacggcgaacctcacgggcgccggaacacgaaccggaaccctagtggtggtggtggtggcgcgccccatgggcatcgacctcaacatggcggacggcgagagccaggagcgccgcccgccgccggcggtgtgccgggagctgtggcacgcgtgcgcggngcccgtggttgcgctaccgcggcggggcagcctggtcgtgtacctgccgcaaggccacctatccgcggccggcggcgggcacgtcgctgtggacctgccgncgcacgtggcgtgccgcgtcgcggatgtcgagttatg

SEQ ID NO: 571 - DNA, 3343 bp, Zea mays
  unsure (1)..(3343): unsure at all n locations
  Clone ID: TF_ZmC13783_1
cgatgggtgcccccctccccgccccctcgcgccctcagagactccctctctgctcacttatctctctctctccgcagcctcatcctccggtttccgcgcccccctcccgtccctctgttggtctcctcttcgagagaatggcgatctccgagctcgggtgagcggaggtgggcgtccctacctagtccgttgcctgcctcgggtgaagcgtcggttcggctcggtgcagaatgcggccgatttgagcgaggacgggggggcgatggatgtgggttcggacaggattcggcagcagcttgtagaggatccggttcgagccatcccggcccagctgatggtagataaagatactttcccctcaggatgtgcagaagatgggaaagccaggaacgatccacgctacatatctgaactgcctatcctaagtcgattcatggaggtgcgtctggctcctcttctgcctccccaccacaccgtagcgcggcgtacgatggcctgctctactctgctcgcaggttcgcccgggtcgcctgtagcatgcaccaccgtgctcgtcttcagaagaccaactccccgtcgcttgtatccggtgcaggtcaccgctcctggactgatactgtggtggattccacgtaggaatcagtagcagcaaatctatcctagtttgtggcaggctcgagcggcgctcgttgctctgtcgcaccaagatcttcggcctaaaaagcgtggccgaaaccgatctctgcaagacgctgactgcgagcgacaccagcattcaccgcgggttttctgtgccccgtcgtgcggcagagcgtgtcttccccccgctggatttcacacagcagcctccagcacaggagcttattgcacgggatattcatgatggcaaagccaatgcaggcatgtcttcatgactcagtgctaaagagcactgcacaggactggctggagtgtgtttgtcagtgctaagagacttgttgctggagattctgtgctattcatatggaatgagaaaaaccagcttttgcttggaatcagacacgctacccggccacagactgtgatgccctcttctgttctttcgagtgacagcatgcacatcggactccttgcagcagcagctcatgctgctgcaacaaacagccgcttcacaattttctataatcctagggcaagtccaacagaatttgttatacccctttcgaaatacatcaaggctgtttttcacacgcggatatcagttgggatgcgattcaggatgttatttgagactgaggaatcaagtgtccgcaggtacatggggacaataacagaagtgagtgatgctgacccagtgcgttggcctagttcctattggagatcagtgaaggttggttgggatgaatcaaccgcaggagaaaggccacctagagtttctctgtgggaaattgagccactgacaacctttcctatgtatccatccctgttcccactgcgagttaagcatccttggtattcaggacttgctgctcttcatgatgacagcaatgctttgatgtggctgagaggagtaaccggtgaagggggctttcattctttgaacttccagtcacctggtataggttcctggggacaacagagactccatccatccttacttagcaatgaccatgatcagtatcaagcagtggttgctgccgcagctgcctcccagtccggtggttatctgaagcagcaattcctacaccttcaacaacctatgcagtccccacaggagcagtgcaatctcaatccgctgttgcagcaacaaatactacagcaagcgagccaacagcagatggttagttctgatgctcaaaatattcagtccgtgctcaacccaggtgctattcagcagcagctccaccaactccagcagatgcagcatactcataatgaccagaagcaaaagattcaaccagatcaacagtaccaagttgctagcagtgcggttctcccgagtccaacatcattaccaagccatttgcgtgaaaaatttggcttctctgatcctaatgtgaactcttccagcttcatcagctctagcagcaacgaaaacatgctggaatcaaacttccttcaggtaagttcaaaatccgtggatttgtctagattcaaccaaccagtagttagcgagcagcagcagccgcaacaacaacaggcatggaagcaaaagtttatgggctcacagtcaatgtcttttgggggctcggtttcgcttaactcgcccactagcaaagatggttctgttgacaacaaagttggtcgtgatgtgcagaaccagtccctttttagccctcaagtcgactcttcctccctactgtacaatatggtacctaatcttacctcaaatgttgctgataataatatatcagcgtttccctctggatcaacatatctgcaaagtccaatgtatggttgtctggatgactcttctggtttattgcaaaatacaggagagaatgatccgacaactagaacttttgttaaggtttacaagtcaggatcagtggggagatccttggacatcacccggttctctaattatgctgaacttcgagaggaactgggtcagatgttcggcattaagggtcagttggacgaccctgatagatcaggctggcagcttgtatttgtcgacagggagaacgatgtgcttctccttggagacgacccgtgggagtcatttgtgaatagtgtatggtacatcaagatactttcacctgaggatgtgcataagatgggaaagccaggaaacgatccacgctacctatcttagctacctatcttaaatcgatacatggagctctttctggctcccatgacgattctgcggcacactgtagcactgttcacgacggcctgctctactgtgctcgcatgttcgcccgtgtcatctgtagcatgcacaccgtgctcgtcttcagaagacgaactccccgtcgcttgtatccggtgcaggtcaccgctcctggactgatattttgtaggttccacgtaggaatcagtatcagcaactctatcctagtttgtggtaggctcgcgcggcgctcgttcctgtgtcgcatcaggatcttcggactaaaatgcgtagtcgaaaccgttctcgtgattcgtaagctattcatgtatttgaggattcctcgacatgctttcgacgatgaactgcaataatctgaatgcaggaggattgtttgagatttgtaaaaaaaaaaaaaaaaaaaaaaaaaaagaggggnnnnnnnnnnnngccccggccgcggcccccccnggggggaannccgcggggnncccccccacggggggggccccgggcgggcggccc

SEQ ID NO: 572 - DNA, 793 bp, Zea mays
  Clone ID: TF_ZmC12351_2
cgtaacgcaaaagaagagcataagcttcgttaatcacacgattccatgtagttattgtaatttttattctagctaacggaaagtgagaaccatacatatggccgcttttttttttttttttttcgaaaacaaaaggagctttaattccggtggaaccatttaagatctgacaatgaatccgtaagatatggaattcagaacaacacaagattcatgtccttgacattattaacatccatataaactctgcaatattcatgtctaatttctggcaatatgaagtccaaggaagaagagtaacctgctcactgtggccttgaagaaaatacatcactcgactatcgaccgcaggcaatgaaacaagagagccggcacatgcatgccacaactcagaattcaggcacttgtgctcttcagcttctcacctgctctggcaccacgttggcagcaaccatcatcatcacagcataggcaccagcaggccggcgatgaccgcacaggctctggcaccacgaggccgtggacggaaatcgacgctggccatggacggaaatcgacgctgcgaggtggtctggcagagtggagcctcgttggagggttgaaggcgacacagttgtggtatagacaccggaagtggttatgcggagatagaacttaggagccgaagtgaaggaggcggatgtggcgcggaggagcacggagggcggtgccatggatggggatgaggaatgggagaacgtgtgctagggttgccgcagggaatgcccgaattcccggccggcccgggggtacc

SEQ ID NO: 573 - DNA, 825 bp, Zea mays
  Clone ID: TF_ZmC1126_1
aattcggcacgaggctttcgtggactcggcggccatggagcgggagcgggagagtgacaggtgcctggacccgcagctgtggcacgcctgcgccggcgggatggtccagatgccggcggtgcactccaaggtgtactacttcccgcaggcagcgtcggagcacgcgcagggccccgtgggacctccccgccggccgggtccccgcgctcgtcctctgccgcgtcgccgccgtccgcttcatggccgatccggacaccgacgaggtcttcgccaagatccgcctggccccggtccgtcccaacgagccgggctacgccgacgacgccattggcgccgcggcggcgtcgggcgcgcaggaggacaagcccgcgtccttcgccaagacgctcacgcagtccgacgccaacaacggcgggggcttctccgtgccgcgctactgcgccgagaccatcttcccgcggctcgactactcggccgacccccccgtgcagaccgtgctcgccaaggacgtgcacggcgtggtctggaagttccgccacatctaccgcggcacgccccggcgccacctgctcaccaccggctggagcaccttcgtgaaccagaagaagctcgtcgcgggggactccatcgtgttcatgcggacggagaacggggacctctgcgtcggcatccggcgcgccaagaagggcggcatcggagggccggagttcatgcaccaccaccaccagcagccgcccccgccgcagggcggcgggtacgccgggttctccatgttcctgcgaggggaagaggacggcggcaagatgatggccgcggccgcccctt

SEQ ID NO: 574 - DNA, 575 bp, Zea mays
  Clone ID: TF_LIB3594-048-Q1-N7-A7
ggccaactagcaatgttcttaattaaatatcctgatgtttgcagccatatcatttaacactatgaccagataagaagtgactcagtaccagcagtggtgaggtcacacgtttctcaatagcgagaacaacaccatccttcgtcttcaacccaattgcagtggatcccaacagcttggtcgtctcgggtagcacgagccactgcgaatacaacacatcagcgatggagttctcacgaagcgcgcccggggcaagctccaccagctgcagcagctccgggtccagcgctgccgcgtccctcctcgtcggtccctgataaataagacagagtcacatgctttaagccgtttcgcacccacaaagagactccatccaattgttagaagatgtcagcttggcttgccacgggcagctgactaggggaggtcgctagcctaatccttgaactcgtcgacgttctggaactcctggagatctgcctcgacaccttcttctttaccttcaccaaacagatgctcagggtcttcaactttataacttgaaaagttcgacctcttggtcgccgaaacttaactgt

SEQ ID NO: 575 - DNA, 4051 bp, Zea mays
  Clone ID: TF_ZmC7095_1
actagttctagatcgcgggcggccgctcgcgatctagaactagcccacgcgtccgcgcacgcgtccgaattcggcgcgaggcgaaagcaagcaaggagcaccgcaccacgccactccagtactccactccactctcgtcccctcctcgatccagccatggcggcctagcccccccccctcccctagggttctctgccagcccccacccacccaggcgcctcttgccgctcccacccggtggtcgcgctgcccgcgtcgaatgggaggccacccggcgctcggagtcgggcgtgaccgcgcgctgccggaggttccctgagctcggcggcggcgggagcgtggctggtccggagcgcgccgcgcgtgcaatgggaggttcgagtggggttcctgcgagccgccgcggcggtctcggttctgcgagcgcgtggcccatgcttcgcgaagggtagggttgtctgtctgtctagctagctgctagctgcttggtctgatgagctcagctccggcgccccgcctcggcttccccgcgcgcttgctccgtcggctgcccagaacccagcttgcccgctccggcgcttctcttcgcttcttcggggaaaggttggagctttgaggtggtgcgggtgctcagccgaggactccgggcgatgacgcccgcagtggcgcgcgtttgccgcgacagtcctgggttcgggtagcgagttcctcgagcggatttggctgctgctgcgtcctgcgtgggaaggggaggcggcggcggcggcagcagctgaggaaggggaacggttgctctgaacaggagggggggcaggctgacattgcttctgggaggatggcgacctgcaaagcacccgcagccatcgcagcccagtcattctcatcgccgcaccttggtgttcttgcccccaggtcgtactggttggtgggagggaacatgaacctctccccgcccaagatgtcggagccatctcctgaaagtgacggggaacaaaggtgtctgaactcagagctatggcatgcatgcgcagggccccttgtgtccctgcctgtggttgggagccgggtcgtctactttcctcagggccatagtgagcaggttgctgcatcaactaataaagaagttgatgctcaaatcccaaactatccaaacctacctccacagttaatatgccagcttcataatgtcacaatgcatgctgatgcagagactgaagaggtgtatgcccaaatgacactgcaaccattgagcccggaagagcaaaaggatccttttcttccaattgaattgggtgctggtagcaagcagccaaccaattacttctgcaagacgttgactgcaagtgatacgagtacccatggtggattctctgttccgcgccgagcagctgagaaagtcttccctccattggatttttcacaacagcctccagtgcaagagctggttgcaagagatctgcatgataatgaatggaaatttcgtcatatttttcgtggtcagccaaaaaggcatctactgacgactggttggagtgtttttgtaagcgcgaaaagactagtagcaggggattctatcatatttatctggaatgataataaccagcttctcttgggaattcgccgtgcaagtcgtccacagactgtaatgccctcttctgtgctatcaagcgatagcatgcacattggtcttcttgctgcagcagctcatgctgcagccacaaacagtcgtttcactattttctacaaccctcgggctagcccttctgagtttgtcattccactggctaagtatgtgaaagctgtttaccacacgcgcgtatctgttggaatgcggtttcggatgctttttgagacagaggaatcaagtgtcagaagatacatgggtacaatcacaggcataagtgatctggactcagagcgctggccaaactcgcactggcgttctgtgaaggttggttgggatgagtctacagctggtgataaacagccaagagtttcactctgggagattgagccactgacaacctttccgatgtacccaactgcttttccattaaggctaaagcgtccgtgggcttcaggactacctatgttcaatggtgggaggagcgacgagttcgctcgttattcttctctcatgtggcttcgagatggaaaccgaggggctcagtcactgaacttccagggacttggagcatcaccatggcttcagccaagaatagattatccattgttgagtctgaagccagatacttaccagcagatggctgctgccgcactagaagaaattagagctggggatcatttgaagcaggcatcttctctcctgccagttcagcagactcaaactttgaatggtggattagatcatttgtatggaaatcctgttctacagcagatgcagttccaatctcagcagtcaacactgcaagctgtgcagcaaggttatggtcagaatgcaaacgactctgggtatgttcaaaatcaactgcagcagctgcagctgcaaaagcagcaggagccaccaccaccacagcagcagcagcagacacaagtccttcagcgacaagcacatcaggaaatgcaacagcacctctcagctagttgtcatgatattgctaatgtagcttctggtgtgtccatgtctggatctgcttgtcaatcacaatcttctctgctttctgggtcatcgttctaccaacagaacatctttgatggaaatggtggtccagatctgcatctgcacaacagtttccacaacttttcaagccaagagtcctccaaccttcttaacctcccaagaagtggccaattaatggcatcagagggatggccttcaaagaggttggctgtggaatctcttgctggtcatgagatccaacctctgcagcacaagcttgagaaagttagtcaccagagtactgtgtctcactgttctggcaccttgccgccactatcagcaagagacggttctagtgcccaggcttgtggtacaaatgttcagagtcacctgcttccatcatcatttgcaatccatgatggattgtcaaccatcaggagtggtggtgttggcagtggaactgatgcgataaccatagcttcgttgagatatagtgatgcgaatttgctacctgaaaactccatagcaacttccagttgtttgggtgaatcaggaaccttcaattctcttgacgatgtttgtggtgtaaacccatcacaaggtggaacctttgtgaaggtttacaaatcagggtccctcgggagatcgctcgacatcaccagattcggcagctactacgagttgcgtgtcgagctcgagcggttatttggtctcgaaggccaactggaggaccctgcaagatcaggctggcagcttgtattcgtcgaccgggaaaacgatgttcttctcctcggcgacgacccgtggcaggagtttgtgaatagcgtagggtgcataaagatcctctcgccgcaagacctgcagcagatggcccgcggcggcggaggtgaccttctgtctgcgcctggagcgaggatgctgcagggcagtgtctgtgacgactattctgcaggccacgacgtgcagaacctcaccggcagcattgcgcctgtggtgcctctggactactgaagaggactgaggcgaaggccgggatctgaagctctgaaccaaaaccggcaatccagcatttgcaggatttgccatccgcaagtcgtttcgttcctgtgttatgatcctctcagtctcaggccctgttgatcgggaataacctagtcgtttaatatagctagatgatgatccatgtatcattatggtaatggacatgctgtacgatagctactgtagctctaaatgcaggcaaggcaagaattgatctatcaaagaacgaatgaatgcaggcactcactgtagaggtgatctagccctgtactcctaagtcctaagatatattctcatagctaaaactgatggttccatgtggcattggcacccaagctattgaaaccagtcacctttgccgattcctccttcaaaaaaaaaaaaaaaaaa

SEQ ID NO: 576 - DNA, 3321 bp, Zea mays
  unsure (1)..(3321): unsure at all n locations
  Clone ID: TF_ZmC1249_1
ccagggtcacaccgaatctcccctctcgtctaccctcctctccttcctcgccgcacacacagacacacgcaaaaacatttctcccccctcccgactgctactgccgctgcctcctccccctttccgcccgccttcgctccctcccaacccccttcctcctccgtctagggtttcccgccgccgcctgatccgagtcagatgccgcccgcaacagccatggcgccgccgtcccagcccccgtctaactcaggggatccgctgtacccggagctctggcgcgcctgcgccggcccgctcgtcaccgtcccccgcgtcggcgacctcgtcttctacttcccccaggggcacatcgagcaggtggaggcgtccatgaaccaggtcgccgggaaccagatgcgcctctacgatctgccccccaagctgctctgccgcgtgctcaacgtcgagctcaaggcggagacggacaccgacgaggtctacgcgcagatcatgctcatgccggagcccgagcaaaccgatgtgccggctgagaagccgagttctgcacctgctgcgtcgccgaggccagcagtcaggtccttctgcaagacgctcaccgcctcggacaccagcacacacggtggcttctctgtgctgcgccgacacgctgacgagtgcctccctcccctggatatgacccagtcgcctcccacacaggagctggtggcgaaggatctgcatggcatggagtggcgcttccgccacatctttagagggcagccaaggaggtatcatgatcagatcgtgtggaggaagccgacgatgatgcatgcgtgatgaacccgttccttgtgcaggaggtggtgccagcccgggtcccagggaagtaaaaactcctgagatcttttgcttgtccgttgcagccccatcccctctccctttgctagtcagaggatgcacctcagagtcctggctactgcatggtccgcgaagaacactgaagtccatgtgcactgtctactacaaacctaggacgagcccttcagagttcatcataccgtatgatcaatatatggagtcagtaaaaaagaattattctattggcatgagattcaggatgaggtttgaaggggaagaggccccagagcagaggtttactggtacaatagttggctgtgaaaatcttgacccactatggcctgattccagttggagatacttgaaggtgcgttgggatgagccttctactatcccgcggccagatagggtctctccttggaagatagagcctgcttcatcacctcctgttaatccactcgtgcattcttctagagcaaaaagacctagacaaaacgttcctccaccttcacttgaatcatctgttctcacaaaagaaggtgcaaccaaggtcgaaatcgattcagctcaaacacaacaccaaaattcggtcttgcaaggtcaggagcagatgaccttgaggaacaacctgactgaaagcgctgattctgattccactgttcagaagccgatgatgtggtccccatcactcaatgggaaagcccacactcattttcagcagagacctgctatggataattggatgccattgggaaggcgtgaaaatgacttcaaggacacccgttctgccttcaaggatgcccgcaccgcctctcaatcatttggagatacacagggtttttttgtgcaagcttatgatgacaatcatcaccgtctctctttcaaaaatcagggttcaactcatcgcttcgcagatccgtacttctatatgcctcaacaatcgtcagtgacggttgaatcaagcacaaggacacaaacagcaaacaatgacttgtgtttctggggtgaccagaatgctatgtacggcaatccaagtgaccaacaacagggtttcaactttggacaaaacccatcaagttggttgaaccagccatttccccaggttgaacagccacgagtggtcaggcctcatgcaacggttgctccatttgatctggagaagactagagaaggaagtggcttcaagatttttgggttccaagttgatacaaccagtccatctcctgtccaattgagctctccattgcccgctatccaggagcatgtgttacaaactcgaccatcggcaccggtgaatgaattgcaacctgtgcaaattgagtgcttgcctgagggatctgtaagcacagctggaactgcaacggagaacattcagcaagccccgcagagttcaaaagatatccaaagcaagtcccagggtgcttcaacaaggagctgtacaaaggttcataagcaaggagtcgcacttggcaggtcggtggacctctctaaattcaccgactacggcgaactccaagcagagctggacaagatgtttgacttcgagggtgaattggtatctggcagccaaaactggcagatcgtctataccgacgacgagggcgatatgatgcttgtgggagacgacccgtgggaagagttctgcagcatagtgcgcaagatctacatctacacgaaggaggaggtccagaagatgaactcgaaatcagctgcgccaaggaaggaggaatctccggcagcgggcggcggaggaggttgcgccgccgccacaaacgagtagtatggtggtttgctcttggtggcaagttgaggccaaggttttactactgctattgttattgctgatttgctctccccgccttccggtgtaaatatctgtgtgtacccagtcccggccttgtgctagtaagtagcaagcagtgttaccttttggtattttaaccagcagctaagttcgcggcattttagtccctgtaagcggtaagcagctctgtagcgtgagatagatggccaagcgccggtacgtacgtgtagtgtctggtcttctcactgagtgtactataaagagttaatataggagctgaccctgtgaacccgcgtgatggatgcatatgcttagtgcaaagcttgtagtgagcagtaacaagcagtagcggtaccttcggtattaaccggcagctagctatttcgcggcattttaatccctgtaagcgtagctctgtggcgtgagatagatgacaaacactgggtatatgtatgtctgatctttctcactgaatgtaccataagagagtttgtagagtaaaaaaaaaaaaaaaaaaaaccgacctgcccgcgcgctcgtctcagcacccccctgtgtatgccgcataggtcaaaaaaatcccaaaaaaaaaaaaaaaaaaaaaaaaaaaaaaaaaaaaaaaaaaaaaaaaaaaaaaaaaaaaaaaaaaaaaaactcgagggagggcnccgggtacccat

SEQ ID NO: 577 - DNA, 2281 bp, Zea mays
  unsure (1)..(2281): unsure at all n locations
  Clone ID: TF_ZmC490_1
caccgnntcggaaaacccggccgggggacgcgtccggttcaaaaccattctccactgttcctccgctccctctgtctcgtcgtctcccatctccggctagggtttgccctttccaccgcgtccgacgcctacctcgcccgcgccactgcagggaccaaggatgtcgcaacagcaaggtgtggaggagccgccgccggcaccgctgccggcggcggaaggcgaggcacaaccggccgccgatatccccatgagcgaggccgcggcggtggaggatgaggaggaggaacccgtcgtgggggaaggggaggacggtgcagacggggccgccgacgccgtcgattccgtcaatgcttcagcgaaacccgaagcagagggcgcggaggaggggggcagcgacagggaggagcggaatggtggcccgacggcggatttggttggcgaggttgtgaagttggagaatggggacgggcctgtgacggtgggcggctcggtggacgagggtcgaggtggagatggcggtgacgacaaaggcctggctggtcagaatcagcctgctgtgaaccagcttttgctggcgccggctgaggaggatctggcattgtccaagatctcagataattccttcatgttcgattacaccactggtggcgatgactcagggactgaggaggagcaggctgccttcatgaaggagctggagcgtttccacagggagaaaatgttggagttcaagccccctaagttttatggtgaaggattgaattgcctcaaattgtggagacaagttactggattgggtggctatgatcaggtgacatcatgcaagctgtggcggcaagttggagagtcattcaaacctccaaagccatgtacaactgtttcctggaatttccgtaacttctatcagaaggcactccttgaatatggggtacacaaaatcgacacacgaaagtatcttgttgctccatttcatcttccacgtctacttggtggttggggcttatttggtggaagcatgagatctgaatctggcagcccgacaatagcaaatgcctagggccttgctgattgcaagccttctcgacgcttccgtgctaatgctcgactgtatcaagttaaactcattggttgacgtggttctgtgtgtatgcgggatagaactcctaaaagcagtggttctgccaagaaagaaaggacaccatgcgttgaagatgatattgggataccttataaatcctataagctacaaaaagactcaatggatattgacatgggccctcttgctgattgggtgaaaataaatgttaggaaaaccaaagattgctatgaagtctatgcattggttcctggccttctgcgtgaagaggtacatgttcagtctgaccctgctggtcgtttgatagttactggagagcccgagcaattggataacccatggggtgtcactccattcaagaaggtcattaggttgccttcccgcattgatcctcaccaaacctctgcagttgtcaccctccatgggcagctatttgtgcgtgcaccatttgaacaatcaaaataatgttgatgccacaatgaagcacaatactacaagtttgccttatgagtgggattatatcgttatgacatgagcttagaagtgctcaccctgaccgtcgtccaaaactagttccttgctgattttaatgcttcaagcctcctccatgctagatctctcatgtatcaagttaaactcattagttgacatagttctgtgtgtattcggttgtgcccattggctgtgaattgtagctaaagcaaagttactaagcctagagtttaggatgttgatagtctgatgctcaacatgtccatggtttcttttcaatttagtctgcataaaatgtactgtttgtagcaatgtagtatgtagcttgttcccagtatttaagctccggaacatgaagagaggtagagattcattgtatgtaactgttgctgttgcattgcaattgctattcaacttgtattgtcaaacagtttaggatgttgatagtttgatgctcaacatgtccatggtttcttttcaatttagtcggcatagaatgtactgtttgtagcaatgtagtatgtagcttgttcccagtatttaagctccggaacatggagagcggtagagattcattgtatgtaactgttgcccctggtgcattgcaattgctattcaactttgtgattaccgtatgtcaaacaatcttttactctatggcctcctaaaaaaaaaaaaaaaaaaaaaaaagag

SEQ ID NO: 578 - DNA, 3643 bp, Zea mays
  Clone ID: TF_ZmC5175_1
ccgtattccaactcacaacaaattcggcacgaggcaggctcgaaccgcgccagcgccaatccggatccccgatcacaacccctacaccacaccacaagtccacaggccacaccgaatcgatctgcaccaaccgaacacatacatgcacaccaaaagcagtcgcagcatccgatattccgatcccggcaaaaacaattctcccagaaagagattatttcgcccccctcaccaatcctgctcccgaaattcctaatcttttaatccgcgttttccctccgtccgtcccccggcttgcagcagtaatgaagcggaggaggaaaaggagaaaacgaaaaagcgcagggaaaacaacacaccagcacccgcagagagcaggcacacatcaactcatcaagctgagcgatgcgtgtgattgcgagcatgtgagcaggcaggcgggcagggcgaaaatccgaggaggaaaagtccgcgagaatctccggactggcctccccacacatcgtcaaaaatccaatcttgacgcctccctggtcgagccgagactgttccaaagtttctgcctctgtgatgcgtgcgggattgttgccagttggttggttgccgctgctaatgaggcccgcccgcccgatccccgtggtcgccgtctccggttaatcccgcttcagttcttgtaccggttcttggagagagatttttttccgcctctccccccctgtggattgcgccgtgtgtgtttgtctggatcgtgatgggggcgtgggccgattcgccaccaccacaagcacgactcctcttttttattgcctccgcactgggatttgctttcgcgttgttgcagtagctatttccgcgaatcgtcttctagggctccgtgtgttctcgcgcactttaccctctgttttccccattcacccgcaccgaatccacccccttcccggtcgcgtccggccgtcgattgaggccgtgccgccgccgattacgccgcaaaatcgcgtcttgggtttggtgcatgaagaagtggggttgatttcgaggggaggtttttctcctgcttggctgccgtcgggaaggctccggccggccagtatgtctcaaatccaaagcttctcgaggaacaactgtgcgctcctcgcggtgctgtgtgggaagtatgctgagaaccgcacaccagcagcgaggtctgggctggaggcgaagcggccgcggccggcttacccgttcccggagctcagctcggctgggcgattggaggtccacaccctgttcaatcctacaccagagcagttcctcgaggcgcagcgaacacattaaaaaggcattacgagacatacttgttggaatatgagttagcacatgatgatgtggatggcgaaagctgcttgctttgtcacagtagcgcacctggagattgggtgaactgcggtttatgtggcgaatgggctcactttggttgagacagacgacaagggctaggcactttcaaggattacgctaagacagacggtttggaatacatctgcccccactgtagcttagcaaactacaagaagccaccactaccaccaaaagtagctaatggtttctcaaatacagcatatgttccacgacttttcagcttgctcatgcatccttccgtctatattgtgtaagaaacagtcatgtgcaaagtgttaagcttggtccgcgtctccttggggatgctccaaaaataaatataagtccacctgagacagaaatggtcgatgaagaaggttcatctgaagtgaccccggctttaaaattatatgatgaagaaatcaacatgaaattactcttatgtggagtgccatgcaccttgattcgtgggagcaaactgcagaatcgaatcagtgcttctccaccacctcttgaagctgcatctctaccacgtgggatggttactatgcgctgtgatatcagtacttgcagctcttcccatgtgtcactcctcgtttctggtagcgcacaaacttgtttcgatgaccagcttctagagagccacataaagaatgaaattattgagaaaagccagttagtccgggctctctcaaatagtgaggacaagttaccatcaagtgagcctttaacttccatgtctacggcttgtggggcttctacctttgaagtttggatgtcccttcctaagtgggcagcacaggttctgaagcatctagcgccagatatatcatacaggagtttggttgcacttggtattggttgtataaatggtactcctgttgcttcatttgagaggcgagatgcagaccgtcttcttttcttttgcacaagccagtgcaaagatttggctaatgaaaacggtccatattttcatctgccaagatggtcagcctcccttaccaaggacagaacaaagttgggttcagaatcaaaacaaaatctgttgggtgcaaatggagttttggaagacaagaagcatatgatggaagggccttcctcatggtcagccgtcaaggctaaattaaagcctgcaactatgaggcccattcctcactctcgaaagcaacaaatgcatccatttatgggttttcctgaaacttcccttcacgaaactagtattgtgaagccaagcttgccagctgcaccaactgtgaagcacaattcagtttcttctgccacaaccacgcacagaaaatcaacatcagggccgtctcatactccctcagtcattcagttaaatcctctgccaatgaagaaacacggatgtgataggttgcctatccaagtgtgctctgaggaggattttttgaaggatgtcatgcagtttttaatccagaggggccacaatcgacttgtacctcacggaggactagctgaatttcctgatgcaatccttaacgccaagcgccttgatctttataacctgtacaaagaggtggtgtctagaggtggattttatgtgggtaatggcataaactggaagggtcaagttttttcaaagatgcgtaaccataccgcaacaaacagaatgactggtgtaggtaacacgttgaaaagacattacgagacatacttgttggaatatgagttggcacatgatgacgtggatggcgaatgctgcttactttgtcacagtagcgcacccggagattgggtgaactgcggtttatgtggtgaatgggctcactttggttgcgacagacgacaaggactaggcactttcaaggattacgctaagacagatggtttggaatacatctgcccccactgtagcttagcaaactacaagaagaagccaccaccaccaaaagcagctaacgtttcccttgtctggatcaatcaaacatttgatgcaacagcacggaagtgtgaggtcctgaagctgttggcgcaataatatgggaagaattcattagagtagataataggctgatggaaagatgggcaaggccttccaggtatgtagtagtattcgaatgtatcatctcgttaatttagtggttattatgaggcttatataacatgtaacaactgataacacagacaagctcctacagtagttggttagatgctggtgtaagcttcttgtttatattaatctcaattgtgtttttagtttcccttgtctggatcaaaaactgggacgttataaaattataaaaacttg

SEQ ID NO: 579 - DNA, 1879 bp, Zea mays
  unsure (1)..(1879): unsure at all n locations
  Clone ID: TF_ZmC5175_2
ctcgccgggaagaaaaaacatgaagttacttctatgtggagtgtcatgcaccttggatccttgtttattgggctctttagaggacggtctgaatgcacttctgaatattgaaattcgtgggagcaaactgcagaatcgaatcagtgcttctccaccacctcttgaagctgcatctctaccacgtgggatggttactatgcgctgtgatatcactacttgcagctcttcccatgtgtcactcctcgtttctggtagcgcacagacttgtttcgatgaccagcttctagagagccacataaaaaatgaaattattgagaaaagccagttagtccgggctctctcaaatagtgaggacaagttaccatcaagtgagcctttaacttccatgtctacggcttgtggggcttctacctttgaagtttggatgtcccttcctaagtgggcagcacaggttctgaagcatctagcgccagatatatcatacaggangtttggttgcacttggntattggttgtataaatggtactcctgttgcttcatttgagaggcgagatgcagaccgtcttcttttcttttgcacaagccagtgcaaagatttggctaatgaaaacggtccatattttcatctgccaagatggtcagcctcccttaccaaggacagaacaaagtttgggttcagaatcaaaacaaaatctgttgggtgcaaatggagttttggaagacaagaagcatatgatggaagggccttcctcattttcagccgtcaaggctaaattaaagcctgcaactatgaggccaattcctcactctcaaaagcaacaaatgcatccttttatgtgtttacctgaaacttcctttcatgaaactagtattgtgaagccaagcttgacagttgcgccaactgtgaagcacaattcagtttcttatgccccaaccacgcacagaaaatcaacatcagggccatctcatactccttcagtcattcagttgaatcctctgcctatgaagaaacatggatgtgataggttgtctatacaagtatgctctgaggaggacttcttgaaggatgtcatgcagtttttaatccagaggggccacaatcgacttgtacctcacggaggactagctgaatttcctgatgcagtccttaacgccaagcgccttgacctttataacctgtacaaagaggtggtgtctagaggtggattttatgtgggtaacggcataaactggaagggtcaagtcttctcaaagatgcgtaaccatactgcaacaaacagaatgactggtgtaggtaacacattaaaaaggcattacgagacatacttgttggaatatgagttagcacatgatgatgtggatggcgaatgctgcttgctttgtcacagtagcgcacctggagattgggtgaactgcggtttatgtggcgaatgggctcactttggttgcgacagacgacaagggctaggcactttcaaggattacgctaagacagacggtttggaatacatctgcccccactgtagcttagcaaactacaagaagccaccactaccaccaaaagtagctaatggtttctcaaatacagcatatgtaccacgaagtgtttaatttcttgtttttttcttttcctttggtcccgtgtttgtgggaagaagtcattagagtagggaatagcctgatggaaagatgggcaaggccttcagggtaggtatcgaaggtatcatctcgctaatttagtggctatgagttttttatagatgtacaattgataacacattcaagttcctaagtagttttttagtggttatgaggtttatatagcatgcatttgaatgcgggtgttacttgtttatattaatctcccctgtgtttttt

SEQ ID NO: 580 - DNA, 823 bp, Zea mays
  Clone ID: TF_LIB4978-057-A1-K1-D3
tttgaacaagaaaatttaattttcttttttgctccaaaaaataacaaaatggacaaatataaattaaatgataactcgaaaacttttatcaatgagctgttcaacttttggggtcagaggggtgtcactaatctaaagattcctcaaattggtggtcgtgaacttgatctgatgcatttgtataaagcggtttgcaaaagaggaggattccatcgcgtctgcagcaataaactctggaaagaaatcgtccttgagttcggacttcccagaacatgcacttctgccagttttaccttgcgtaatcattaccagaaatatcttcttgcttatgaacaaaaattcttctttggcagaaatgaagaagtagaatatcctgaagttcaaggtgccagacccagaaaagtcgtcagacctgttgaagaagaacccaaatttattgcactagaaatcgccccaagaaatcaatccattgaaaatgttctcaacggaatgtaccaaaatatcccagataatagtgaaattctttacttgagaaaatacaaaacagtccctgttgtgagtgaaatgagtagaatccttctcgctttcgagtcacatatgcaagaagaaaccacttttgccctcaattctttattactttactcttgcaatgctcatttccatctcgagtatcaccccaccctcttggacactctctttgtttatgtcgaaaacatcatcaaggatgtcccttactacaaaaaatctatctcaagacagacaaagaaaaaaactcgacgttgttcataacggcaattaccctgtctcagaaatatcagcacaa

SEQ ID NO: 581 - DNA, 2027 bp, Zea mays
  Clone ID: TF_ZmC8963_1
ctacgcctcagacctcggtgcaaacctgccgcgaaaatagcagccgcccgttcgctctcccactcctcccgcgatgagcgacccgcggggccacgccgccggtcccgaccgtgacggggacgacccgctcgccgaggacgccaacagcgaggaagcgtggcagacgcccgagaaagagccggttgctgtgtcgaaagaggcggctgcgcggggtggggacacgaccccggacgccgaaccggagagcgatgacggagagggaggagtgggctccccggatcagatggagcccaatgcggacggggagcgcgcaccgcccgtggccgcggctgaggacccggaggggattgttggcagcgcaaaggtggagacgaacggcgaggacgccatcagccttgacgccgacggggaggaggaggacgacgatgatgacggagacgaggaggaggaggaggaggacgacgacgacgacgactccacccctgatgcgtctccgagggccgaggtgaaggtggagggcgaaagctccacggggatgacccagagtggcgccggccaccgcgtggaggtggaaccggaccccttcctcgacggtgatgactctgggacggaggaggagcaaggtgcgttcatggcggagctggagcgcttccatagggagcacagtctcgagttcaagccgcccaagttctacggcaagggcctcaactgcctcaagttatggaggcaggtcgcccacctgggaggccacgagcaggtaacggtttgtaaactatggcgtcaagttggagagactttcaggccaccaaagacctgcacgactgtttcttggtcatttcgaattttctatgagaaggcacttcttgaatacgaaaaacacaaggtccggactggtcagcttcagataccaccgcctggtttaccacagcctagtggtgctgaccgtgaggtggttgtaaatcaatcatcttctgccagagttagaagggatgctgcagcgcgtgctatgcagggttggcatgctcaccgccttctcacaaatggcacttatggggataacattttgaaggacaaagatacaatgccacttccaaatcgtgataaaaacctaagctttggggtgctcaagagaaagaaagcatctagtccagagtatgctctcaagtcgtcccgctcaaaaacaaataagtcacaggaagattctatggtcgttgacgttggagaaccagccgactgggtgaagatcaatgtgcggcagactaaagattgctttgaagtttatgcactagttccgggacttctaagagaggaggtgcatgttcaatcagatcctgctggacgtctggttatcacaggggatccagagcagcctgataatccttgggggatcactccgttcaagaaggtggtcaacttgccatcaagaatcgatcctcaccaaacatccgctgttgtcacgcttcatggtcagctattcgtgcgtgcaccatttggtcatcctgatatgtagatatgaaatcctgtttacttcagttttgttgactggcgatgcctcgtcatcagtgatattccttgatattactagggtttatgtcaattctgttgaggaaataggattttgtttgagcagatacatgatgtcaagctgacttagctgaaccgttctgtggttggatgctgattgctgctgttgccatctgttatcaccttgtttattactccctccgttcttttttatttgttgtggtttagtttaaaaatgaactagaggacgataaatatttgagaacggaggtagtattatagtagtggccataaagttagctgattcatgcatgtattccagtttcatggtgagattttatagagaaaggagatgttgttcgtagtagggctaatttgacattatgattacttattgttctttattatttttcttctgtattataaatgcctctctgggtcactccaggcgccttaatgttgcatttttgtgcataacgccggttcctatggtttatgaagct

SEQ ID NO: 582 - DNA, 1891 bp, Zea mays
  Clone ID: TF_ZmC50242_2
ggccgggaacttatgtacagtaacgttatctctcttcctcctttctctctctacctatctgttcccaagtatagaatataggaggagtatatttttttagagatcgttaacctctcacagtaatccctccttttgcccaaaacctaaaggaagccaaagtgggagcaccaaaatattcgcggcgggtgcatagttgtttgtttaggagaagacgaggttaagaggagatgaccgagccggcacctgcggcagcagcggaggagaagagggccgtcgcggacacggctgcggctgtggtggcgaagggaaaagagaaggaggaggcggcgccaactctggcggccggcgccagggggaggttcgtggcctacccggcgcgggtgacggagcacacggacgtggtggcggacgccgcgcgcttcagggcggcgctcgaggggctgcacgcgcacatgaacacgaggctcaaggtgccacccacgcgtccgaaagatttggatcttcatcagctatataaggaggtcacatcacggggtggtattgacaagttgaaggcagagaatagatggagggaagtgaccgcatcatttattttccccgccactgcaacaaatgcttcttttatgttgaagaaatactatatgtcactcttatatcattttgagcagctatacttttttagagtgcaaggctggtaccaacaagaaatagattccagaacgaattcctccattgaagttaaaaccgaagcccaagcttaccacaaaagaaaaaggggtatcaatgcatctctttcaggtccagcttcgtcttcagataatgttgacgtagatgtgatagttgatggcaaatttgaacatggctacataataactgttattatgggatcaaaatccactaaagcaatcctctataactgcactgaagaacctgctctaccaacttcggagctagctgttgcaagtaacaacaatgatttgaagggtggacgtcgccgaagacgacgtaagaagaagctaagtacaacagaccccaggcaccccaaaccaaacaggagtggctataatttcttcttccaggatcaacatagaatgcttaagccacaatgtcctggacaagacagattgatcagtaaaatgattggtgaacgatggaacaatctaagtcctgaagataaagctgtatatcaagaaagaggtgtacaggacaaggagcgataccggacccagctggctgcttatagaaagctgacaggccaacctatcagcaatgctgtgcctatcgagcagagactccctctgacagatgtgacgattgatgaggtagactccaaggtgagtgaaggtgatatgctgctgtcgaaccaagcgtacagcagcagtgatgaaagtgaccactcaggagaaaaaactgttgaagacgagctcaacactgaaacatctcctgaggtgagcatggaaacgactggttctcttcgacaccctgatccttgtgccgatgaggaccactttgagttgcggcggagagaaaaccccaaggcagatgagaaatataatgcaccacctgattcatgactttccgatttgaatgctatatctgtgaacgtatgaaagaagaatttccaaggggtgccgagctagacatacctgattgacttgcatagctctattagcagttagaatacctttcgttttgacagttctgaatttgtgttgctaaatttctttcgaacttaacaggtggctactggataaaattcccattatccagggatatgactggatggacacttgattgacttgcataggaagttggaagtatattctttcattcaatatgtgtcattaaagtacgttgttctccccccaaaaaattaaaataaacccataat

SEQ ID NO: 583 - DNA, 984 bp, Zea mays
  Clone ID: TF_ZmC27538_1
cgtcctcccagcgtccgcccagcgtccgtaagattgaggccggcggcctccgaaataaaaaagatcctgcaagaaaaaaaaaagaaagatctagggcgagagaggaagagggagggagggaggaaaaagaataacctagcaagcaagcttgtgagatcgatcgtggtcaagattatggatccggtcacggcatccatacacggtcattatctccctccgccattcaacacccgcgacttccaccaccatctccagcagcagcagcagcaccaccaccaccagcagcacctgcagctcaagaccgaggacgaccacggcggcggcgcgccagggctgttcggcgaccgcggcacgcagggcgaccacgagaacaatgacgagaacagtggaaacagcaacgggagcggcggcggcgagctggcgctggttcccccgtctggtggcggcgggcccgagggcggggatgccacccctcgccgcccgagaggccggccggcggggtccaagaacaagccgaagccgcccatcatcatcacccgggacagcgccaacacgctgcggacgcacgtgatggaggtggccggtggctgcgacatctcggagagcgtgacggccttcgcgcggcgcaggcagcgcggggtgtgcgtgctgagcggcgcgggcaccgtgaccaacgtcaccctgcggcagccggcctcgcagggcgcggtggtggcgctgcacggccggttcgagatcctctccctctccggctccttcctcccgccgcccgcgccgcccgaggccacgggcctcaccgtctacctcgccggcggccagggccaggtggtcgggggcagcgtcgtcggcgcgctcacggcggctgggcccgtcgtggtaatggccgcctccttcgccaacgcggtgtacgagaggctgccgctggaggacgacgacttgctcgctgcccatcaagcgccgcaggcgcaggccgacggtgtcctc

SEQ ID NO: 584 - DNA, 482 bp, Zea mays
  Clone ID: TF_LIB3069-002-Q1-K1-B12.F2
aaaaagggggaaggggcctgcaccggctcgaaaagggcccgctgaagaaaaaaacaccgggcaccaaaaaaaaaaagaaaaaaaaaggggggccaccccaccccaaaataagggggagggggcccccgcgaccactggggacaaataggaaccaaaaagggcaccccccccccaaaaaaagccgccccgggccacgggggacaaagaaagtgccccccccccccaggggagaacacaggcccccaaaggggggagggcaacaacagtggtttcccgggggaggaccccacccaagggggggggcccccaccctgcgggggccatataccaaaaatgcggcgcaagaacccaaaactcgtttaaaggggcgcccacccggcggaggggtacgtggaaaaaaaggtaagcggccggaggccccgggggcgaccaaaaaaaatctgaaaatcccgggccggtgtgggaaaaaacccccccctggg

SEQ ID NO: 585 - DNA, 2579 bp, Zea mays
  Clone ID: TF_ZmC139_1
ctcgaggccggattggccggctcgtccctatccgtgacgcagtcaggagatccccaattccccattcaccaatccccagtattgtagtagggggaaaaacgagagaaaagaaacagcagtagcggaggcaagacgaaatggtggccgccgtcgcgtcgccttcgtcggcggcaccctccgccggccgtccccatccgacatacaaggagatgatcatgcaggcgctgacggagctgcgggacccgagcgggtcgagccgcagcgccatcgccagctacatcgccgaccacttctccggcctccactcgcgccacgatgccctcctctccgtccatctccgcagcctcaagtcccatggccaacttcgcctcgtctctggcaactacttcgtctccaccgccgctcagcggcaggggcgaggctccaacatcccgcccaaccccaagcctgctccggggcagaagcgtggtcgggggcggcctcgcaagcacgcagattcagccccttccgcttcgaccccggcgtttcagggcgccaagcgagggcgtggacgcccacgcaaacgcaagagcgcccaggacccggtggcttcctccccctccccttcgccgctacagggagcaagtgttccgccgcctccatctggggtcaagagggggcgtggacgccctcggaaggacgcccttgtccctccgccttcctcttcttcgccactgctgggagggattgatccaccgcctccatctgggatcaagacgggccgtgcacgtcctcggaaggcccttgtccctgtgcgttcctccttttccgagctgctgggagctgttgttctaccacctccgtctggggtcaagcgtggccgcggacgcccgcgcaagagtgcctaccccgctgtggcgccgttggtgggagctgagaagggacctgctggtggacaaccacagaggaataccactcctctctcaccgacacctgctaccatgtcccacagtggtaagagtgagactgtccggctgcccaaggttgctgttgatatcagtgctttgcgtggttcctccatgaacatatctgcttctagtaacagtttggttggtgcgaagcggggaagagggcgcccacctaaggttgtggttgctgggaaagagaagatgcaacaacctgaatctgtgcagtccgtggatgcttcattgactaagagagggcgtgggaggcccagaaaggagaaggcattggaaagtggccgcatgaaagcctcgcagatgactgagggtcaacgtgaagctctgactgcagaccaagctggggctgtccaaaatgaagtagaagatagggatttgcaatccttgggtactcctttgacagagaagagaggccgcggtcgtcctagaaagaggccgttggaaatcgaaactgcaaaagcaggggctgctaagcgtgggaggccaagaaaggagaagacatctgaaactggggacttgaaagttgcacagatgactgagggtcggcatgaagctctgcctgcacaagctgtagaccaaactgggcctgtgcaaaatgaagttgaagctatgattttgcaatcccttgctactactcctttgatggagaagaggagtcgtgggcgacctagaaagaggccattggaaactgaaactgcagaaacccaagttgctgcatcggtggagaagcgagggcgtgggaggccaagaaagaagaatccatcggcagggtggtctgcaggaaccagggatactgcattaaaggggattaagagagggcctgggaggccaaggaaggccaggccttttgaaactgagtctgtgaaaactgcacttgaggtgtctagggacttgacagaagatgggcctcaaaaggatggggatcttgtgtcagggaagaaagcagatactcatggtgtggtttggtagtgtcaactgaggaggtagccattgctcccatggatgctgggtgcgcagacgccaagggttgatctgatggatgtgggcaccaagagtcactagtgctctgatggtgcgaacaagaacaaaaaagaaataatgatagtacctgaaaggctaaacagaacatgcagctaataagtgtgttcatggatataattaatagccatactgcaagtattgctatatgtttgcaccagtttgattactcgtatgtttttgagcagttccattggaaactgcgtttgatgggtttcacttttgggggttggatttaaatatctaacccacatcctctttctttgtcaaggactataacatttttgtaattttgttgcttgtactggaaactagccatcataaggttcattttgttttccagtttcaaaaaaatttagtgatatgttcacataatatctctgttttgtgctttatttggtgtgtctattgggtgtttggttggagggatgggacgagttggtccactattgcttcattcagtcattcctcatactaataagcacagagtattcagtataaaaacaaggatttgtgtcatctgagtaaattttgtagaatggtattatgatgtaccaaaccattgaggtttctcataccaac

SEQ ID NO: 586 - DNA, 423 bp, Zea mays
  Clone ID: TF_LIB3637-199-Q1-N6-F3
ccattggggggaaaattagctttccaacccggagaagaaaaaaggggggaaaaacaaggaaaagaccacaaaccggcgacgcggaggcaacgtggacaaaagggcggcaagggggggggcgcaccgcaaaaaaacgggggggggggagaagcgaaaaaaaaccgggggagaaacaaagggaaaccaccgggggcaaaaacaccaaaaggccccgccggcaagaacaaaacagcagaggcccaggaaaaggccacaaccatggaacccaacaccggggaaaaaagcgggaacccccgggaaaaacaacaaaaggaccccacccccggaacacctttaacagaccccggggacgaccccgaaaatccccacccgtacccagaagggtaacaacttcgcgtaaaggggggccgataagaacccggg

SEQ ID NO: 587 - DNA, 676 bp, Zea mays
  unsure (1)..(676): unsure at all n locations
  Clone ID: TF_LIB4172-013-Q1-L1-E6
tacgcctgcggttccggtccggaattcccgggtcgacccacgcgtccgccgagtcggggctatttctggtgttggcgcggctccaagaagactcactgtgtgctgccccacacatagagaaggagaatgagcgagtcgggctcaaagtccagccagcccctggcctccaaacaggaaaaggatgggactgagaagcgaggccggggcaggccacgcaagcagcctccggtgagtcctgggacggcgctggtcgggagtcagaaagagcccagtgaagtgccaactccgaagagacctcggggccgaccaaagggaagcaagaataagggcgccgccaagacccggaaagtcaccacagctccagggaggaaaccaaggggcagacccaagaaactggagaaggaggaagaggagggcatctcccaggagtcctctgaggaggagcagtgatcaccactcgcagtgccgcctgctccatagccactgaggagcagctgtcccctgggactggaagccctgctcccaggcccctccccgcccccactgcacactaccgcaccaggcaccagctgcaggctctgctccgcancacccaagggagcaggattcggctcagtccctgtgccctcctcccgaacacacctgccccatcctgagcaggctaacttcccattta

SEQ ID NO: 588 - DNA, 483 bp, Zea mays
  Clone ID: TF_jC-zmXLIB3526P032bf12a1
gctccggttcctggcgtcccgctccaaggccgaggtcgtcgacatgctccgcaagcacacatacttcgacgagctcgcgcagaacaagcgcgccttcgccgccgcgtccgcggccaccgcctcgtcgctggccaacaacccttcttcctacgcgtcgctctcccccgcgaccgcgacggccgccgccgccgccgcgcgggagcacctcttcgacaagacggtcacccccagcgacgtgggcaagctgaaccggctggtgatcccgaagcagcacgccgagaagcacttcccgctgcagctcccgtccgccggcggcgagagcaagggcgtgctcctcaacctggaggacgccgcgggcaagggtgtggcggttccgctactcgtactggaacagcagccagagctacgtgctcaccaagggctggagccgcttcgtcaaggagaagggcctccaagccggcgacgtcgtcggcttctaccgct

SEQ ID NO: 589 - DNA, 491 bp, Zea mays
  Clone ID: TF_ZmC4844_3
aggtgaatttgtgaagacacatggccttcaggcaggggatacactcattatctacaaaaactccgtacctggcaaatttattatccgtggggagaagtccattcagcagacaaacctgtagacacaaattgatgtgattgacaccatcagatatggtgctcgaggatacaccatacgttcagaattgagttgttatcgacttctgtaatgtttcaccatcacattgggataagtcgaaaaggagaatcacgagtctgagaccccgcgtgaatggagggaaggaggaaaggaagacattggaagtgcgcctaagttcagaacaagtggttcatgtcctacgcccccccccccccccccaaccggttgtatttggatggctgagtcctgctgcacattgcattctgaagaacattcgtagtctttttgttttgtaaatattttggatctataagataaaggaagcggtttggaacttacgcaaattctgatac

SEQ ID NO: 590 - DNA, 204 bp, Zea mays
  Clone ID: TF_uC-zmroteosinte109f10b3
ggactttgtggggaaagtgtggtggttgcggtactggtactgtaacagctgtcagagctactttctcaccaagggctggagccgttttatcaaggagaagggcctccaggccggattacgtcttccgttactaccgttcctcggtcggcgcctacagcatgctcttcattgacttgcaagcatgcgactctgcagaacattcta

SEQ ID NO: 591 - DNA, 383 bp, Zea mays
  Clone ID: TF_LIB3245-012-P2-N1-F3
actatagaagagctatgacgtcgcatgcacgcgtacgtaagctcggaattcggctcgagggcgccacagacaaagcccgcgcctgctggtgctcggcaggacgacattcaccaccgcctcgcagcggcttcagataagcggcagggcgccaaggcggacaagaacctgcggttcctgctgcagaaggtgctgaagcagagcgacgtcgggagcctcggccgcatcgtgctccccaaaaaggaagcggaggttcacctgccggagctgaagacgagggatggcatctccatccccatggaggacatcggaacgtcgcgcgtgtggaacatgcggtacaggttttggcccaacaacaagagcagaatgtatctgctggagaacac

SEQ ID NO: 592 - DNA, 497 bp, Zea mays
  unsure (1)..(497): unsure at all n locations
  Clone ID: TF_jC-zmXLIB3526P032be12a1
ctgcttttgttttctgtgcgtaccgctccaaggctcgaggttcgtggacatgctccgcatgcacacatacttatgcgagctcacgcacaacaagatgcgccttcggcggcgagacgctgtcaccagatggtctctggcctataacccttacttactacgcgtcaggtatacccggggaccgagatgggaagaaccgtcgccggcgcgggagacacctgttnagacacagaaagtcaccatcggcgacaaacgcaagcagaaccggctggtgatccccaagcaccacgccgagaagcacttacagctgcagatcccgtccgtcggcgatgagagcaatggcgcgctcctcaacctggaggacgaacagggcaaagtgtggcggctccactactcgcactggaacagcagacaaagctacctgctcaccaacggctggagccaatgggtaaaagagaatggccttcaacccggagacgtagtaggcttatagcgctccg

SEQ ID NO: 593 - DNA, 1978 bp, Zea mays
  Clone ID: TF_ZmC1903_2
gccggccgggcctccatatcctacaacacttcccgcaacagttgcatacgccgtgcccatctatctatagctagcactaggagtggtgcacactgaaatggacagcgccagcagcctcgtggacgacaccagcagcggctgcggaggcggcgcgtccacggacaagctaagggctttgggcgtcttcgccgacgactcggtgacgccgctggagcgcatgggcagcggcgccagcgcggtcgtgaacgcgcccgaggcgggcgccgaggcggactccggctccggtgccgccgtggtgagcgtcgacgggaagctgccgtcgtccagggacaagggcgtggtgacgcaggccaacgggcggtggggcgcgcagatctacgagcgccaccagcgcgtgcggctcggcaccttcgcgctcgaggccgacgcggtgcgcgccctcgacgccggccgggccgggtacgcgacacacacacaccatcactgcgctgcgctactctactccccaccaccgccgccacccaagagctttcctcgctgcacaagaaatggccacgaaccatctctcccaagggcagcacccgcaggcctggccctggggcgtggccatgtacaccaacctacactaccaccaccagcagcaccaccactacgagaaggagcacctgttcgagaagccgctgacgccgagcgacgtgggcaagctcaacaggctggtgatccccaagcagcacgccgagaggtacttccctctcagcagcagcggcgccggcgacaaaggcctcatcctgtgcttcgaggacgacgacgacgaggaggctgccgccgccaacaagccgtggcggttccgctactcgtactggaccagcagccagagctacgtgctcaccaagggctggagccgctacgtcaaggagaagcagcttgacgccggcgacgtcgtgcgcttccagaggatgcgtggtttcggcatgcccgaccgcctgttcatcagccacagccgccgcggcgagactactgctactgctgcaacaacagtgccccccgctgctgctgccgtgcgcgtagtagtggcacctgcacagagcgctggctcagaccacgcagcagcagcagccgtcgccttggagcccaatgtgctacagcacatcgggctcgtactcgtacccccaccagcagcccagccaattcccagcatgcctaccaccgccactcagctgaccatgaccacagcaacaacatgcaacatgcaggagaatctcagtccgacagagacaacaggagctgcagtgcagcttcggcaccgccgccaccgtcgcggcggctccggctgttcggcgtaaacctgactgcggcccggggccggagccggagacaccaacggcgatgtacggctacatgcaccaaagcccctacgcttacaacaactggggcagtccataccagcatgacgaggagatttaagattatgcctgcagaatccaaacagccaaagtagtagcagtagtagttgctagcagcagcagcagccgcctagtactacttgcacacgaagtgacaggattgaattgacctgtacacggggagaaaaaaaaaggaaggaaggaagtggagagagatcccttgtttcccgggcaatcttccttccatccccgcccccagaagaatgctgctgcctttttgctgttccgtttttttttttttaatttttattttcttctccatggcttccagaaaaccctacttactgtaggggatctggtagcagggggccgggcatgcgtgggaggtttgcaggaagcatcaagctgccaaggagctggaacgagagacaacagacagagagagatgtgtgtgtatgtatgtgtgtgtcatctgtacctatatgtcttaatttgtgggtccgatagagaacaaactgtgaagttgatgtgtgtgcctgcctgcctcctgaagaaacaatgcaatatccccatgg

SEQ ID NO: 594 - DNA, 2825 bp, Zea mays
  unsure (1)..(2825): unsure at all n locations
  Clone ID: TF_ZmC4844_1
ggcaaagttcatcgtgacacagttggcactcttcctgagtcgaagcagagccatgaaagttgtgcttccgtgaataatgtgatacatctaacacacactccatgtcctttttttattgtgcatattcttctcttatggcgtatctgcatttgctaagttcatcggaaaaagaaaataactgaagttcaactctggagagtaccaagtcattttgcgcaaggagttgacaaagagtgatgtcgcaaattccggacgaattgngctccccaagaaggatgctgaggctggtcttccaccattggtgcaaggggatcctctgatactgcagatggatgacatggtgcttccaattatatggaaatttaagtatagatccttccactacaacctctcccagtcttatgccctatggacccattacatgctcaacaagaatgtatcctactctacttactctacaccacatgagccgttgcgccatacccacatcccggataagtattcaggtacatcttctgcactctcctgctgcaaattctttctctctctctctctatgccctacattgcacaggcatcacaccattatcacccttatgctccaacaatcgttgaacttactacagcagttaaaaaaaaaaaaaaaaaaaaaaaaaaaaaaaaaaaaaaaaaaaaaaaaaaaaattggtacctcgggcgggccctttccccttctttgcccttggcccttggcctccttccgtcgagagagagagagagagagctgtgctggctgctgctgccccgggtccgtcgggacgggtagatgaggaggaagagaacagctcgtgactgactgactccctccctcagcgtgagtgggttgcggacgaccacatccatccgttcccaccattcccttctcccacctcgcctcctccccttgcccttgcccttccacagccggaatcagggggtaatgggccagatgggaggacccgacggcgacggcgacggcggcgcgggcccgcaccaccagtaccactaccaggcgcttctcgccgccgtgcagaaccccagccagggcctgcacccctttcccctccccttccacgtgcctctccacgcaggagcgggagcacccgccgccggaccaggacctggagctgatgctgatgcctccacacacaatgccaatgccgctcaccactctcagcctccaagaggtttcaccgattggagcgcgtccaacagtgccttcgccgccgttgcctcacagcccgcacctgctaccaccaatacacccttccattacaacctctcccagtcttatgccctatggacccattacatgcttaacaagaatgtatcctactctacttaccctacaccacatgaggagcatccccacccattgcgccatacccacatccaggagaatccccacccattacgccatacccacatcccggataaggattcaggttgtgcatctagccttggatttgactctttcactacaatgtcacttggaccaaatatttgttcccacatgacgcccatggaaggatctatatctgccaaagaacccgagaattcagaggatttgcctgcaatagttaggagcagtgatgaaatggacactagaaacagtggcaaagttcatcgtgacacagttggcactcttcctgagtcgaagcagagccatgaaagttgtgcttccgtgaataacaagttcaactctggagagtaccaagtcattttgcgcaaggagttgacaaagagtgatgtcgcaaattccggacgaattgtgcttcccaagaaggatgctgaggctggtcttccaccattggtgcaaggggatcctctgatactgcagatggatgacatggtgcttccaattatatggaaatttaagtatagattttggccaaacaacaaaagcagaatgtatatcttggaagctgcaggtgaattcgtgaagacacatggccttcaggcaggggatgcgctcattatctacaaaaactccgtgcctggcaaatttattatccgtggggagaagtccattcagcagacaaacccctagacacaatttgatgtgactgtgcaccatcagatatggcgtccgaggatacaccatatgttcacgttccagttgttatcgacttttataatgtctcaccgtcacactgagataagtcgaaaaaggagatacaccgcgtggatggagaaaaagagaagaaattttgggagacattggaagtgctgccagtgaggctacgtctaagctcagaacaaatggtttatgttttttcccctaattcggtcgtatttggatgcttgagtcctgcattgcatgatgaagaacattctcaatctctctttttttgtaaatattttaattcaggatctataaggtaaaggaagtggtttggaagcagaaaaaaaaaaaaaaagcggcacatctcctgcactctcctgctgcaaattctttctctctctctctctctctctctctctctctctctctctctctctctctctctcaactcatatatcaatacgcttaaattcgattgaaaataaaaactctcatggggaccttagagcaaaaaacatatgctttgctttcttttcattcctttcagcttcgcagacataactgtagcttgctgcaactagtaagtttgattttgtcttctttgttttgaatgcccttctgaccttcaagcatgtaatgtaagctcgcactttatttctgtactatcgtattattatctgtggtcgcatgttacatttagaatccaatgtagtattaaccgatatccacattgattcaaccag

SEQ ID NO: 595 - DNA, 2233 bp, Zea mays
  Clone ID: TF_ZmC1903_1
accagcatgcctaccaccgccactcagctgaccatgaccacagcaacaacatgcaacatgcaggagaatcccccccccccccggccgccagggcctgcgcggccgcctcggccccgccgccgccgccggcgcggcggcgccggctccgcggcgcctaccgcgactgcggcccgggccccgtgctcaccaagggctggagccgcttcgtcaaggagaagggcctccaagccggcgacgtcgtcggcttctaccgctccgctgccggcgccgacaccaagctcttcatcgactgcaagctgcgacccaacagcgtcgacgccgcctcgacgacgagcccggtcgtcgccgccggcgccggtggcgaaggccgtgcgtctcttcggcgtcgacctgctgacggcgccggcggacgccatggcccggtgcaagagagccagggacttggcctcgcccccgcaggcggcgatcaagaagcagctcgtggagctggcactagctagtgtagatcaatgctacggagcgggtcgatctttctcttagttagctaagctagtcggtttttattttattttattttattttgctcgatcgctcactgaaatggtagcatcagggctgagctaaatttttagtccctcctcggaatctcatgtagttggttcgtcatcctctggctttgctccgatgtaaatcttctcatcaactgtatactaccaatggaaacaaaaagcagccatggaaggctgcacgatgattaactgaaaaaaaaaaaaaaaaaaaaaaaaaaaaaaaaaaaaaaaaaaaaaaaaaaaaaaaaaaaaaaaaaaaaaaaaaaaaaaaaaaaaaaaaaaaaaaaaaaaaaaaaaaaaaggggggggcccttttaaagaatcaaattttacttccccgtgcttgcaacgtaaaactttttttatggggcccccaaaataaaataaatgggccggggtttaaaaacttccgaattgctcgaggccggccgggtgcctccctctacacagcacacggcacaccaccaccactcacctctccctcttctcgctgccgatctttcttcccttcccttccttccacctcggctagctagctagttattaccttagcatcccaccacatcacaccaaggtcacgcggcggccggcaagaatggcgacgcaccacctggcccagggccacccgcaggcgtggccgtgggggatggccatgtacaccaacctgcactaccaccaccaccaccaccaccagcagtactacgagagggagcacctgttcgagaagccgctcacgccgagcgacgtgggcaagctaaaccgcctggtgatccccaagcagcacgcggagaggcacttccccctcggcggcggcgacggggacgggaacgagaagggcctgctgctggaattcgacgacgaggccggcaggccgtggcggttccgctactcgtactgggtcagcagccagagctacgtgctcaccaagggctggagccgctacgtcaaggagaagcgcctcgacgccggcgacgtcgtgcgcttcgaccgggtgcgcggcgtcggcccccccgtccgactattcctctgctccccagcggcgcggcgaagcggaccgcggcgggtgattccgacgccgcccggcgcccggcgggcgagcagcagcagcagcagccgtggagccccaccgtgtgctacagcacgtcggggtcgtcgtacccgcccagccccgctagccccccttacgcctaccacatcgacacgccacacgcaggcgcaggcgaggcggacgccaagagcagcggcggcacgcctactacaggaacagcgccgacgaggaagctccggctgttcggcgtcaacctcgactgcggcccggagccggagccggagacgccgacggcgccaatgtacggctacggatacgtgcaccagagtccctacgcagcagtgcccgcagttcccagctactggtaatgagcaagcacggtcggaaggaacaacaccgagatcattcagtcgcattacacgtactgtactactgctagctgaagctgatagagctaattaaaatggataagcatataagcaaagcgtcagtttcttttctttttttaatgtttgctcaacttgtataggaaattaggaatgaataggataggagtaattgtaaaaaaaaaaaaaaaaaaaaaaaaaaaaaaaaaacccccccccgaccccctttc

SEQ ID NO: 596 - DNA, 3415 bp, Zea mays
  Clone ID: TF_ZmC7307_1
gggaaattgatcatgggcttcaggaaggcaactaacaattctttcgaacaggagcaagctacaaagcctgccaatggcgccctagcaacttcagaagcaaatggtaaagtttctgccccagattccagtccaaatgctgcagtttcccgtcaaaacaagctcaacacagagaccacaagatctggtcctgtggaacaagccactgcattgaaaatggacaaggatggattaacacataaggaagggcctggaactggtagttcttccccaggttctgtcaagagaaaaacaactattcttggtcaaaagaataaaagattacggatggataatgaggaatcaatggagttgaagataacatgggaggaagctcaagaattgcttcgccctcctcctaaggccccatccattgttattgttgatggccatgagtttgaggaatatgaggagccaccggtacttggaaggaagacttattttgtagcagataaatcaggttcgaaccatcaatgggcccaatgtgaagattgttccaaatggaggaaacttccaatagatgctctgttgccctccaaatggacctgctctgacaacaaatgggatccagagaggtgttcttgcgaatctgcacaggaaataagtatagaggagcttgcagaattcattcctataaaacctgccaaaaagcccaaattgaagatagaatctgatgctatcgatgcttcagatgggctggacacgcttgcaaaccttgcgattcttggtgaaggtgaagctctcccttcacagccaacaacaaaacatccccgccatcgtccgggctgctcatgcatcgtctgcatccaaccaccaagcgggaagggtccaaagcacaagcaaacttgcacctgtaacgtttgtatgacggttcgccgccgtttcaggacactcatgcttcgacgcgagaagaaggcgacaaaggatctgtctcgcaagaaagagacgggccaatccagtgagaaggccacacaacaagctgtgtccggacctccaggagccaatgccactgcaaccagatctgcccagaaagcagatggaaacaccgatggacctgaagacatggccgtcgatcacaaggtgacaacatcctctcccgtcaagaaccatattgacctgaacatccaacctgaacgggacgatgagcagtcaccgaaatctggtgcggctggtttgttgagccgagacaatgcaacttagagagtggatagcgtggattgattgatcataccataccaatgagtggacatagataaccgatcgaacatatccttccgaatgtctatacccttgtttttttttttaagatagatgtggcgtgaggcgtggggccttgtagtgtagctgttaccttcccataccatagagccggtttccttttaccctgagactccagtggtaatgttatcgtgtataccatagggcaggacacccgtaggtgttgcgtggggacttgcataaccatgtatattgcaagaccagctcgtttcggctgaatgtgaaccgtaagttgctactgttcccatctcccaacctgaacggctccctttaaaggttcaggatgccagtggtaaagaatggatattccaattccgtttctggccaaataataatagcaggatgtatgtattggagggtgtcacaccttgcattcagtcaatgcagttacaagcaggcgacacagtaacctttagtcgaatagacccagaagggaaattgatcatgggcttcaggaaggcaactaacaattctttcgaacaggagcaagctacaaagcctgccaatggcgccctagcaacttcagaagcaaatggtaaagtttctgccccagattccagtccaaatgctgcagtttcccgtcaaaacaagctcaacacagagaccaaaagttctagtcctgtggaacaagccactgcattgaaaatggacaaggatggattaacacagaaggaagggcctggaactggtagttcttccccaggttctgtcaagagaaaaacaactattcttggtcaaaagaataaaagattacggatggataatgaggaatcaatggagttgaagataacatgggaggaagctcaagaattgcttcgccctcctcctaaggccccatccattgttattgttgatggccatgagtttgaggaatatgaggagccgccggtacttggaaggaagacttattttgtagcagataaatcaggttcgaaccatcaatgggcccaatgtgaagattgttccaaatggaggaaacttccaatagatgctctgttgccctccaaatggacctgctctgacaacaaatgggatccagagaggtgttcttgcgaatctgcacaggaaataagtatagaggagcttgcagaattcattcctataaaacctgccaaaaagcccaaattgaagatagaatctgatgctatcgatgcttcagatgggctggacacgcttgcaaaccttgcgattcttggtgaaggtgaagctctcccttcacagccaacaacaaaacatccccgccatcgtcccggctgctcatgcatcgtctgcatccaaccaccaagcgggaagggtccaaagcacaagcaaacttgcacctgtaacgtttgtatgacggttcgccgccgtttcaggacactcatgcttcgacgcgagaagaaggcgacaagagattcgtctcgcaagaaagagacaggccaatccagtgagaaggccacacaacaagctgtgtccggtcctccaggagccaatgccactgcaaccagatctgcccagaaagcagatggaaacgccgatggacctgaagacatggccgtcgatcacaaggtgacaacatcctctcccgtcaagaaccatattgacctgaacatccaacctgaacgggacgatgagcagtcaccgaaatctggtgcggctggtttgttgagccgagacaatgcaacttagagagtggatagcgttgtttgattgatcataccaatgagtggacatagataaccgatcgaacatatccttccgaatgtctatacccttgttttttttaagatagatgtggcgtgaggcgtggggtcttgtagtgtagctgttaccttcccataccatagagccggtttccttttaccctgagactccagtggtaatgttatcgtgtataccaaagggcaggacacccgtaggtgttgcgtggggacttgcataaccctgtatgcatgtatattgcaagaccagctcgttttggctgaatgtgaaccgtaagttgctactgtacccctgaacatatttcccccgaaaaaaaaaaaaacgccaaaaaaaaaaaaaaaaaaaaaaaaaaaaaaaaaaaaaaaaaaaaaaaaaaaactcgaggaggggggccggtacc

SEQ ID NO: 597 - DNA, 261 bp, Zea mays
  Clone ID: TF_jC-zmX700468806a1
attcggctcgaggccacatacaaagccctttcttggtggtgctcggctggacgactttgacctccgcctctcaacggtttcagataagcgcctcggcgccaaggctgtcaagaacctgctgctcctgtccgagaaggtggttattcattgtgacactaggagcctcggccgcatcgtgctccccataaaggtagcggaggttcacctgcccgtgttaaagacgagggatggcatttccatccccattggaggacattggta

SEQ ID NO: 598 - DNA, 1848 bp, Zea mays
  Clone ID: TF_ZmC7307_2
accatatcagaattgcaccaactcagcagcaagcacaaatggcttcctccccattgcagaaacaattctattctcacactgtaactggttataatgaattccaagcacaaatgcgcaatggaagacccagaatggattcaaaggcgagatcacagttacttccccgctattggcctagaataacagatcaagagctacaacacttatcaagcgattcaaattctgttattactcctttgtttgaaaaaatgttaagtgctagtgatgctgggcggattggtcgtttagttttgccaaagaagtgtgctgaggcatacttccctccgatctcccaacctgaagggctccctttaaaagttcaggatgccggtggtaaagaatggatattccaattccgtttctggccaaataataatagcagaatgtatgtattggagggtgtcacaccttgcattcagtcaatgcagttacaagcaggcgacacagtaaccttcagtcgaatagatcctgaagggaaattgatcatgggctttcggaaggcaactaataattcttttgaacaggagcaagctacaaagcctgtcaatggtgcaccagcaacttcagaagtaaatggtaaagtttctgccccagattccagtccaaatgctgcagtttcccgtcagaacatggtcaagacagagaccaaaagttctagccctgtggaacaagccactgtatcaaaaatggataaggacagattaacacagaaggaaggacctggaattgctagttcttccccaggttctttaaagagaaaaacaactaatcttggtcaaaagaataaaagattacggatggataatgaggaatcaatggagttgaagataacatgggaggaagctcaagaattgcttcgccctcctcctaaggtcccatccattgttattgttgatggccatgagtttgaggaatatgaggagccacctatacttggaaggaagacttattttgtagcagataaatcaggtttgaaccatcaatgggtccagtgtgaagattgttccaaatggagaaaacttccaatagatgccctgttgccctccaaatggacctgctttgacaataaatgggatccagaaaggtcttcttgcgaacctgcacaggaaataagtttggaggagcttgcagaactcattcctataaaacctggaaaaaagcccagattgaagatagaatctgatgctattgatgcttcagatgggctggacacgcttgcaaaccttgcaattcttggcgaaggtgaagcgctcccttcgcagccaacaacaaaacatccccgccaccgtcccggctgctcatgcatcgtctgcatccaaccaccaagtgggaagggcccaaagcacaagcagacatgcacctgtaacgtttgtatgacggttcgccgccgttttaggacactcatgcttcgacgcgagaagaaggtgacaagagattcctctcgcaagaaagagacgggccaatccagtgagaaggtcacacaacaagccgtgtccggtccgccaggagccaatggcagtacaaccagctccccccagaaagcagatggaaatgctgatgcgcccgaaaacatggccgtcgatcacaaggtggcatcctctcccgtcaagaaccacattgacctgaacatccaacctgaacgggacgacgagcagtcaccgaaatctggtgcggctggtttgttgacccgagacaatccaacttagcccttgttgttattcctgtcccatatggattggatcccatatggaattatggattggatgagattggaaaacattatgaaaaattttgacttgtttagaattt

SEQ ID NO: 599 - DNA, 3511 bp, Zea mays
  unsure (1)..(3511): unsure at all n locations
  Clone ID: TF_ZmC10032_1
actttttcacgagggcccaaacaacncngacaagcgcgnggggaaaagcgacgagctatcgccaagcagaaaatttgaacaaccaccctctcttatgttgtattccagaaatgatgatattgctattgtaaataagagcaatcacctgttcatggtaaaaggtatagaggctggacaaagcagtaacatcttgagacaaaaagagatagagaatggttcaaggcagattaaatgggaacaaccaacccttagttttggggacatgggaaggcctttcctaactaggtctcaaagtgcattagagtcacctcaatgtactcgaagagatgacaataaggatccaactacagatagcacaagtgagtcattttcagaagcatgtctgagcatgagcctaggtattgcaaacaatgtaaacaggatggaggctacttcaacagcggaaaggcctgtgcggcttttcccgacatgacgaacagccctcgaggacgtgttcacgcatgttgaaattgcttttggcaaccggacgttgcacgagctggtcaagggaagaggctaagacggcatcggcatgggccaacgagaaccagcaggacaagcctgccgactctgccgctgccgctgctacttgacggcgtgcgtctgttgtgaaagtgactgatgggtgttgtcagcgtgctttgatggtttcaaggtgttgctcctggaggctggagttacttacgtgtacgtatgaggctgtgcaaccaacccccaggttgtatgttgtagaagttctgtaaaccacgatgctcttgtgttggttgctgctgtaatctaaaaacgcttagacctttggattcaataactcaccacatacttgatctgtactgtacatctcatctattgtatctatcggacaacaggaatgtcacagaacttgccaccacacaatctccctttaaacacgcacaaagggcacagcatttcctgaccagacctccaagggttggtgaaggtgctgcttttgatccaacaagagacatgtttccacatcttcgtgttgctagacaacctgctgatggaaggggacgcaatcaattacttcctcgttattggccaagaataacagaccaagagctgcaacaaatatctggagattcaaattccacaatcgttccattgttcgagaaggtcctgagtgcgagtgatgcaggccgcatagggcgccttgttcttccaaaagcttgtgccgaggcatattttcccccaatttctcaaccagaaggacgccccttgacaattcaagatgcaagaggaaaagaatggcattttcagtttaggttttggccaaataataacagcagaatgtatgtcttggagggtgttacaccatgcatacaatcattgcaattacaagctggcgatacagtgacctttagtcgtatagatcctggagggaaacttgttatgggctttcggaaggccacaaatactgtcagtctgccagactcacagatttcagctattgcaaatggttcccttctcagtgagacactcttttctactgcaaatgagagcataggagtagtaagtggttatcctggatttcttcactcaataaagggagctgcagatttccatccaagctctctatatgatcatcatatgaactcagctgacggggatgtcagttggaataaggcagataaatttggcagcaggccagatgaggggtctttgcaatttctacaaaaacgaagtcgcaatattggttccaaaagcaggaggttcttaatcgacgctgaagatgccatggaactaaagcttacctgggaagaagctcaagagttgttgcgccctgctcccactgcaaaaccaactgttgtgatgattgaggactatgaatttgaagaatatgatgaaccccctgtctttgcaaagagatcaatttttaccatccgtgcaacaggggaacaagaccagtggattcaatgtgacgagtgctcaaaatggcgccggttgcctcttaatgttattgttgcatccaaatggacatgcaccgacaactcatgggacccaaaatgctgctcctgctctgcgcctgaagagttgaccccaaaagagttgcaaagtgttatgcagcagtatgaagaaatgaggaggcgaaagggcagctatggtctgaagctgaatgtcgctgaaatggatgcatccagctttgacgccttggccacgggtgcagtattcggtgaagtcgggaaccaaggtacggcttcagtcgcgacgaccacaaggcacccccggcatcgccccggctgcacatgcatcgtgtgcatccagccacccagtggcaagggcccgaagcacaaccctgcgtgcacctgcaacgtgtgcatgacggtgaggcgccggttcaagacactgatgatgaggaagaagcagcggcagtcggagcgcgaggaggcggaggcaagcaagaagatcgcgtgggtgaacagagacgagcctgaggggagcagcctgtcgagatccccgcagacgctggacagcacccgagacaacagcgatgtcaccatgttcgacaaggtgtccgacgtgaacaagcaggggcacatcgacgtcgacctcaacctccaccctgctgcccctgccgtccaggctgcgcagcagcagccccggccggtgagcatgatgggtctcttggaagtggcgggccggccgcttgacaactacatgaagcagaatggcctgacgagcctggtgggggagcaaggtggtggcagctccagcacggccacggtcccgccggctccggtggagagtgaggagcggacgtccaacgagggcctcgtcccatcagcatcggcagagcgggaaccgaacgccatggccgtcgacgaggctggcgagaaccagcaggacaaggctgccgacgacgacgacgacgccgtcgctgccgcggctacttgacgtgattttttttcatggagctgcttctcctggaggctgggagtaacttacgtgtacgtatgaggcttgtgttggttggtgttgtaatctgacgcttaaacattggcttcaataactcatacagagtgagaacctgaaagtatcagtctagagcaagttctttttactggtgctgagtcttcccaaaaggaggaaacaaaaattttagacccttcctttaatttttaatcagccatgtcgtgaaacagacgccatggccatcgacgaggccggcgagaaccagcaggacaagcctgccgactctgccgctgccgctgctacttgacggcgtgcgtctgttgtgaatgtgactgatgggtgttgtcggcgtgctttgatggtttcaaggtgttgctcctcctggaggctgaagttacttacgtgtacgtatgaggctgtgcaaccaatccccaggttgtatgttgtaaaagttctgtaaaccaaatgctcttgtgttggttggtgctgtaatctaaaaacgcttagccccttggctccaataactccccacatacttgat

SEQ ID NO: 600 - DNA, 2957 bp, Zea mays
  unsure (1)..(2957): unsure at all n locations
  Clone ID: TF_ZmC10032_2
gccggccggtccgggaactaggtctcaaagtgcattagagtcacctcagtgtactcgaagagatgacaataaggattcaactacagatagcacaacaagtgaatcgtttccagaggcatgtctgagcatgaacctaggtattgcaaacaatggaaacaggatggaggctacttcaacagcggaaagacctatgctatcgccaacgacagccattgctgaaggaagagaacttaccactgcactgtccccctttcagcacgcacaaagggctcggcatttcctgaccagaccaccaagggttggtgagggtgcagcttttgatccaactagagacatgtttctgcatcttcgtgttgctaggccacctgctgaaggaaggggccgcaatcaattacttcctcggtattggccaagaataacggaccaagagctgcaacaaatatctggagattcaaattccacaatcgttccattgttcgagaaggtcctgagtgcgagtgatgcaggccgcatagggcgccttgttcttccaaaagcttgtgccgaggcatattttcccccaatttctcaaccagaaggacgccccttgacaattcaagatgcaagaggaaaagaatggcattttcagtttaggttttggccaaataataacagcagaatgtatgtcttggagggtgttacaccatgcatacaatcattgcaattacaagctggcgatacagtgacctttagtcgtatagatcctggagggaaacttgttatgggctttcggaaggccacaaatactgtcagtctgccagactcacagatttcagctattgcaaatggttcccttctcagtgagacactcttttctactgcaaatgaaagcataggagtagtaagtggttatcctggatttcttcactcaataaagggagctgcagatttccatccaagctctctatatgatcatcatattaactcagctgacggggatgtcagttggaataaggcagataaatttggcagcaggccagatgaggggtctttgcaatttctacaaaaacgaagtcgcaatattggttccaaaagcaggaggttcttaatcgacgctgaagatgccatggaactaaagcttacctgggaagaagctcaagagttgntgcgccctgctcccactgcanaaccaactgttgtgatgattgaggactatgaatttgaagaatatgatgaaccccctgtctttgcaaagagatcaatttttaccatccgtgcaacaggggaacaagaccagtggattcaatgtgacgagtgctcaaaatggcgccggttgcctcttaatgttattgttgcatccaaatggacatgcaccgacaactcatgggacccaaaatgctgctcctgctctgcgcctgaagagttgaccccaaaagagttgcaaagtgttatgcagcagtatgaagaaatgaagaggcgaaagggcagctatggtctgaagacgaatgtcgctgaaatggatgcatccagctttgacgccttggccacgggtgcagtattcggtgaagtcgggaaccaaggtacggcttcagtcgcgacgaccacaaggcaccccaggcatcgccccggctgcacatgcatcgtgtgcatccagccacccagtggcaagggcccgaagcacaaccctgcgtgcacctgcaacgtgtgcatgacggtgaggcgccggttcaagacactgatgatgaggaagaagcagcggcagtcggagcgagaggaggcggaggcaagcaagaagatcgcgtgggtgaacagagacgagcccgaggggagcagcctgtcgagatccccgcagacgctggacacgacccgagacagcagcgatgtcaccatgttcgacaaggtggccgccgacgtgaacaaggggcacatcgacctcaacttccaccctgcagcccctgccgtccgtggcgctggcgaccagggacagaatggcgcgcagcagccccgggcggtgagcatgatgggcctcctggaagtggcgagccggccccttgataactacatgaagcagaacggcctgacgagcctggcgggggagcaaggaggtggcagctccagcacggccacggtcccgccggctccagtggagagtgaggaccggacgtccgatgagggccgtgtcgcgtcagcagagcgggaagcagacgccatggccatcgacgaggccggcgagaaccagcaggacaagcctgccgactctgccgctgccgctgctacttgacggcgtgcgtctgttgtgaatgttgggtgttgtcagcgtgctttgatgtgcgtatcttatcggctcctcttggtttttttcttcttttctttcaggaatagctggtgagtttttgatgtgaaagttctaaactaaatttctgtagggtttcaaggtgttgctcctcctggaggctggagttacttacttacgtgtacgtatgaggctgtgcaaccaacccccaggttgtatgttgtagaagttctgtaaaccacgatgctcttgtgttggttgctgctgtaatctaaaaacgcttagacctttggattcaataactcaccacatacttgatctgtactgtacatctcatctaagacatcttttggaaaacaggaatttcacaggagtgcgtgcgtctgttgtgaatgtgattgatgggtgttgtcagcgtgctttaatggtttcaaggtgttgctcctcctggaggctggagttacttacttacgtgtacgtatgaggctgtgcaaccaatccccaggttgtatgttgtaaaagttctgtaaaccccgatgctcttgtgttggttgctgctgtaatctaaaaacgcttagacctgtggattcaataactccccacaaacttgttttgtactgtacatctcatctaagacttttttggaaaacaggaatttcccaggagtcccggacggactcagtgc

SEQ ID NO: 601 - DNA, 691 bp, Zea mays
  Clone ID: TF_ZmC403009_1
aattcggcacgaggagccagctagtcagtctccgccaagcagggaccgcgtcgcatcaaagccgctgcccgcaacagggacaggcaggccagcgcgcgctcgaaaggggagccgtcgttctacacgaagacgaggaggaggagccctgcagggcgtagctagctatggagttcgcgagctcttcgagtaggttttccagggaggaggacgaggaggaagagcaggaggaagaggaggaggaggaggaggcgtctccgcgcgagatccccttcatgacagcggcagcgacagccgacaccggagccgccgcctcctcgtcctcgccttccgcggcggcctcatcgggtcctgctgctgccccccgctcgagcgacggcgccggggcgtccgggagcggcggcggcgggagcgacgacgtgcaggtgatcgagaaggagcacatgttcgacaaggtggtgacgcccagcgacgtggggaagctcaaccggctggtgatcccgaagcagcacgcggagaagtacttcccgctggacgcggcggccaacgagaagggccagctgctcagcttcgaggaccgcgccggtaagctctggcgcttccgctactcctactggaacagcagccagagctacgtcatgaccaagggctggagccgcttcgtcaaggagaagcgcctcgacgccggcgacac

SEQ ID NO: 602 - DNA, 1145 bp, Zea mays
  Clone ID: TF_ZmC2719_1
cccacgcgtccgctgctgtttatgctcctgcaacaatgaatatgctccaaactcctccatttcatagcaacagccatgaaaaagagtcaggtgcagttttttcaaatagctttaacatggccccatcagtgacacctacctccccttttcaacttatgtctccaagctcaaccaactacacttccactcaaatcttcgaggaaaccaacaatttagaggacacttcaagagtctttggaggtggggataacgaaagcaacaacagtgaggaaccggatcccaagccggctgtggagatggaagacctaaaccaaggcaatgatcatacttcgaataaaacagctaactgtcaagattaccgtatggtcctgcgcaaggacttgacaaacagtgatgttggaaacattggaagaatcgtgctgccaaagaaagatgcagagcctaaccttccaatcttggaagataaggatggcctgatactggaaatggacgattttgaactcccggttgtatggaatttcaagtacaggtactggcctaataacaagagtaggatgtatatattggaaagtactggtgaatttgttaagaggcatgggcttcaagctaaggacatcctcatcatttacaggaacaagaaatctggcagatatgttgcccgtgcggtgaaggctgaggacatagcgccgccagaatgcgagtgcgtcgaggcaggaaaccctagagaagagtgcggcttctccgtcagtccttcgatcaataagaagatcatcacgtagatggctggagcatcagaaatgtatggtgtaggctgtttgccgcgcaggagcacaccgagaatcggcggttgctgggagccaagcaactgtttcgatcgaggttgtgtcgtcaaagctgaattcccacccaacctgcgtaggcctgtactatactgtttcccttgtttttgtcggccgtttcgtgtagttcgagataaatgatgagtttgcttttgtacctgtatatatttcgtctttggataattcggtgacaaacaagtcaaggtcgttatataccgtctttttgaataattattacgattataagaagtttatttatttattttagatcggtagctaatgccaaattgacaggtccttccccga

SEQ ID NO: 603 - DNA, 874 bp, Zea mays
  Clone ID: TF_ZmC1903_4
cctcgaggccggccggggaagcccttccactttgattcctcctgtctctctagccttctccatgctaatagccagatcaaacgcatcaagacctcatgttgtgtagtaccagcagggggggaaatattaatactacgtcgcgtagacgctagctagctccgtcgtcgtcccaaaagtcctcctgctcttgggctataaatgcctggccaagacacctgcatggttctctacgcgacacacacacaccatcactgctgctatactctactccccaccaccgccgccacccaagagctttcctcgctgcacaagaaatggccacgaaccatctctcccaagggcagcacccgcaggcctggccctggggcgtggccatgtacaccaacctacactaccaccaccagcagcaccaccactacgagaaggagcacctgttcgagaagccgctgacgccgagcgacgtgggcaagctcaacaggctggtgatccccaagcagcacgccgagaggtacttccctctaggcaagcggctccggcgacaggcctcatcctgcgcttcgaggacgacgacgacgacgaggctgccgccgccaacaagccgtggcggttccgctactcgtactggaccagcagccagagctacgtgctcaccaagggctggagccgctacgtcaaggagaagcagcttgacgccggcgacgtcgtgcgcttccagaggatgcgtggtttcggcatgcccgaccgcctgttcatcagccacagccgccgcggcgagactactgctactgctgcaacaacagtgccccccgctgctgctgccgtgcgcgtagtagtggcacctgcacagagcgctggcgcagaccaccagcagcag

SEQ ID NO: 604 - DNA, 870 bp, Zea mays
  Clone ID: TF_ZmC10115_12
cacttactctcggcaacggatatctcggctctcgcatcgatgaagaacgtagcgaaatgcgatacctggtgtgaattgcagaatcccgcgaaccatcgagtctttgaacgcaagttgcgcccgaggccactcggccgagggcacgccaccctattcctgactctccactcctcccctctcccctcctcttctcttctctccactgcccaacttttgctatagacaagaaagaacctaagctaggtagctttcctccagagcagagcaatggccatgcatcctcttgcccaggggcacccgcaagcctggccatggggggtagccatgtacacgaacatacactaccaccaccagtacgagagagagcacctgttcgagaaatccttgacgcccagtgacgtgggcaagctcaacaggctggtgatccccaagcagcacgcggagaggtacttccccctcaacggcggagactcccccggtgacaaggacctgctcctgtctttcgaggacgaggccggcaagccgtggcggttccggtactcgtactggacgagcagccagagctacgttctcaccaagggctggagcaggtacgtcaaggagaagcagcttgacgccggagacatcgtgcacttcgagagggtgcgcggccttggcacaggcgaccggctcttcatccactgcaggcgccgtggcgagagcgcgccgccaccacctgtccgcgtacctccgcccgctctgaacgccggggagcagcagccttggagcccgatgtgctatagcacatcaggatcataccctaccagccctgccaactcccatgcctatcgccgctccgtggagcaagatcacagcgagatgctgcatgca

SEQ ID NO: 605 - DNA, 441 bp, Zea mays
  Clone ID: TF_LIB3239-009-P1-N1-E9
agccgcgcgcagcccacgccggcctgggcgcgcgtgctgctgttcgacaaggcggtcacgcccagcgacgtcggcaagctcaaccgcctcgtggtccccaagcagcacgccgagaagcacttcccgctgaagcgcgcgccgccgtcggtggaggcgcaggcgcccaccaccgccaagggcgtgctcctcaacttcgaggacggggagggcaaggtgtggcggttccgctactcctactggaacagcagccagagctacgtgctcaccaagggctggagccgcttcgtcagggagaagggcctccgagccggggacaccatcgtcttctcccactccacgtacggctcggagaagcagctcttcatcgactgcaagaagaccaagacgacgacgcccgccaccgacggggtaccggtaccattaccagcaccagcggagaaa

SEQ ID NO: 606 - DNA, 716 bp, Zea mays
  Clone ID: TF_16927321
ttttttttttttttttttcgaaaaacatgactaattaagattcaacaaggcatgcacgccacctatggtgtaataaggtccctgatcagtagatcaccatcgttcatcgtctctctgcgcactctacgccgccgctgctactaggtgtcgccgtcgacatactccacttcggcgggagcaggtgccggtgccggtgcatcgtcgccgctgcactcaacattgaacccgaagagcctgaagctcctcgcccccgagggtgccactgccacctcgatgtcatggccggcgatggtggcggacgccaccgttgcacccccattattcatggccgcggttccgataactatcggcctcggccacgccggcacggtggcagcgtcgccgaagctgatatcgacgtcgcggcgccggcgctggcagtggcggtactcgatgaagtatcggccgccgccgctgcgggagaaggtgacggtgtcccccgcggcaagtcgtgcggcgcggacgaagcggctccaccccttggtcatgacatagctctggctgctcccccagtaggagtagcggaactgccacagcgccccgccgcggtcctggaagcacagctgcgtcgacccggcgccggccgccgggaagaaccgctccgcgtgctgctttggcaccaccagccggttgagcttgcctacgtcgctcggggtcagcaccttgtcgaacatgtg

SEQ ID NO: 607 - DNA, 822 bp, Zea mays
  unsure (1)..(822): unsure at all n locations
  Clone ID: TF_LIB4828-034-A1-N1-A10
ccggccggactaatcctcccccttcatcccgtgtcacaaagccacaaagaagtttagcaggtcctccatggcagcctctctgccactgtcagctgccatcgttggagccgaagagtcggttgacaaggaggtcttggagatggagtacctctttgagaagtttttgatgccaagtgacttgtgcagcaatactgaatggcttgggatcccagaagaacatgttaggaaatttggcatgatgttggaggacagggacggttactccgtcattttctttcaggacggtgtggtgcctgggaagttgtggtgctttaggtactggaaaagcaatggagtccatggcttgaccaagggctggaggtgctttgttagggagaagggcctcaaagccggagacaccatctccttcttccgaggatctgcatgtggccgtctcttcatctgctgcaggttaggcacccatgcaacctttgcgtcatcctccaccttgcatcatggcttttctatgcccccaccacctgcccgcccgctggtgggtcttcaatctggcatgttggcaagagatgtcccatcattaggacaagctaggttgcatgatggaaatcaagatggaggcggtgcaccatcaagacatgttccatcctcaggacgacgtgtggaggcacagctatcacgtgtgtcgtcgcgccgtcaacgccgtactatgaagcactcgataccagagcccacgatagagacgccaccaattncttgagtcgatgttcctcatagccgcaccacccggcagtggagtgcttacggctttttggcgtcaacatctat

SEQ ID NO: 608 - DNA, 1538 bp, Zea mays
  unsure (1)..(1538): unsure at all n locations
  Clone ID: TF_2437851
tcgaccagctcctcgacttcgcgtcgctttccatgccgtgggactccgagccgttcccgggggttagcatgatgctagagaacgccatgtcggcgccgccgcagccggtgggcgacggcatgagtgaagagaaagccgtgccggaagggaccacggggggagaggaggcctgcatggatgcgtcggagggggaggagctgccgcggttcttcatggagtggctcacgagcaaccgcgaaaacatctcggccgaggatctccgcgggatccgcctccgccgctccaccatcgaggccgccgccgcccggctcggcggcgggcgccagggcaccatgcagctgctcaagctcatcctcacctgggtgcagaaccaccacctccagaggaagcgcccgcgcgacgtgatggaggaggaggcgggcctgcacgtccagctccccagcccggtcgccaacccaccaggatacgagttccccgccggcggacaggacatggccgcgggcggcggcacatcttggatgccccaccagcaggcattcacgccgcctgctgcgtacggcggcgacgcggtgtacccgagcgcggcaggccaacagtactctttccaccagggccccagcacgagcagcgtggtcgtgaacagccaaccgttctccccgccgcctgtgggcgacatgcacggcgcgaacatggcctggccgcagcagtacgtgccgttcccaccgcctggggcttccacgggctcttaccctatgccgcagccgttctcccccggattcggcgggcagtacgccggcgccggcgctggccacctctcagtggccccccagcgcatggcaggcgtggaggcctcggcgaccaaggaggcccgcaagaagcgcatggcgagacagcggcgcctgtcctgcctgcagcagcagcgcagccagcagctgagcctgggccagatccagacctccgtccacctgcaggagccgtcccctcggtccacgcactccggcccggtcacgccgtcagcaggcggctggggattctggtcgccgagcagccagcagcaggtccagaacccgctctccaagtccaattcctcaagggcgccgccttcctcgctggaagcggcggcggcggctccacagacaaagcccgcgcctgctggtgctcggcaggacgacattcaccaccgcctcgcagcggcttcagataagcggcagggcgccaaggcggacaagaacctgcggttcctgctgcagaaggtgctgaagcagagcgacgtcgggagcctcggccgcatcgtgctccccaaagtgagacatgttaggatagataagtctctggaacagattagtctgtaacaacttgtatgcgtccattcctgattacatgccgaagcttactnagaaggttagtttatgtaaggatgttacttccgataagctttggcaagtatatctgatggcactcgttctgtaaactgaaatagcgcgtttcgtcgcctatattaacatgcaagcagcgcacggtaaaggtgctctgtttcc

SEQ ID NO: 609 - DNA, 1249 bp, Zea mays
  Clone ID: TF_ZmC9208_1
gcacgagcttccttccttctccgctcgtcgtcgttctaccggcatggccggcattaccaagcgccgcacctccccggcctccacctcctcttcgtccggcgacgtcttgccgcagcgggtcacccggaagcgtcggtccgcccgccgcgggccccggagcaccgcccgtaggccgtcggcgcctccacctatgaatgaactggacttgaatacagctgctcttgatccggatcattatgctacaggattgagagttcttcttcagaaggagctccgaaatagcgatgtaagccagcttgggagaattgttctcccaaagaaggaggcggagtcttacctccctattctgatggcaaaggatggaaagagtttatgcatgcatgacttgctaaattcacaactgtggaccttcaagtatagatattggttcaacaacaaaagcaggatgtatgtgcttgaaaataccggagattatgtaaaagctcatgaccttcagcaaggagacttcatcgtgatctacaaggacgacgagaacaaccgctttgtcataggagcaaagaaggcaggagatgagcagaccgccactgtacctcaagtccatgaacacatgcacatctctgccgcactgccagctccacaagcgttccatgactatgcaggccccgtcgcagcagaagctggtatgctcgcgatcgtgccacagggtgacgagatattcgacggcatactgaactccctgccggagataccagtggcgaacgtgaggtactccgacttcttcgacccgttcggtgactccatggacatggcaaatccgctgagctcctccaataacccctcggtcaacctggctacgcacttccatgacgagaggatcgggagctgctcgtttccctacccaaaatccgggcctcagatgtgagatcctggcagaaaaactgccgcggtcaaaaccatcatcccctgcgtggaactcagagatcccctggttgacgccattgctgtacatccaaataaatggcgtcctcattttgtatgttcagtagtatatgattgggtacgcgtgttgtttatgtgtaaaagggtaactctgcaaaactgaactgagcgttacatcagatgcaacgctgtgacgactgacgaggaggcaggctctggtgtttcctgtcccaaaaaaaaaaaaaataaaaaaagaaaaaaaaaaaaaaaaaaaaaaaaaaaaaaaaaaaaaaaaaaaaaaaaaaaaaaa

SEQ ID NO: 610 - DNA, 1316 bp, Zea mays
  Clone ID: TF_ZmC9208_2
cattgggtacctcgaggccggccgggacctcgcgcgcgcgcggttggccgcgcctgcgcgccctcggcatcgcccccgacggggggcgttggcgttgcctcccccactttgcacccatttcagagcccgcccgacacttgtcaccgcgcgccgcacctccccggcctccacctcctcttcgtccggcgacgtcttgccgcagcgggtcacccggaagcgtcggtccgcccgccgcgggccccggagcaccgcccgtaggccgtcggcgcctccacctatgaatgaactggacttgaatacagctgctcttgatccggatcattatgctacaggattgagagttcttcttcagaaggagctccgaaatagcgatgtaagccagcttgggagaattgttctcccaaagaaggaggcggagtcttacctccctattctgatggcaaaggatggaaagagtttatgcatgcatgacttgctaaattcacaactgtggaccttcaagtatagatattggttcaacaacaaaagcaggatgtatgtgcttgaaaataccggagattatgtaaaagctcatgaccttcagcaaggagacttcatcgtgatctacaaggacgacgagaacaaccgctttgtcataggagcaaagaaggcaggagatgagcagaccgccactgtacctcaagtccatgaacacatgcacatctctgccgcactgccagctccacaagcgttccatgactatgcaggccccgtcgcagcagaagctggtatgctcgcgatcgtgccacagggtgacgagatattcgacggcatactgaactccctgccggagataccagtggcgaacgtgaggtactccgacttcttcgacccgttcggtgactccatggacatggcaaatccgctgagctcctccaataacccctcggtcaacctggctacgcacttccatgacgagaggatcgggagctgctcgtttccctacccaaaatccgggcctcagatgtgagatcctggcagaaaaactgccgcggtcaaaaccatcatcccctgcgtggaactcagagatcccctggttgacgccattgctgtacatccaaataaatggcgtcctcattttgtatgttcagtagtatatgattgggtacgcgtgttgtttatgtgtaaaagggtaactctgcaaaactgaactgagcgttacatcagatgcaacgctgtgacgactgacgaggaggcaggctctggtgtttcctgtcctgcaccctgtgaatgtgtgtgcaggtacataaacgaaagacatcctgtgcattagcatt

SEQ ID NO: 611 - DNA, 836 bp, Zea mays
  unsure (1)..(836): unsure at all n locations
  Clone ID: TF_LIB4742-120-A1-K1-H3
ctcgaagccggccggggtccgttcccctacctaccaattctttctgtgtagtgcctttggtctagatctatggctttctcggcaagaacgatttcaagggagatggaggtgcaaatggggaaggccccaccatgtttgaatcccttcctaatggtaaaccctcttttgccccctcagcatgtctctccctggtcatccaagtttgtaccagttttccaatttggcatgaccaatggtcatggagctttagatctatgtgaagaaagcaaaagggccaggaaggttgttcacttggagtacttgttcagcaaggttttaactccaagcgatgttggtaaactaaatcgtctactgataccaaggcaatgtgcagaggggttctttcctatgatttcagaggtaaagagtggtggagatgacattttcctcaattttgaggacacctccacagggttagtctggcgcttccgcttttgcctctggaataatagcaagacctatgtcctgaccaagggttggtctgtctttatcaaggagaagaatctcaagaaaggtgatattttatccttttatcgtgatgccagtaagtcgataaggacaaaccacatatttattcatatcaagccccataccggtaccatgcctctgccacatcatgtgccaagtccggtcttctctccatctggcatggtaattgatgatcaggtccacaatagccttgacatcggtaaaagccatggaattgctccattctggaagcctttgtcctttggatctngggagttaagccctcaactaatccgacgccacaacaaacaaatttcctgaatcgacgt

SEQ ID NO: 612 - DNA, 2678 bp, Zea mays
  Clone ID: TF_ZmC2776_1
ccggggtctcctcagtaactgcacccacctccacacctacacccgagaggcggcggcggcagacacagacaccgtctctctcctccctttgtcgtcgtgtctctctgcatggaagcctccgccggctcgtcgccaccgcactcccaagagaacccgccggagcacggtggcgacatgggaggggcccccgcggaggagatcgaaggggaggcggcggatgacttcatgttcgctgaagacacgttcccctccctcccggacttcccttgcctttcgtcgccgtccagctccaccttctcgtccaactcctcgtcaaactcctccagcgcctacaccaacacggcaggaagagccggcggcgagccctccgagcctgcttcggccggagaagggtttgatgcgctcgatgacatcgaccagctcctcgacttcgcgtcgctttccatgccgtgggactccgagccgttcccgggggttagcatgatgctagagaacgccatgtcggcgccgccgcagccggtgggcgacggcatgagtgaagagaaagccgtgccggaagggaccacagggggagaggaggcctgcatggatgcgtcggagggggaggagctgccgcggttcttcatggagtggctcacgagcaaccgcgaaaacatctcggccgaggatctccgcgggatccgcctccgccgctccaccatcgaggccgccgccgcccggctcggcggcgggcgccagggcaccatgcagctgctcaagctcatcctcacctgggtgcagaaccaccacctccagaggaagcgcccgcgcgacgtgatggaggaggaggcgggcctgcacgtccagctccccagcccggtcgccaacccaccaggatacgagttccccgccggcggacaggacatggccgcgggcggcggcacatcttggatgccccaccagcaggcattcacgccgcctgctgcgtacggcggcgacgcggtgtacccgagcgcggcaggccaacagtactctttccaccagggccccagcacgagcagcgtggtcgtgaacagccaaccgttctccccgccgcctgtgggcgacatgcacggcgcgaacatggcctggccgcagcagtacgtgccgttcccaccgcctggggcttccacgggctcttaccctatgccgcagccgttctcccccggattcggcgggcagtacgccggcgccggcgctggccacctctcagtggccccccagcgcatggcaggcgtggaggcctcggcgaccaaggaggcccgcaagaagcgcatggcgagacagcggcgcctgtcctgcctgcagcagcagcgcagccagcagctgagcctgggccagatccagacctccgtccacctgcaggagccgtcccctcggtccacgcactccggcccggtcacgccgtcagcaggcggctggggattctggtcgccgagcagccagcagcaggtccagaacccgctctccaagtccaattcctcaagggcgccgccttcctcgctggaagcggcggcggcggctccacagacaaagcccgcgcctgctggtgctcggcaggacgacattcaccaccgcctcgcagcggcttcagataagcggcagggcgccaaggcggacaagaacctgcggttcctgctgcagaaggtgctgaagcagagcgacgtcgggagcctcggccgcatcgtgctccccaaaaaggaagcggaggttcacctgccggagctgaagacgagggatggcatctccatccccatggaggacatcggaacgtcgcgcgtgtggaacatgcggtacaggttttggcccaacaacaagagcagaatgtatctgctggagaacacaggggaatttgttcgttccaacgagcttcaggagggggatttcatagtgatctactccgatgtcaagtcgggcaaatatctgatacggggcgtgaaggtaaggcccccgccggcgcaagagcaaggcagtggttccagcgggggaggcaagcacaggcccctctgtccagcaggtccagggagagccgcagccgccggtgctcctgaagacgccgtcgtcgacggggtcagcggcgcctgcaaggggaggtctccggaaggcgtgcggcgggttcggcagcagggagccggcgccatgagccagatggcggtgagcatctgaaagagcagcagactccgccatatattgatcgatcgaccaatcgatcgttagttctccaagttactattagctagctatagctcgaaacagctgaactgatgatgacgatggtaacctccgtcgtgtgtgctaagcatgtagcgtgctaggagatgatatattaaatataatcgagtagtagagccacccgctgtgtgacgctaaatttgtgtgcatttggtttggtttgtgagttgggcccgtgcgtggctgtgtcatgtcgtggttaattagctatactagtcctgtctgtacatgcatggacatccctgtttcggcccttgggtggggggggcccttcggctaccaaggccagctgcggcctgccgcaaaagctagacccttttcccccgcttaaaaaaaaaaaaaaaaaaaaaaaaaaaaaaaaaagggcggccgccgactagtgagctcgtcgacccgggaattaattccggaccggtacctgcaggcgg

SEQ ID NO: 613 - DNA, 371 bp, Zea mays
  Clone ID: TF_LIB3069-031-Q1-K1-A4
cccacgcgtacgagtcaagttaccgtttcaaaggatgtttcttctagggaagcttcaaaggacgtcacatggatgggagcttcatggaaatgccaacgaagtctgaagcactacaaatctttctgccgtacaggaattactatctcggtgcatagctttgtatacattatgggtgaagagatgaacagacttattgcttatgtggaagatctctatgaggatacaaattcctgcaacatggtcaaggtacaatggtttggcaaagctgatgaagttggtgttctgttgcccatggattttgatgacagggagattttcttttctctgggacggcaagatctcaatgtaatatgtattgacggattggctgc

SEQ ID NO: 614 - DNA, 2306 bp, Zea mays
  Clone ID: TF_ZmC5665_1
tcttggtgtttttttatagccaaactctggaaggtcggcaaaggcccaactgtcggcttcgccccgttgacatcaacctgtcagtgatgagtttgggctgttcgcctgtggctgcctttgttccgtctgtgtctgtctatgatgggacgggacacctagggttcggataccggcaccggctcaactgacgacggactatcgccagtggcgatcaccctccctgtcccctgaccgcggcgtcccctgctcgcgccgcaccggtggcgacaaggcaccccttgcctgctcccctagacgcgagcgagcgagccaacacctgtcggcacaagaatggatgggaatgctgagacgatccaattctcatggggcaagcgtcgagggaaaggtggtgctaagatggatacacagttctttgggtccttcacattggacaatgtgaagtattcactgtttgactgtgtctatctatttaagcatggtgatcctgaaccgtacattggaaaaatagtgaagatctgggagaaagataatgataaaaaagtaaaaattctttggtttttccaccctgatgaggttcagaaatatttaagtggccctgtgatgggaaaggagatttttcttgcctgtggtgaaggtgctgggcttgcagatatcaacccgctggaagctgtcgctggaaaatgcactgttatatgtacttcaaaggataagaggaatcgtcaaccatcccctcaggaactacaaattgctgattatatcttctatagggtctttgatgttaaaagtctaacactttctgatcagttaccagataaaattgctgcatttacagttgatcttcttctgaatccaaaagatgagctagtcatacctgcaaatgttctggtgaatccaaatgtggatgagggtatggttgccacagttcctacacccccttcagcagttaaattggaggatcgaagtcaggctgctgcacttccccttacgcagacaggccaggtggatgaaaatctgcctgccacagttccccttccccaatcagaggtcaaggaggaacagaaaccagtcattgccattcccatttcccagactgtggtcaagaaagaggataagaaatcactttctgacattcccctttcccattcagcagtcaaggaggatgagacaccagttgcttcaattggccctccacagtctgcagttatggagaacattcccaaacatacacagttacaggatgctcatgctggggagaggccaccaaaaaagttgaaattatcccaagaaactacagagcaggacatagatccaacgaatactgaacaaagacctttggagctacagccaaagaatattgacagaagcaaatggtttaacattgaatggaatgacagactaaagatggctgatgataaggggacacttgtctatattcaaaatctcgatattcggtttggacctgctgacatagaggagttagttcgtaaagcattacagctaaattgtactgcgaagcccattaaccaccccacatatgatgatccaaacaatggcaaagcatatgctatattcagaactaaagatgctgctgatgctgccatttcaaaaatcaattctggtttggttgttggtggaaggcccctgtactgcagcaaagggttacttgaggttccaaaaccttcagcgaatcttgttgggcacctctcctcatatgttaagattggtcaaaagcagcgcgacgagcagaagaaggctgtagcaacctcgcattgttcccagcccaacacgatcgagtacgacttggccttggactggatgcttcttcgggaaaagcaagaccagagcttcagagtacttcacaagaagcacagagaagccaggaaagggttcgcaagcctggtcggcaaaggatccaaggcagagtagcaggccggttgcccggttccaacctttcagagcttggcgcggtatgactgccgactggcaggaagagagggtcgtgcgcgcagaggttctctttttgcagtagccatcgagtagttcgttgggtcaattcgtgttaatttctgttaggaaaggaaaaatgtgttaataagtgttaggatagaaaatgcacgtcagctttgacaggtcagagcagcctaggtaggcatcaatatgttgctgcgactgcgatgttttaatttgacttggaacctcttatgttgggcgacaagtttgccctatgggggagagagacactgtttcgtctctgttaccatctcatctgatttcactttcagtcaatctcgtccatatcgttctac

SEQ ID NO: 615 - DNA, 2513 bp, Zea mays
  unsure (1)..(2513): unsure at all n locations
  Clone ID: TF_ZmC2907_1
cggncgcgtgggctcaaaattagtattttagtaatgttcttaaggttagtatgctactaggaaaaacctacgccggcccattggctcgggaccctccgggagacacgaagtccaacccaaatctcaatatcccaaccctccgatccccatttccatccactccgacaccaatcctccgctccgaccaccgccggagaaatggggcggcgccgccggttcgcgcagctggacgatgacgacgacgacgacgaagacgtgcccatcaatttcaagccctcgggtggcgcctcctcctcggacgccaaacccaggaagccccagccgccgccgcagcagcgccgcggagtctccgatgacgacgacgaggacgtggaggaagtggaacttgaggaggaggaggacgacgagaaggatctcgaggcaatgcgacgggccgaggaggaggagcgccgcgagcaggaggccgagacgaagactcgccgccgccggggacggcccaagcgccgccgcgacccggggagcgaggatgaggagcccgaggagctagagctgcaaacggaggatccccgtgaggaggagatcacggaggcggtgcccgtagctgtaggggacccggtcaagatcactggcaaggggaagaagcagaagaagcactatgcttccttcgagtacgagggcaacagcttcgagctggaggaccccgtgcttctcacgcctgaggacagcaatcagaagccctatgtcgccatcctcaaggatataacagaaactgatgggagcctatatgtaactggccaatggttttatagaccagaagaggctgacaaaaaggagggtggattctgggtagcacgagatacacgagagctattttacagttttcatactgatgatgtgcctgcagaatcagttatgcacaaatgtgtggtccatttcattcctcagcaaaaacagattcccagtcgaaagcagcatccgggatttattgtccagaaggtctatgatgcagttgagaagaaactgtggaacctaacagacaaggactatgaggataacaagcagcaagagattgatcttctggttaagaaaacaatagaccgtattgggcagcttcctgatctcgaacctgaagagacacctcttgagaacaattatttgtcaaataaacgaggcctgcgtaagaaacctgttaaccctatagatgtaacaagagaacctccagttggcaaatccgagcagtttgcaaaagcagagacacctggaagtgataagatacggaattatgatacccttgttaagtataaagtacttactggacattctcatcgtgataggtggctcgataaattgatagaaagtattccgcttgcatcaaaggagaatgctggaacatctgctgatgctaattctacagccaaaagttcaatcagtggttcacctgcaaaggatgttggttctgctgaaaatgaaaaatcatatggacttgatgttgttgttgagataatgactgcattagaaagatctgcatatgaagctcttggaacagattttgggaaatataaccagaaactgcgacaactacagttcaacatcaagaatatctctaaacttcgcaggaggctgatggacaaggagcttgatcctccagttcttttaaccatgtcccccgatgaattaaaggctggcttgacttcagcagagaaaacatctgaaccagaagaatcaaggaaattgcagatgactgatacaagatgtcaaagatgcagcgaaaagaaagttggcatatctgatattatccatgcaggtcatggagaccgctatcagttggaatgcacttcctgtggctacacatggttttcgtccagagatgccatcacaacacttacagaggatgccccaagcactgctgggaatgtgggcactgcccccttggcaacagcaaagttcgaggtcgttgagaagaagctcacgagcccacgggaccaatccggcaagcctgcttctgatgctctgcagaagagcactgcagcttacatgccaactatggagaggcagaagtcgtttgctaagaccaagctgttggatgaaccctcccccgcaccaaaacaggggtagagccgtattcatgctgcagattggtctttgcaggatttcgagatacatacttgtacataggggtgatccaccccccgcaccaaaacaggggatgaaccctcccctgcaccaaaacaggggcccttttcttgacatgctaccacctcgtactggttgtcttcgtttcggtagtttgttttgcagtcatgcatagccagttacctctcgttttattatttgcttgtttgttgtagcactcatcagttgacatgaggacgtaggtttgtggcgtttaccagattgattttgctttctatgtgctataaattttgtcttgcaaggatcacttcccagttatgctgggcgacatcatgaccgtctgttgcaaacttaaaaccccttctttgagtttttgagtt

SEQ ID NO: 616 - DNA, 634 bp, Zea mays
  Clone ID: TF_ZmC35813_2
accagtcttaatagtgtaatggtctactctatataggaataccctgaggtggtaggttcgactcctatcaactatgttcaactattcccttttttaaaaaaaaaaaaaaaaaaaaaaaaaaaaaaaaaaaaaaaaaaaaaaaaaaaaaaaaaaaaaaaaaaaaaaaaaaaaaaaaaaaaaaaaaccttagggcccccggccccggtttccgcccccccgccttcgccgtcgggggggggccccatggggggaaagtcgcgaccgcccaaggggatcctcgagtcctataccatcaagggttcggaaagagtcatcaagcctggcgattgggggctaatgagggcatctgatgcttcaaagccaccctatgtggaaagagttgaggaaattgaagaagaaggatctcgaggcaccaatgtgaaagtacgagtgggggggtattatcgaccaaaggagtccataggtggtcgggggccatttcatggttccaaggaggttttcctctctgaccattatgatgtacaaagggttgacaccattgaggggaaatgaaatgtccacagtttccgaagctatacaaagcttgattttgccaatggtgaggatttcttatgccgctttgagaataaatcac

SEQ ID NO: 617 - DNA, 1856 bp, Zea mays
  unsure (1)..(1856): unsure at all n locations
  Clone ID: TF_ZmC3042_6
gcagttccacggcgccaaggagctattcctctccgaccatttcgacctgcagagcgcccacacaattgaggggaagtgtgttgtccactctttcaagaactataccaggcttgacaatgttgggcctgaggacttcttctgccgattcgagtacaaggcggccaccggttcgttcacccctgaccgcgtggcagtgtatgaagctcctcaacccttccattgctggctgtcccttttactgtgcatgcatttttagcttgcttgtgatgatttcggcgcctggtttctctcaaggtattgcaaatgtgagatgccgtacaaccccgatgacctcatggtgcagtgcgatgcttgcaagcactggtacatttgttacaatgatttgcaatttacatttcactgatatttgcctttgttccccgtctattatgtgactgtacaaagcatgttttaaatctcctgatattgagtttagcggcatcatcaccgagctgctaacacagtgccaaacgcaccacccagagtcccagacctacctcttcagtccttgtccacgagttctcgctgacgctcacaccttttatctgttttcttgcccaactctgtcttgcctgcactctgccactctaactttccaatactcactctgctgcaaaacggcttctgctgcattgctgctggggaggactttgcgcccaacagcacacacgtttgtggctgcgcttggggagagtgtcgtggatgagatggccatgattcagcagggctcagtgctcctatcctagatcgaggaggagctcaagcacacatcacaggggctcaaggacactgaggtggtgggccagaaagcgccgagcagagggcaagagtcacacagccagtagtcagggcacctcgccgactggagctaggtgcttctgtgtgcagaggggggggggagccggcatcaagtggagctgttgcttcttctattggtgcgctgaggtggagagctggaattggacgatgctcgacaaggaggtactcttgtaactgcggcaggcagtagagaaggtctcagcctgctgctggcagtgttccgacgggtgttctgcgaggaacagcaagtctcaacaatgtaagcggtagcgcggtactaaatcacatcttgattagcagatttcgcgcactaaatccggctattagtgctaaaagtcaactatcccagccgctgttctgtgcagctcggcacgatagttgtagcgtccactatagctggagatttagaacttcggtacaaaggcaggaatttcacgtcagttttatctgcttcacagcccaagaggcttcgctggcccagtgcccttgtttcaagcccagtggattgtttagctggagtataagtagaagtagccgtgtaggagactccaacaattgtatcgaaatgtttaactcataatcatttaactgttatgttgtcgttctcttctgtccccttctttccgaaggctaccgtcacaatttgtatcagattcatggatcctagatctgttcccgctgctgcattaccattcaccagattccagggagcctgcggtgcgatgggcttgctcagagcttcactgagcatggtgccaagttggagtgttgcttcgtcgatttggtgcgctcccatgacgactcttatgccgccttgagcaatgataggttgattaggagaacaaccgctccgaacacgtcaacaccaagtgtgatgactgatgattgtgtctccaccttagaagctgctgccacanatctcagcacctgatgcctggaagtggaggccgctatcgatatctaaagctgaacaagttgacaaagcattggtgggactg

SEQ ID NO: 618 - DNA, 1995 bp, Zea mays
  Clone ID: TF_ZmC977_1
ggaacgaccgcacgcgttcgcggacgcgtggggtggcgccttaggcacgtagccaaacaggcctaaatcctctacatcctggtgccatggatatgagtcatatgacttgtacatataatcctgtttattctatattctatggaaaatgcttatttaacttgttaacaatgtaattatgcttatgatatttggatgatgatattgctcttgtttattaccatttttattagttatccaacttttaactcttgaaactaccaaattacccctagcccgctccctcagcttcctgctccgttggaacggacagccgcggcagtccccagcccccccgcttcctgcaccctcgctgctagggttttctcgcaatccagcccctctgtcatggccaagacgaagcaagggaagcgggatgtcgacgcctataccatcaagggcaccaacaaggtggtccgagtgggggactgcgtgctgatgcggccagcggacacggacaacccgccgtacgtggcgcgggtggagcggatttggagtcggacgggcgcggcagcgtgagggtgcgggtgcgctggtactaccgccccgaggaggccaagggcggccgacgcccgttccacggtgccaaggagctcttcctctccgaccacttcgacacgcagagcgcccacaccattgagggcaagtgcatcgttcactccttcaagagctacaccaagctcgacaacgttggtccggaggacttctactgccgatttgactacaaggccgccaccggtgcattcacccccgaccgtgtcgccgtatattgcaagtgtgagatgccgtacaacccggatgacctcatggtgcagtgtgaaggatgcaaggactggttccatccgtcttgtatgggaatgaccattgagcaagcaaaaaagatagatcattacatgtgctcggattgtgctaaagaaaatggtgcaaagagaccctcaaattcatactcagtttcaccaaactcagattctaagattgaatcaaagaggcgcaagagataaatgctgcggcagaagcacccctggcaaaggagatgcggtatttatggtgtcagctcctcattactggtgcatatttgagatgttgatgtgtacactgcgagagaagagccaagccaattgtagggcaaaacctatttgacttatcattcttctgtgtattctgcctagacattagtgtgatgagtaggtgagttccccgttgcggcgtgtgcatgatcagctgctggaggcgggatgtcgggaaatgctagaattatgctgactcttgtcgatgtaagtgtatcgtgtgtgtgtgttaacatatgcactggctggaaacgttcccatgtgtgaatggaggatgctgatgatagcttgactgttgtttcatattcagttagaaatatacggagagttgaaataatgagtttgatctcgaaaaaaaaaaaaaaaaaggggcggcctgctgtttcataattcagttccggtttgccaagcaaagacttgagataatattgagttcgatcttgaaacttgaaaaaaaaaaaaagaaaaatgtccaggttccatccgtcttgtatgggaatgaccattgagcaagccaaaaaattacatgtgctcggattgtgctaaagaaaatggtgcaaagagaccctcaaactcatacccagtttcaccaaactctgattctaagaattggtagttttgcctgcatttccactcccaaattatatcatgagcagtgcttagttttgggcggtcgattacaagtgctctttatggaagcataggtccaaatgacttctttgttcagctgtataccatctagacattggaacccttcagtgcagtgctggctcatttcattgtgaactaaagactgcatgccctcggggtgctcggctgtgtcatgtgcattgcagggtttgtggtcattgttgtggctactcttgctagggaatgtgctgaattttttctc

SEQ ID NO: 619 - DNA, 1093 bp, Zea mays
  Clone ID: TF_ZmC29757_2
ggagtgcgacgcgtgcctcggcggattccatctgcgatgcgtgcgaccgccgcttcggagggtgcgtgaaggtgattgggcgtgcccttactgctaggccgagcgcgccggtaaggtggtcgagcggcccatgccgcctgaggggaagcgcgtcgtgaggaccgccaaggaaaaactcctttccagcgacctgtgggctgcacgcatcgagagtttatggagggagcctgatgggacgttctgggcaaaggtcaggtggtacattatccctgaagagactgcagcaggaaggcagctgcataacttgagaagagagctgtatcgtaccaatgatcttgcagacattgagatggaaacaatccttagacattgttctataatgtgccccaaagactttagggatgctaacaacggaggggatgatgtattttattgtgaatatgagtatgatatacattggcataattttaagcgtttggcagatattgatgatgagccagagacaaaggaagatctcagtgacgagccctacaatgctggtgatgattataacagtgacactgatgaagattcagactatgacgaggaggaagaatccacatcatctttctctgtcagaaggaatcaatcacatgaatctgcggcgaattcaaggaaaggtagaatatatggcctgcaaaaaattgggatacaaaaaattcctgagcatgctcggtgccaccaaaagactgagctggagaaggctaaagcaaccctgttattggcaactcttcctaagtcattgccttgcagagataaagaaatggatgagatatcaatatttgtaaaggatgcaatctgcaacaaccaatgcctaggacgctgcctttatatacatggtgtacctggcactggcaagactatgagtgtacttgctgttatgaggaggctgagatctgaatttgattctggaactctgaggccatattgttctatcgaaattaatggtcttaaattagcatctccagagaatatctacaaggttgtatatgaacagctgagtgggcataagggtgggtggaaaaaggctcttcactatttaacagaacatttt

SEQ ID NO: 620 - DNA, 1056 bp, Zea mays
  Clone ID: TF_ZmC3042_4
cccacgcgtccgcgctccacggccatggtgaggatgaagcaggtaaagatttcggtaaagaaggacgtggattcgtacacaatccgcggcaccaacaaggtcgtccatgtgggcgactgcgtgctgatgcgggcgtcggactcggacaagcagccgtatgtggcgcgggtggagaagatggaggccgacggacgcggcagcgtgcgggtgcaggtgcgctggtactaccgccccgaggaatccaagggcggtcgccggcagttccacggcgccaaggagcttttcctttccgatcatttcgacctacagagcgcccacaccatcgaggggaaatgtgttgtccactctttcaagaactacaccaagcttgataatgtcgggcctgaggactacttctcccgatttgagtacaaggcggccaccggttcgttcacccctgaccgcgtggcagtgtacggagctcctcaatcctttcattgttgactttttcttctctttgcatgcgttttgagcctgcttgtgataatttgggtgtgtgtatttttctctcaaggtattgcaaatgtgagatgccatacaacccggatgacctcatggtgcagtgcgaagcttgcaaggactggttccatccatcttgcatggctatgaccattgaacaggccaaaaaactagatcactttgtttgctcagactgtttgaaagaaaatggttcaaagagactttcaaatgtatatgccacttcatcaaattcttagcccaaggctgaatcaataaggcagacgaggtgaaaactgagtgccaacatccagtggagatgtgctgcttctgtggcgaatcagtccttgcactggcgagagcagaggtgtacagtgtttgctgtggtttgttcgatgtaactagccagtgtggcatgtcatgcagttgttggtagatcagtcattgtgttgacttggtcagcttaactcaataccccccttcgttgattacattgttgctatggcggtgcggcatgatcgattactgttctattaatatatgacttttatatgttgatat

SEQ ID NO: 621 - DNA, 1799 bp, Zea mays
  unsure (1)..(1799): unsure at all n locations
  Clone ID: TF_ZmC3042_1
cggttcgtcacccctgaccgcgtggcagtgtattgcaaatgtgagatgccatacaacccggatgacctcatggtgcagtgcgaagcttgcaaggactggttccatccatcttgcatggctatgaccattgaacaggccaaaaacagatcacttgttgtagctgttgaaagaaaggtagaaccggccggaaaaaaaaaaaaaaaaaaaaaaaattaaaaaaaaaaaaaaaccggctcgatgatgatgtagagatctaaggatgtttggttcttcactttcggcggttggtactgcatatgtgaggtgccggactgcctgcattaaactgcttgcgccgtgggatggcaataaccttcctccttcgttccccatttctcctcttgctaggtttctacccctctaaatcgatcctcgctccacggccatggtgaggatgaagcaggtaaagatctcggtaaagaaggacgtggattcgtacacaatccgcggcaccaacaaggtcgtccatgtgggcgactgcgtgctgatgcgggcgtcggactcggacaagcagccgtatgtggcgcgggtggagaagatggaggccgacggacgcggcagcgtgcgggtgcaggtgcgctggtactaccgccccgaggaatccaagggcggtcgccggcagttccacggcgccaaggagcttttcctttccgatcatttcgacctacagagcgcccacaccatcgaggggaaatgtgttgtccactctttcaagaactacaccaagcttgataatgtcgggcctgaggactacttctcccgatttgagtacaaggcggccaccggttcgttcacccctgaccgcgtggcagtgtattgcaaatgtgagatgccatacaacccggatgacctcatggtgcagtgcgaagcttgcaaggactggttccatccatcttgcatggctatgaccattgaacaggccaaaaaactagatcactttgtttgctcagactgtttgaaagaaaatggttcaaagagactttcaaatgtatatgccacttcatcaaattcttagcccaaggctgaatcaataaggcagacgaggtgaaaactgagtgccaacatccaggggagatgtgctgcttctgtggcgaatcagcccttgcactggcgagagcagaggtgtacagtgtttgctgtggtttgttcgatgtaactagccagtgtggcatgtcatgcagttgttggtagatcagtcattgtgttgacttggtcagcttaactcaatacccccttcgttgattactttgttgctatggcggtgcggcatgatcgattactgttctattaacatatgacttttatatgttgatataattaaattattttgatactaaaaaaaaaaaaaaaactgaaccaaaaaggcagaggaggtaacaaactgtgagtggtaacatccatatgggtaaggggagatgtgctgcttctgtggtgaatcagcccttgccctttgctgtggtgagagcagaggtgtacagtgtactagaccagtgtttgctgttaggggaacgggttttgttcgatgtgtagaccgtgtggcatggcatgcagttgttggtagaggtcaaaagaacagtcgttgtgttcacttggtcagcttagcgccttagcccttgttaatgtgttaatgcactgtgttaactcagcgagccccccttgtggctgataatgcaagtcatgcagttgttgatacaaaaaaaaaaaaaaaaaaaaaaaaaaaaaaaaaaaaaaaaaaaaaaaaaaaaaangaanaacgatat

SEQ ID NO: 622 - DNA, 3219 bp, Zea mays
  Clone ID: TF_ZmC29605_1
ggccgcgggaattcgattttagatctagagcagcagcagctaccgcatcccttgccatggcgccaagctccccgtcatccgctaggcccacgcgcgcctccggccgggagcgctccgccatggccgaggagatccaccagaaccaggaggaggaggaggaggttgtggctgcgtccaccgccaagcgcagacgcaaggcggcgtcttccgggaagaagcccaagccgacgcccaagcaggccaaaccggccgtggcggggatgaagaagaagggggagaccgagaagacggagcccgttgtggacgacgtgtgcgccgaggagcccgacgaggaggagttggccatgggcgaggaggaggcggaggccgaggagcaggccatgcaggaggtggtggccgcggtcgcggccgggtcgcccggtaagaagagggtggggagaaggagcgccgccgcctcgggcgaccacgtgcccgagttcatcggcagccccgttgctgcggccgaggcgcacagcaactggcccaagcgctacgagcgcagcactgccgcaaataaaccggaggaggacgatgagctcaaggccaggtgccactaccggagcgctaaggtggacaacattgtctactgcctcggggatgacgtttatgtcaaggctggagaaaatgaggctgattacattggtcgcattactgaattttttgagggcactgatcgatgccactattttacttgccgttggtttttccgtgcagaggacacggtcatcaattcgttggtgtcgattaatgttgatggccacaagcatgaccctagacgtgtttttctttccgaggaaaagaatgacaatgtgcttgattgcatcatctccaaggtcaagatagtccatgttgatccaaatatggatccaaaagctaaggcccaactgatagaacattgtgacctatactatgacatgtcttactctgttgcatattctacatttgctaatatctcatcagaaaatgggcagtcaggcagtgaaaccgcttcgggtatttcttctgatgatgcgggtttggagacgtcatctaatatgccagagaggacagcaacccttcttgacttgtattcgggctgtgggggcatgtccactggtctttgcttgggtgctgctctttctggcctgaaacttgaaactcgatgggctgttgatcttaacagttttgcgtgccaaagtttaaaatacaatcatccacagactgaggtgcgaaatgagaaagctgatgagtttcttgctctccttaaggaatgggcagtcttatgtgaaaaatatgttcatcaagacgtggattcgaatttagcaggttcagaggatcaagaggatgctgacactcttgacaaggatgaatttgttgtacagaagcttattggaatacgctatgatggcactggaaggaaaaaaggcgtatattttaaggtccaatgggaagaatatggtcctgaagaggatacatgggaacctattgataacctgagtgactgtccgctgaaaattagagaatttgtacaagaagggcgcaaaagaaaaattctcccgcttcctggtgatgttgatgtcatttgtggaggcccaccatgtcaaggtataagtgggtttaatcggttcaggaaccgtgatgagccacttaaagatgagaaaaacaagcaaatggtgactttcatggatattgtggcatacttgaagcccaagtatgttctcatggaaaatgttgtggacatactgaaatttgctgatggctacctaggaaaatatgctttgagctgcctagttgctatgaagtaccaagcacgccttggaatgatggtggcaggctgctatggtctgccacagttcaggatgcgtgtgttcctctggggtgctctttcttccatggtgctccctaagtatcctctgcctacctatgacgttgtagtacgtggaggagcccctaatgccttttcgcaatgtatggttgcatatgatgagacacaaaggccatccctgaagaaagctttgcttcttggtgatgcattttcagatttaccaaaggttcaaaaccatcaacctaacgatgtgatggagtatggtggttcccccaagacagagttccagcgctacattcgacttggtcgtaaagacatgttggattggtcgtttggtgagggggctggtccagatgaaggcaagctcttggatcaccagcccttacggcttaacaatgatgattatgagcgggttaagcaaattcctgtcaagaagggagccaacttccgtgacctaaagggcgtgagggttggagcaaacaatattgttgagtgggatccagaaatcgaacgtgtgaaactttcgtctgggaaaccactggttcctgactatgcaatgtcattcatcaagggcaaatcactcaagccgtttgggcgcctgtggtgggacgagacagttcctacagttgtaaccagagcagagcctcacaaccaggttataattcatccgactcaagcaagggtcctcactatccgggagaacgcaaggttacagggcttccccgattactaccgattgtttggcccgatcaaggagaagtacattcaagtcgggaacgcagtggctgtccctgttgcccgggcactgggctactgtctggggcaagcctacctgggtgaatctgaggggagtgaccctctgtaccagctgcctccaagtttcacctctgttggaggacgcactgcggggcaggcgagggcctctcctgttggcacccctgcaggggaggtagttgagcagtaaaaggatgacagatctgagctgagctgggcaacatccagcggcaggagcatttctggttcggttcgattcgggctcacgagcgcatcgtgctgattcgcagggtgcactcgagctcgagtgcggagttgttgtaatgtaggttgaggtttcaaaacatccatccatccatcggccccgcctatttgtggatggtgtttctcgtgccattttagttcagctgtattgatgcttcgtcatgtatgtgtattgtaccattcgttcttgttacctactggtaaggcaacatttaatccatgttcaacgcgagcaaattttcatccactttaggtactgagatgctcaagtagttaaaaaaaactgtaaaaaaaaaaaaacagtgcccgaaaagccgcaaaaaaaaaaaaaaaaaaaa

SEQ ID NO: 623 - DNA, 1466 bp, Zea mays
  Clone ID: TF_ZmC35813_1
gtacctcgaggcggccggggcgaccgggccgggatttcgaaccaaagggggcagaactgagagatcgagagaaataataaaaaaaaatccgtcttcttgtggtcttctccaaaccctagcgcccccggccccggtctccgcccccccgccttcgccgtcgcggtcgcgccccatggcggggaagtcgcgaccgcccaagcggatcctcgagtcctataccatcaagggttcggacagagtcatcaagcctggcgattgcgtgctaatgagggcatctgatgcttcaaagccaccttatgtggcaagagttgaggcaattgaagcagcaggatctcgaggcaccaatgtgagagtacgagtgcggtggtattatcgaccagaggagtccataggtggtcggcggccatttcatggttccaaggaggttttcctctctgaccactatgatgtacaaagtgctgacaccattgaggggaaatgcaatgtccacagcttccgtagctatacaaagcttgattctgtcaatgctgaggatttcttctgccgcttcgagtataaatcagctactggcagctttgtaccagatcgtatagcagtgttttgcaagtgcgagatgccatacaatccagatgaccttatgatccaatgcgaggaatgttctgactggtttcaccctgcttgcattgggatgacaatcaaagaagcaaagaaactcgagcattttttctgccagacctgtacagctgaaaatggtaagatggttgagaattcacatgaagctacagcgcaatcagaagaaaagccggtggagtcaaaaaggcggcgaaggtgatggccgtgctgattaaatttatgaaatctatgctcggttgtacaaagccttcccacgtttcacgtttgagaactgtaattttattgttcgtcgcagtttgtggtcctgggctggggtccctctaatgtcaggcacactgtatatagcttgtaacctggtcagattgttgtattagagcacactagggtttgtgtgatagcacggaagttcggactactgagtatgtgtagagtatggcattataatgccagcatcaggtgatcaggcttcttctgggcattaggactcctgcatgatccagcaataatacttccatgcagctggacctggttagtcactagtaagttgtcaggaaacttagtactgccatgtgaactttttttgaaaccctctatgtaatgtaagcatctgtgtcctacttgcaaactgttgcacgaaattgggcacccaccctggcccattggctgcggttgcataattgcggcaactaacttgtgttttaagtttggaggaacaataataaagtttaggctcattgaactggtctggttcaacgaaacaaaccctcactttttgcttgtattttgagttaatgtgatgtttattcaaattatgggctaataaattgctgtcc

SEQ ID NO: 624 - DNA, 3129 bp, Zea mays
  unsure (1)..(3129): unsure at all n locations
  Clone ID: TF_ZmC29605_2
cgcccgtggtcggacgacacactgcccgcgggcgggtgcgggacggagcctgcgcgctcgagcagcagtaatccccgcagagcgagggtcctcgctgtccgggagaacacaaggttacagggcttccctgactactaccgattgtttggcccgatcaaggaaaagtacattcaagatgggaacgcagtggctgtccctgttgccctaccactgggctactgtctggggcaagccttcctgggtgaatctgaggggagtgaccctctgtaccagctgcctccaagtttcgcgtctgtaggaggacggagtgcgggagaggagagggcctctcctgttggcacccctgcagggggggccgttcagcgggaagtggatgacagatgtgaacggagctggggaccatgcagcgggaggagcatttctggttcggttcgattcgggctcacgagcgcattgtgctgattcgcagggtgcactcgagctcgagtgcggagttgttgtaatgtaggttgagggttcaaaacatccatccatccatcggccccgcctatttgtggagggctacggtcgcgccactgcagcaaagctgcctggttacgaggaagagttcaaggacagatgtcaccaccggagcgctaaggtggacaacgtcgtctactgcctcggggatgacgtctatgtcaaggctggagaaaacgaggcagattacattggccgcattactgaattttttgaggggactgaccagtgtcactattttacttgccgttggttcttccgagcagaggacacggttatcaattctttggtgtccataagtgtggatggccacaagcatgaccctagacgtgtttttctttctgaggaaaagaacgacaatgtgcttgattgcattatctccaaggtcaagatagtccatgttgatccaaatatggatccaaaagccaaggctcagctgatagagagttgcgacctatactatgacatgtcttactctgttgcatattctacatttgctaatatctcgtctgaaaatgggcagtcaggcagtgataccgcttcgggtatttcttctgatgatgtggatctggagacgtcatctagtatgccaacgaggacagcaacccttcttgatctgtattctggctgtgggggcatgtctactggtctttgcttgggtgcagctctttctggcttgaaacttgaaactcgatgggctgttgatttcaacagttttgcgtgccaaagtttaaaatataatcatccacagactgaggtgcgaaatgagaaagccgatgagtttcttgccctccttaaggaatgggcagttctatgcaaaaaatatgtccaagatgtggattcaaatttagcaagctcagaggatcaagcggatgaagacagccctcttgacaaggacgaatttgttgtagagaagcttgtcgggatatgttatggtggcagtgacacgggaaaaggcgtctattttaaggtccagtgggaaggatacggtcctgaagaggatacatgggaaccgattgataacctgagtgactgtccgcagaaaattagagaatttgtacaagaaaaacacaaaagaaaaaaaaacccactgcctggtgatgttgatgtcatttgtggaggcccaccatgccaaggtatcagtgggtttaatcggtacagaaaccgtgatgagccactcaaagatgagaaaaacaaacaaatggtgactttcatggatattgtggcgtacttgaagcccaagtatgttctcatggaaaatgtggtggacatactcaaatttgcggatggttacctaggaaaatatgctttgagctgccttgttgctatgaagtaccaagcgcggcttggaatgatggtggctggttgctatggtctgccacagttcaggatgcgtgtgttcctctggggtgctctttcttccatggtgctccctaagtatcctctgcccacctatgatgttgtagtacgtggaggagcccctaatgccttttcgcaatgtatggttgcatatgacgagacacaaaaaccatccctgaaaaaagccttgcttcttggcgatgcaatttcagatttaccaaaggttcaaaatcaccacccgtccgatgtgatggagtatggtggttcccccaagaccgagttccagcgctacattcgactcggtcgtaaagacatgttggattggtccttcggtgagggggctggtccagatgaaggcaagctcttggatcaccagcccttacggcttaacaacgatgattatgagcgggttcagcagattcctgtcaagaagggagccaacttccgcgacctaaagggcgtcagggttggagcaaacaatgttgttgagtgggatccagaagtcgagcgtgtgtacctttcgtctgggaaaccactggttcctgactatgcgatgtcattcatcaagggcaaatcactcaagccgttcgggcgcctgtggtgggacgagacggttcctacagttgtgaccagagcagagcctcacaaccaggttatattgcatccgactcaagcaagggtcctcactatccgggagaacgcaaggttacagggcttccccgattactaccgattgtttggcccgatcaaggagaagtacattcaagtcgggaacgcagtggctgtccctgttgcccgggcactgggctactgtctggggcaagcctacctgggtgaatctgacgggagtcaccctctgtaccagctgcctccaagtttcacctctgtggggcgacgcaccgcggggcaggcgagggccgctcctgttggcacccctgcaggggaggtagtcgagcagtaaaaggatgacagatctgagctgagctggnnnnnnnnnnnnnnnnnnnnnnnnnnnnnnnnnnnnnnnnnnnnnnnnnnnnnnnnctgattcttatggttggagatgaatgtatgtagggtgtactcgagctcgagtgcttgttgtactgtaggttgaggtttctcatccattggcctgcctatttgtggatgacgtttcatttcagattagcaatgtgcttatttaaggtttcgtcatgtacctgtattctacaatccactattgtttccaaagacagcatttgatccttg

SEQ ID NO: 625 - DNA, 919 bp, Zea mays
  Clone ID: TF_LIB3150-078-B9_FLI
gacgtggattcgtacacaatccgcggcaccaacaaggtcgtccatgtgggcgactgcgtgctgatgcgggcgtcggactcggacaagcagccgtatgtggcgcgggtggagaagatggaggccgatggacgcggcagcgtgcgggtgcaggtgcgctggtactaccgccccgaggaatccaagggcggtcgccggcagttccacggcgccaaggagcttttcctttccgatcatttcgacctacagagcgcccacaccatcgaggggaaatttgttgtccactctttcaagaactacaccaagcttgataatgtcgggcctgaggacttcttctcccgatttgagtacaaggcggccaccggttcgttcacccctgaccgcgtggcagtgtattgcaaatgtgagatgccatacaacccggatgacctcatggtgcagtgcgaagcttgcaaggactggttccatccatcttgcatggctatgaccattgaacaggccaaaaaactagatcactttgtttgctcagactgtttgaaagaaaatggttcaaagagactttcaaatgtatatgccacttcatcaaattcttagcccaaggctgaatcaataaggcagacgaggtgaaaactgagtgccaacatccaggggagatgtgctgcttctgtggcgaatcagcccttgcactggcgagagcagaggtgtacagtgtttgctgtggtttgttcgatgtaactagccagtgtggcatgtcatgcagttgttggtagatcagtcattgtgttgacttggtcagcttaactcgacatccccttcgttgattacattgcgcatgttttgttaggatcagcagatcctggtcgaagcctagatgcaggctgggcttagcctgtatgcattgatgcaaaccaaaataagttct

SEQ ID NO: 626 - DNA, 4936 bp, Zea mays
  unsure (1)..(4936): unsure at all n locations
  Clone ID: TF_ZmC2046_1
ttcaggaacaagaagatgcagagcaaagccacaaaagaaggaagaggaatccacagaaaacaacaagctggagaatggacctctggatgcaacagaagaggtgcatcatggagtcgaaaaaggtgatggacatgttacccgcaagagaccaaggagagcagcggcctgttctgatttcaaagagaaatccatacgcttatccgaaaaaaaatctgttgtcatggtcaagaagaatcggatggaggaggaagaagtagatgctgtcaatctgacaaaacttggaccagaagatccaccaccttgccggaagttgatcgattttatcttgcatgatgcagaagggaacccacaaccctttgaaatgtcagaaattgatgacttctttataacagctcttatcatgcccatggatgatgatctagaaaaagagcgtgaaagaggagtacgctgtgaaggatttgggcgaattgaggactggaatatttctggttatgatgaaggtactcctgtaatctgggtgtcaactgatgttgctgactatgaatgtgtgaaaccatcaaccaattacaaatcttattttgaccacttctatgagaaggctcaggtgtgtgttgaagttttcaaaaagcttgcaaaatcagttggtgggaatcctaaccagggcctggatgaattgcttgctagtgttgttcggtcaaccaatgccatgaaaggatatagtggaaccatgagcaaagatttggtgatatccattggagaatttgtatacaatcaacttgttggtttggatgagacatcaaacaatgatgatgaaaagtttgctaccctgccagttcttctttctctaagagaccagtgcagatctagggtggaactgaccaagttgccctctaacttctcgaacacaagtctgaaaattaaggactcagagtgtgatgagacagcagaagacgatgatgatgcaaaattagctagattacttcaacaagaagaagaatggaaaatgatgaagaaacagaggggtaggcgtggaacaccatcccagaaaaatgtctacataaaaatcagtgaagctgagattgccaatgactatccccttcctgcatactataagccatttagccaggaaatggatgaatacatatttgatagtgatgacagcatattttctgatgatgtgccagttaggatactcaataactggacactgtacaatgcagattccaggcttatatctttggaattgatccctatgaaatcaggggcagaaaatgatgtggttgtctttggatctggtttcatgagagatgatgatggcagttgctgttctacagctgagtctgtgaaatcttcgtcttcctccagcaaagctgaccaactggatgcgggaatccctatttatctgagcccaatcaaagaatggattatagagtttggtggctcaatgatttgtataaccattcggactgatgtggcctggtacaagctacgccaaccaacaaaacaatatgctccatggtgtgagcctgtactgaaaacagcaaggcttgctgttagcatcattaccctgttgaaagagcagagtcgtgcctcaaagctttcttttgcagatgtcataagaaaagtagctgaatttgacaaaggaaaccctgcatttatatcttcaaacatcacacttgttgagagatatattgtggtgcatggacagataatactccagcagtttgcagattttccagatgagactatccgtcggagtgcatttgtcagtggtcttttattgaagatggaacagaggaggcatacaaagttagttatgaagaaaaaaactcaagtgatgaggggagagaatctgaatccaagtgcagcaatgggtccagcatcgaggaaaaaagcaatgcgtgcaacaacaaccaggctcatcaacagaatctggagtgattactatgcacatcatttccctgaagattccaaggagggagatggaaatgaaataaaagaaattgatgatgaacaagaagaaaatgaagatgaggatgctgaagatgaaggacagattgaagagaacatctcaaagactcctccatcaacacggtcccggaagttgctatcacaaacttgtaaggaaatcagatgggaaggtgaaacatctgggaaaacattgtctggagaaactctatataaatgtgcttatgttagggaactcagaatacctgttggtggaacagtggctctagaagatgattcaggagacacagtcatttgttttgttgagtacatgttccagaaagttgatggttcaaaaatggttcatgggaggattctgcaaaaaggttcacagacaattcttggcaatgcggcaaatgagagggaggttttcttaactaatgactgcttagaattcaaattagatgacatcaaggaattggtaatggttgatatccaatcaaggccttggggtcacaagtacagaaaagagaattctgaagctgataaagttgagcaggtcaaagcagaagagagaaagaaaaagggccagcccatggtatatttctgcaaaagcttgtactggcctgagaagggtgccttctttgccctctcccgagataaaatgggtcttggtagtggtttatgtagttcttgtgataatatagagccagattctgatgaattgaaaatattctcgaagaccagctttgtctacagaaaggttacatataatgtcaatgagtttttatacataagacctgatttttttgctgaagatgaggatcgtgcaaccttcaaggctggccgaaatgtgggtctaaagccctatgcagtttgtcaaatattgtccatccctgaaggggctggatctaaaaaactcaatccagcatcagcaaatatcagtgctagaagattttacagaccagatgacatttcatcagccaaagcctatgcttctgacatcagagaggtctactatagtgaggatgtaattgatgtgcctgtggatatgatagagggaaaatgtgaggttagaaagaagaacgatcttgcaagttcagaccttccagtgatgtttgaacatgtatttttctgtgaacttatatatgaccgtgccagtggagctctcaagcagttgcctccaaatgttaggtttatgtctatggtgcaaaggacaagtgcgttgaaaaagaacaaaggaaagcagatctgtgagcctgatcaaatagattcaggtaaatggttggatgtgcctaaagagaaccgtctagctactcttgacatttttgctggctgtggaggtttatcagaagggctgcagcaagctggtgtatcttttacaaaatgggcgattgaatacgaagagcctgctggtgaagcatttaataaaaatcatccagaggctgtggtctttgtagataactgcaatgtgattctaaaggcaattatggataaatgtggggatactgatgattgtgtttcaacttctgaagctgctgaacaagcagcaaaacttccagaagtgaacattaataatcttccagtccctggcgaagttgaattcataaatggtggtcctccgtgtcagggattctctgggatgaatagattcaaccaaagcccatggagtaaagttcagtgtgagatgattctagcattcctctcattcgctgagtatttccgtcccagattctttctgttagaaaatgttcggaactttgtttccttcaacaaagggcagaccttccgtttggcagttgcatctcttctggagatgggataccaggtccggtttggaattctagaagcaggggcttttggtgttgcccagtccaggaaaagggcgtttatttgggctgctgcacctggagagatgcttcctgattggccagagccgatgcatgtgtttgctagccctgagctgaagataacactgcctgatggccaatactatgcagctgcaagaagcactgctggtggagcgcctttccgagcgattactgttagagatacaattggggatctgcctaaagtgggaaatggtgccagcaaactcacgcttgagtatggaggtgagcccgtgtcttggttccagaagaagataagagggaatatgatggtactgaatgatcacatatctaaggagatgaatgagctgaacctaataaggtgccaacacattccgaaacggccgggttgtgattggcatgacctaccggacgagaaggttaagctgtcaaatgggcagatggctgacctgataccttggtgcctgcccaacacagccaagaggcacaatcagtggaaaggactgtacgggaggctggactgggaaggcaacttccccacatccgtcactgatccccagccaatgggcaaggtcggcatgtgcttccaccctgatcaagacaggatcatcacagtccgggaatgtgctcggtcacagggctttcctgacagctatgaatttgcgggcaacatccagaacaagcaccggcagattggcaatgccgtgcccccgcctcttgcctatgcacttgggaggaagctgaaggaagccgttgacaagcgtcaggaagccagcgcaggcgtgcctgcaccatgagaagttttccttccatcaaaccatgacccatgaagctaagcgctgaggtcgtccttgaggaccagttaattttggttttatcagtcttaatgcactcctgaatgtatatgttagagaagtgtcgattgctgattgttaccctgattcagggtagcggttatatctaaaaacttgagaaaatctagtgtactctagttgccatgtgttccattttgttggctctaaactttcaactagttttggtgattaatgacaacatgagattaacttaaaaaaaaaaaaaaaaaaaaaaaaaaaaaagtactccgcgttgttaccactgctnnnaaaaaaaaaaaaaaa

SEQ ID NO: 627 - DNA, 758 bp, Zea mays
  Clone ID: TF_ZmC3042_3
ccggccgggcgcccacacaattgaggggaagtgtgttgtccactctttcaagaactataccaggcttgacaatgttgggcctgaggacttcttctgccgattcgagtacaaggcggccaccggttcgttcacccctgaccgcgtggcagtgaattgcaaatgtgagatgccgtacaaccccgaatgacctcatggtgcagtgcgatgcttgcaagcactggttccatccatcttgtgtggctatgaccattgaacaggccaaaaagctagatcactttgtttgctcagactgtttcaaagaaaatggttcaaagagactttcaaatgcatatgccacttcaccaaattttgagcctaaggctgaaccaaaaaggcagaggaggtaacaaactgtgagtggtaacatccatatgggtaaggggagatgtgctgcttctgtggtgaatcagcccttgccctttgctgtggtgagagcagaggtgtacagtgtactagaccagtgtttgctgttaggggaacgggttttgttcgatgtgtagaccgtgtggcatggcatgcagttgttggtagaggtcaaaagaacagtcgttgtgttcacttggtcagcttagcgccttagcccttgttaatgtgttaatgcactgtgttaactcagcgagccccccttgtggctgataatgcaagtcatgcagttgttgatacaaaaaaaaaaaaaaaaaaaaaaaaaaaaaaaaaaaaaagggcggccggacgcgtgg

SEQ ID NO: 628 - DNA, 3010 bp, Zea mays
  Clone ID: TF_ZmC29757_1
cgcgtccatttctcagattgacattccacccgttttcctgtcactcttcaacgcaccccgtatccggggggtccaggatttgccaaactttggaacacccttacggttaacctttgatcctgagctgtccaaaagtgatctcggtgaaataatcttcgataagatggtagaaacagttttcccctggtgccatgccaacagagaactattgcctggatacgacactctcttgaaaatttgttgcaagcttggtgaaagcaagatcatcctctgtgaagagggtagtaagcacaagttgcagaaggttcagcttaactatccaagtgacgatgtgacatttgccctcaaggaatccccagatcttccttggctatccaagtacttgtgaggttcatattacattaaccattaattcctggcgttctgttgcatttctgttctctttggaagcaacgattcactttacctgcagaccttgcatacacacgtcccatggtcgatctgcaaaggaaccatcgaaggatgtcggcatggcgctgcacccaagggatcacgcatatttaatcgcacaacaggaacataaaacgttaagaaatatgtacgtctgcaatttcgtctccttcaaactatggtgttgtttgtgttgtattgaactgccgcgtgtgagctgatccaattgttttctattgccatctttcagtaactatatacgaattgttcgttaaacattgacagttttgaataagaaacattgagatatcaaatttgtactttgccggcccctttatggagggagcctgatggcaccttctgggcaaaggtcaggtggtacattatccccgaagagactgcagcaggaaggcagctgcataacttgagaagagagctgtatcgtaccaatgatcttgcagacattgagatggaaacaatccttagacattgttctataatgtgccccaaagactttagggatgctaacgatggaggagatgatgtattttactgtgaatatgagtatgatattcattggcataattttaagcgtttggcagatattggtgatgaacccgagacaaaggaagatcccagtgacgagccttacaatgccagtgatgattataacatttaacagaacatttttcaggtggtactaaaattggaaggccagcaaaccagccacttgttttgcggatagctgtaatttatcttcgtagcgaattcaaggaagggtagaatatatggcctacaaaatggcctaccacgaaaaattcctgagcatgttcggtgccaccaaaagactgagctggagaaggctaaagcaaccctgttattggcaactctccctaagtcattaccttgcagggataaagaaatggaggagatatcgatatttgtaaaggatgcaatctgcaatgaccagtgcctaggacggtgcctttatatacatggtgtacctggtactggcaagactatgagtgtacttgctgttatgaggaggctgagatctgaatttgattctggaacactgaggccatattgttttattgaaattaatggtcttaaattagcatccccagagaatatctacaaggttgtatatgagcagttgagtgggcatagggttgggtggaaaaaggctcttcactatttaacagaacatttttcaggtggtactaaaattggaaagcaagcaaaccagccaattgttttgctgatcgatgaacttgatcttcttatgacaagaaaccaatcggtgttgtataacattcttgattggcctaccaaaccaaattcaaatctagttgttataggtatagcaaacacaatggatcttccagaaaagttattgcctcgtatatcaagtcggatgggtatccaacgactgtgttttggtccatacaattatagacaactgcaggaaattataacaagccgtttaaaggggattgatgcctttgaagaacaagctattgaatttgcttctagaaaggtagctgctatgtcaggtgatgctaggcgagctttagagatttgtagacgagcagcagagtttgcagactaccgtgttaaacagtctcgacagtctgcacagaatactgtttctgcaaataaaggtgatggtgttgtttccatgggtgacatagaagctgctattcaggaagtcttccaggcaccgcatattcaagtgatgaagaattgtccaaagtttggaaaagttatcttggttgccatagttcatgagctgtacaaaagtggactaggtgaaataatgtttgataagttagcaacaacagttttctcctggtgccatgcccacagagaactattgcctggatacgacactctcttgaaaatttgctgcaagcttggtgaaagcaagatcatcctctgtgaagagggtaccaagcacaagttgcagaaggtgcagctcaactatccaagtgatgatgtgacatttgccctcaaggaatctccagatcttccttggctatctaagtacttgtgaggctcttattgcattaaccattgattcctggcactctgttgcctttctgttctctttggaggctagacaattctacttcacccgcaaacctttcaaacacacatatcccatggtcgatctcctggtcactctagcctcgtatctgcaaaggaaccggcgaaggatgacggcatgtcgctgcacccaacggaacgcgtcacactaggaacgtaaaacgttagaaacatgtacgtctggaatttcgtccccttcatgactggatacgtatgtatccacttcaacccatgtagtttggagtggtttggtatgtattttaaactaaactctatattaaaccactctaatccatatcgattgaggtgaatatgcatgcgtccatatgttgtaactgaactgccgcgtagtgagatttagtaactatatatgaatggtttgttacaataacattgcgagttttgaataagaaacattgagatatcaatttgtaaaaaaaaaaaaaaaaaa

SEQ ID NO: 629 - DNA, 3021 bp, Zea mays
  unsure (1)..(3021): unsure at all n locations
  Clone ID: TF_21213068
cccacgcgtccggnnnnnnnnnngaaacatttcctctctctctctgacgtcttaactcggatcacgagttgaaatttgtgtcggggacaagccatgaacaacgcaaccaccagttgttaactaaccctcttttaaacttcaagcaaccaaagccaagagcagaaatggttttccaaaagagnnnnnnnnnnnnagagatggagtcgtgcggtggaggccaagtcccggagatgccacgcgttcccaagtccgcgaggggcaagagatcggtcaggaagaaggaggcccagagcccggcccagatgtctgcattcgaccttctcgcgaccgtggcagggaagctgtttgnnnnnnnnnnnnnnnnnnnnnnnnncacgagcgccggtgccccggccttggctgcgtgcgcaaaggatgccctggtgaagcaggagcagtgtgatgagcaaatgaagctgttcaagcatgaggcgacggatcaggatagctgcaatgagagtgcaatcctnnnnnacattgtgctccagcgggtggtgaataatgctaggaatgaggatcctaaggcgaagtctgaggtccaggacaaggaatcctccatgatcagctatacgaaggctgnnnnnnnnnnnnnnnnnnnnnnnntcgcagacaggtggtcgcctgaatccgtggaatcaggagcctgcacaggagatgcagtggcgagactgatgatgacggccccggcaggatttcataagaatgcacccgaaatgtatagtttgcttgattcaatggatgtggatgtcaagccgcctcctttggtcagctctgacagcaccggcgagatgccattgcatggcgataaaattcaccgctcaacctccttaccgaggggcccnnnnnnnnnnnnnnnnnnnnnnnnngatagannnnnnnnnnnnnnnnngtcctcagggtgcactcatccgagcaccgccactaacaaggatttcacatccaattgtaaagctgagtataatagggtaaggaagctgctcactagtaagcacaggaaagttgctccagcgaggattcacaaatctgatctttcctatagtgatgtcgagcggaagccttctttccggtacnnnnnnntgcatacacgacagaggacacaaaggagtacattcaagcggaggaagctctttgatcgccatttagctctagcatctgaatttggtacagcaaatggaaagggaaacacaaaggttgccggaagaaactccaatgctgtgtctttggaagcaaacaaggggactaattcaatgccattccagaaatcttgtgggtcaaatgattgctatgtgaaacttagaattaagtcttttaacgtgcctgaacttcttgttgaaatcccagacagtgcaactgttggctcactaaagaaaactgttctcgaggcagtgactgcgattcttggaggtggcctacgtgttggtgttcttcaccatggaaagaaagtcagagatgatagtaaaacgttaattcaggctgggattggtcaggatgatatgctggacaaccttggcttttcacttgaacccaactgtactcaaaacccacaagtccaagctcctgaagatgtcaatttcctcgaaaacattgatactaccgaacccctcgcaaggatcacacctgctgactcgtcttctaagcttggtgaagttgacgtatcacaggagcttgcattaaccccattagcaatgaactaccagggcagtgatcatgattccgtgcactcccctggggctgtctcgtcgcgcgataaagactcgcgagccttatttctggttccagctgcagatcccaatgcaggagctgtagttccagcaaataagactaagaggtcaccagagcagggacaccgcagaatcaggcggccgttctctgttgctgaagtagaagcacttgtgctcgcagtcgaaaagcttggaaccggaaggtggcgagatgttaaacttcgcgcttttgacaatgcaaagcaccgtacctacgttgaccttaaggacaaatggaagacgctggtacacacagcgagcatctcgccgcagcagcggcgtggcgagccggtgcctcaggagctgctcgaccgggtcctggcggcccaggcctactggtcccagcagcaagccaagctccagccgaagacgccctcgctggctgaggctcgcttgctcacccaataattcgatgatcccggctgatggcctcctctgaggccgttgcagcctttgtataannnnnnnnnnnnnnnnnnnnnccttcacaggannnnnnnnnnnnnnnnnnnnnnnnnnnnnnnnnnnnnnnnnnnnnnnnnntacaagaagcattgaccgatttgttgtaatatctactcaccaccggttattctttaagccaggattctctctccttgtgaatttaaccaaaggaaagggcatttctttggcaattgtacattttgatgatggaagaagaagatgatccatgaactgagatctgcagtgtctcctactaatggctcacaannnnngcaattgtgattaagaaattcaaggtgctgcttgaccaagctcggctccggcttccagnnnnnggattctcttgcgnnnnnnnnnnnnnnnnntcttttttacagcagaagctgagagccgaacagtgtatttggcttgaattgcagcctatatagtttcatccactcatacagacggccacaaatgccgtaaaaggagggtagcttcttttgctgagtctagtcttgggagcaaagctcaggaccgaagtctagacttgagacggagcgngggccaaagcggcacccgaatgaaagcttcagattcttttgttcagttaaattcattctttggtagtggagactgacggaaggataggagattaggtggggtggttgtcgattacacacgataannnnnnnnnnnnnnnnnnnnnnnnnnnnnttgtattaatgtactatattattttaccaatcttgtagttaccctcaaatttgtaattggt

SEQ ID NO: 630 - DNA, 2503 bp, Zea mays
  Clone ID: TF_ZmC9036_2
ggatcctaaggcgaagtctgaggtccaggacaaggaatcctccatgatcagctatacgaaggctgaattgggttgtaattttggtgtgatcgcagacaggtggtcgcctgaatccgtggaatcaggagccttcacaggagatgcagtggcgagactgatgatgacggccccggcaggatttcataagaatgcacccgaaatgtatagtttgcttgattcaatggatgtggatgtcaagccgcctcctttggtcagctctgacagcaccggcgagatgccattgcatggcgataaaattcaccgctcaacctccttaccgaggggcccaaagggggtggggttttttgctgtagatagagatgatgacgacgacaagtcctcagggtgcactcatccgagcaccgccactaacaaggatttcacatccaattgtaaagctgagtataatagggtaaggaagctgctcactagtaagcacaggaaagttgctccagcgaggattcacaaatctgatctttcctatagtgatgtcgagcggaagccttctttccggtacaaaaaaatgcatacacgacagaggacacaaaggagtacattcaagcggaggaagctctttgatcgccatttagctctagcatctgaatttggtacagcaaatggaaagggaaacacaaaggttgccggaagaaactccaatgctgtgtctttggaagcaaacaaggggactaattcaatgccattccagaaatcttgtgggtcaaatgattgctatgtgaaacttagaattaagtcttttaacgtgcctgaacttcttgttgaaatcccagacagtgcaactgttggctcactaaagaaaactgttctcgaggcagtgactgcgattcttggaggtggcctacgtgttggtgttcttcaccatggaaagaaagtcagagatgatagtaaaacgttaattcaggctgggattggtcaggatgatatgctggacaaccttggcttttcacttgaacccaactgtactcaaaacccacaagtccaagctcctgaagatgtcaatttcctcgaaaacattgatactaccgaacccctcgcaaggatcacacctgctgactcgtcttctaagcttggtgaagttgacgtatcacaggagcttgcattaaccccattagcaatgaactaccagggcagtgatcatgattccgtgcactcccctggggctgtctcgtcgcgcgataaagactcgcgagccttatttctggttccagctgcagatcccaatgcaggagctgtagttccagcaaataagactaagaggtcaccagagcagggacaccgcagaatcaggcggccgttctctgttgctgaagtagaagcacttgtgctcgcagtcgaaaagcttggaaccggaaggtggcgagatgttaaacttcgcgcttttgacaatgcaaagcaccgtacctacgttgaccttaaggacaaatggaagacgctggtacacacagcgagcatctcgccgcagcagcggcgtggcgagccggtgcctcaggagctgctcgaccgggtcctggcggcccaggcctactggtcccagcagcaagccaagctccagccgaagacgccctcgctggctgaggctcgcttgctcacccaataattcgatgatcccggctgatggcctcctctgaggccgttgcagcctttgtataaagtcagtaagtcagtcagtcccttcacaggaggtttaatgaaaatataatattaggggaaaaaataatgcatatataaggtacaagaagcattgaccgatttgttgtaacatctactcaccaccggttattctttaagccaggattctctctccttgtgaatttaaccaaaggaaagggcatttctttggcaattgtacattttgatgatggaagaagaagatgatccatgaactgagatctgcagtgtctacctactaatggctcacaatttttgcaatgtgattaagaaattcaaggtgctgcttgaccaagctcggctccggcttccagtttttggattctcttgtgaagaagttgctgcctcttttttatacagaagctgagagccgaacagtgtatttggcttgaattgcagcctatatagtttcatccactcatacagacggccacaaatgccgtaaaaggagggtagcttcttttgctgagtctagtcttgggagcaaagctcaggaccgaagtctagacttgagacggagcgggggccaaagcggcacccgaatgaaagcttcagattcttttgttcagttaaattcattctttggtagtggagactgacggaaggataggagattaggtggggtggatctttggttccctttttctttttttcttctattattacattattagttgtattaatgtactatattattttaccaatcttgtagttaccctcaaatttgtaattggtgaaattaacaaaattgaaggaaatacatttctaccccttcgct

SEQ ID NO: 631 - DNA, 2935 bp, Zea mays
  Clone ID: TF_ZmC9036_4
cccacgcgtccggaaaaaaaaaagaaacatttcctctctctctctgacgtcttaactcggatcacgagttgaaatttgtgtcggggacaagccatgaacaacgcaaccaccagttgttaactaaccctcttttaaacttcaagcaaccaaagccaagagcagaaatggttttccaaaagaggtcgtcgtcgtcagagatggagtcgtgcggtggaggccaagtcccggagatgccacgcgttcccaagtccgcgaggggcaagagatcggtcaggaagaaggaggcccagagcccggcccagatgtctgcattcgaccttctcgcgaccgtggcagggaagctgtttgacgagggggcggggtcgctggggaacacgagcgccggtgccccggccttggctgcgtgcgcaaaggatgccctggtgaagcaggagcagtgtgatgagcaaatgaagctgttcaagcatgaggcgacggatcaggatagctgcaatgagagtgcaatcctcccccacattgtgctccagcgggtggtgaataatgctaggaatgaggatcctaaggcgaagtctgaggtccaggacaaggaatcctccatgatcagctatacgaaggctgaattgggttgtaattttggtgtgatcgcagacaggtggtcgcctgaatccgtggaatcaggagcctgcacaggagatgcagtggcgagactgatgatgacggccccggcaggatttcataagaatgcacccgaaatgtatagtttgcttgattcaatggatgtggatgtcaagccgcctcctttggtcagctctgacagcaccggcgagatgccattgcatggcgataaaattcaccgctcaacctccttaccgaggggcccaaagggggtggggttttttgctgtagatagagatgatgacgacgacaagtcctcagggtgcactcatccgagcaccgccactaacaaggatttcacatccaattgtaaagctgagtataatagggtaaggaagctgctcactagtaagcacaggaaagttgctccagcgaggattcacaaatctgatctttcctatagtgatgtcgagcggaagccttctttccggtacaaaaaaatgcatacacgacagaggacacaaaggagtacattcaagcggaggaagctctttgatcgccatttagctctagcatctgaatttggtacagcaaatggaaagggaaacacaaaggttgccggaagaaactccaatgctgtgtctttggaagcaaacaaggggactaattcaatgccattccagaaatcttgtgggtcaaatgattgctatgtgaaacttagaattaagtcttttaacgtgcctgaacttcttgttgaaatcccagacagtgcaactgttggctcactaaagaaaactgttctcgaggcagtgactgcgattcttggaggtggcctacgtgttggtgttcttcaccatggaaagaaagtcagagatgatagtaaaacgttaattcaggctgggattggtcaggatgatatgctggacaaccttggcttttcacttgaacccaactgtactcaaaacccacaagtccaagctcctgaagatgtcaatttcctcgaaaacattgatactaccgaacccctcgcaaggatcacacctgctgactcgtcttctaagcttggtgaagttgacgtatcacaggagcttgcattaaccccattagcaatgaactaccagggcagtgatcatgattccgtgcactcccctggggctgtctcgtcgcgcgataaagactcgcgagccttatttctggttccagctgcagatcccaatgcaggagctgtagttccagcaaataagactaagaggtcaccagagcagggacaccgcagaatcaggcggccgttctctgttgctgaagtagaagcacttgtgctcgcagtcgaaaagcttggaaccggaaggtggcgagatgttaaacttcgcgcttttgacaatgcaaagcaccgtacctacgttgaccttaaggacaaatggaagacgctggtacacacagcgagcatctcgccgcagcagcggcgtggcgagccggtgcctcaggagctgctcgaccgggtcctggcggcccaggcctactggtcccagcagcaagccaagctccagccgaagacgccctcgctggctgaggctcgcttgctcacccaataattcgatgatcccggctgatggcctcctctgaggccgttgcagcctttgtataaagtcagtaagtcaagtcagtcccttcacaggaggtttaatgaaaatataatattaggggaaaaaaagaatgcatatataaggtacaagaagcattgaccgatttgttgtaatatctactcaccaccggttattctttaagccaggattctctctccttgtgaatttaaccaaaggaaagggcatttctttggcaattgtacattttgatgatggaagaagaagatgatccatgaactgagatctcgagtgtctcctacaaaaaaaaaaaaaaaaaaaaaaaaaacccacgaagaagttcaaggtgctgcttgaccagctcggctccggcttccagtttttggattctcttgtgaagaagttgctgcctctcttttatacagcagaagctgagagccgaacagtgtatatggcttgaattgagcctatatagtttcatccactcatacagacggccacaaatgccgtaaaaggagggtagcttcttttgctgagtctagtcttgggagcaaagctcaggaccgaagtctagacttgagacggagcgggggccaaagcggcacccgaatgaaagcttcagattcttttgttcagttaaattcattctttttttttttttgacacaacacaggtactttaaaatttaaggagatatcattgtcgattacacacgataa

SEQ ID NO: 632 - DNA, 479 bp, Zea mays
  Clone ID: TF_LIB4171-017-R1-K1-A8
aaaaaaaaggggggggggttggcaaaaccacacaaactaatggggttccttgggaccccccttttaacctggttttttataacccacagttttaacaaaagaacaagttttccttggaaaaaaaaatctaagaaaaaggaagagccgggggggggggtttgcccaaaaccctcccctggtgttggtgggggaaccagaaggcctgccctagaagaacccggtttaaaattttttggggaaccgggtgccctttcggtgggggggggaatatgctcgcagggaaaaccagggttttccatttgtccttggggccaacggaggcccggggatttatttgggcgagggcgagggtttaaaagggtttcccctttccagcccaaaggtggtggaccgttcccaccagcgcttaaacctcgcggaaggggaaggcgctcctaaggcgccttggcccggtttaaaacccttgggatttacaaggg

SEQ ID NO: 633 - DNA, 777 bp, Zea mays
  Clone ID: TF_ZmC426700_1
ctcgaggccggccgggccgggaaaagcccctctgcctctctctctctcacctcctgtcccctctcctctccgtgtccggtggagcttctccacctccggccaagatctggaaccagcgagggtgcccggcggttctcatcccggaccccgactctttcctcatctctgcaacctctggatcctccatctgcccccctgcaggatctggaagctgcacccgtcggggggagaagcaagcagcacatccagcccgctcgagctcgctcatccgacctcaccactgagcttccgcaggatcttcacatccccattccattgacaacgtgaaagagaacatgtgacggggctgccaagctacatgccaacgacgccgattgccgaatgccgagacaccgcgcacgctcttgcagataaagatgatcgacgtggtatttgtaccactttgctgtccgtgaaagcccgctatataggtggtgacatcaagtgatcaagattttatggtgcgcaagaggttgggttatagttcccgtggccatcgaattccaactatgccacgtgttccaaactcagctcgggggaaacgttctaccagaagaaagaaagatgagaatgatgatatgtgtgcaatggatttgctcgcaactgtggcaggaaagttactagcagatcaggacaattcatctagcgttcctaataccagtgcagcgaaagctaaaaaaaggaaatcagttaaggaagaacactttgatgaaattccgctctaaaaaatgtggctat

SEQ ID NO: 634 - DNA, 1859 bp, Zea mays
  Clone ID: TF_ZmC1435_1
cagtattagagtcactaacagtgaaatcaaatatgctagcaaaaattcctgagtgtggatcttatggaatacaccatgcaggctcctcaagttcagcagagcctgaacaagtgcatcaagctgaacctaaagtgagcagaagacaagcagatggacatcctgtggcttatggtatatttaactccgtggatgtggatggcaaacctccggctttggttagttctgacagtagctcgtgtgttcctctgagcagccatgacaaggaacatcaaacctcttccttgtatcggggtgtagtgcagtatactgcagatagagaagatgatgaaaattcttctgggtgcacgcatccaagcaccatagaaaataagggttgcaaaccacaatatctaggtaaccataggataaggaaattgcttgcctcgaaggtaaggaaggcagcacgtaataagatttgtggagggattccatcaaaaaagatctgtggagggttgtcaaaaaaaggtagcaagctaaacttatgtgggaaaaagatgtccaccacacaccaaaaggtgcaaagaatgattttcaaaaagaaaaagctagcgcaccgtacatcttttgctaaggagatgctaactgaagctagtgggacatcatttgctatggaaggtcaaaataaatcatgtgaagctgagaattaccatgttaagctaagaatcaagtcattcaacatcccagaattgttcattaaggtcccagaaaatgcaaccattggatcactgaagagagctgttatggatgttgtcaatagtataatggaaggcgacctacgcgttggtgttcttcttcaaggaaaagatatccaagacgacaacaagacactttgtcaggctgggatatgccacgataaaaagctaaataacatagacttcacgctggagtgcgagcgtgagcgtgagcctccctctggagtcattatacaagaacagatggatttcctcaccacagatatggtggagccattagctaggatgaagtgtgaggaaccttttcctgaagccgacgtcggagatgacagccagcagcctagagcgccttatcgaagccgctctctctctgacctgtactctgtccattgtcctgttcagatggcttcccaggacacgtcggtgagctcccaggccatcgtccctgtttcgcctgcgccttcagacgtgggcgctctagccattgtgcccctttgtaagtccaaggggtctgaagtcgggcagaggcgcatgaggagacccttcactgtcggcgaggttgaggcgctggtgggagcggttgagcagcttgggactggaaggtggagagctgttaaaacgcttgcattcgacagtatagatcaccggacctacgtcgacctcaaggacaagtggaagaccctggttcacactgcgagcatatccccgcagcaacgaagagggcagccggttccacaagaacttctagaccgtgtcctcctagcgcaggcctactggtcccagcagcagcagcaggcgaggctctaggacaagccccgcggcaaggctcctcttcttcctgagatctgttttccctaggagaagggaaagcttgtacttgtgtaaatactgtgcgtaatagaaaacgaggtagaaggggtgtccaaaggaaccagattagtttgtgtgttattgcatactcacaacattgttgttccttttcatgccctgctcgctggtctctgtcgaagccaggggctctctcgcatgtggataaataagggggagagaaccttgcgtggcacttgtaaatggtggcgcaaacttgccgtgttttaataagcctttgacatgtcgctcgaggaacct

SEQ ID NO: 635 - DNA, 588 bp, Zea mays
  Clone ID: TF_LIB3600-034-Q6-K6-C8
tgttcattaaggtcccagaaaatgcaaccattggatcactgaaggtaaacactagatgggcatacagaagttattgctaagcaatcgtgcattcatttggcatcccaatattctttttggtgatgttgttgttaatttactatacagtgtaattgatgaaatctgcaaggttgcaagagcgcacttgagttcatagatttatctttttcattccacagttggtacgctggattcagttgactgtcatgttagatttctgcatttgaggtttattgcaatgtggaataatgagtcttcacaatagttttactggtatacagagcaaataaataatttttttagtaacagtttgtagttcgtctatgcctacagagagctgttatggatgttgtcaatagtataatggaaggcggcctacgcgttggtgttcttcttcaaggaaaagatatccaagacgacaacaagacactttgtcaggctgggatatgccacgataaaaagctaaataacatagacttcacgctggagtgcgagcgtgagcgcgagcctccctctggagtcattgtacaagaacagatggatttcctc

SEQ ID NO: 636 - DNA, 1774 bp, Zea mays
  Clone ID: TF_UC-ZMFLB73193B04_FLI
gtgacagaatttcatggcttctgtattctcctgtatggttatggatatcatgtaggtggcgagatgttaaacttcgcgcgtttgacaatgcgaagcaccgtacctatgttgatcttaaggtaagaactgtcaaatgcttgactttgacttcaactaaagactaaagcaaaaatatctttgctttgcatatactcgtcaaatctgataactagttttcttactgtcctttcctgatttatttattgatcctctcgatttccttctcttttttttttttgccaaaccttttaattgcctgtgaaaaggagtcttttgcatgggtttgtctacgtaatacgtatgctttatgcaaattcctagtgaggttaggttacttggccgatttaatcaatagtttggcacttgtgggttttaggcctactcacctaacaggtgcgtgctgtttctgtgttctttatttgaaagttttctgccagactcttgttcttgaaaaacttgtgtccttgtgattcagttggtgctgttcccacgcatcagctttgtagtttggctgggtcatgttagctttagtaccagaatgcttcacctggaaacaaaggagacccattcttgcacgtcaactaacccgatccggactttggagaaaaaacaagtccagctcagggatcagataacctttcctttattagactggaagcttcttggctgctttgcactgtacattgctgcattctctggtcagattttaacgatgactttgaaagtttgaacaggcaatggattaaccgtgtcgaaattgtggtgcgaacaggacaaatggaagacgctggtgcacaccgcgagcatctcgccgcagcagcggcgtggcgagccggtgcctcaggagctgctcgaccgggtcctggcggcccaggcctactggtcccagcagcaagccaagctccagcctaagacgcccccgctgctggctgaggctcgcttgctcacctaataaattcgatgatcctggctgatggcctcctccgaggccgttgcagcctttgtataaagtcagtaagtcagtcagtcccttcacaggaggtttaaggaagatatattaggaaaaaaaagaatacacatataaggtacaagaagcattgaccgatttgttgtaatatctactcaccaacagatattctttaagccaggattctctctccttgtgaatttaaccaaaggaaagggtatttctttggcaaattgtacatgttgatggtggaagaagaagatgatccatgaactgagatctggggtgccattgctcacaatttttgcagttgtgactgagaaattgaaggtcctgcttgaccaagctcggctccggctccggcttttggattctcctgcgaagaagttgttgcctcctcgcagaagctgagagccgaacagtgtatttggtttgaattgcagcctatagtataatttgattcacccgtacagacggccacaaaaagccgtaaagggagggtagcttcttttgttgagtctaggcttgcgagctgggccaaagcggcaccgaaagaaagcttcagattcttttgttcaattaaattcattcttttgttagtggacagtgacggaaggataggacattaggagggatggatctttggttctcttttccttttttttcttctattaaattagttgtactatgttatgtcaccaatcttgtagttaccctcaaatttgtaattgatgaaattaagaaattggaaggaaatgctttcgtacc

SEQ ID NO: 637 - DNA, 3614 bp, Zea mays
  Clone ID: TF_ZmC9036_1
caccccttacgcttcgcctgacgcgtcgcctgacccgtgggtgacagaatctcatggcttctgtattctcctgcctggttatggatatcatgtacgtggcgagatgttaaacttcgcgcgtttgacaatgcgaagcaccgtacctatgttgatcttaaggtttgatctgacaaaagcttggctttgacttaaacgctatcgtagaaaaagaatatattctcttttggcaaaaccccccaaaaatggaaacacacaccaagctactgtcctttcctgatttatttattgaccctctcgattgccgccctttttttttttttttcctaaatatcttccttaaacgagtataaattcggcacgagggaaaaaaattggcggagggcggagaggatagcaaggagggtgaagggggaaaagggtaataaaaataaaggaggaggggagaagcaagacgaggaggaagagggagcaccccaaagtaggggagggggaataattccgcaggggctgagggatctcggcgagtccggccgcggagcagcgcagcgaggcggcgatccgagggcgatcggaggcgggcgggcgtagacgccggcgagatttgtgttggtgacaagccatgaacagcgcaaccaccagttgttaagtaaccctcctgtaaacttgaagcaaccgaagcggagagcagaaatggtgttccaaaagaggtcctcgtcagagttggaggcgtccggtggaggccaagtcgcggagatgccgcgcgttcccaagtctgcgaggggcaagagatcggtcaggaagaaggaggcccagaacccgccccagatgtcagcattcgaccttctcgcgacggtggcagggaagctgcttgatgagggggtgggctcgctggggaacatgagcgctggtgccccagctttgactgcatgcgcgaaggatgtccgtgtgaagaaggagcagtgtgacgaggaaatgaagcagttcaagcatgaggtgacagatcaggatagctgcaatgagagtgcaattctcccgcacattgtgttccagcgggcggtgaataatgctcggaatgaggatcctaaggcgaagtctgaggcccaggacaaggaatcctccatgatcagctgtaccaaggctgaactgggttgtaattttggtgtgattgcagataggtggtcgcctgaatccgtggaatcaggagccttcacaggagatgcagtggcgagcctgatgccacctgccccagcaggatttcataagaatgcacccgaaatgtataatttgcttgattcaatggatgtggatgtcaagcctcctcctttggtcagctctgacagcaccggcgagatgccattgtatggcgataaagttcaccgctcaacctccttaccaagggtctcgaagggagtggggtttttttgctgtagatagagatgatgacgacgataagtcctctgggtgcactcatcccagcaccaccactaacaaggatttcaggtccaattgtacagctgagtatagtagggtaaggaagttgctcaccagtaagtacaggaaagttgctccagcgagggtttacaaatctgatctttcctatagtgatgttgatcggaagccttctttccggaacaaaaaaatgcattatacacgacagaggacacaaaggagtacattcaagcgtaggaagctctttgatcgccattcagttctagcatctgaatttggtaccgcacatggaaagggaaacacgaagaaggttaccggaagagactcccatgctgtgtctttggaagcaaacaaggggactagttcaacgccattccagaaatctcgtgggtcaaatgattgccatgtgaaacttaaaattaagtcttttaaggtgcctgaacttcttgttgaaatcccagaaagtgcaactgttggctcactaaagaaaactgttctcgaggcagtgactgcgattctcggaggtggtctacgtgttggtgttcttcaccatggaaagaaagttagagatgataataaaacgttgattcaggctggtattggtcaggaggatatgctggacaaccttggcttttcacttgaacccaactgtacacaaaacccacaagtccaagctcctgaagatatcagtttcctggaaaccattgatactgctgaacccctcgcaaggattgcacctgctgactcgtcttctaagcatggtgaagttgacctatcacaggagtttgcattaaccccattagcaatgaactaccagggcagtgatcatgattctgtgcactcccctgggggcgtctcatcgcccgataaagtctccacaaactcgcgagctttagttccagttccagctgcagatcccaatgcaggagctatagttccagcgaataagtctaagaggtcaccagagcaggggcaacgcagaatcaggcgcccgttctctgttgctgaagtagaagcacttgtgctcgcagtcgaaaagcttggaaccggaaggtggcgagatgttaaacttcgcgcgtttgacaatgcgaagcaccgtacctatgttgatcttaaggacaaatggaagacgctggtgcacaccgcgagcatctcgccgcagcagcggcgtggcgagccggtgcctcaggagctgctcgaccgggtcctggcggcccaggcctactggtcccagcagcaagccaagctccagcctaagacgcccccgctgctggctgaggctcgcttgctcacctaataaattcgatgatcctggctgatggcctcctccgaggccgttgcagcctttgtataaagtcagtaagtcagtcagtcccttcacaggaggtttaaggaagatatattattaggaaaaaaaaagaatacacatataaggtacaagaagcattgaccgatttgttgtaatatctactcaccaacagatattctttaagccaggattctctctccttgtgaatttaaccaaaggaaagggtatttctttggcaaattgtacatgttgatggtggaagaagaagatgatccatgaactgagatctggggtgccattgctcacaatttttgcagttgtgactgagaaattgaaggtcctgcttgaccaagctcggctccggctccggcttttggattctcctgcgaagaagttgttgcctcctcgcagaagctgagagccgaacagtgtatttggtttgaattgcagcctatagtataatttgattcacccgtacagacggccacaaaaagccgtaaagggagggtagcttcttttgttgagtctaggcttgcgagctgggccaaagcggcaccgaaagaaagcttcagattcttttgttcaattaaattcattcttttgttagtggacagtgacggaaggataggacattaggagggatggatctttggttctcttttccttttttttcttctattaaattagttgtactatgttatgtcaccaatcttgtagttaccctcaaatttgtaattgatgaaattaagaaattggaaggaaatgctttcgtacccaaaaaaaaaaaaaaaaaaaaaaaaaaaaaaaaaaaaaaaaaaaaaaaaaaaaaaaaactcgagagggggccgcgggtacc

SEQ ID NO: 638 - DNA, 254 bp, Zea mays
  Clone ID: TF_LIB3245-450-P1-N1-F8
acaaaaaaaactccctaaaaccccctggaaaggccccgcctgacttactgcctttatccaaggcctcaaacgccctcgggggagcccatcaccccggaccatcgaatttattaggggaccaagcaaccctaaaccaccaggggggccgtttaagcctgaaccttggtttgctgttggaaccaaaaggcctggccccccagaacccggtcaagcaattcctgaggcacccgttcccccccccttttttgcgaaaa

SEQ ID NO: 639 - DNA, 396 bp, Zea mays
  Clone ID: TF_jC-zmX3061005Q1K1D06b2
ccccgggggactagttcaacgccgggccttttaacacgggggggcgatgattgccatgggaaacttaaaattgagtcttctacggtgcctggactgatagcgaaattccagaacgcgcatctgttggatcactaaagaaaactgttgtcagggaagtgactagcgatcttggaggtcggctacgagttggtgtcctttacacatggaaagaaagttagagatgataataaatccgtagattcacgctggtattggtcaagaggatatgctggacaacctaggctcatcacttgaacccagctggacacgcaacccacaagtcccagctactggagacattaactacccggaagccattggtactgctgaacccccttccaggattggacctgctga

SEQ ID NO: 640 - DNA, 440 bp, Zea mays
  Clone ID: TF_ZmC73462_1
gtgcaccatcaggcgccacgtggacctggagactggtgaggtccaggctggactggtgggtccggcagctacgcctcggcgaccgagttctaccgcgacctgctccttctgtgcgccaacgcgctggtcttctacccgcgcggctcgcccgagcgttccgccgcggcgcggacgcgcgcgctcgtcgccaagcacatgtccaaggatcagccggggccctcggggaaggctgtcgcggggccggcggcgtccaagaaggccaaggcggaggccgacgttgggtcgctgctggagaagacggcgcccatcatcgtgtgccggaagcggagctctatcgccaaggccgccgcggcggccaccgccaaagaggagagatcggagaaggcggagtccgacaaggagggcgagaagcagcaggaggcggtgggcaagaggaaggc

SEQ ID NO: 641 - DNA, 406 bp, Zea mays
  Clone ID: TF_LIB3279-203-Q1-K6-H9
ggtccctgcattctcgtgcgcgcaccactgtgatgcctgagcggggcctgttctctcatgcgtataagaagtactcatcacttgtggagccgcttaatgaagcacaagtttggtttgggtgttcaacaagccttgttgatgcagctacacttggtttgcgtgatgattatactattatcaagcacccaatggatcttggcacaataaggaggctggtgacccgctggctgaccatgaaccctcacgagttagctgaggatgtgcgcattactagccataacgggaggacatataatcccacgggtcctgttgtacattttatggtgaaacaaaagttatgaatctttgacgcacagtggatctgagaattgaggctgacgttaactacctattattatgttctcca

SEQ ID NO: 642 - DNA, 2333 bp, Zea mays
  Clone ID: TF_ZmC1240_1
gatttacggaaatttcctataaaaataatttatctttattaggcttctttggtggggctctcagttggcaagggacttctatattacccagcgtccggcttgccggattcctccctcacacatggttgtgttgggtagttcgcagccggcctggagcgccccaagcaccacaagaagaaacataggtccctagaatctcgtggcgcagactttgatgccgagcggcgcctgtactctcatgcgttcaagaagtcctcatcacttctgagccgcttaatgaagcacaagtttgggtgggtgttcaacaagcctgttgatccagttacacttggtttgcatgatatcaagcacctggatcttggcacaataacggcttagccgtggacagtacaggaaccctaaggagtttgctgaggatgtccggcttactttccataatgcgatgacatataatcccaagggtcaggatgtgcattttatggcagagcagttgtcaggaatcttcgaggcacagtggcctgagattgaggctgaggttaactaccttgcatcgtgtcctccattgccgaagaagtttccacctccaccaattgacctgcacttcctagagaggtcagattcgatgagacaccacatggcattggacaccaattcaagaccgatcagtcatactcccacttacacccggactccatcaatgaagaaaccaagagcaaaggatccaaataagagggacatgacaatagatgagaagcgtaagcttagtgagaacctccagaatttgccgccggtgaagcttgatgctgttgtgcaagtcattaagaacaagaacttatcagttaagcaacatgatgatgagatagaggttgaaattgatagcatggatgctgagacactttgggagcttgacaggtttgtgtcgaactacaagaagaacctgagcaagcaaaagagaaaggccgagcgagcgatgcttgcccgacaagatgcagagttgcgtgcacagcaccctatacaacaaccacaaccaaccccagtcccccaagaaccttttggtgaaaaatctccaaaacaagttgtgaaagattcgctggaaggcgagcaactgccagcatctgcaccagaacaaaatggtgagaatagacagaatgcgagtagttcaagcaattcaagcagctccagcagtggctcaggatcatcttctagtggctcagacagtgatagctcctcttcagatggatctgatgctggcaattcatcttgagatataggttcagaagttctgtcgagtaggcaataactgcctatttgacgcgacaatagcaccataagattgtacatgcttaccttgtctggcttagggaacccctgtagtttaagtaggttttgtatgtcgattcacccgctgatgaaggcagtaacttgtaggtttcgtggtgtacccgcctaataagactaggcttgttgctgacaccgtcccttggtacaccgcacttttgctaggagccctctggctggcccagacagtactagcatgtacattagcggcagcttgaacgctgattttgtttagctgtgttgattgcagtatgtaggaaggcgactgctgtatgcatttttttcttacttttgtttaacttacggatgaaagcattggcaagccccgttggtgttcagtttgcccccatctttttgtggactacctgtaacccctgtgggttcatcgccatgtgccaagtctttttgatgttgtaaattaaagtttgttgatgcatctgatgtttagcatcacgactattgacggtccattgttatgttatgatgtgaggaatgtttgctggaaaaaaaaagaaaaaaaaaaaaaaaaaagaataggtggttgtgttgggcacgagcacgagagatgatgtgtagcagttcggacctttgggtgggtagcagtaggtagcctcccctcctttcccctggtctggtgatgatggtttgttggagatgtggctatatgtgcgtatgatatgccgtggctccttttgagctgtttgctggctggcgtcttccagcgatggataatacgtgaaggctgggctgcgacggcctccagcatgcagtcagttgaagtgaagtgtacgtgtggatgttccgtctgttgggtgtgccttcctttggcactgtacgtttggttcgtcagctcaggtgtctggtctacgaggagcaatgtagtaaaggcagcaggctgttcgtattggttatttggaagtagtagggtcagcataatggaggggatcgaaggggccaaaataacttaggctaaaacaacatagtacctctgtttt

SEQ ID NO: 643 - DNA, 535 bp, Zea mays
  Clone ID: TF_ZmC209461_1
ggttctagatcgcgatctagaactaggggccacgcgtccgctcttgttctctattccctcttgggctttctgttttccatattattcttttttctcatggttcgcagaactagattaatatgtgagttggttttggttattcgcatggaggttaattgctattggtgaaggttgacgtgtcaaacatcctacatgacccacagcaatgcagaaacattctttggtatgaagcaatatgaattacagattttgtgtcatcattctagatacctgactatcatggcattataaagcatccaatggattttttaacaataagaaagaagcttgataagggggatattcctacttgaagcgatttgagaagactcttggtcatcatacatgctgttgtaaatgccagattgtccaaggacagttctgtggggattctttgtacatgagatatggtgagaatgtggtagaggttaagaagaatcctaacaggatatgtcaaggttggcgcggcatctataattgcaggatatgcagaact

SEQ ID NO: 644 - DNA, 159 bp, Zea mays
  Clone ID: TF_700223701H1
gatgattctcgagaaacttcaaaagaaggatacatatggagtgtttgcggacctgtggatccagaggagctgcctgattaccacgatgtgattgagcacccaatggacttcagcaccgtcaggaagaagcttgccaggaatgcatatcgctcgttcgag

SEQ ID NO: 645 - DNA, 403 bp, Zea mays
  Clone ID: TF_LIB5116-027-A1-PF1-E10
agattataatgacattatcaagcacccgatggaccttgggaccatcaagaagaagctagattctggttcctacgcaagtccatctgattttgcagctgatgtcaggctgacttttaacaatgcgataacttataatcctcgagggcatgtagtgcatgatctggccattcaactgaataaaatgtttgagtccagatggagaacagttgagaagaagttagctactgccgccactaagccacatgttgaggttgataaggccgactcaaagaggagaaagacccctcccgtggaacgcagtaacttgtcaatagaccgtgtcaggccaactgagattgtgaagccaaagatgacaaaagaggagagagaaaccttgggagactgcttaacttctttggccgag

SEQ ID NO: 646 - DNA, 1021 bp, Zea mays
  unsure (1)..(1021): unsure at all n locations
  Clone ID: TF_ZmC2164_1
ggggaaaagaaagacctggnaagattttgaggagcgaagagaaagccacaagcaaggctctttgatgctacgatatatgcatcaaggcaggaggatcatctaaaggcaaaaaaagaaaaacaagaaaaagaaaaaacatgaattcaaagatgatgacttacttgatcacaggccatacagaaatgacaggagggtacctgaaagacatcgagcactaaaacgatctagtccagctcctgtggttggatatgcatcatctgccaagcgtcgcagaggaggagaggttgagctctccaacatattggaaaaagtagttgatcacttgcggggtttgagtggatcactgctgtttttaaaaccagtgacaaagaaagaagcttctgattaccttgatatcatacggtacccaatggatcttggtaccatcagggacaaggtgagaaagatggtgtacagaaacagggatgaattcaggcacgacgtagcacagatacaactcaacgcacacatatacaacgacactcgctatcctcacatccctccgcttgctgacgagctcatggaggtctgcgaccatctgctttacgaaaacgcagatctgctcaccgaggcggaagatgctatcgagtagcaatataaaaagctagatttagcatttggatcttgctatatcctaacatagatgatgtatctatcttctgatctgtaggaggggaaaaggttgtacattttttgggcctagcagcaatctacatgtgatcccgaatccagccagcttctgttggtattgtgttgagaggtagtggaagtacaaaatgtctaggttagccactcaatggcctcatgttgtaaaaatgtagaatgtaatcatgtccatatacatggcatatatcggtccaataaaccgattgtgttgcagtatttgatatgatatggaatggcgtttcaattgcagcgtgaaaaaaaaaaaaaaaaaaaaaaaaaaaaaaaaaaaaaaaaaaaaaaaaaaaaaaaaaaaana

SEQ ID NO: 647 - DNA, 3234 bp, Zea mays
  Clone ID: TF_ZmC906_1
aattcggcacgagggttcgcatcgcttctggttcgggtctcacctctcgcgatcaaagcagtagcgggttcagtggcttggcgaaggaaaaaaaaggaggaaaaaaaaatagcaaggctgtgcagcgaggagacgactcgactccaactgggaggcgaaaaataaaaaagaggataaggcgaggcccgaccgggcggccaccgcgctcccagatccgctccgctgccgtggagatccagctcccttgcgcgcctgagcgtggacgccggcgtctcgctcccggatcccgaccttggggttgcagctgcttcagatccagcgttaccagatctgtgacccgctggcgcctgggcacatgacaccgacggttttaatggagtttgggcagcagaggccaatgaaacggggatacgaggaaatggtcttcagggcagcctcttcccgtggttatgcagagactgttggcgagtcgggagttgcagctggtagtcctcttcgtgttgattctgaggactcatctgtgccaaagcgcaagtgcatcagcctgaacagcgttggctttgatgtgaagcgggagatcttggtgccctctaagatgtcgtcatctgaacggcggtaccttcgaaagagattccgggcagagcttgattcggtgcgggatctcctcaagaagccagagtttgcagcccctgttcctctcaatcgggcacctgctttgtcatcctcagctgcacctcgagctaagaagccacagaagtctcagcgtggtgggaccaatgttatacgtggtgcaaagggacgattcttgcctacaaaaccgcggccggagacttccactgtgttatctgaagctgcagcgtttaagcagtgtgaagctattttgaagaagcttatgactcaaaagtatagtcatatattcaatgttccagttgatattgtgaagctgcaaattcctgattattttgacattgtgaagaccccaatggatcttggtactgtcaagaaaaagcttgaatctggttcatacacaagtccatcagattttgctgctgatgtccggctgacctttaacaacgctatggcttataatccgcgggggcatgctgtgcacgacatggccatccagctgaacaagatgtttgagagtcgatggaggccaattgagaagaaattggcttctgctgccactgagaaacatgttgaggttgacagggctgactcgaagaggaggaagacacctcctgtggaccgcagtgatgtgtcaatggagtgtgcacgacagacagagccagaaacaccgaagatgacagctgaagagagggaagcctttgggaactgcttggcatccatatctgatgagttacctcctcacatatttgaactgctacaacaatgcatcgacagcaatgcagatttgtctggggatggagagatagagattgacatccatgctgtcagtgatgacttgttatttgagctgaagaaacatgttgacaagtatttgcaagagaaagagcagagccagcaggtgaaatctgagccctccgagaatgaagctgtgaatgtatctggccttagccactcttctacaaatccttgcaaaggcggcgaacctatcgaagaggatgtggacatctgtggcaatgcctcacctatcatgctagacaaagatgcacaaatcaggaatagcaagtgtggtagtccaagtagttccagcagcgactctgaatcatcttctagcgattctgattcaggcagtgactctgaaagcgaatcagaaaaagttggcagccctggaaagcttgcgaaggggactaagaaacctgatcagctggtggagcaagaaaagagtgatgttattagtccagctgatgccaaccgtcctgctgctattgtggggcttcatggggaggacagtgagtcaaagcctgcaccagggggggaaaactcagaacccgatacacaagtctcaccagacaggctattgcgagcagcccttttgaggagccgttatgctgatgtgattgtcaaagctcgtggcattcttagtcagggtggagacaaacaggaggagctggaaaagctacagaaggaagagaaagagcgcttgttggctgaaggtactgcagccatggaggcttgtagagccgaagctgaagctgaaaagaagcgtaaacggaattttgagagggagaaggctcgtcaggccctacaggagatggagagaactgtagaaattaatgataacctccatctcaaggatttggaattgcttggaacagccacaacagaacatattgtaagctctgttgatgagactagtccagaacgctctcatgatggcatggccggctatcatccaggagctgtcaatcctttggagcaacttggactgttcataaaggtagacgatgaggaagacgacgagcagtgttccctgcattaaagaaagaagagaaaggagaaatcagctgatggtgctgtgtttttccatgccctgtcacgggctaggggctggtgccaacctattgatccaaagtgatcacctgttgcgggccatcatgtgtggcaatggttctaaactggggtggtgagagccgtccattttgttaaaaatatgcatgggaaggatgaagatcatcttgcatagtcatttgcttccaggaggcgcacaggaggtggagtaaaaacgaacgtatttatggtgcctagaggacggttttttcagccactgccaaaacggcttgaatgacgccaccgaagtagtggagttcaaatggctcattgtttgccgcaacctcaatttcaagcgggtttgttcagcggcttatagcttcttctctccttttgttgtctcatctgttttagattgtagaatttgggctagttgcttcctgctgtaaatccgaattttgatgtagtgacggaagtgctacctttttgttgagcatgatcgaaaagtttacaagaaaaatcgtttttttgtaaaaaaaaaaaaaaaaaaaaaaaaacctacaaaaaaaaaagaaatcagtgtaacaaccgttgtgtttaaattaaaaaaaaaaacgaattttttgttaagcacgggccagtcgtgactgaaacagcaatttgtttcgcaatcagtgtaacatccgttgtgtttatattctgctcgacaacgagtacggatttaagcacgtgatatcagtgaataagacagacattagggtctaatcgtttttatcaaaa

SEQ ID NO: 648 - DNA, 365 bp, Zea mays
  unsure (1)..(365): unsure at all n locations
  Clone ID: TF_LIB189-003-Q1-E1-D10
gaaaagagctagatataagaagatgattcgccggcatatggacttccgaatgcttcactctaagatcaagagtggcgcaatctcttgcaccaaggagcttctgagagatgtgctcattttcatcaataatgtaataacattctatccgaaggctacattggagcacatggctgcggttgagcttcgtgagtctgcatgcaaaactgtgaagcagagtgcaagcttgttcttgaaaagccatggagagaccggaacagctggtgcccctgtagtaaagaatactcgagtcctgcagcctcgatgcnctggccccggtgatgcaaggccaagcaaggttttcttcaaggacgctactgccaaggaaa

SEQ ID NO: 649 - DNA, 2439 bp, Zea mays
  Clone ID: TF_ZmC20581_1
gttccagttgacattgtgaagttgaacatccctgactactttcaaatagtcaagcagcccatggatttgggtacgatccagaaaaggatgaaggcaggcatgtactctacacctccggaatttgctgcagatgtgaggctcactttcagcaacgctatgaactataacccagctaacaatgatgttcatttaatggccaaaactttgagcaagaactttgagagccgatggaagcttattgagaagaagctccctaaaccagatgagaagcctcctcagccagatgagaagcctcctcaaccagttgagaagcctcctgtgaggaagcccacaaaaaagaattcaactaagagagtttccattgagaaagaagacctcactaagaaaaaaccctcaaagaaaagtgtacctaagcagtacatctttcggggagaagattcagctgacagtccagttctgcaaccaaagaaaaggaaaacctctcctttggtacaagatgctcctttggtaggggatattgttccaaccagaaagagaataatgacgagtgagcaaaaatatgatttaagtgcaagattacagtcatatggtgcattcattccagatcatgtagttgagctcataaggagtcacgctgactattgcgacgccaacgaagaggaattagagcttgatatggatgctctaggtgatgatacactttttgaattactgaggctacttgatgactatgacagagttaacccatcaagaaaccttacagaacaggatcctcatgaggttaagtctcgaagtcaatatgaactcatcaatgcgtcagtgtgtaacgaggaagtaaatgagctctttgacgaggacgttgatattggggagaatgaccctccagttttgacttttactcctttggtacttgaagatgaaacagcagacagaagccgcaaacatagtgcatctagcagttctagtagtgacggagaatcatcctctagtggttctagtagctcttctggaagtgatgccgatgccaaagctgctcaacaaaacagcgggtcaaaggaaaaaattctacctgtggatggcgtgggtcatgaaaaggattcactggacacattaaatttaccagagcaaagtacagaccctgtctctgtttctgcttatggtgagggggggtatgtatctgagaaggtctcccctgagaagcaaatccgagctgcccttctgagaagccgctttgctgatacgattctgaaggctcgcgaaaaggctcttgatcagactaccaaaaaggatcctgagaagcttcgacgcgagagggaggaacttgagaggttacaaagacaagaatttgagagctcggttgcaagctgaggctaaagctgcagaggatgcctgcaagagggctgaagaagcagcagctgctgaggctgctgcagaagctaaacgacaaagagatattgagagagaagcagctcggaaagctttgcaagagatggagagaactgttgacatcaacggagggagccactttctgaaagaccttgaaatgcttagaggtgtcacaggcgaagagatgcccaacttggttggtgaagggagccctgggtttcaactgggaagcagcaacgccctagcaaagctcgggctgtacatgaaagatgacgaagatgacgaggagggcgatttggcagatgcaccagtggtggttgatatcgaagagggagaaatagattaagcgtgcttcttctggaccattttttatacgcgacaggagacctgtgggcatcactgatctgcatagcttttctttggcatacaaagcgacctgacgaaaagatcgcctcgcaccagacctggaggtctggtattcgtttttgtaactgcccaagttttggagccaagtcactaggttcgtcgagcttatcgtttggattgagaatctctggacttctgatatccactttcgataaggacttgttcggttaagaggtgatcgaaggagattggagaggggattggagaggattaaatccctttctagtcaattgaacagaggtagcaactgaataagccctaaaatggaatggcgagtttactgcatatatgatgaggccataaaagcggatgaaaagggaggagaaggcacaaggagtgatatatatgatgaggccataaattcggatgaaatgggagaagagatggggtagtggggagaaggcacaaggagtgatggtgatggctcttgagctggtgccagccgtttttgaggggtagttttagagccatttccgtgtcgtgaatgtaatatcggaaactgtacaaaagttagctagttagacgatggaaatcattctttccttcaatttatgcagtgcctgttcttatgagacgttgcccaaaaaaaaacaaaaaaaaaaaaaaaaaaaaaaaaaaaaaaagaga

SEQ ID NO: 650 - DNA, 286 bp, Zea mays
  Clone ID: TF_700332659H1
aagcacgccgcctacgcctggcccttgtacaagcctgtggacgtggaggcactgggcctacacgactactgtgacatcatcaagcaccccatggacatgagcacaatcaagtctaacctggaggcccgtgagtaccgtgatgctcaggagtttggtgctgacgtccgattgatgttctccaactgctataagtacaaccctcctgaccatgaggtggtggccatggcccgcaagctccaggatgtgttcgaaatgcgctttgccaagatgccggacgagcctgagg

SEQ ID NO: 651 - DNA, 1942 bp, Zea mays
  Clone ID: TF_ZmC1935_1
cacgaacacgcccccccgggctgcagcatcccgctcccagatctgccgaagaaccctaccacccaacgttctagaacttcccctctttccccgcatggacggcctcgtggcgccgtcgccatcccactccggcgccacctccggcggcggggcctcccaccgcaagcggaagctcccgccgtcgtcgctctccgacgccaccggcgacgaggacgacgacaccaccgctccgtcatccccctccacggccccatcctcgccctctcgcccgtcatctccatcttcttcgcactccgacgatgacgacgacgactcgctccacacgttcaatgccgcgcgcctcgacggcgcgccgagtgggggctctgcgtccggccgtcctcctaagccggattcctcatcagtgtctgctgctgcggcggcagccgcggctgcggtgggtggaggacctaagccggagcccggctcggcgaacgccggcgacgggaaggaggacacaaaggggctgttcacggacaacctccagaccagcggcgcgtacagcgcccgtgaggagggcctcaagcgcgaggaagattcaggaaggctgaagtttctctgttattctaatgacggcgttgatgaacacatgatatggttggtagggttgaagaatatcttcgcccgacagcttcctaatatgcccaaagaatatattgtacgccttgtcatggatagaactcacaagtcaatgatggttatcaggaacaatattgtcgtggggggcattacttatcgcccttatgcaagccagagatttggagaaatagcgttttgtgctatcacagctgatgagcaagttaaaggctatggaacaagattaatgaatcatttgaaacaacatgcacgggatgctgatgggctcacacatttcttaacctatgctgataacaatgctgttggctattttgtaaagcagggtttcacaaaggagatcacattggacaaagaaagatggcaagggtacattaaagattatgacggaggaatattgatggagtgtaaaattgacccaaagctgccatatgttgatgtggcaacaatgattcgacgtcaaaggcaggccattgatgagaagatcagagagctttctaactgccatattgtttattcaggaattgattttcaaaagaaagaagctggcattccaagaagactgataaagccagaagatatccctggtctcagggaagctgggtggacgcctgatcaattggggcattctaaatcacgatcatcattctccccggactataatacttacaggcaacagcttactacccttatgcagacagcgctgaagaatctgaatgaacatcctgatgcttggccattcaaagagcctgtggattcacgggatgttccagactattatgatatcatcaaagatcctattgatttaagaacaatgttaagaagagtcgactcggaacaatattatgtgaccctagagatgtttgtagccgacatgaagagaatgttcagcaatgcaagaacttacaattctccagatactatctattacaaatgtgcgacacggcttgaaaacttcttctcgggcagaattactgtactgcttgcacaactctcaaccaagagctaggctggcgtgggctcactggactgggcactactgtcgcatgttgtaaaattattattggctcactggactggacactactgtcgcatgttgtaaaattattaagttgtattgatatagttgtcaccttgctgaatgttcggcacggtgatgaacttttagtttagcatgtagtttttattttaaccaggagggacactgattgatctttacatttcggtctcaacctggccggcctaataatatagattgaggagattcttcagtttctaaaacctatgggtaaagatgttttgcatcctt

SEQ ID NO: 652 - DNA, 1070 bp, Zea mays
  Clone ID: TF_ZmC1935_2
gagaaatagcgttttgtgctatcacagctgatgagcaagttaaaggctatggaacaagattaatgaatcatttgaaacaacatgcacgggatgctgatgggctcacacatttcttaacctatgctgataacaatgctgttggctattttgtaaagcagggtttcacaaaggagatcacattggacaaagaaagatggcaagggtacattaaagattatgacggaggaatattgatggagtgtaaaattgacccaaagctgccatatgttgatgtggcaacaatgattcgacgtcaaaggcaggccattgatgagaagatcagagagctttctaactgccatattgtttattcaggaattgattttcaaaagaaagaagctggcattccaagaagactgataaagccagaagatatccctggtctcagggaagctgggtggacgcccgatcaattggggcattctaaatcacgatcatcattctccccggactataatacttacaggcaacagcttactacccttatgcagacagcgctgaagaatctgaatgaacatcctgatgcttggccattcaaagagcctgtggattcacgggatgttccagactattatgatatcatcaaagatcctattgatttaagaacaatgttaagaagagtcgactcggaacaatattatgtgaccctagagatgtttgtagccgacatgaagagaatgttcagcaatgcaagaacttacaattctccagatactatctattacaaatgtgcgacacggcttgaaaacttcttctcgggcagaattactgtactgcttgcacaactctcaaccaagagctaggctggcgtgggctcactggactggacactactgtcgcatgttgtaaaattattaagttgtattgatatagttgtcaccttgctgaatgttacgcacggtgatgaacttttagtttagcatgtagtttttattttaaccaggagggacactgattgatctttacatttcggtctcaacctggccggcctaataatatagattgaggagattcttcagtttccagccacc

SEQ ID NO: 653 - DNA, 273 bp, Zea mays
  Clone ID: TF_700447086H1
ttctctgtctgtagtgaggatcaggaagctattcaggcacagaaaatttggaagaaagccatcatgcttgtatggagagctgcagctaatcataggtatgccaatgtcttcctgcagcctgttacagatgacatagcacctggctaccacagcattgtgcagaggcctatggatttgtcaactattaagaaaaacatagaaaatggactgatccgaagcacagctgaatttcagcgtgacattatgctgatgtttcagaatgcgtaatgtaca

SEQ ID NO: 654 - DNA, 1948 bp, Zea mays
  Clone ID: TF_ZmC8951_1
gccgagaaaaaatcctcgcccgcaacaccatttccgaacgggtcgcgcccgagcccgatatgcccgcgaagcccaggcccagccagacccaaagcgatgcgacggagatcgtgagatcgcgcgccgcagcctcctcccccgcccccgccgccggcgatgacctccgcagtcctcgccggccggaatgaggtccaccaggcgcatcagcaccaccgccaatgggctggcgcccgcgtcccgctcatgcccaagccgtcctccaaccctaaccctaggcgccaccgcgcgggcccaaaccctatccccagtggctcgccgccggagccgcgggccgctccggccgtcgcggccgagccctcgccgtcgccttcggggcacctgaacttcaggccgtcggaaatgacccccgccgaggcccggcacctccgcgcgcggctcaccagcgagctctgccgcgtccgcgctttcctctcccgcatcgactcgtggcaggacgggcagcgccggcgccggggccccgagccccccgcgcgcggcccgtccccgccgccggcgctggtggaggcgatgcggaagcggtgcgcggacatcctgatgcggctgcggaggtcgaagaagagcgtgtggttcaactcccccgtcgacgtggagggcctcaagctgcacgactaccgcgccatcatccggagccccatggatctcggcaccgtcaagcagaacctcaccgccggccggtacccctcgcacgaggcgttcgctggcgacgtccggctcaccttcaacaacgcgctgcggtacaacccgcccgaccaccacgtgcacaggtacgccggcaacctcctcgcctcgttcgaggggatgtacaaggaggccgtctcgtggttcgagcagcagcgccagcagctcgagccaccaatgcagcccgatttgccgccgccgccacagctcccggtcgtctctgtgccagtgcaagcgcccccgaggatgggtgggggcgggaggaggcccaagcccaaggcccgggagccaaacaagagggagatggacgaggaggagaagcagaagctgagggtagagatcgagaacttacccgaggagaagatgctgaatgtgctgcagattgtgcagaagaggaacagcgatccagcgttcactggggaggttgtcgagctcgatttcgacgagctggatatggagaccctctgggagctcgatcggttcgtggtcaattggaggaaggctctgaagaagagccagcggaactctatggtgaatggcgatgctgccgcggcggtgaatggagacgccatcgatgtgacagttgttccggacgacgacgacatggtcgaggttgctgtcaatccgtccgtggcggtcgagatcggagagtcggctgacgttccagagaaagaaatggaggccgagatggtcgacgattacgtggatataggcgacgagatgccgacagtgaattaccagtcagtggagatcgagagggattccccggcggctgccagcagctcaagcggatcaggaagtggctcgtcttcatccagcgattccgactcggactccgattctgacggggacgatgccagcgccccgcactaggtgtggctgttgttgctgttttatctgactgtactgtaggattagcgatgagtaggtgactgaaaaggttccatttgatgaggcgttttgaagaacggtatagagaagcctgtagggaactcttgttcatgcaatgcaagtggttgtgttcgtctgtgtatgtgtgggtgcagcatttaggttgtcggtacttgggtgatgggtaggtggtagatgcttgggtagattgggaggcttctgtaaagaggggaatataagctggaacaaagaggaaaagtagcaatgccggccggggcatttcttcatgaaaaaaaaaaaaaaaaatcattatgtttct

SEQ ID NO: 655 - DNA, 1280 bp, Zea mays
  Clone ID: TF_ZmC296488_1
gacagctacaggtactagcaggctagcggctgcctcccttgtccccaccggccgccaccaccaccaccacggcaccaccacaccgacccccttcccctcccctctccctgtcgtgcggtgcctcctccgcccaaatccccaaatccgcgcctccgatccgccgccgtccacgatctgccgcagccgttgacccgctaaaaatggcctccgggccgccctcgccatccggcaaaccctactcgcgcaaatctcacgccagctccaaggctcccagcgtcccttccttcgacgcccacaacggccagctcctacccaccgtcaccttttcgctgccctccacgaccaccgcccgccgggagctgcgccgccgcctctcttccgagctctcccaggtgcgcgccgccgtcaagcgcctgaactccctcccggctcccgccccctcctcggcgctctctgccaccgacccctccacgccgcatccgccgtacccgccggcgtccaagcacaagtctaagaagggcggcggagtcccgcagccgcacctctcggcggaggcgcggcgcaagctctacgcgcccgtgttcaagacctgcgccgctctgctctccaggctgatgaagcacaagcacagctgggtgttcaacaagcccgtagatgcgagcgcgcttggcctgcacgactaccatacaatcatcaccaaacccatggacctcggcacagtcaagtcaaagctaggtgccgggcagtacaagtcaccacgggaatttgcaggtgatgtgcgtctgacgttccagaacgccatgacgtacaaccccaagggccaggacgtgcacttcatggccgagcagctgcttaacatgttcgaggagaagtggccggagattgaggctgagatagctcagctatcaccacagcctcctacaccatcctcagcagcacccaaaaagccaaagccaaaggagatagataattctaggccgttagagaggtctgattcgacagttcatgctgccgggatagaagctaccccgaagacacacactggcagaccccaagttttaaagaagcccaaggcaagggagcccaataagagggatatgacattctgggagaagcagcggcttagcaataacctccaggatttgccaccagagaagctagacaatgttgttcagatcataaagaagaggaacttgttactcatcccgcacgacgatgagattgagggtgatatcgatagctttgatgttgaaacattattggggctcgatagatttgtg

SEQ ID NO: 656 - DNA, 666 bp, Zea mays
  Clone ID: TF_LIB3595-033-Q2-K6-E12
aggtatcaagtggatcaaccaagttttgacgatagattgaggtacttcagtatattgtttgagtcattgctctctttccaaatggaagaatcaagaaacaagtcaaagaaacagaagtctgctattgaccttcccaaagccccgaaagaagtggagggccctaaggtttctgagctaaaggctagggcagaagctgagcagcatgctgttcgtcgaatgaggatgtgcctccgagatatctgtaatcgcattttgtacaacaaaaggttcaatgtatttcacttcccagtattagaagatgaggtgcctgactatcgatcaataatccacaagcctatggatatggctactgtcttgcagcgggtggactctggacagtaccttaccagggcagcatttataaaggatattgatcttattgtctcaaacgcaaagacttacaacggggatgactacaatggatctaggattgtcagtagagcatgtgaactcagagatgtggtatcttgtttgttctcactttctcctacattagactgttgacaatgcctctacagattatcgttgttgtgtctaatgaacctctttttggccaggtccaaggcatgttgtcacaaatggacccatctttggtgtccttctgtgataaaattgcttcacaagggg

SEQ ID NO: 657 - DNA, 1771 bp, Zea mays
  Clone ID: TF_ZmC828_1
ccggccgggtagacctcgccttttgatatgtggtggtgaaagtgtcggactggatcatgtgggaccagctgttttgcatgagcttgagaagttctctgttcactctttgggactgccgtctcttctctctgatccaagtgcgaagacacctgaagaagctcttgtgcatatctttggggaagccaagagaacaaccccgtccattctatacatacctcagttccatctttggtgggatacggcacacgaacaactaagggctgtgttgttgactctgttgaacgatttgccctccaaccttccagttttattgcttggaacatcatcagtggtttttactgaccttgaagaagagtgtgcttccatattctcttctcgcaatgtgtatcaagtggatcaaccaagttttgacgatagattgaggtacttcagtatattgtttgagtcattgctctctttccaaatggaagaatcaagaaacaagtcaaagaaacagaagtctgctattgaccttcccaaagccccgaaagaagtggagggccctaaggtttctgagctaaaggctagggcagaagctgagcagcatgctgttcgtcgaatgaggatgtgcctccgagatatctgtaatcgcattttgtacaacaaaaggttcaatgtatttcacttcccagtattagaagatgaggtgcctgactatcgatcaataatccacaagcctatggatatggctactgtcttgcagcgggtggactctggacagtaccttaccagggcagcatttataaaggatattgatcttattgtctcaaacgcaaagacttacaacggggatgactacaatggatctaggattgtcagtagagcatgtgaactcagagatgtggtccaaggcatgttgtcacaaatggacccatctttggtgtccttctgtgataaaattgcttcacaaggggggccactgcaggctgtggatgatgaagatagagctattcttcaagcagcacctgttgctcagctggtttctggtactagaataagtgcaaggcttcgaaatgtacagcctgaagtaaacctgtcacaaagttatgaagtgctaaggcggcaaaagaaaagtgcagaaaatgaacaaagcatgactagagatgaaaagtctcctgaagatgtagatttgtcgaagccaactgacgcagaagaagctgcaaaagaaccagagtcaaatggcactacgaaagaagccaacgattcaccagccaaagaaccagaagtatctacttcccctgaacccatggagagtgacaacggcaaaattgccgcggctactggcgacgacttgttagaacagctagaagccctgaagcaacgcttcatggaactcactgcaagctatggcgtgccgcagctcgagaggctgtattccaagataatgaaaggagcaatagagttgacaagtaaagaaagcaacgaggatcataggcggttagtagttaggtatttgtggacattcgttgagaacagcaacaatttttaacctggcgccaataagattcttgttttccttgtacatcctctttggaacgaaacaatagtagccgttcatcttgggagttgtccccgttccatgccttgtaacaaatcttccaaatgctctagtgtcagtgacacagttttgccatgaaatgatgtagcaagtgaacccttcctagatttgtacctcagtttgatgaatttatgaggtggaattccctcttaatgcataacatgtgttaccatg

SEQ ID NO: 658 - DNA, 769 bp, Zea mays
  unsure (1)..(769): unsure at all n locations
  Clone ID: TF_LIB4969-022-Q1-XP1-A11
gccggccgggtcggggctcacacgcaacgacgcgcctcggcctcgcagaaacaggggccaaaaaggaaaagaaaaaaaaagaggaaaagaacgcagggaatgggcaagcagcagcaggcaccaccggcgcggcggtccccggcgatgtcggcgcctccgccaccgaagcgccggaagaagaagggccggccgtccctcctcgacctccagaagcggaacctccgcctcgagcagcagctccaacagcagcagcagcagcagcagcccaaggggcgacgctccaaccgccggagcgccggctccgcggacgagngacgacgacggccccgcctccggctccggccgccgcgagaagaagctgcgcctcgtcatgggcctccacgacggatcacccaagcaggtagaaaaggcgaggaaagcgacggatgggcatgaagagttgtcagattccgggcccacaacacctttgccaaacaaaaagttattgctcttcatccttgataggctacagaagaaggatancatatggtgtattttcagagncctgttgatcctgaagagctacctgactatcatgacattgtaaagcatccgatggatttttcgacaatacgtaagaagctcgataagggtgcctattccaacttggagcaanttgaggacgatgtgttcctgataacaccaacgcgatgtgctacaattcaccagatacnatatactatcgacaggcacgaggtattttcagagatcgctaaaaggattttgagat

SEQ ID NO: 659 - DNA, 631 bp, Zea mays
  unsure (1)..(631): unsure at all n locations
  Clone ID: TF_LIB3632-059-Q6-K6-E4
cgctcccgtgctctctccctctccccaggatccgaattgccagcgcaccagtcgagctcgcgggacctcgccggcgccggcgatggcctcctcccttttggccggacggggagggggccaccaccacaactggggggagacgcgcgccccgctcgagcccataccccccaaccctagtcccagccagccccacccgcgcgccgacgggtccaagtccaagccgcgggcggcggccggctacgtgaagttccgcccggcgtccctgggccaccgcgaggcccgcgcgctccgggaccgcctcgcggtggagctcggccaggtccgcgccctcctctcccgcatcgacacctggcagcagcagggcccgccgccgcgcgcggtgctccgcggggcgatgcggaagcggtgcggccagatcctcagcaggctgcgcaaggacaagcgcagcgtgtggttcaacgcgcccgtcgaggtggagcgcctcggcctccacgactaccatgccgtcatcaagcgccccatggatctcggcaccgtcaaggagggcctcgccgccgggaggtacgcctcgcacgacgacttcgcggncgacgtncgcctcaccttcaccaacgcgctgcggtacaacccc

SEQ ID NO: 660 - DNA, 510 bp, Zea mays
  Clone ID: TF_uC-zmflteosinte056e06a1
aaataattaggatgaggttgctgcactgtttaatatgtcataatatatataataatagaaattaacaaatgtttcttcaactcaaatagcatgtagtcactgacagtattgctgtcgttgcattgttgcagcagataactaatgggatatagaaaccaaacagttctcaaatgcttgtctcttcaactgtcatgtttggtttttcatgctatacacactccatgtctcactgcagtccataggaggtattgtcttcctcttcaaatttctcagtggcagcaaaagctagtttcttctcatttggcctccatcgactctcaaacatcttgttcacctgaatggtcatgtcgtgcacagcatgcccccaaggattataagccatagcgttgttaaaggtcagcctggcatccgcagcaaaatcagatggacttgtgcatgagccagattggagcttcttgtggactgttaccaagatccattggatcttgacaatgcaaactaatcaggaat

SEQ ID NO: 661 - DNA, 1988 bp, Zea mays
  Clone ID: TF_ZmC19394_1
tcgccgccgggcctgcgcaaaaaaaaaatatcgcagctagttactccactccccccatccctcctctctctctctctctctctctctctcggatccgaattgccagcgcaccagtcgagctcgcgggacctcgccggcaccggcgatggcctccgccctactggccggacagggcggggcgcgccaccacggctggggggagacgcgcgccccactcgcgcccatacctcccaaccctaaccccagccagccccacccacgcgccgacgggtccaagtccaagccgcgggcggcagcctcctcgccggcggccggatacgtgacgttccgcccggcgtccctgggcccgcgcgaggcccgcgcgctccgggaccgcctcgcgggggagctcacccaggtgcgcgccctcctctcccgcatcgacacctggcagcagcagggcccgccgcccgcggggctccgcggcgaggtgcggaagcggtgcgggcagatcctcaccaggctgcgcaaggacaagcggagcgtgtggttcaacgcgcccgtcgaggtggagcgcctcggcctccacgactaccacgccgtcatcaagcgccccatggacctcggcaccgtcaaggagggcctcgccgccgggaggtacgcctcgcacgacgacttcgcggccgacgtccgcctcaccttcaccaacgcgctgcggtacaacccggtcggccacgaggtccacaccttcgctggcgccctcctcgcctacttcgagaggatgtacaaggaggcgctcgcgtgcttcgaggaagactgcaaacgccctgagccgccaaggccagtggcgcctgaattgacacctccacccgcagctgagcctgttgaggccaaggttaagccgagagcagggaatgtgaggatgcggaagcccaaggccagggagcctaacaagagggagatgagcctggaggagaagaacatgctcagggtggggctggagagtttgcccgaagagaagatgcataatgtgctacagattgtgcgcaagaggaacaacaatccggagatgctgggggatgagatcgagcttgatattgatgagatggatgttgagacacagtgggagcttgatcgtttcgttgctaacttcaacaaggcgctcaagaaatcccagcgtgctgtgttgaagcagtacagcaccatgtgtatgtaagctggaggtggaaggtactggtgtgttaaaagtatcagcaatgtgcttacgttggttgacaatgatgatgtggagagagagaaacctgtgaggagcgctacaatggctgagcaggtggatgagtatgttgatattggggatgagatgccaacagccacttaccaatccatggaaatcgagaaggacgctgaaggtgcgactggctctcgtggttctggcagtggctcttcgtcgtccagtggttctgagtcgaggagctcaggggacagtgcctcaggagctggcaatgctcattctttggcttaggggaggttgttaacaataggatttgaaaatttggatgatccgagttctgttgttgggtgatttacgtagaggtagtggtaattgtaagtatgtagctctttctgagacgtgggtttgcgtaggcgtggattacacagttagtagtagataacaaactggctttctgggtgtctgttagcaccatgtgtatgtaagctgggggtggaaggtgctggggtgttaaaagtagttgatcgaccttctggtatggagggggccagggctagtgtttgtgttctttgtagtacagttgttctggtgcagacctcttatgtaattaatgctttgtgcatgacattaaagtatggttttataagtaacaaagcagtatcatttgttgggtggtgttcttaatggtagggttgatcgaccttctcgtaattgatgctttgtgcatgacattaaagtatggttttataagtaacaatgcagtatcatttgttgggtg

SEQ ID NO: 662 - DNA, 929 bp, Zea mays
  Clone ID: TF_ZmC1935_3
gtacgtaagctcggaattcggctcgaggctaaaagggcatacttgtgctcgtataaaattgagaaagacatcaaatgatctgtacatcttgatcaactttgcagaatctgaatgaacatcctgatgcttggccattcaaagagcctgtggattcacgggatgttccagactattatgatatcatcaaagatcctattgatttaagaacaatgttaagaagagtcgactcggaacaatattatgtgaccctagagatgtttgtagccgacatgaagagaatgttcagcaatgcaagaacttacaattctccagatactatctattacaaatgtgcgacacggtgagtattctttttacgtacattattctcgcagccagggatgggtatgttcctggcaagtaagctaggacctgggttgccaacatctagtttctcgagattttctaaccggctgctttatcatgtttagttgttcacattatctgacctaatattatcaaccatgccattctatcttctaaatggcacaatgcccagcttaaatctggccggtacagtttatgccagctggcagactagggttgcatctctggcgctgccacgtgactatcgattttgttggttttggtcacgcaggcttgaaaacttcttctcgggcagaattactgtactgcttgcacaactctcaaccaagagctaggctggcgtgggctcactggactggacactactgtcgcatgttgtaaaattattaagttgtattgatatagttgtcaccttgctgaatgttacgcacggtgatgaacttttagtttagcatgtagtttttattttaaccaggagggacactgattgatctttacatttcggtctcaacctggccggcctaataatatagattgaggagattcttcagtttccagcaaac

SEQ ID NO: 663 - DNA, 939 bp, Zea mays
  Clone ID: TF_ZmC531483_1
gaccctcgaggttggccgggagggaaaaaaataccaaacgcacgcaaagcccacgcacctcgacccgttcccaggccatcacaccaccagcaccacctcgtcccccgtacctgcctcgccgccgccgccgcctcctgccggcctccgatggcgaagacccgcaagcctccggcccctccttctccgccgccgccccccgcagaaacgccatccccgcagcggcggcgcaagaagaagggccgcccgtccctcctcgacctccagcgccgcagcctccgcctgcaggcccaaaaccctagccccgccgcctcgcccacccgccgggaccccaatccctccgacgacgatgaggacgggaccgggagcgggcggcggcggcagaagcgcctcaagagcgtcctctccggcgtcgtcaaggaggagcagggggaggggaagaaggatgcagcgaaagcgacggggaaagaggacgctgcgtcggatggtgggcccacggggactcccctcccagacaaaaagttgctactcttcatcctcgataggctccagaagaaggatacttatggagttttctcggagcctgtcgatgcagaggagcttccagattactttgacattattgaccatccaatggacttctcaacaatccgtgagaagctgttgaatgactcgtattctaagttggagcagtttgaggatgatgtgtttctactcacatcaaatgccatgtcttacaattcagctgatacaatctacttccgacaggcacggtctattgaagctcttgccaaaaaggattttgagaacctgaggcaacccagtgatgaagaggaacccaaacaccagctcgaaggggtaggccaccgaagaatcccaagacagagggtgatgtgtcaccagacctatctaatgtgaaagcaaataaacctgaagacaatg

SEQ ID NO: 664 - DNA, 1482 bp, Zea mays
  Clone ID: TF_ZmC21171_1
tgggtacctcgagccggccgggaaagaaataccgtcagagcgacgttagtcggctcagctgtagtgtagttgcaggtgttcgccggcacacgcgcgtggccgcgaaccctagatgacgccggcgaacggcgccccagcgcgggcagcggaggcgggcccccacgaggtggagtcggaggccgacgcgttccggcgccaggtcgacgacctcgtctcgaagaccgacgtgctggagcggcgggtgaaagaggtggcggacttctacgatggcaaaaagcacggaagcggcgggaggaagggtggtggtggtggcaggtatggggcatcctcgaggggaatgccggaccttatgcgccagttcggcgtgcttttgaaagagatcacctctcataaagatgcatggccatttctggagccggtggatgttgtaactctacagcttcctgactatcacaacattattacccaacctatggacttctctaccatccaaaagaaaatggaaaggaaggatggtacttgttacaccaatgttagagaaatatgttctgatgttcgattaatttttgccaatgcgatgaagtacaatgatgatcaaaatgtcatccacttgatggctaaatcattgcttgagaaatttgaagagaagtggctccattttcttcctaaagttgagagtgaggaaaaaagacaaaaggaggaggaatcaaagggtgttgcagccacaaatacttctcgagaagttgcaattgtaaaattagcaaaagacactgatgatgagctaaatcagatcaacaggaagctggaggagctccggaaaatggtggttcacagatgcaggaaaatgacgacagatgagaagaggaagctgggtgcaggtatctgtcacttgtctccagatgatcttagcaaggcgctagagattgtcgcacaagacaatcctagcttccagactaaagcagaagaagtggatcttgatatggatgcccagagcgagacaactctatggaggctgaaattctttgtgagggaagcgctggaacgacaggccaacgttgcctctgggaagatggacgaaaacgccaagagaaagagggagatatgcaatgctctggccaaaaccacctcgagacggatcaagaagcagccctagccatcttccatatctttcactcgcgtcctctgattgtttagaagttctttttttgatactagccaccagctttgtgaaacgttttcctgcattttttttgtgatgtgtatatagtagtatagtgaactgtccagtccagtaacaagtgatttcgtgtgtaaccatgagctggtcgcattcgcgtcccctctgatccaacaacaaacattgtctcacaatgtgattgattgtagaagcaagcttttgtcacagggcgatgttgctcacttgtggaatcagatgatgcatacatttcgtaactgttcaaaaaaacaaaaaaaaaaaaaaaa

SEQ ID NO: 665 - DNA, 974 bp, Zea mays
  Clone ID: TF_ZmC8951_2
cattgggtacctcgaggccggccgggaaagacttatagttccctacctagatggcctccacgtagcacgctcccaaatctccccacccctcgtcacctcgtcctcagcaccccaagtccccaaccaacatttgccgaacggatcccgcccgagcccgagagctcgcgaagcccaggcccagccagacccacgaagcgatgcaacggagatagtgagatcgcgtgaagccgccgatgacctccgccgtcctcgccagccgggatgaggtccaccacgggcacccgcaccaccgccgctggggcggcgcccgcgcccccctcatgcccaagccatcctccaatcataaccctaggcgctaccgcccgggaccaaaccctatcgtcagtggctcgccgccggcgccgcgggccggttcggctgtcgcggctgagcccttgccgtcgcccttaaggcacgtgaaattcaggccgtcggaactgacacccgccgaggcccgtcatctccgcgagcggctcaccggcgagcttggccgcgtccgcgctttcgtctcccgcatcgactcgtggcaggacgggcgtcgctcttccccgccgccggcgctggtggaggcgatgtggaggcgatgcgcggatatcctgacgcggctgcggagatcgaagaaaagcgtgtggttcaattcccccgtcgacgtggagggcctcaagctgcacgactaccgcgccatcattcggagccccatggatctcggcaccgtcaagcagaacctcaccgctggccggtacccctcgcacgaggcgttcgctggggacgtccggctgaccttcaacaacgcgctgcggtacaaccctcccgaccaccacgtgcacaggtacgccggcgacctcctcgccacgtttgaagggatgtacaaagaggaggtctcgtggttcgagcagcagcgccagcagctcgagctgccaatgcagcttgatttg

SEQ ID NO: 666 - DNA, 2661 bp, Zea mays
  Clone ID: TF_ZmC16_1
ggtacccaaacggaaaccagccgaccgcccccgaaaaaacagcaggcggggcactcgtcaccagagtaccatacccccgccccgataccgcgacgaccggacgcctcgtccgcccctcctcccgagttccgactcatactggctatccaccgcctgtctcccccgcgatcaagtcgaccagagccggcaaccgatggtggtggtggcggtgggagggggcggcggcggcggtggctgggggacgtgggaggagctggtgctgggcggcgcagtgctccggcacgggggcgccgcgtgggccaccgtcgccgacgagcttcggacccgctctccgtgcaccttctcgcccgaggaatgtgaagcaaaatttgcagagatacagttgcggtactctgcgtgcaatgcttggtatgaagagcttcgtaagcagagagttgctgaactgaaaagggaattggagaagtcagaaaattctattggatccctccaatctgtgattcaaagcctcagcaatagcaaacacgttgatgggagttctgaatgccgcaccagtcatactgaatcatgtccacattctgaaaatacagcagatactaattcctcaggtaaagaaacgtccagggatagatcatcagctgctagtttcacagaggaagcaaggaacagtcagaaatctcagaaagtgcagcagtgtgatactgattcaattcaagctatcaatccatcaccagatgagtcatatccccaggcccaagttgaaaaggtcggtcccaaagatggcttgctttggggttctagaaaacaaagagtagggagagctagaaggacacttctgaaaggtggtgatagtagcggggatggtgagcctacatctacagcatgcatacagagggagggtttgtctaaaggctgcatgaagaacttcataactcaaaacttagaatcagttgttgtgaagaagggtgtgaaaactccaaaggtagaatctgatgtgatgaataaggatttgaaaacccccacgcgtccgcccacgcgtccggaacttctaaagcagagtctgatggtatgaagaaggggatgaaaataccgaaagtagaacctgatgttatggactggaaaactcccaaagcaggatctgatgttacgaagaagggcttgagatctccaaaggcagaatgttgccagcctgtgattgagagcgttaaactaaagctggcagagattttgaatactatatcaactcaagatgactgcaaaatgttgcaacaccaacttgatacccagaggaaaagagctagatataagaagatgattcgccggcatatggacttccgaatgcttcactctaagatcaagagtggcgcaatctctggcaccaaggagcttttgagagatatacttattttcatcaataatgtaataaccttctatccgaagactacattagagcacatggctgcggttgagcttcgtgactttgcatgcaaaactgtgaagcagagtgcaagcttgttcttgaaaagccatcgagagaccagaacagctggtgcccctgtaataaagaagaatgctcgagccctgcatttttcaagaacaagcttgcactctggggatgcaagggcaagcaaggtttcttcaagggatgctgctgccaaggaaggggatggcaagagaccttgcagtgatgagctggctaatcaaaagactacaaagagaaatgagccagccaagaagaggggtgtgggtcggcctccaaagagtgggcagaggattgctggggcacaggaaaatagccccatcaaaggcaggaaaagtagcgctggggcacaggtagatagccccagcaaaggcaggaagaggagtgtggaagcacatgatgatagctccagcaaagggggcaagaggagccggcggtgaagctaccatcagctcaatgccggtgaaactgtgtacagcttaaccatatatcataggctgttcccttccggtttgtttacctgacaaaaaaaagttattgtcccagtattcaaactgatgtaacaggaagggttagttgtttctgatgttgttttgtaaggagtaaggacaattagaagggaaccctcatttttatattgagattatccgagttaggctatacatatctgaccatgtaatgcttatagtagtttaagttgttataccatgtgaactgatgcttgaacaccgaaaaaaaaaaaaaaaaaaaggcggccgccctttttttttttttttatcatataatagttttttatatataatataatataaagtaaagctgagaataataaactactactacatggtagttacatgctagcagtggccaataagcctagtcactggcattgggccccacgcacgccttagcctctgggctccacagccactgcaccaagaatttcctccccttcctcccattcacattccagctcctcccctgcgcgtccaccgacaccttcccggcgtacccgccgccgccgcccgtaccgtacaccccctcgcacaggtcggcgatctcggtgggcgccgtggggtcctccccggcgtaccacgcgttgacgagcgggttcgtggcgagctcggccagctcgtgcgcgatgacgctgaccatgccgtcgacgcccgcgtcgccgttgctgt

SEQ ID NO: 667 - DNA, 1924 bp, Zea mays
  Clone ID: TF_ZmC4386_6
aaaacgggaaaaaggataaaaaaaaagtggggaaaagaacgccgggaatgggcaagcagcagcaggcgccaccggcgcggcggtccccggcgatgtcggcgcctccgccgccgaagcgccggaagaagaagggccgcccgtccctgctcgacctccagaagcggagcctccgcctcgagcagcagcagctaccccaggggcgccgctccaaccgcaggagcgccggctccgcggacgaggacgacgatgggcccgcctccggctccggccgccgcgagaagaagctgcgcctcgtcatgggcctccacgacggatcagccaagggagaaaagatgaggaaagcgacggatgggcgtgaagagccgtcagattccgggcccacaacacctttaccgaacaaaaagttgttgctcttcatcctcgacaggctacagaagaaggatacgtatggtgtattttcagagcctgttgatcctgaagagctacctgactatcatgacattataaagcatccaatggatttttcgacaataagaaagaagctcgataaggaggcctatttcaacttggagcaatttgaggatgatgtgttcctgataacctccaacgcgatgtgttacaattcaccagatacaatatactatcgacaggcacgaggtattcaagagattgctaaaaaggattttgagaatcttaggcaagatagtgatgccagtgaaccagaaccggaaccagaacgagaacccaagccggagcccgaaccagaagaaccaaagccacagcctcgccggggcaggcctccaaacaagaataatgccaaacagaaagttgggaagccaccagcagaacgtgccactgcagacttttctggtgcaacacttgctactgcggcaaatattggacggcatgcacaggcagatgttgatctgtcacgaagagtaatggataaagcgatgattgcggatgtgttgagagcttcttttgccaacctaaggaatgagcacaactggtctggtgagcggaagtttgaaagacttgaagcttactcaggttatgggggtacatggtctgcaaaaacggggaagaggccgattctgatggaagatagtcgccggagcacatattatgagactcaaccatccagttcaatatatgagctgccggtatcgtcctcctacaatgggaccgagaagctgctagtaccagttggggttcagttaccgcagtcctattcccacagcctggcacgttttgctgcacaacttggccctgttggctgggaaattgcgtcaagacgacttgaacggagccttgctcctggaacaaagtttggtcgtggctgggtaggagatggtgaaacgccgccgaacccatttcagacacctgtactcgctgcattttcagaaacaatggcaccaccgagcagtatagcagcatcaggtgagcagccatctatgaagtcccccacgcacaagcaagcctgcactggcagcataagccataggttgggatctcccgagctgaacgtacccttgagatgaaagggcagccccaataatcttcacggacacccaggcatgcagcaaactgcgaatggtttcaatgatgttccaggaccaatgatgttcccacatgtggctcaactggtggtgaatcagatgcagacacatacggctgattgataatgttgtgtgtgtgccagggggtcgggtcgcctttgatccgtcgcgcctcaacctgaggctgcaactgtgagcctgttgtgtaattgcttaagtagttattaggatgatagcatgcatagatgtgttgggtggatgctgtaacagtggtgatcggtgagttgcgattctgaatgtgtagcagaaaaaaccacagccgaaatgaaacatctgtatagattatcgaggatttttttagcatg

SEQ ID NO: 668 - DNA, 1720 bp, Zea mays
  Clone ID: TF_ZmC1240_2
cggggacggcttagccgcggacagtacaggaacccgaaggagtttgctgaggatgtccggctcactttccataatgcgatgacatataatcctaagggtcaggatgtgcattttatggcagagcagttgtcaggaatcttcgaggcacagtggcctgagattgaggctgaggttaactaccttgcatcgtgtcctccattgccgaagaagtttccacctccaccaattgacctgcacttcctagagaggtcagattcgatgagacaccacatggcattggacaccaattcaagaccgatcagtcatactcccacttacacccggactccatcaatgaagaaaccaagggcaaaggatccaaataagagggacatgacaatagacgagaagcgtaagcttagtgagaacctgcagaatttgccacctgagaagcttgatgctgttgtgcaagtcattaagaacaagaacctatcagttatgcagcatgatgatgagattgaggttgaaattgatagtatggatgctgagacactttgggagcttgaccggtttgtggccaactacaagaagaacctgagtaagcaaaagaggaaggccgagcgagcgatgcttgccagacaagatgcagagttgcgtgcgcagcgccttatacaacaaccgcaaccaaccccagtcccccaagaacctgttggtgaaaaatctctaaagcaagttgcaaaagattcactggcaggtgagcaactaccaacatctgcatcagagaaaaacgacgagaatagacagaacgcgagtggttcaagcaattcaagcagctccagcagtgactcaggatcatcgtctagcgactcagacagtgatagctcctcttcagatggatctgatgctgccaattcatcttgagatataggttcacaagttctgtcgagtagacaataactgtctatttgacatgacattggcaccataagactgtacatgcttaccttgtctggcttaggaaaccccctgtattttaagtagctttgtatgtggattcaccggctggaggcagtaacttaggtttcatggtgtacccgcctaataagactaggcttgttgctgacaccgtgtctttgtacaccgcactgttgctaggagccctcagttggctcagtagcctgtacattagcggcagcttgcacattgattctgtttagctgtgttgattgcagtatgtaggaaggcgattgccgtaagcattgtttcttccatctgttaactgactgatgaaagcattgacaaagcccaaaaaaaaaaaaaaaaaaaaaaaaaccagtgattcggaggcttcatcaccacaccatgcgcaaaagtctgttggattgactgctctaaattcgggtcttgggtttgcataaagtttgttgatgcacatgatgttcgtcatgacgatcattgatggtccattgttatgttatggagtgaggaatagaggtgattaggtggttgtgttgggcacgagagatgatgtatagcagcagttcggacctttgggtgggtagcagtaggtagcctcccctcctttcctctggtctggtgatgatggtttgttggagatgtggctatatgtgcgtatgatatgccgtggctccttttgagctgtttgctgcctggcgtcttccagcgatggataatacgtgaagggtgggctgggacagccatacaaccaccccctcagttg

SEQ ID NO: 669 - DNA, 1668 bp, Zea mays
  Clone ID: TF_ZmC119_1762
tgttttttccctttttaaagttcatcacgattcacgcaacagctgttctgacgttttttttttttttgttccggctcctcctagtccccttctctaacataaaacccctgcgaggtttgggtgtttcaaatacaagaggagccacgtggcaactcccagctggccttaggattgatgaaattttttctccttccgggaataaaacccatagttcctccccgctccagcaccttgcacaccaaaggttccatttggtctcttccttcctccccagattccgcatcttctccttaaaatgcctgcagagaggaaccttgcaggtgtccgggaggaagcacatgcgggaatgcagctcgaggagctgccacatccgcctgcagttggcacagccgccgggcacccggactccgcaggccgagaagtggcgcacgagcagctcaatgcccttgcaggcgcgaaacttgcaggcggctgctaggctgcccttgagcgcttgatctcgaggcccgatcgtcctgcatccgtcccggcagatgtggaccagcgcctccattgcttcgtacagttgcagatacactttcttttcttccatccttttagctctttcctgccttctcgtatcagcttcgacaagagactcgagcagctcctgttccatacttggattggcccgtctcatcactttccacccatccgtcagagagatggtcttgaaatccccgatgaccatccggacacaggcgagcgcgaggcggggcgcgtcacacagcctggcaagctgcagcatgtctaccacgttgtcaggagcgaggaagcccctctcgagttggtcgacgcagaccgtcttcagagacggcaccgagaagacgtgggagagcacaagcaaatgcagagcgtgctccttcatctgttcctgctcaaaccgtgaagagtagagaaatctgatgaagacacggactgcttccgaaggcgcgccagagacacggatacaccgaaacccatcatctctcagtctagcttcctccagcatagctctcaggacaggggatttgacgccaagaacgcaggaatgcgacggaatctcagcgccgccgtctgtggagacacggaggtcagactggtatccctccaagaacaacctgtcccaggaatccaggacgccgccttcggggacacgggcacggcgacaggccttcgccttcctccgcgcgccataataagaggttccaggcagcggcggtggaacaggcgcgttactcccatgaagctgagcacgccggctatgactatgactatgacccggcgcagctttggctttggcacctgccgagctacttgactcgagatggttctccagtgagaagtcggtcgcatgcgcatcgccgccgtccaggaagaagagatcgggagaatccagcagctccacgcattccatcaactgcctcctgctctgggctgaagtgaaatcagtctggagtgcaaactgcaaagcctctgagacgagagcgaggcggagaacgaaaagggggagctcgttcaccactcactcactcaccacggcgtcctcgtcctcgtcgctccaccaaaattttggaggcctccccttcctatggcgactcaagccaaggcgcctgtcctgacaagtgttccctacaaaatcccggcagg

SEQ ID NO: 670 - DNA, 1441 bp, Zea mays
  Clone ID: TF_UC-ZMROB73012D02_FLI
agatatcacattctatgtggacagaaagcctgttgaagctcatcgggtcatcctttgtgcccgatctcctttcttcgaaaagaagttcaagacagactggaaagacaggaaggaagtgagattttctaaccaaaagttgtattttggcgccttatacagcctcatccatttcttctattctgatagactcgaggtagctgttgacgacatggaaaatttggcgcgtgcatgcaaagtttgcaagtgcgaggagttgcaaaaagttttggataaagaagttgtgcatcagaagtatgcggagtacaagtcagcaagagaactggatatggacagctcacagaaacgattcatcttacaagcgcaatccttgcctgaggaagatcgccttccatcagccttgcagcgtattctgcagacttgtctagcaaactcaagagaaggttactgtagtgaggaatcaaatgagatgataaggaactcagaggatgatgatcttgcagatctttatattaaagtaggtgataaggttttccattgtcatcaggtgattttggcctcaaggtcagagtactttagagccaggctatctcgaactgttgattttcttgaaggtaactgtggctttgaagctgctcagaatgttccgcttcttgaggagcatgacataagtgcagaagcatttgaaaagatgctcgaatacatgtaagatcctattgtaatatgctttaccactattgttttgttgttgctgttgctgttgctgttttctggcttactttttacttgtaaaacttaggtatactgataagctagagcatttggaccctggccaggctgaagaactatttgatgttgcatcaaggtacctgctgtttccccttaagcgggttgtagctgatatgctgctgccatatctcgaacatgtttcgcctgcagaactgtgccactggttgatgatgtcagacatatacggtgtcatgaaaataagggagtatatcttggatatcattgcttgcaactttgagatgtttgcagccacccgggagttccgggccttgctcttgactcttccaccaccatccggagatgactcactacggacaacacgtcccagtgcacctgggactggaggcaacaccgaccaaggcaacattcttgatgatttgcgtgagaagtggctagaagcagagggtgccgagctcgacgagagggatgagagtgcagctctgttcgacaagcgactggagatgcttatgctagttgcagagaaagaagccgatgatgaagacgcttgagtttcggagagtacgtgtgctagggtagcattgtttttgcattcttcactgcgcagttgtttaggtttgtgagttacaagttcatcttttgttgtatgaacttcaaacagatcagttttgacccatcaagtatccagtgagcaagt

SEQ ID NO: 671 - DNA, 833 bp, Zea mays
  unsure (1)..(833): unsure at all n locations
  Clone ID: TF_LIB5117-027-A1-PF1-D12
catttcaccaatcggcacagcacgctcccacagctgcctccatccgtccccttctcctccaactcctccgccgccgctcctgctagggttaaggtaacgtgcgcgcgaggcgaccgatgtcgacgggagcgggagcggaaccggagatggacgacggttacggctttgacacggtcttcaacgtggaggctttctccgacaggacgctgcaggtagaggtcgtcggccgcgacgaccacgcgcctgggtccggccgcaagcgccgccgcgaggaggacaaagaatatgatggagaacatattgactcgttttgtactgtgatgagtacaccagttttacgagtggagaccatatatgtgagctcggcgattcttgctgcaaaaagtagtttctttcgcaagcttttctcaaatggcatgaaagaatctggtcagagagaggcaacagttagacttgctgattcagaggaaaaggccttcatggagcttttacgcttcatgtacatggggaaagttgacaccaacaactgagcccactcatctggttgacatcttgatggctgctgacaaatttgaggccatttcttgcatgaagctttgtgtgccagctgtcctaacagaggcagtcatgaaattccttgctgaacggtacaaggaattcctgtcaacagagtcccaagatgaactgatgaggatccctggtggctgngattgaagccatcctaagaaggaatagctttgggtttgcatctggagtagctgtctatgacttcgtgcttaggtggacctgttatcagtgcccaaattcagaagaaatacggaagttctcgagta

SEQ ID NO: 672 - DNA, 1042 bp, Zea mays
  unsure (1)..(1042): unsure at all n locations
  Clone ID: TF_ZmC13701_3
ccggccgggatctcctcgccctcggcaagcccagcaaccccaatccccaatcccgtccgcttctttccccgtccccgaccttgccgaggaacctcccgctcccaaatcctagcctctcctccctcgccgctcccctccccatggaggacgaggacgccggcctcggcgacgggggcgaggcctcccctccgcaccatgccgcggcgtcgggcgaccgggcgcgggacttggcggcgtccccgaccagctcgcgctccgtgacgcagacggtgaacgggtcccaccgcttcgtgatccagggctactcgctcgccaagggcatgggcgtggggaagcacatcgccagcgacaccttcaccgtcggcggctaccagtgggcgatctacttttacccagacgggaagaaccccgaggacaactccggctacgtctcggtcttcatcgcgctcgcgtccgacggcaccgacgtgcgcgcgctcttcgagctcacgcttctagaccagagtggcaagggcaagcacaaggtgcactcgcactttgaccgctccctagagtccggaccgtacactctcaagtaccgcggatccatgtggggctataaaaggttctttcggcgtaatgctcttgagcaatcagattttcttaaagatgattgcttgaagataaactgtactgtgggtgttgtagtatcaactatggattattccaggccacattcaatagaggttccagagtctgacataggctatcattttggaactcttttggacactctggaaggtgtagatgtcatttttagtgtagcaggggagaagtttcatgcccataagttggtgttggctgcccgatcttccttttttagatctgaatttttcgaccatgaatctgatgaagagaagaacgaaactggtacaggggatgaaatcaaagagatcgttattgatgatatggatcctgtagtgttcaggcggtgcttcactttatgtacagggacaatcttgntaatgatgatgagttgatggcatcaagctctgactgctct

SEQ ID NO: 673 - DNA, 708 bp, Zea mays
  unsure (1)..(708): unsure at all n locations
  Clone ID: TF_LIB4765-040-R1-K1-C1
cattgggtacctcgaggccggccggggccgccacctctagagagaactgtagatccctgtcatccaatcacccaccatgcaatacctcaccgatgttgctcgctccaaggacctgctcaaggttgtaggccattcggtgatcaaggcgatgtgcgatggggagttcctcatgtcgaggaaatgggccgtcggtggccacgattgggaggtccacttgcgtcccaaggatcactcggagggccacgagcgcccggtgacgctgaggctcgtcttgatctccgaagcgcgcggcggcgacgtcaaggccaagctcagctgccgcctggttgatccgaccgggaggctgaagccgtcgaaggagaatagcaaatcgcataagttctacaagtccggcgattactccggtgcaatccaggtgacgggaagagaggatctggagaagtctggctacctggtggacgattcctacaccgtggagtgcagcatcacggtgctaaaaaaagcgccggcgcggaatactgcggctgcggctgcggcgacggccatggatcgcgatgctgcgatgctgccgtccctcgaactgcaccggcacttgngcgaacttctgcagaaggggacgggcgcggacgtcacgttccatgtgtccggcgagaagttcgccgcgcacaagggcatcctttgctcgagggtcgccggtgttcatggcgg

SEQ ID NO: 674 - DNA, 918 bp, Zea mays
  Clone ID: TF_ZmC868_4
gggtttcttaaatcaatcgatcaatcacgcgcacaagatttggcaataaatcgcggaattcccaacgccgcaccttcaccgccgggctccccagtccaatccaacccaaccccagtccggcgacggttccgggcagcgcgcgatcggatcgtcgcgggttcggcttctcgtcgaacggcgcggattcctgcccccgatcggagggcgtcgggtgcggcgtctcggcgattgatctgttgtggatcgattcttcttggaagaggagcgggatggacggggaagtgatgcggatgggtggggggctgtcggcgtgctcccccgtgttcaagagcatgttcgtgcacgacctgagggagaaggagtcgacgacggtggacatcggcgacatgtgcgtgaagtcgtgctcggcgctgctgggtttcgtgtacgggacgatcgagcaggggcagttctggaagcgccggctgccgctgctggcggcggcggacaagtacgggatcggcgacatcaaggactgctgcgaggagagcctgctggaggacataggctcgggcaacgtgctggagcggctccacgtggcgtggctgtaccggctggagcggctgaagaaagggtgcctcacctacctgttcgtgttcgggaagatctatgacgtgagggacgagatgcacggcttcttccaccacgcggaccgcgagctcatgcacgacatgttccaggaggtgctcagcgtgtggaagcccatgtgaattgaagtgtccctttccacgcaacctgtgtgtgtgtgtgtgtgtgtgtgtgccgcgtgtgtgtgtgtgtgtgtgtgtgtgtggtgcttgttcagtcagcagtgtgtggagagcatgctggttatgcatatttgaaacgaaaaggatgttcagaatttgaatggaagct

SEQ ID NO: 675 - DNA, 1449 bp, Zea mays
  Clone ID: TF_ZmC21312_1
gaattggcctggctacccagacaagagcacgcaacgcaagcaactgcgacgtctcccgcccccgccgcgccccggaccttttccgcagatattttttttatccccccacgcccccggctcgttcccttccattccaccacctctcgccagacaacgagatgtgcgaggcaccgcggctcggcaaccgcgccggcgccggcgacccggccgccgccgacgtcgacgtcgtcacgacgggcgggcgccggaggatccccgcgcattcctctgtcctggcctcggcgtcgccggtgctcggcagcatcctggagcgtcgcctgcggaaggacagggagagcggcaagcccgggcggtccgtcgtccggatccgcggcgtcaccgacgacgccgccgcggccttcgtccgcctcctctacgccggcaggtgcggcgaggatgaggatgacgacatggaggagcacgcggtgcaggtgctggtgctggcgcacgcgtaccaggtgccgtggctgaagcgggcgtgcgagggcgccatcggcgcgcgcctcaccgcggactcggtggtggacgtgctgcagctggccggcctctgcgacgcgccgcgcctgcacctgcgctgcgccaggctgctggccaaggagttcgcggccgtggagcgcaccgaggcctggcgcttcctgcaggagaacgacccctggcaggagctccacgtcctgcagcgcctgcacgaggccgacatgcggcggcgcaagtggcggcggaagcgcgcggagcagcgcgtgtacatggagctgagcgaggccatggactgcctggaccacatctgcacggagggatgcacggaggtcggcccggcggggcgggcgccggcgccggcgccgtgcgcgcgctacgccacgtgccggggcctgcagctgctcatccgccacttctcccagtgccaccgcaagagctgcgcgcggtgccagcgcatgtggcagctgctccgcctccactccgcgctctgcgaccgcaccgaccgctgcaacaccccgctctgcatgaggtttaagcagcaggagcaggataaggcggctgccaagggcggcgatgatggcgacaaatgggggcttctggtgaagaaggtgaagactgccagggtcttctcttctctggccaacaggaagcagatgagcaccaccaccacccagtgctgaggagcagcctgggatgcttaggggtcaaagttagattagtgagagagaatgaagcgagcagtttttttttgggtctgttttgagatgtcagatctcttttgagatatgtacatgtacatgccctacacctactttgtcaccctacgttggtatagcgcttttatcgaggtgggagttggtcagccggaagtctatgtaaaaagtgcgcatgtatcattatataataatagggaaatatgagaagtattttagtctt

SEQ ID NO: 676 - DNA, 738 bp, Zea mays
  unsure (1)..(738): unsure at all n locations
  Clone ID: TF_LIB4725-011-R1-K1-C12
tgcagcactttctccatggatgctgcccctccatctccaacacctcaggtttatcttggtgagcaatacgtgaatagttcaacactttcagatgttactttcttggtagaaggttggtactatttcacgaccctgatttcatcagtagatactttaaataattcttttctatcatgtcctagataatcttaatcccttctacaggaaagcgcttttatgcacacagaattgctttgcttgcttcttcggatgcatttcgtgcaatgtttgatggtgggtattagggtgagttttgacttggcacaacataatgtgcttttgctggttttagtctgttgatctctttccgtagttgatatattgctgctgtatatagtatgttagttttgaacaggccttgaatctcatgtctaattcaaaggtcattttcttaaccaggaaaaggatgcaagagacattgaaattccaaatatcagatgggaggtctttgaactcatgatgagatttatctatacagggtcagtgcagattaacagtgaaatttcacaggatcttcttagagctgctgatcagtatctcttagaaggactcaaacgcttatgtgaatatactattgcgaaggatgtgaatctagataatgtatctgacatgtatgacttgtccgaagcctttcatgccgtgtcactgagacatacatgcatcttgtacattctggaacattntaacaagatctgcacc

SEQ ID NO: 677 - DNA, 1074 bp, Zea mays
  unsure (1)..(1074): unsure at all n locations
  Clone ID: TF_ZmC2364_3
ccggccgggctccccgggcctttctctcatttcgccctccctccgccggctagggttactgccaccgccttccacccctccccgactgcccgtgggtggaggaggctggttggcgtgcagggtacctcggcggcggagatggagccggacttctcgaccgtgggcgggcccagctttgagttcgctttcaacgaggccaacttctccgaccgggaattgcggatcgaggtcgtcgcgggggattacgacgcgccggggtccactggcggcggttccggaggaggtggcctcgccgactgggcgcgccatcggaagcgccgacgcgaggagctcttcaaggagaaaggtgatgatgagcaaggtattgatccatcttgggctgctgtggttacgccggttttacgagtcaagacaatttatatcagttcggcgattcttgctgcgaagagtcctttctttttcaagcttttctcaaacggcatgaaagaatcggaccagagacatgcaacccttagaattactgactcaggtaatgtgacaattttgggaaactagagcatcctgcttcttttgtatttatttcctaataattttcatttttaaatcaactgttatgattatatatgccaagaatattcgatgtttccaaagttgtgcttttttttctttgatagtgacattgcctactatttttccctccttagctctacctatcaaatggatattttgtgtagcctgctttctgtacagatttcatcatttgttctctgagaaccagttgccacaaaaacacacacacacgtgcacaaacaaacacaaataaaatagaaaaatccttctctagtggatctttactttgtgcgtcatcctttttcccttaattctcttggaacagaggaaactgccctcatggagcttttaagctttatgtatagtggaaagttggcaactactgagcccactcttctgctggatatcttgatggctgccgacaaatttgaggttgtttcatgcatgangtactgcagccagttgctcacaagcttgccgatgaccacagaatctgcacttctc

SEQ ID NO: 678 - DNA, 845 bp, Zea mays
  unsure (1)..(845): unsure at all n locations
  Clone ID: TF_LIB5072-031-Q1-XP1-G12
tttcgactctagtcttttcgacataccgctttctctcctctctcaccgccccctttttttctttctctgtttttctacctgaccggaaaggagaggtggattttggtttaaaaagagtgaggtcgaagaaggttggttgtatcttatcgtgttacgtggagccaacaacgaccgagaaaaaggagagaccaagggaagacagtattcaaggaaaagaagaagggtaaatcgaataagccatcatgtctaatgttcaggataagccgctcaatgagctcctctcgcgctcaatggtagacatctacgtcgggccagagaacacacactggatcctgcacgaaaaactgctatgccaccactcgcccttcttccgcaaaatcttctactccaaatcctcgacctcgtcgcgcacgcaatcctttggcctccccgatgaagaagacctccccttcaagacctttgtcggctggctctactcgtctagcctgcccgtgccccgcgaggaagccgacctcggcacagccttcgatctgtacctgatggctgagaagttcgagatccctgcgctagtcgccgatgtgctgcaggttgtccgcgagtggtacaagtacagcgattcgtaccctggactgcgccgcgtgcagtatatctacgctaacactgaggagtcgagcccaatgcgacatatgctggtccacgccgtcgcgcgcatgatggtagtggcgaacacgggtattccgccgcactgngacaaggcgctgcgcaagaacgggcagttggttgttgacgtcatccgcgcgatccaggactggcggctcgacgaggagacagtgcccgatgcgcgt

SEQ ID NO: 679 - DNA, 1523 bp, Zea mays
  Clone ID: TF_ZmC1033_1
cctttgagggcagttcttatgatgcttctctctcctagccaattcattttctctgagaaagttagatgcggggattgtgtgccatgaatgcagagatcattacaacgaaggtttggttggagtccttaaacaagccttgtgtcagaacatgagcccagggcccaagtcttatattgcacatatactgagtatgtttggcctctgtggttttccaagcaagctaggaggaaatatgagaaatgttttgtgtgacagtgagttagttgatctggaactgttgcttgcagatggcgaatctctaagtgctcatgcgggtatcctatcagcaagatgtcctaaattattaccatgtgaaaaaacttttgtccgtgatgggtcagtaactttggaatggggcaggaggtcttgctatgttgttcgaatgtctgatcgtgtcgatagtcacgctctgaagaaaattttggagtatgcatacactgggttggtcactgtagatgatgccactgttaagcctgtaaaaacacttgcaaagtattgccatttgagatcgctacacttgatgcttcagaaagagcaacctagatggcactcatgtcccatatatgatcttactacagcactcgaaccagctaaacattcgttctcggacatcattttggaggcccaatcaaatgacaaaatggagtgtcaccatggttcgtgccagttatcgactcctcatattcatagccataaggtcattctgagcgtgagctgcgaatacctccgtgctttgttccagtctgggatgcatgagaggtagctttgcggagactatcagagttccggtcggatgggaagcactgagaaaactagttcagtggttctactcaggcgagctgcctagagttccacctgactgccgatggaaggctatgagtacagaagagaagctatctatcctgaaatcgtacgcggagctgtcgtccctggcggacttctggttcgtggacgggatgaaggaagagagccttcaagtgttgacctcgtgcctgaattcctccagcacggacgcctccctcgccttcatcggcttcgcggcgaacttgggccagtgggagctggtggaggccgccatcagcagcgtggcgcatctgtaccccaggctgcgagactccggtcggttggagcagctcgatgaggacgtgctcaacatgctgcggacagagcatgtcaggtatttgcagcaccgcagtgcaagtaactgaatccttaatgtcatggagggtttttttccccgtccactggtggtcgcatagcggtcctgttgtggtggtgtatgcacagctgttgcgttaaaaaaaaactgtacagccacttccgttgaagcttatggcgtcatgaacggggctcatctccgttgaaacaggtactctctccgttcttttttatttgtcgcgttttagtaaaaaaaatgaattagcggacgataaatattagagaacggatgtagtatattagtattggttgataaaaaaaaataa

SEQ ID NO: 680 - DNA, 580 bp, Zea mays
  Clone ID: TF_ZmC184317_2
ttagcccccttgtgtcccgacaacgctgggagcccattctcgcaccgcacttcgttaggttggtttagatcacatcattctcaggtttgttttaggcttttagtctacacctgtcgcctcaattaattcgctgtggagggggagattcggaggcattagcagaatcaaaatccatggtgttgtacgccgatctcgacgcgctccgggcgtcggcggccgacgtgcggatcgtcacgtcggacggccagaccatcgccgcacactcctacgttcttgcctcggcgtcgccggtgctggagaggatgatccacagggcgcgccgcgggtggggcgccgccgactgcacagtcgctgtcttcggcgtcccctccgacgccgtcctcgccttcctccacctactctactcatccagggtggcgcccggaacggaggaggagctggtggccgcgcacgggccgcagctgctggcgctggcgcacgcgtaccgcgtcgggtggctgaagcgcgccaccgaggccgccgtgtcggcgcggctgaccgcggaccgcgccgtggacatgctcaagctggccaggctctg

SEQ ID NO: 681 - DNA, 814 bp, Zea mays
  Clone ID: TF_LIB4743-082-A1-K1-C4
agcggcggtcggtcttgtcgctccgcctcggaactccacacggtcacacctcgctcgctctcgctcccgtatcgcggtttccttttcgaagccttgctaggtttagctggggcctccgtctatcctgtcaatggccccttaggcggctgtacttcagacttcagaggtgacgtgaggcgtggggacgcgcgtagctgattggttcgaggaggcggggatggacccggacttctcgccggcgagtgggggcccgagctttgagttcgccttcaactcggtcaacttctctgaccgggtgttgcagatcgagatcgtcgctggggatgacgccctcggggccaagggcgccaccggcgaggggtgctcatctcttgccgactgggcgtgccaccgcaagcgacgacgggaggagctccgacgcgacaaagatccagcaaactgcaaagttgaagctgaagaatgtgatgcctacgaggaaggcaatgagcctgtagctatgatagaagaatctccgcctgatattgaggcagatggtgaggatggaaaaagcagcgactcatactgtagtatggagtgtactcaggttttgagagttaagtctatgtacatcagctctgcaattctagctgcaaagagccctttcttttacaagcttttctcaaatggaatgaaagaatccgatcagaggcatgcaactcttagaataactgcttcagaggaaaatgcgcttatggagcttctaagctttatgtatagtggcaagttgacgacaaaccagccaactgtcctgctggatatagtgatgatcgctgac

SEQ ID NO: 682 - DNA, 1014 bp, Zea mays
  Clone ID: TF_ZmC5281_2
aaaaacccccagatttctctatatcacgacgctacccctccacgtcgccgcttctcgtgttcttgttcgtctccgcctcaggcaactccacacggacacggtcacacctcgctcgctctcgctcccgtatcgcggtttccttttcgaagccttgctaggtttagctggggcctccgtctatcctgtcaatggccccttaggcggctgtacttcagacttcagaggtgacgtgaggcgtggggacgcgcgtagctgattggttcgaggaggcggggatggacccggacttctcgccggcgagtgggggcccgagctttgagttcgccttcaactcggtcaacttctctgaccgggtgttgcggatcgagatcgtcgctggggatgacgccctcggggccaagggcgccaccggcgaggggtgctcatctcttgccgactgggcgtgccaccgcaagcgacgacgggaggagctccgacgcgacaaagaatctagaaaatacatgccagatccagcaaactgcaaagttgaagctgaagaatgtgatgcctacgaggaaggcaatgagcctgtagctatgatagaagaatctccgcctgatattgaggcagatggtgaggatggaaaaagcagcgactcatactgtagtatggagtgtactcaggttttgagagttaagtctatgtacatcagctctgcaattctagctgcaaagagccctttcttttacaagcttttctcaaatggaatgaaagaatccgatcagaggcatgcaactcttagaataactgcttcagaggaaaatgcgcttatggagcttctaagctttatgtatagcggcaagttgacgacaaaccagccaactgtcctgctggatatattgatgatcgctgacaaatttgagttcggcccttgacggcggcactgcagtcaattgcttagaaatttgcctatgaccacagagtctgcactgctctatctggatctaccttcaagcatttcaatggctgctgcag

SEQ ID NO: 683 - DNA, 1061 bp, Zea mays
  Clone ID: TF_ZmC13121_1
tctgaagctcatccttgtcagtgaacccctgagggacaagctgagggtgagcctgagctgccggcttgtatgccaccccccaagccagcggcaccttgatgcctccaaagagaagagtgtgtctcatatatttgccagtaacttcaaatgctcgcctgtagttctccttttcgaaaaaaggaaggtacgatcatcaggttatctcgtgaacgattccctgaccgtggaatgcacggtcaccatgctacgcgacttggacgccacggataaggagcagcacctgccggtgctaccgccctcggacctgcaccagcacctcggcgagctcctgcagaccagcgatggagcggacgtcacgtttcgtgtctccggggagtccttcgccgcccacaagatcttcctcgccgcaaggtccccggtcttcaaggccgagtgcttcggaggtgtggagttaggtagccccgcttctgtttataacaaagacatggaggcagctgtgttcagggccatgcttcacttcatgtttaccgacatggccccagagctcgacggtgaccaggagcctgaggccgcggcggccatggctcagcacctactggtagccgctgacaggtatggtctaaacaggctaaagctgatgtgtgaatgcaagctctctggtggcatcgacattggcacagcggctgcgacgttggctttcgccgagaagcacgactgcccgctgctcaaagccaagtgtcttgagttcgtcactaagtcgcctgagactcttgatgctgtcctggcgactgacggctacgagcatctggtggcaagttgccccttggtgctggctgaactgctgagggctgcgcgtggaaggaagatctgagctcgcgatgatggtttacgttgacagtcctcatgtaacgagttgcttggcttctccacttgtgcttgtcatgtatgtgtgcacacacatgagacgggcagctagcattattttctgtggttagatctcgttcggttttgtgccagactctgcttcagttgcaggttgcagctagtgcaaaaagattcag

SEQ ID NO: 684 - DNA, 1734 bp, Zea mays
  unsure (1)..(1734): unsure at all n locations
  Clone ID: TF_ZmC11136_1
ccggccggcnnnnnnttaannnnnnaaaaaaaaaaaaaaaaaaaaaaaaaaaaaaaaaaaaaaaaaaaaaaacgccatccgccatcctcactgatggttccgtcccgccgccatcggagagtgtagaagtggaagcaagcagataaaccccaggttctgtactcctgttctctttccactttgtcccttctttccccattgacacgctttccttccgcccattgacgagttgacgaccaacagacccaggcctccgaccagatcgaggtgagcgaacgtgccccgcctgcgctggtgacggtgagggtgaggccgcacgccatccgccatcctcactgatggttccgtcccgccgccatcggagagtgtagaagtggaagcaagcagataaaccccagcacaagtagttcgtaacgccatccatgggatcctccttatcgaacctcaccgacgccgcttgcatcgtgcaccagtttaagatcaacggctactcggctaccaaatccatggcgaggacggactcgctcccgtccaagcggctggccgtgggagggtacgagtgggaggtccactacaccccaagcctcctcgtcgacggcagctacatgatagcgttcaggctcgtcctcctcggcgcgccgcgtcggaacgacgtgaaggcggcgttcagatgtcggctgctgtatccttccaccaactacggtcatcaacgcggtgcgtgcgtcagcgattcaatggggaacgtggaaggtcagatgtctcatgcgttcaagcgggcgaaggagagctcgggatggattccgctccgcaaaaggaatgttgtggaggcggcccgggtcatcgagaacgactctctcactgccgaatgtaccatcacggtggtcaccgagctacctgaacctgatacagcaaagactaacgccgtcttgccccgaattcggcgattgacgggcgtgcattccttgcaccatgatctcggtgagctcttgggcaagggaaccggatccgatgtcgtgctggtggtttgcggtgagtccttcgcagcgcacaaggccatacttgcatcgaggtccccggttttcatggcccagttctttggccccatgaaggagacgcactcgcagtcgcagagggtggagatcatggacatggaggcggccgtattcggggccatgcttcgcttcatgtacaccgacgtggtgcccgagcttgagcggcaggagaacggcgacgtcatcgcgcagcatctgcttgcagctgcggacagatatggactcgacaagctcaaatcgatgtgcgaggacaagctctgcggtggcaccacagtggagacagcagcgacgactctggcgctggcagagcagcacggttgcccaaagctcaaggcttggtgtgttgagttcatcgctgcaaaccttgatgccgtcatggtgaccgagggttacaagcatctgatgacaagctccccgttggttctgaatgaccttctgagagctgtgcgtggaacgaagaactgaagaacattggtagttgtattgtatctgctctctatgaattcggtgtttaagtttatattccttcccattgaggaagggtggattgctggaaggctgtcatttgagaacttggcttcatttctagtcgttgtcccagctcatgggtttatgggtattttctaggagaaaagaggtaagacttagctatcctaggtgctacagaaaagatagttaatga

SEQ ID NO: 685 - DNA, 2396 bp, Zea mays
  Clone ID: TF_ZmC684_2
acctcgaggccggccgggatgcaatcctgattgcttttttgtcgcgtctgcttctcccccctcctgcctcttcgtgctgcttcctggttggggaagtggaaggagaaggagaaggttgcgtgcgtcctgcgccgataacgcgatggtgtccattgtcaccgaggtatgggcgctcgctggatgcggcccggtgtccaaggcggcggcggtagcggtagcggcgcaggagttgccggtgcagcatccttctcctgccgcagcgggaggagggaaggccaagaagagagtcgtgccagtgtcgttcagaggcgtcagcagcggcggtggccaggaccaccagcgcgaggcgttaacctcgacggccgggccggcgacgcaaaaccacacacacacacgccacctccttgagtccttgtcggctcgccatcgccaccatcatttcgtgtcgagtctccgtttcaccctccccaaattcccctcaaatcgatctcccccgcaccccgaatccccgcgcccccgcgtctgaatccggcgccccccgccccgatccgtccgatccgcgccgaatcgccgttgctcggggcggaaccctagcccgatctccacctgtttcctcgcgatgggcgccggtcgtgtctgccgcggcggccctttctccgcctcccccgccgctggcgccgccgcggggcggccgttcccgccgctcaccgcgtcctcctcctcatctccttcatcggccccttccgagacagcgtccacgtcggtcaccaagacggtgaacggctcccaccacttcaagatcgcgggctactccctctccaaggggatcggcgtggggaagttcatcgcctccgagtccttcaacgtggggggattcgactgggcgatctacttctaccccgacgggaagagcggcgaggatggcgctgcctacgtctcgctcttcatagccctggccagcgaaggcaccgatgtgcgcgcgctgttcgagctcacgctcgtcgaccagagcggcaaggggcaagacaaggtgcatacccactttgggaggtctctcgagagcggcccatacaccctcaagtaccgcggcagcatgtggggctataagcgtttcttcaaacgagttgccctggaaacatcagactatcttaaagatgattgccttttagtgaactgcacctgttggagaagttcaatcacatactgtccaacatggctctacatattggtcagctattgacaagtggaaagaggacagacattgcattcgaagttgatggagagatgtgtcagacattgcatttgaatcttttggagagatgtttcctgcccacaaggtgattctttcagcccggtctcctgtttttagggcacaactttttggtccaatgaaggataaggacatgaagtgtataaagattgaagacatggaggctccagtattcaaggccttgctccatttcatgtattgggatgagttgccggatattgaagagcttactggtgtaaatacaacttgggtatccaccttgatggctcaacatttactagctgctgcagaccgttatgcattggagagattgaagttgctctgtgaacttaagctgtgtgaagatgttgcaataaatacagtggcaaatactttggcactggctgaacagcaccactgctatcagctaaaaactgtttgcttaaaatttgtggctctgcctgagaatttgaaagctgtcatgcaaaccgatgggtttgattatttgcaacaaagctgcccatccctcctgaccgagcttcttgaatatgtggccaagataggagagcactccgtgagcccctgcctgtattcaactgaagtccttgatggtggagatgccaatggacgacgcgtgaaaccaaggatctaacggctgcccagatgagcctagaagagggagttccttgtgcttattttttgttgttgttaaagtgattccaatgacgggcgctttctgtggtgccataatcatgcatgttgtagcgttggtttgtgtgtgttgtgatttccccagccccattgctgctactgtagagggactgatatacatcctactgactagactgcgttgctgctgcaaagcagcttttcatcatatgccaaggatggtctggtgcaaaggtttgatcaaggggggagaatggcgcagaatatgttctgcagaagttttacctttcgctaggccagatttgtcgattcatggtcatctgtattgactgtattcaattgaaatgaaatgtatccgttgaacattcactttcaaaagtgcgtaaaaaaaaaaaaaaaaaactctcgaaaaaaaaaaaaaaaaaaaactcgagagtacccccaaaaaaaaaaaaaaaaaaaaaaaaaaaaaaaaaaa

SEQ ID NO: 686 - DNA, 1785 bp, Zea mays
  Clone ID: TF_ZmC1451_1
cagcgttccactcgcgttgaatttacagcgctcgcagctcggtcggggggacgtcgccaatgccgttgggtggcggattcactctctctctctcccccctcctccgcccatccaaccaccatataacaacctagtagccgccaacgccacattgtcccctcggggcgggccacgagtagtcctactggtccttgacgtccgtggccactcaggttgtgttctcggagttctttcgccggggccgggtggggaggcggagtgcgcggtcgaggaaggccttagcggtcggatcgttcggcgccgtgcttgactgcctgtacatgaggagcggctgcggcggcggcggagggagacaacctggggaaggaggcgggggaggcgctggggctgctgggctgcgtcaatgaggtggtggcggcggtggcggccacgtgggggcccatgaccgacggcgcgcgcgtcgagacggcgcccaggctcgcccaatggcgcgtcgacccgctcccctgctacacctaccgcaagtcactccccttcctcatcggcctctggaactggtgcatatctgtggagagaaataacaagcaaacctgtgttaagctctttgcagagaatacaagttctctcaagaacggttcctcagccccaatagcttcctttatcgccaaacttattgtatctcttccacctaatcagcagaccatagtccacccaggaatttttgacaaacagctgaaatacgacggttttgtgtggacaatcgatagcaccgtcactgggaggtttgtgattgagatagagtttcttgacctgaaggtcgctgatccgtctggcggggagccggcctcgatttgggcctcccgccaggtcaagcagtgctcggacagcacggccctgtcgtccctggctcggatgctgcacgaggacgtcctcaccgacatcaccatcaacgcggcggacggcagcgtgggcgcgcaccgcgcggtcctggcgacgcggtcgccggtgttccggagcatgttctcgcacgacctgagggagaaggagctctccaccgtggacatcaccgacatgtccctggacgcgtgccgcgccttcctcagctacatctacggcgacgtgcgcggcggcgaggagttcctggcgaaccggctggcgctcctccgcgccgccgacaagtacgacatcggcgacctcagggaggcctgccacgagagcctgctggaagacatcgacgcgcgcaacgtgctggagcggctgcagacggcgcacctgtaccggctgccgaggctcaagggcggctgcctgaggttccttgtggacttcaggaaggtgtacgagatgcacgacgacgacctcaacgcgttcctgcagacggccgacagggaactcgtggccgaggtgttccatggcgttcttgccgcgtggagcgggcggtaagccgggcgcatgccatggcactgccgctctgctgcaggtgttgcacatctggttggttcagttcgtcacaactcagaagcgttgtttgcaactggaggattcttgctgggaaagcgtgtaaatatttgcaaactgtacatgcgtgccagtggttggtctaaaatttactgtgcatgccttgattggattttgttcctatgatgtggaaatcagctcatatgctgctcatattcacgttttgaggaatttcagacttgatcttcaggtttacacatggcatggcaacagagagaggcaatgctcaataatctcattgtacatggtttcgatcccaccccccccccc

SEQ ID NO: 687 - DNA, 1710 bp, Zea mays
  Clone ID: TF_ZmC2246_2
tcgaggccggccgggacgccgcctccttcgccgtttcgccttcacttttccgcgccgccggttcgtgccaaaaccctactccctacaaaatgcagcggcgcctaagctgaaatcggtgaatcgtgcgccgcggcgaagagagaactcgaactcggcaggacttgtgcggaataggaggggagcggccgagcgggggtcagagagggagatagagttcatcaggtttgccatgtcctccagggctggcggcggcaagccgttgtggtctgcctccaccatcgtcgccaaagtcgcgagtgggtaccacatcctcaggatcgatggctactccaggaccatggagacccccacaggagagtccatcgcgtccctcccgttctcggtgggcggccgttgctggcgcattcgctactaccccaacggcgacaagttggagaataaagaatacatctcgctttatcttaatctccacgacagaagcgtcgaggcagagaaggcgcagttaatgttccgtttcgtcggtgacgtagcggagcagccgttgattctgggaggactgcataccttcgaaaagcaaggttgggggtacggcaagttcatcaaaaggaaagatttggaagagtcgaagcatctcgtggacgattctttttccatcaggtgcgatgtggccgtgcgcttcaacgatgtccgcgtggagaaggcgccggaagccgctgctgcagcagctatgatttccgtgcaaccatctgacctgcaccagcacctcggcagtctcctgctgacccagaagggcgccgatgtggtgtttgacgtcgccggtgagacgttcgcagcgcaccggtgcgtgctcgcagcccgctctcctgtcttcactgcagagctctttggtgcgatgaaagagggccacaccggaggcgtggtgcgcatagaggacatggaacctcgggcgttcaaggcattgctctacttcctttacaccgatttactattcccaaagacaatggcaacgacgatgaatcaatctgaagacggagacgtaggcggcgacgatgaagacgttctgtgtcagcacctactggtcgctgcagacagatacaacttggagaggctgaaatcgctatgtgaaaagaagctgtctgagtgcatccatgtgggcacggtagcaatcatcctgacgctagctgagcaacaccgctgccctggactgaagaaggtgtgcctccattttctcagatctcctgcaaatttgagggcagtcgcctccagcgacgcctttaagcatctgagcagcagctgcccctctgttatggtggagttggttgccatgcttggcaactcagcgtagaccttcatctaagcaggaaactgcacttggtgtttttttctggatcgacttgtattatcaagcggtcttggaaaaatgctactagttcatagtgtccacttccagtagctatgcatcctaagtttcaaggtagattctgaagtagttgaatccgttggcgcttttggtacaccatttcgcagcggatgattttggtatctggtagctttgaatgtctgccagaagtccgtctatgtccttaacatacaattctcagacgttggaaacttggaatgcaatgcagttcttgttattgttaaaaaaaaaaaaaaaaaaaaaaaaaaaaaaaaaaaaaaaaaaacaaaaaaaaaaaaaaaaaagcggcc

SEQ ID NO: 688 - DNA, 3124 bp, Zea mays
  Clone ID: TF_ZmC5281_1
atatatcacgacgctacccctccacgtctccgcttctcgtgttcttgttcgtctccgcctcaggcaaactccacacggacacggtcacacctcgctcgctctcgctcccgtatcgcggtttccttttcgaagccttgctaggtttagctggggcctccgtctatcctgtcaatggccccttaggcggctgtacttcagacttcagaggtgacgtgaggcgtggggacgcgcgtagctgattggttcgaggaggcggggatggacccggacttctcgccggcgagtgggggcccgagctttgagttcgccttcaactcggtcaacttctctgaccgggtgttgcggatcgagatcgtcgctggggatgacgccctcggggccaagggcgccaccggcgaggggtgctcatctcttgccgactgggcgtgccaccgcaagcgacgacgggaggagctccgacgcgacaaaggtgagagaggatttctgattatctttttttttttcatattccctagaatttgcgaattggctgtggattccaaactggggaaagacagtggttggttgtttgaattgaattattccatgcgttctctggaacttttgaggtgatttgatttgaccttaccatgtgctcgggctttactaaagccttcggcctcaagtgctaaaatcccccctttctattcaaaataggaagggtattttagcccccctcgttcccctccaattccctgactcccaaactagccccaagtgttgtgaaggcactttttgttttaatcgaggctgtgaaatgtgggattgtggttctctttttcaatcctttgagttggcgtagtggcaattcagattatcatttactaagcaatctgttaccaatgaaatgaccaagtggtggaaattagtggggataattattgcaattgacacttggctgtgggtgatatgttctgctgtattggcacgatgtcattcatctctgcatttggtttgtgcaaactaattatttgtatgccctaccttgatcaatgcctgtaatatgatttacataatcatgaacatatgaacaacacactcaagaccagcctgtgcgaccgaacaaagcttgcaagtttgggatgtaatctctttggctattgctgcatcggttgtaaatgaggaagaggaaaggagcgaggaagaagataaagaagggagagtgtcaagggggtgcatatcttggctgttggatcgatccaacacccaaaaaatgtgattgaagccatagccaaatatcaggcaactgataaggatgctgatctatattagtgatatttttttgtgctgaccatcatgccttggcaatttactatctcattttctttcactgattgctgtaatttccagtttattcccatcttatgtctttcatagttctgcatgatcttcaactatcaaatttatcatgcgtataacttttgaactactgttttatggacccagaatctagaaaatacatgccagatccagcaaactgcaaagttgaagctgaagaatgtgatgcctacgaggaaggcaatgagcctgtagctatgatagaagaatctccgcctgatattgaggcagatggtgaggatggaaaaagcagcgactcatactgtagtatggagtgtactcaggttttgagagttaagtctatttacatcagctctgcaattctagctgcaaagagccctttcttttacaagcttttctcaaatggaatgaaagaatccgaccagaggcatgcaactcttaggataactgcttcagaggaaaatgcgcttatggagcttctaagctttatgtatagcggcaagttgacgacaaaccagccaactgtcctgctggatatattgatgatcgctgacaaatttgaggttggttcctgtatgcggcactgcagtcaattgcttagaaatttgcctatgaccacagagtctgcactgctctatctggatctaccttcaagcatttcaatggctgctgcagttcagccattgacggacaccgccaaggaattccttgccaacaaatacaaggatttgactaagttccaagatgaagcaatgaacattcctcttgctggaattgaagccatcctatggagcaatgaccttcaggtcgcgtcggaggatgctatctacgacttcatgataaagtgggcacgtgctcaatacccaaaattggaggaaagacgtgagatcttgggcacacgcttgctgccccttgttcggttctgccatatgacctgcaggaagttgcggaaggttattgcctgcagtgatctggatcacgagcaggcgacgaaatgtgtcacagaggcacttctctacaaagctgatgcaccacataggcagcgtgcccttgcagcagacgtgatgacatgtaggaagtatgctgagcgagcttacaaatatcgcccgcttaaggttgtagagtttgataggccgtaccggcagtgcatagcatacttggacctgaagcgagaggagtgcagccgacttttcccatctgggcggatatactcgcaagctttccatctagctggacagggcttcttcctctcagcacactgtaacgtggaccagcaaagtgcgttctattgttttggtctcttcctagggatgcaagagaaagggtcgacaagtgttaccgtggattatgagttcgctgcaaggacaaggccgtcaggcgagtttgtcagcaaatataagggctactatactttcactggcggtaaggctgttgggtaccggaatctctttgcgatcccgtggccgttattcatggctgatgacagtctcttctttatcgacggggtattgcatctcagagctgagctgaccataaaacaaccctagatgaggccgtgtttgtgccgcgcgcgtgtccaaatccatgcaatggtgttctgcagtgtagaatatggaaatcttgtgtgctgttttgttttgaaaacgacaactcaattctctcttgttcagttgtttgtacacctgaggaggatcatgtcatgttttgtactctcactaaactgtgataagtgatttagctaatcaaactttaagttcaccagcaacaaaaaaaaaaaaaagcgggc

SEQ ID NO: 689 - DNA, 1044 bp, Zea mays
  Clone ID: TF_ZmC1327826_1
atggccggcctcctgccccagcatccagctactgtagacatgagtgacagcgtgctcatcagttcctgtttcacacataaattcaagatcaactatgtggagacggagaaggtcgccgtcgagcactcagtcaggtcggagcaaatcctcgccggtgggcacctctggaggatcatctgcttcccgcgtaggatcggaggtatgaaagagagcaacgttgagtacctatctatatacctctgtcatgagagcgaatccaaagacgtcaaagctgtcttcgaggcctttgtaatgtacaaagaaggcactccatctttggcccataagaaaaagctggtgcacgttttctcacccaaggccggcggcaggcacatccatggttggccttgcttcgtggagcgaagcgtcctacagtcgttctacgtgacgaattctggctcgttcgtcatcgtgggagccgtcaaagttttgcaggaggaccctctcgacgtgccgccctccaacctcgggatccatctcggcggcctcctgctgggctccacggacggttccgacgtttcgttcgttgtcggcggcgagaggttcgctgctcaccgggccgtgcttgccgcccgctcgccggtcttcaaggcgcagttcttcggctccatggcggaagccaccatgtcgtccatcaccttgcatggcatcacggcagcgacgttcaaggccatgctccgcttcgtgtacaccgatgcgtgtcctgaagaagcccccagcgaggcgtttcaggacctgctcgctgctgctgaccggttccagttggatcgcttgaagatcctgtgcgcgagcaagctgtggaataatgtctcggtggatacagtttctgctacgttgatctgtgccgaaatatataactgcccacagctgaaaaggaagtgcattgggttcttcggggaggggaagggcttcaagacgaaggctgtgttaacggatggttttgctcagctgtcgcagcagttcccgtccattcttgatgagctgaggaagaaggttggagcatag

SEQ ID NO: 690 - DNA, 1439 bp, Zea mays
  Clone ID: TF_ZmC2246_1
tgtgcggcgcccggccgggactccaagatggaacccaaaatgcagggagggattgtcatggctggcggcggcaagccgtcgtggtctgcctcgcccatcgtcgccactgtcgcgagtgggtaccacatcctcaggatcgatggctactcccacaccatggggacccccacaggagagtacatcgcgtccctcccgttcaccgtgggcggccatcgctggcacattcgctactaccccaacggcaggagctcggagaccaaagagtacgtctcgctttctctctatctccacgactgggtcgctgagacagtgaaggcgcggttcaagttccgtttcgtcggtgacgtggcggagcagccgttgatactgggaggactgcatagctttgataatattgacaacaattgggggcgccccgagttcatcaaaaggaaagatttggaagagtcgaagcatctcctagacgattctttttccattcggtgcgatgtggtcgtgcccaccaacgaagtccgcgtggtagccactgctgcggctgctatggtttccgtgcccccatctgacctgcaccagcatctcggcattctcctgctgaccgagaagggcgccgatgtggtgttcgacgtcgccggtgagacgttcgccgcacaccggtgcgtgctcgcagcccgttcgcctgtcttcagtgcagatctctttggtgcgatggaagaggggggccacaccggaggcgtggtgcgcatagaggacatggaacctctggtgttcaaggcattgctctacttcctttacaccgacttgttagagacagagacgatgaaacaaggtgaagacggagacgatgaagacgttttgtgtcagcacctactggtcgctgcggacaaatacaacttggagaggctgaaattgctatgtgaaaagaagctgtgtgagtgcatccatgtgggcacgatagcaaccatcctggcgctcgctgagcaacaccgctgccatgcactgaagaaggtctgcttccattttctcagctctcctgcaaatttgagggcagtcgccgccactgacggctttgagcatctgagcagaagctgcccctctgttatggaggagttggttgtcatgctcagcaacttggtgtagaaaactgcacagtagttgtgcatcctaggagattctcaatcttttggtgcttttgccagttgacttgactgcgtatgtgccgctctccaccaattcgcagcgggtgattttgttagctgctagctttgaatatccacaacaagtccgtctatgtgcttaatgtttaattctcagaagttggaatgcactatagctcttgctttcttatttagttgtagaattcgtttacttctagttctctagccgtcaatctagatgcatatataaaaaaaaaaaaaaaaaaaactcgagagtcttctaga

SEQ ID NO: 691 - DNA, 667 bp, Zea mays
  Clone ID: TF_LIB4741-124-A1-K1-C6
tcgagccggccgccatggaggacaccctcaagtcgctgtccatggactacctcaacctgctcatcaacgggcaggccttcagcgacgtcacgttcaacgtggagggtcgcctcgtgcacgcgcaccgctgcatcctggccgcgcgcagcctcttcttccgcaagttcttctgcggcgccgaccaggccgccgccgggcccggcgcgctgctgctggaccacctcagcccgcgctccccgtccggcacctcctccccgcgcggagcctccgccgccgcgccgggcgccgtcatacccgtcaactccgtcagctacgaggtgttcctgctgctcctgcagttcctttacagcggccaggtgtccctggtgccgcagaagggggagccccggccgggctgcggcgagcgcgcgtgctggcacacgcactgcgccgccgccgtcgacctcgcgctcgacacgctcgccgccgcacgctctttcggcgtcgaggagctcgcgctcctcacccagaagcagctggccggcatggtggagaaggcgtcgatcgaggacgtgatgaaggtgctgatggcgtcgcggaagcaggacctgcaccagctgtggaccacgtgctcccacctcgtggccaagtccgggctggccgccggaggtgctcgccaagccccccc

SEQ ID NO: 692 - DNA, 2171 bp, Zea mays
  unsure (1)..(2171): unsure at all n locations
  Clone ID: TF_ZmC2364_2
ccggccgggttatgtatggtaggaataatcctgatcaatggaggagattgtggaggcatcanagaattcgggagtacaagaacctccgggccggccgggctctcctcctttccctcccggccacttctctcgtttcgccctccccctcgagcaccccgccggctagggttacggccaccgccttccacgcctcccccacttcccgtaggcggaggctggtcggcgtgcacgcgaccgcggcggcggagatggacccggacttctcgcccgggggcggggggcccagctttgaattcgccttcaacgaggtcaacttctccgaccgggaattgcgtatcgaggtcgtcgccggggatgactacgctccggggtccagcggcgccggtgccggaggaggtggcctcgccgactgggcgcgccaccgcaagcgtcgccgtgaggagctcctcaaggagaaagaatctacaactcacatgtcagaccaaacaaattgcaatgaagttgaagcagaagagtgtgatgcgtatgaagaaaatcaagaggaacctgtagcaatggtagaagaatctccacccgatgttggccaagatggtgatgatgggcaaggtattgattcgtcttggactgtggttggtacaccagttttacgagtcaagacaatttatatcagttcagcgattcttgctgcgaagagtcctttctttttcaagcttttctcaaacggcatgaaagaatcggatcagagacatgcaacccttagaattactgactcagaggaaactgccctcatggagcttttaagctttatgtatagtggaaagttggcaactactgagcccactcttctgctggatatcttgatggctgccgacaaatttgaggttgtttcatgcatgaggtactgcagccagttgctcacaagcttgccgatgaccacagaatctgcacttctctacctagatctcccttgctcaatttcaatggcagcagcagttcaacctctgacagatgcagctaaggatttccttgctgtaaaatacaaggatttgactaagttccaagatgaagtgatgaacatccctcttgctggaattgaagccatcttgtcaagtaatgacctccaggtggcatctgaagataccatctatgacttcttgctcagatgggcccgtgcacaatacccgaaatcagaagagagacgtgagatccttagttctcggctgctccctcttgtgcgattcagtcacatgacatgtaggaagcttcggaaggtcctaacatgcacagatatagaccacgagcaggcaaccaagtgtgtcaccgaggctcttctgtacaaagctgatgcaccacaccggcaacgagctcttgcagcggacacaacaacctgtcggaaattcgctgagcgggcttacaagtacagaccactcaaggtcgttgagtttgatcggccctatccacagtgcatagcatacttggatctcaagcgcgaggaagtgctctcgactctttcctgcaggccggatatactcgcaagcgttccacctcgcagggcagggcttcttcctctcagctcactgtaacatggagcagcaaagcaccttctactgctttggcctgttcctggggatgcaagagaagggctcaacgagcgtgaccgtggactatgagtttgctgcaaggacgagaccatccggcgagtttgtgagcaagtataagggtaactacacatttaccggtgggaaggcagttgggtacaggaatctctttggaatcccgtggcaggcgttcatggccgatgacagcctcttcttcatcgacgggatgctgcatctgagagctgagcttacgataaagcaacctacgtagatgtgctgccgtcgggttaagtgtgtccagtcatgggtgatgtggaaaatgctgtgtgctgcagatatcctttttgttttttttccttttgttcacgcaccttaatccttacattaatagacagtttggtgatgacaaaatataaaggaaaaaaaagggctggaaagctgccttttgttgtttcactaagatgaaggttgtatgatctctgtctcttcgtagtggaagttgttacaccagatgaaaaagaaaagatatcggatgggaatccccccgcccttgagttctctgcaagtttccat

SEQ ID NO: 693 - DNA, 1205 bp, Zea mays
  Clone ID: TF_ZmC29433_1
gcggccgtttcaagaccagttgcgtcgtcgcccggccgctgtgcgtgcgtgcgtgcgtgctgtgccgcctttctttctcgctttaatttctttccatccatccgctttccccccctcccaatcccaatccctccaaaaatccgctccgcgcgcgcaagcgcggccggcctttatcgatccctcccggcctctagcgctgctccggcggcggagtccggccccaggaaacaaaggccgcgcgcgccgaccggaccgaccggggggccgtccagttccagttccagttccaggccgcacaagcacatgagatcatgagctcggaggactcgctcaagtcgctgtcgctggactacctgaacctgctcatcaacgggcaggccttcagcgacgtggccttcagcgtggagggccggctggtgcacgcgcaccgctgcgtgctggccgcgcgcagcctcttcttccgcaagctcttctgcggcctggacccgagccaccagccgcccccacccaccgccggcgggcgcgcgccggacctcgtcatccccgtcagctccatccgctacgaggtgctggtgctggtgctccagttcctctacagcggccaggcctccgtcgccgctcccaagagcggcccgctcccgggctgcggcgccaggggctgctggcacacccgctgcggcgccgccgtcgacctcgccctcgacaccctcgccgctgcgcgctccttcggcgtcgagcagctcgcgctcctcgtccagaagcagctggaggccatggtgaaggaggcgtccgtggacgacgtgatgaaggtgctgatggcgtcgcgcaagttcgagatgcaggagctctgggccgcctgctcccacctggtggcgcgctcgggcctctccgccgacctcctcgccaagcacctccccatcgacgtggtcgccaagatcgaggagatccgcgccaagtcccccggcggcgccgccgccgcgggcggcgccgggccgcgctcgccgttcctcctcacccaccactacctccccgtcaacggcgcgtcggcgtcggaggccgagcgcgaccacagggtccggcgcatgcggcgcgcgctggacgccgccgacatcgagctggtgaagctgatggtgatgggcgaggggctggacctggacggggcgctggccgtgcactacgccgtcgcagcactgcggccgctcata

SEQ ID NO: 694 - DNA, 1049 bp, Zea mays
  Clone ID: TF_ZmC13701_4
attgggtacctcgaggccggccgggaaacttcctttcatttctttccgttccggactcctgtttccatcctcttgccacgggtccacttgcacccccatctcctcggcctcgggaagcccagcaaccccaatccccaatcccgtccgcttctttccccgtccccgaccttggcgaggaacctccaattccccagtcctggcctcttagccccaaccctaaccctagccaatcgcattcccatggacgacgacgccggcgacgcctcgccgccgccgggacctgccccccttgctgccacaggcgccccgtcgttgcgtgacatggcggcgtcccctaccagctcgcgctccgtgacggagacggtgaacggctcccaccgcttcgtgatccagggctactccctcgccaaggggatgggcgtcgggaagcacatcgcgagcgagaccttcaccgtcgggggataccagtgggctatctacttctacccagacgggaagaacccggaggacaactcggcctatgtttccgtcttcatcgcgctcgcttccgagggcactgacgtccgcgctctctttgagctcacgctgcaggaccagagcggcaagggcaagcacaaggtccactcccatttcgatcgctcgctcgagtctgggccctacaccctcaagtaccgaggctccatgtggggttacaaacggttctttcggcgaactgctcttgagacatcggactttcttaaagatgattgtttgaggataaactgcactgtgggtgttgtggtttcaactattgattactccggaccacactccattcaggttccagactctgatattggctaccacttcggttctcttttggacagtaatgaaaggggttgatgttattcttaatgtgagtggagagaggtttcatgcccataagttggtgttggctgcacggtctactgtatttagatccaaactttttgacgatgaatcagaaggagacaagacgcgagttatgagagtgaggatctgaaggagattgttcttgatgatctagagcc

SEQ ID NO: 695 - DNA, 844 bp, Zea mays
  unsure (1)..(844): unsure at all n locations
  Clone ID: TF_LIB4757-047-Q1-K1-E12
attgggtacctcgaggccggccgggacgcctcacgacaagcgagttcgacaaccaaagtgtgctttgtcttcaccaccagtgtggataaacacgcttaagctcttcgaatcctcactgacttttctcccccgaaaggtttgcgagttcgagagtttccagagctcccaacttcacatgaacgttgcgtcacactaacctgtccactctttacgagaaacacccccccccctctcgcttcagtcgctcgcttcatcatgttcggcaagcgttctttggctagttcaaaggacaaggaccgttcaggcaagatcaccaagcagccaaagagatcgtttcgcgatgcctccaagcaaaaggccatggccgagaagctggatgcacgcaaggacagccccatgatggacggaggttcaccgcagctgacctctgccattgtgacagtcatcgttggttccgaccagcgactgttcgcggcccacgaagatgtactgtgtcattctccgtactttgctgaactgctgcggagccagttcttcgagtcaactaaccgccgcatcgatctgcccacggaagagcctgaaatcttcagttgcatcctcgagtatctgtacaagggagactactacccccgccttgtccacgacaagcggcgccagacctggatgctcgaaggtgcaattgcctcacccgaccccaacaaaaccggcgaccgcgctgccgcagtcgagccaacctttttccacaccgngcgtgggagacgttcttctccgtgacactgctgtgtactgcgctgccgatcgttacggncttgaggagctcaagaagctctccctggcgcagcag

SEQ ID NO: 696 - DNA, 1268 bp, Zea mays
  Clone ID: TF_ZmC13701_5
ctccatttcatttccgttccaggtctcctgtttccatcctcttccacggttccacttccacccccatctcctcgccctcggcaagcccagcaaccccaatccccaatcccgtccgcttctttccccgtccccgaccttgccgaggaacctcccgctcccaaatcctagcctctcctccctcgccgctcccctccccatggaggacgaggacgccggcctcggcgacgggggcgaggcctcccctccgcaccatgccgcggcgtcgggcgaccgggcgcgggacttggcggcgtccccgaccagctcgcgctccgtgacgcagacggtgaacgggtcccaccgcttcgtgatccagggctactcgctcgccaagggcatgggcgtggggaagcacatcgccagcgacaccttcaccgtcggcggctaccagtgggcgatctacttttacccagacgggaagaaccccgaggacaactccggctacgtctcggtcttcatcgcgctcgcgtccgacggcaccgacgtgcgcgcgctcttcgagctcacgcttctagaccagagtggcaagggcaagcacaaggggctataaaaggttctttcggcgtaatgctcttgagcaatcagattttcttaaagatgattgcttgaagataaactgtactgtgggtgttgtagtatcaactatggattattccaggccacattcaatagaggttccagagtctgacataggctatcattttggaactcttttggacactctggaaggtgtagatgtcatttttagtgtagcaggagagaagtttcatgcccataagttggtattggctgcccgatcttccttttttagatctgaatttttcgaccatgaatctgatgaagagaagaacgaaactggtacaggggatgaaatcaaggagatcgttattgatgatatggatcctgtagtgttcaaggcggtgcttcactttatgtacagggacaatcttgttaatgatgatgagttgatggcatcaagctctgactgctctatatttgatagtttagctgggaagttaatggctgctgcagacaaatatgagttgccaaggctaagattgttgtgtgaatcttacttgtgcaagcatgtttctgtaaactccgtggcaactactctagcattggctgatcgataccatgctatcgagcttaaatctgtttgcctaaaatttgctgctgaaaacctttcggggtataagacttacaacatgaaaatatgtttaaccttc

SEQ ID NO: 697 - DNA, 1200 bp, Zea mays
  Clone ID: TF_ZmC184_1
ccggaaaaagaagcagcagcctctgccgttcgttttatacgcttacccgacgacaggcgaccggccggcagctatagccctgcagttagtagcatctcgtttcagagctcagaggagggaggaggaagaagaagcagcagcaaggcatggattgctgcatctgcagccccgtggcgtccgtgtacaggctgccaaggaacgccatctgcgctccctgccaccaaggcgccaaggccatcatcggtttcctcgacagggatggtgagcgggaagaggacgacggcggtggccgttctgtccagctccagcctcgcggctcggccaaggggctgagagatgcgtgggagcaggtgaaggagatgagagccagggaggaggagaccaggcagagagctgccttcctccagcacggcttcgcgtcggcgtggaaggagggaatccacaccgacatcgtcgtcaaacctggcaccggtcccgcgattccagcccacaaggccatcctggccgcgcggtcggaggtgttccggcacatgctgtccggcgacgaccgctgcaaggcccccgccggcggctccatctcgctcccggagctctcccacgacgacctgtccctcctgctcgccttcctctacacaggcgctctggaggcgccaggagaaggaggaggagaggccagccaggaccaggagcggcagctgcacgcgctcctcgtcgcggccgacaagtacgacgtgccgttcctgaggcgggcatgcgaggcgcggctggcggcgggcgtggcgccccggaacgcgctgcggacgcttgaggtcgccgagctgagctccagcgccgcgctcatggagcgcgccatgggcgccgtcgtggagcacgccgaggaggtcgtgttctcggcggagtacgagcggttcgccgcacggaacgcggggctgtgcgtcgagatcacccgcgcgctgctggccaggatgccgacgccggcgaggagtgatggcccgtgcttagagcttggaagcagctgatgcatgcagttgtattgtatatgtatcagatgatgatggatcggaaagaatactactcttgtttcagtttcgagtcacgacaatatgtaattgtaaacgcataagttcttctgaaacacgggcgagcacgatgagctagactgcaagaacaacacaggtcgacgcggccgcgaattcggat

SEQ ID NO: 698 - DNA, 926 bp, Zea mays
  Clone ID: TF_ZmC34319_1
cgagagtaacggggttttcaaatttgaagttacaaagcgctcgggatttacgaaattcaacgaatttctagcgatttttcgttttcgcagacgaccaccggaaaaatgcgttcaaaacctgcacgtactaattcatcaaagaagattactacgtacgtgcatcgcttttgagaaacgagcagagcaacctgcattgtatgaaactggaaaccgttggccatggctactcagaagatcaaaacggtggcaagcttggccagtagctccttgagaacagcagggcagctggcgttgagcacctcgaagccatccgtcgtctgagtgaaggagccaaggttgccgctagaagagaggaaacggaagcacgcctccttgagcgcagggcaatggtgtcggtcagctaaaaccagcatcgtggccaccgagtccgcgcgtatgtgcttgcacagcttctcctggcaaaccagcttcatcctgtcgacgccgtacctgtccgcggcggcaagcagaagctgatactgcaccatggcttcatcgtcgtcgtcgtcgtcgtcgtcgccgctgccagtctccggcggcaacgagtcggtgtagatgaaggccagcagggcgctgaacacctgggcttccatgtcctcaaccggtatgacgacgccggtgcccttgctgctctccatcatctcgccgaacagctgcgctctgaacacgggcgaccgcgccgcgagcacgcaccggtgcgcggagaacgtctcgccgcccgcgtcgaccagctggaacgtgacgtccgcgccgtccttgcgcgccagcaggtcgccgaggtgccggtggaggtcgtcggacgggggcgccgcgacgaaggcgtcgccgtcgccggccgtggccgcggcgaagggcttgatggcgatgtcgcagcggacgcggaagca

SEQ ID NO: 699 - DNA, 800 bp, Zea mays
  Clone ID: TF_LIB4756-081-R1-K1-E6
cattgggtacctcgaggccggccgggactgatgacttcacttgtctcttattctgataaatgtgattgttttatccttgtcctgtggcagtgcacgagcatcttctgcgtaccagcgatgattttgtatggcaagtcgatgcgatgtcccatgggcgttttacgattgatgttgagtttctagacctgaggatagccacgaacaatgctacggaatcgtcatcggtgtggccaaacgaaggcatggtgcagaagatcgcgagcaagagcgccctgggctgcctgtcgcgcatgctggcggactccatccacgcggacgtgaccatcaacacgacggacggggtgctgaaggcgcacaaggcggtgctggcggcgtgctcccccgtgttcaagagcatgttcgtgcacgacctgagggagaaggagtcgtcgacggtggacatcggcgacatgtgcgtggagtcgtgctcggcgctgctgggcttcgtgtacgggacgatcgagcagggacagttctggaagcaccggctgccgctgctggcggcggcggacaagtacgggatcggcgacatcaaggactgctgcgaggagagcctgctggaggacataggctcgggcaacgtgctggagcggctccacgtggcgtggctgtaccggctggagcggctgaagaaagggtgcctcacctacctgttcgtgttcgggaagatctatgacgtgagggacgagatgcacggcttctttcaccacgcggaccgcgagctcatgcacgactgttccaggaggtgctcagcgtgtgga

SEQ ID NO: 700 - DNA, 2020 bp, Zea mays
  Clone ID: TF_ZmC684_5
cattgctacctcgagcccgggaccctcgggcgggcggggtacacccaaaaaaccacacaccacctcctcgccggctcgtcatcgacatcgccatcgccatcgccatcgtttcattgcgagtctccgtttcatctcgccccctcacccccacacacactggaatccccgcgtctgaatccggcgccccccgccccgatccgcgccgaatcgccgccgctcggggtggaaccctagcccgatctcgatccgtttctccgcgatgggcgccggccgtgtctgtcgcggcggcccctcctccgcctcccccgccgcagggcggccgttctcgacgctcgccgcgtcgtcctccgcctccccttcctcggctccttcagagacggcgtccacgtcggtcaccaagacggtgaacggctcccaccacttcaaaatcgcgggctactctctctccaagggaatcggggtggggaagttcatcgcttccgagtccttcaacgtggggggattcgactgggcgatctacttctaccccgacgggaagagcgccgaggacggcgctgcctacgtctcgctcttcatagccctcgccagcgagggcaccgatgtgcgcgcgctgttcgagctcacgctcgtcgaccagagcggcaagggtcaggataaggtgcatacccacttcgggaggtcgctcgagagcggcccatacaccctcaagtaccgcggcagcatgtggggctacaagcgtttcttcaaacgaactgccctagaaacatcagactatcttaaagatgattgccttttagtgaactgcactgttggcgttgttcaatcacatactgaaggaccaaagatatacacaattccagtaccgcggtccaacatggctctacatattggtcagctattgacaagtggaaagaggacagacattgcattcgaagttgatggagagatgtttcctgcccacaaggtgattctttcagcccggtctcctgtttttagggcacaactttttggcccaatgaaggataaggacatgaagtgtataaagattgaagacatggaggctccagtattcaaggccttgctccatttcatgtattgggatgagttgccggatattgaagagcttactggtgtaaatacaacttgggtatccaccttgatggctcaacatttactagctgctgcagaccgttatgcattggagagattgaagttgctctgtgaacttaagctgtgtgaagatgttgcaataaatacagtggcaaatactttggcactggctgaacagcaccactgttatcagctaaaaactgtttgcttgaaatttgtagctctgcctgaaaatttgaaagctgtcatgcaaaccgatgggtttgattatttgcaacaaagctgcccatccctcctgaccgagcttctcgagtatgtggccaaggcaggagagcactccgtgagcccctgcttgtattcaactgaagtccttgacggtggtgatgccaatgggcgacgcgtgaaaccaaggatctaacggttggaagaggagttcctcgtgcccattttaagttgtaaagtgtttcgaatgacgggtgcttatgtggccgtgccatatcatgcatgttgtagcgtgtgggtttgtgtgtgtgtttgtgacttccatccctctccccagccgtattgatggtactgtagagggtgttatcgctaatatataccctactgacttatgtattgcatcgctgtttcaaagcagtctgtcatcataagtgcacacaggtggaatagggcgaggatggtctggtgcaaaggtgaaataatggcacagattgtgtatgtgtgtgtcctgtttttcagaagttttaccttgcggtaggccagatttgtcgattcttagtcgtctgtatttggctgtattcaattgaaattgtgaaatgtatcagttgaagttatgcgtagacattcactgcaaacaactatgacacaaaatggtgctctcatcatgattttgcaagtgccaagtatg

SEQ ID NO: 701 - DNA, 697 bp, Zea mays
  Clone ID: TF_ZmC3486_1
tgaggccggcggtgagacattccccgcgcataggtgcgtgctcgcggctcggtcgccggtcttcgctgcagagttctttggcgcgatggaggagagtaaaagcggcagtgcggtccacattcacgacatggaggctcgggtcttcaaggctttgcttcatttcatatatactgacttgtgttggaaaacgaatgaagttgaagaggaagaagaagacgatgtcatggctcagcacctgcttgttgcagcagacaggtataacttgccaagattgaagctcatatgtgaagataaattatgcaagtacatcgatgtgggaacggtggcaaccatattggcactagccgagcagcaccattgccatggattgaagaaggcatgctttcgtttccttagctccccggagaatttgaaggtagccgtggcaagtgaaagcttcgatcatttgagcaagaattgcccctctgttatgaaggagttggttgccatgctcggcaccttacttgagtaaggctgggttttgtgtgttcttgtgttggtgtgtgctaatgtgatgtgatgaatcaaatgctcctgatttgtctgggtttctgctacctggtttctgtatgtgttgtttgataccaatgaatccaggtattcaagtcaagaaaactctgttcagtttgcactttcagtatttccggaactgactacc

SEQ ID NO: 702 - DNA, 2363 bp, Zea mays
  Clone ID: TF_ZmC13701_1
gtagcaacccacccttgtcgtccgcgtcctccacgccctcgtcggctcgtcctcgccgtcctcctccacaccgcgcgcgcggtggtgttgacccacccacccgttcctctcccaccccatcaccactgcacgcggcgctgcgtaagtccccaggacgggtaccctgccggaagtctcctgtttcagctctcttcccttcactccatcggctcgtctgtacagcatcccgtgtagcgtgtatccacctcgtcgccaccccaatcctcgttccccaatcccgtccgcttctctccccgtcccttacctcgcccaggaggggagcctcccgcttacaaaccctagcctctactcctctgagcttccaccgctccgctccccatggaggacgaggacaccggccccggcgatgggggcgaggcctctcctccgcaccacgtcgcggcgtcgagcgaccgggcgcgcgacatggtggcgtccccgaccagctcgcgctctgtgacgcagacggtgaacgggtcccaccacttcgtgatccagggctactcgctcgctaagggcatgggcgtggggaagcacatcgccagcgagacattcaccgtgggcggttaccagtgggcgatctacttctaccccgacgggaagaaccccgaggacaactccacctacgtctccgtcttcatcgcgctcgcgtccgacggcaccgacgtgcgcgcgctcttcgagctcacgctcctcgaccagagcggaaagggcaagcataaggtgcactcgcacttcgaccgctccctagagtccgggccgtacaccctcaagtaccgcggatccatgtggggctacaaaaggttctttcggcgtactgctcttgagcaatcagattttcttaaagatgattgcttgaagataaactgtactgtgggtgttgtagtatcaactatggattattctaggccacattcaatagaggttccagagtctgacataggctttcattttggaacgcttttggacactcaggaaggtgtagatgttatttttagtgtagcaggagagaagtttcatgcccataagttggtattggctgcccgatctcccttttttagatctgaatttttcgatcatgaattgggtgaagagaagaacggaactgatacgggggatgaaatcaaagagatcgttattgatgacatggatcctgtagtgttcaaggctgtgcttcattttatctacagggacaatcttgttaatgatgacgagttgtctgcatcaagctctgactgctctatctttgatcgtttgtccgggaagttaatggctgcagcagacaaatatgagttgccaaggttaagattgttgtgtgaatcttacttgtgcaagcatatttctgtaaattccgtggcaactactctagcattggctgatcggcaccatgctatggagcttaaatccgtttgcctcaaatttgctgccgaaaacctgtcagctgtgatccggactgagggtttcgactatctcaaagacaactgcccatctctgcagtcagagatactgcggacagttgccgggtgtgaggagccatgtagcagcggcttgaaaagccagagcgtgtgggcgcagctctctgacggcggcgacaccagcgggcgcagggtgaggccaagggtctgagacgcaaaccccggaagcactgacctttgtaatcaaaagctgttgtggtgtaaatgggacggcttttcttaattttcacttgagacaacgatttaaataacatgattgacgtgtttgtggtgctcgcagacattatttggttctgaacaggaattctctgagtctgccgcacattaacgataaacatggtggccttgtgtcttggcaactggtgtttgcagcaggcgggccagcagctgtctgctactaatatggatccgttgattttgttgtattcttctttcgactggaaggtatcataagtcaattaggaggtgattcttatatgtattcgttatgctgcaaaagtgaaggtgacaatatttttggtttattggcaagtacatggaatttacatttttgttgagatggttcgtagatggagtaattttgctgtaaagatatagtggtgacaagttttttttgtttgtttggattttttacatttctgttcgcaagtatcgtcatctgtcaatgttgagaggtgatgatatataggattgtcctttggtggcctccattgaaaaaaaaaaaaaaaagaaaaaaaaataaaaaaaaaaaaaaaaaaaaaacgctctagagacgacaggtttgtttttttccttgtattgtgggccgttttttcttttattaatataatgatatgttcaaggaatctt

SEQ ID NO: 703 - DNA, 1425 bp, Zea mays
  Clone ID: TF_ZmC868_1
aaggaacagtttttgtactcctcgcctgtgtcgtcaaatcctccacaccctggactggagtggctgctgctcgtgcccggcgatgagcggcggcgggcccggaggtgcgtgcgggccggactcccgcgtggagaccatctcccggctggcgcagtggcgcatcgataccttcggcccctgctcctaccgccggtcggacccctttaagctcggcatctggaactggtacctgtcggtggagaagagccgctccatcgttgtgcgcctcttcccggagcccggccgggtggccaaggagcagccccctctcgcgcgcttcctgctccgcgtctcctgggccggcccgccgcgacgctcctgcgtctcccctgtgcacgagcatcttctgcgtaccagcgatgattttatatggcaagtcgatgcgatgccccatgggcgttttacgattgatgttgagtttctagacctgaggatagccacgaacaatgctacggaatcgtcatcggtgtggccaaacgaaggcatggtgcagaagatcgcgagcaagagcgccctgggctgcctgtcgcacatgctggcggactccatccacgcggacgtgaccatcaacacgacggacggggtgctgaaggcgcacaaggcggtgctggcggcgtgctcccccgtgttcaagagcatgttcgtgcacgacctgagggagaaggagtcgtcgacggtggacatcggcgacatgtgcgtggagtcgtgctcggcgctgctgggtttcgtgtacgggacgatcgagcaggggcagttctggaagcaccggctgccgctgctggcggcggcggacaagtacgggatcggcgacatcaaggactgctgcgaggagagcctgctggaggacataggctcgggcaacgtgctggagcggctccacgtggcgtggctgtaccggctggagcggctgaagaaagggtgcctcacctacctgttcgtgttcgggaagatctatgacgtgagggacgagatgcacggcttcttccaccacgcggaccgcgagctcatgcacgacatgttccaggaggtgctcagcgtgtggaagcccatgtgaatggaagtgtccctttccacgcgagctgtgtgtgtgtgtgtgtgtcgtgcttgttcagtcagcagtgtgtggagagcatgctggttatgcatatttgaaacgaaaaggatgctcagaatttgaatggaagctaaattatacatgatgagacagaaaaaaaaatagtcgatccagatgtgttcaagtctaatagatcttgtgtgggtacgaatggaagcagccaacttgggcttgaatgctccctagttggctgagaaatgttgacattgtttgttctagatgagggttacctggcctgggaaatgttgtagctaaaaaaaaaaaaaaaaaaa

SEQ ID NO: 704 - DNA, 1076 bp, Zea mays
  Clone ID: TF_ZmC868_3
ccacaccctggactggagtggctgctgctcgtgcccggcgatgagcggcggcgggcccggaggtgcgtgcgggccggactcccgcgtggagaccatctcccggctggcgcagtggcgcatcgataccttcggcccctgctcctaccgccggtcggacccctttaagctcggcatctggaactggtacctgtcggtggagaagagccgctccatctttgtgcgcctcttcccggagcccggccgggtggccaaggagcagccccctctcgcgcgcttcctgctccgcgtctcctgggccggcccgccgcgacgctcctgcgtctcccctggctacggaatcgtcatcggtgtggccaaacgaaggcatggtgcagaagatcgcgagcaagagcgccctgggctgcctgtcgcacatgctggcggactccatccacgcggacgtgaccatcaacacgacggacggggtgctgaaggcgcacaaggcggtgctggcggcgtgctcccccgtgttcaagagcatgttcgtgcacgacctgagggagaaggagtcgtcgacggtggacatcggcgacatgtgcgtggagtcgtgctcggcgctgctgggtttcgtgtacgggacgatcgagcaggggcagttctggaagcaccggctgccgctgctggcggcggcggacaagtacgggatcggcgacatcaaggactgctgcgaggagagcctgctggaggacataggctcgggcaacgtgctggagcggctccacgtggcgtggctgtaccggctggagcggctgaagaaagggtgcctcacctacctgttcgtgttcgggaagatctatgacgtgagggacgagatgcacggcttcttccaccacgcggaccgcgagctcatgcacgacatgttccaggaggtgctcagcgtgtggaagcccatgtgaatggaagtgtccctttccacgcgagctgtgtgtgtgtgtgtgtgtcgtgcttgttcagtcagcagtgtgtggagagcatgctggttatgcatatttgaaacgaaaaggatgctcagaatttgaatggaagctaaattatac

SEQ ID NO: 705 - DNA, 1924 bp, Zea mays
  unsure (1)..(1924): unsure at all n locations
  Clone ID: TF_ZmC13701_2
cnncggccgggaaaaagaaaagaaaagaaaaactcaaaagcgcacggcgggccggcggcacgccgcacggctacggcagaaaagttagcaacaacaaaccagcggagctcgaaatcgaattccccaatccccgccttcctcggttccctcaccgcgaaccctaaccctagtccaccccgctcccatggacgaggatgctggcggcgcctcgccgccgccggtgccactggctcacgtgccccctcttcagcaacccaccaccgccgccccctcgcatcgggacatggcggcgtcccccaccagctcgcgctccgtgacggagacggtgaacggctcccaccgcttcgtgatccagggctactcgctcgccaagggcatgggcgtggggaagcacatcgccagcgagaccttctccgtgggcggataccagtgggcggtctacttctaccccgacgggaagaaccccgaggacaactccgtctacgtctccgtcttcatcgccctcgcttccgatggcaccgacgtgcgtgccctcttcgagctcacgctccttgatcagagcggcaagggcaagcacaaggtccactcccactttgaccgctccatggagtccgggccgtacaccctcaagtaccgcggatccatgtggggttacaaacgattctttcggcgaactgcccttgaattatcagactatctcaaagatgattgtctgaaaataaattgcactgtgggagttgtagtgtcaactatcgattactccataccgcactctatccatgttccagactcagacatcggctatgattttggttcactgttggacagtcaggagggtgctgatgtcattcttaatgtgggaggagagaggtttcatgcccataagttagtgttggctgcacggtctcatgtattcggatctcaattttttgatgatgaatctgatggagagaagagtgaggttaatgagactgatgaactaaaagagttttctattgatgatatggagccaaatgttttcaaggcaatgcttcacttcatctatagagatacccttgttgatgatgatgagttgggcgcgtcaagctctgatggttctatctttgatactccggcagctaagttgttggctgcagccgataagtatcacttagcaagactaaagtcgctatgtgaatcttacctgtgcaagggcatatcagtggcctcagttgcgagtacgttagcattggctgataggcaccatgccatggagcttaaagctgtttgcctaaaatttgctgctgaaaatctttcagctgtaatgcggagtgagggtttcatttacctcaaggacaactgcccatctctccagtcagagatactgaaaactgttgcagggtgtgaggaccagtgcagcagtgttgggaagagccagagcgtttgtgggcagctctcggacggtggcgattccagttgccgcagggttaggcaaagaacctgaggtcaacccagaactgacatggttagccagctcttgctctgtaaatgacgatggcaatcatctgtatgtgaagaaaaaacaatttgaaggagctgtaactagctgtatctcatcatgctccttacatcttacctgccgtcttgtttgtaactagttgactgtttggtcatgagcagttactgaatcgatgtgtagacagccctgcaaatgctcacgagtcaacgataaacatggtggccttgtgtcttggcaactggtgtttgcagcaggcgggccagcagctgtctgctactaatatggatccgttgattttgttgtattcttctttcgactggaaggtatcataagtcaattaggaggtgattcttatatgtattcgttatgctgcaaaagtgaaggtgacatttttttttggtttattggcaagtacatggaatttac

SEQ ID NO: 706 - DNA, 785 bp, Zea mays
  unsure (1)..(785): unsure at all n locations
  Clone ID: TF_LIB4729-113-A1-K1-H2
aaacctactccaaatggagtccaaaatgcagggagggattgtcatggctggcggcggcaagccgacctggtctgcctcggccatcgtcgccactgtcgcgagtgggtaccacatcctcaggatcgatggctactcccacaccatggggacccccacaggagagtacatcgctggcacattcgctactaccccaacggcaggagctcggagaccaaagagtacgtctcgctttctctctatctccacgactgggtcgctgagacagtgaaggcgcggttcaagttccgtttcgtcggtgacgtggcggagcagccgttgatactgggaggactgcatagctttgataatattgacaacaattgggggcgccccgagttcatcaaaaggaaagatttggaagagtcgaagcatctcctagacgattctttttccattcggtgcgatgtggtcgtgcccaccaacgaagtccgcgtggtagccactgctgcggctgctatggtttccgtgcccccatctgacctgcaccagcatctcggcattctcctgctgaccgagaagggcgccgatgtggtgttcgacgtcgccggtgagacgttcgccgcacaccggtgcgtgctcgcagcccgttcgcctgtcttcagtgcagatctctttggtgcgatgggaagaggggggccacaccgggaggcgtggtgcgcatagaggacatggaacctcctgggtgttcaaggcattgctctactttctttacaccgacttgttanagacagagacgatgaaacaag

SEQ ID NO: 707 - DNA, 494 bp, Zea mays
  Clone ID: TF_ZmC142074_1
cggacgcactttttttggtaacagaaggaaaaaaccccatcaacatgaactctatgtcttcaagtcttgcaagaaccggtcaatgggttttttctcaagatattccgaccgatgttgttgttgaagtcggagaagccaatttctctcttcataagttcatgttagtggctaagagtaactacataaggaagctaataatggaatccaaagatagcgacgtgacaagaatcaatctctcggatatacccggaggtcctgagatatttgagaaagctgccaagttctgttacggtgttaacttcgagatcaccgttcagaacgtggcggctcttcattgcgcagccgagttttttcagatgaccgataagtactgcgacaacaaccttgctggtcggacacaagacttcctttctcaagtagctctctctagcctctctggagctaatcgtgtcctcaagtcttgcgagattctccttcctatttctcgtgatctt

SEQ ID NO: 708 - DNA, 3011 bp, Zea mays
  Clone ID: TF_ZmC22965_1
ggggttagatcgcagcacattacccgaatccgagcaatcatcatttttcgcctttcttctacctcccgactctctggcctctcctgactctgccccgcctcatcactcccattccaccgacacgcggcggcggcgtgtcgcgcgcctccgctaaaaccgtagcccgaggcccgatggccgccccgccgcaaccgcacccacaggcagcggaggagagggccgcgccggcggttcccctgcccactgccccggcgggtccgcggccgtacgacgtggcggtcgcggcggcggagctccggccggtagactgcaacctcgccgcgctctgtgaccacgtccaggcggaggggttcgggttgggggccttctccgacctcgtcgtggaggccgcgggcgccacctaccgcctccatcgcctcatcctctctcgtagcgcctatttcaggaatatgctacatggtccttggagagaggcgggagcacccacagtggttttgcacatagatgatgccaatgttgattcagaagcaattgcaattgcgcttgcatatctttatgggcaagcccccaagcttaatgataacaatgcattccgggttcttgcagctgcatcatttctggatcttcaggacttgtgcacgatatgtacagattttattatttctgagctttggacatcgaactttttacaatatcagttgtttgctgagagtcaagattatggtagccatggagagcgtgtcaggaatgcttgctggggttatctttgtcaaagtgccacactggaattgcgagaggttctaccaaagctttcttcacagactttgcatgctctccttacatctgatgaattgtgggtacctaacgaggagaaaaggtttgaactagcattgtttactctacttgcaaaggttactacgtgtgagatacaagttagtgggaatgaaacaagcttaccaagtgctgatcgatccatgaggaaggggaaggctccaatgaacgaatctggggaggaactgttaatggactctgaattgaagaacttgaagttgcatgataacttggggaatgaaattccccataacattattgctatttcagatatgaatggtgaagctcccaagagaatggagtttgattgttctactggaggaccatctggagaaagcacttcatatcaatttaatgaaaataactggatttctagtgagcaaactgcaaataattatttctcaagaactttcagtagtggtgttgttcctactgagtggggaaggcccaatgcaccactttggggtggcagggtcgttggacggcggcaaattagatacattagaggaagctcttgtctatctactgatgaatataatgcttttatgaatatatttgagagaggttctcttctctactgcaatatgtcctttgatgcactgctaagtgttcgaaagcaactcgaagaatttggattcccttgtaaagctgtcaatgatagtctatggctacagatgcttctgtgtcacagggtgcaagcgattgttgctgatacttgcaggaattgttgccttatgaatagttcttgtgcttgcaagcaagcatatgtgagctcgcatacacattacaggcaggagcatgacaggagcagtgcctccgacaacataggtaatgtctaccttgcggatggccagggtgatgggaatggtgtacttgggcctgtccgtgttaatgtaagaggagcagtcgatggacttgctggtattgggagagggaactcaaatgtgcctggtgcagcttgggctcctacacgttaggtcttctcccgtgtcccttatgggcttggttcaagaaatggccagcaatttgccattgatgaatcagaacctagaattgaccgcaatggagatatttcagcagatggtctgactgcattggttaaccttagccaagaaaacaatgctgctcatctgcaggatcaaagtctatttgagacagggatgcagacaagatatcgcagtgttccatctgtttccactccaggtggttcttctgtccagatgcaggagtcaaaggagcatgaatgggaaaccacaaaggatgcaactatatcattagacatgaaaacacctcttagccattttccacctttccgctttggggttgagttcgatgatgtgcacaggcttgctgatggtcatgtgaaacattcgactgaagtgttttatgcaggctctctatggaaggtgagtgtccaggcattcaatgatgaggatcctcatgggcgacgcactcttggactttttctccaccggcgcaaggctgagttgttagatcccttgaggaaggctcacttgtacgtcgacccccgggaaaaggtcactgcgcgctatcagctcatctgtccatcaaagagggaggtcatggtatttggatgcctgaagcaggctgggacgctgctgccgaaagccccaaagggctggggttggcgcactgctatactgtttgatgagcttgcagatcttctccagggtggtgccctgcgaattgctgcagtggtccagctcgtctaaacttgagttgtagaaaacaactgcttgcttgcaaggatggtgacaccacggcagtttgtgtagttggtacctgcaagaactcaatccgtcatgtattcgttctctgtaattgtgtattactgtatagtggttcgttgtttgatgctcactccgtcctaaaatatagttctttctggtccttttttccgtccacattcgaacaaatgataatgaatagacatacatacaaactacattcataaattaagttaagtagtcaatgcttgtttagtgtaaaacgaattatattttaggacggggtgagtatgtaagaactcaatctgtcatgtactcgttgtcatgtactcgtgctctgaaatattgtataatctatagcggtttgctgtttggtaaataaaagagaatatatcagatgcaaaccaaccacttgtaaaaaaaaaaaaaaaa

SEQ ID NO: 709 - DNA, 1527 bp, Zea mays
  Clone ID: TF_ZmC13598_1
cctcgaggccggccgggtttcccggatgcaataatttttttccgccaaagccaggattcctctgctcttcctgtttagggtttccccctctctctgctcctgccggatgcgatggcgattccgccgcggactccttccccgccgccatcgtggtcgcgctctgtaaccgagaccgttcgggggtcccaccagttcaccgtacggggctactccctcgccaagggcatgggccccggccgctacctcgccagcgacgtcttcgccgtcggaggataccactgggccgtctacctctaccccgacggcaagaacgccgaggacaactccaactacgtctccgttttcgtcgccctcgcttccgacggcatcgacgtccgagccctcttcgagctcaccctcctcgaccagtccggccgcggctgccacaaggttcactcgcactttgaccgctcgctcaagttcggcccatacaccctcaagtacaggggatccatgtggggttacaagcgcttctacaaaagaacactcttggaagaatctgatttcttaaagaatgattgcctagtgatgaactgcacagtaggtgttgtcaagaaccgtatagaaacaccaaaggacatccagattcatgttccacgatcagacatgggccgctgcttcaaggagctcctcagccgctgcattggatgtgacataacattcgaagtgcgagatgagaaagtcagggcacacaagtggattcttgctgctcgctccccagtatttaaagcccagttctttggtcctattggaaagcctgacctgcacacggttgttgtggaggatgtggaacctgttgtcttcaaggcaatggtgaacttcatttacgctgatgaactccccagcattcctgagctagctggatctgcctcaacgtggacatcaacagtagtagtacagcatttgttggcagcagctgatagatatggactggtccgtctgcgtatcctgtgtgaatcaaagctctgtgatgaactgactcctgaaactgtcgcaacaactttagcccttgctgaacagcaccattgtgctgagctgaagtctgcatgtctaaagttcattgctttgcgaggaaatttgggagctgttatggagacggaaggctttgattacctggaggatacatgcccgtccctactatctgacttgttagctactgtggcagtcgtggacgacgatcttgcatcccttaaccgaaaaaggggagtcagcgggaaccaagtcatggctctagtgggaagcgttgaaaggcgcacccggaggaagctttagtagctggcttccctagagggagactgtagttgacaacgatttgatttggacgctggtagctgtgaataatatcgtatccagatgatttttttttttttttgcagaagcagaagttgtaaattttttgaattgaatgcctttttttttctgtttgggacccttccttacgtaaagttctagcttttatactgttttcaatactctaaattgtcccct

SEQ ID NO: 710 - DNA, 829 bp, Zea mays
  unsure (1)..(829): unsure at all n locations
  Clone ID: TF_LIB4741-097-Q1-K1-A11
agcatcatcttcgaggcgtagccagaatgatgtacactggtcttccgccaccagcttgggagccggcactaccactacaagacggacaccagccgccactacaccgtcatcctgggcagccataggaacaagcggctcaagatcgaagtagatggaaacactgctgttgatgttgctgccgtcggtctctgctgctcctcgtctttccagagctactggatcagcatctatgacggatacataagcatcggccaaggaaagcatccaagcaacaatctcctcttccagtggcttgatcctgatcccaacccacatgttcagtatgtcggcctatccagctgggacaagcatgtagggtacagaaacataagccttcttccatcagctcccccaaatagcatattttggactcaaattgagtacgccaatgtccacccggatgctgacgccagggattatgtgaggaaagataattgtggtcaacgggtacttgcagactttctagagaactgggatttctctgatgccgtatttgtcggtggcactgaaagaaaggtcgtccctgcacacaaacttgtcttgtgtgcctctggagatttcccttttgaaataggggatggagctaccattgtgcttccatcagcatcctaccctgttctccactctcttcttgagtatatctatacaggttcgacccagattgctgaatggctactaagttctctgctggagttaagctcacagnttanagtcgacccactgatgaagtggtgtaaagacatcattgactgtttagaagtggataagaaaccttcccgatctggaaaat

SEQ ID NO: 711 - DNA, 774 bp, Zea mays
  Clone ID: TF_ZmC560263_1
cattgggtacctcgaggccggccgggaaaaaccctcccattccccctccgctgccgccgcccacccgacccaaccgatcgaggcgcgccagcgccaggccgccagcgccctacgttgttgtcctccatgccgggatcatctggctctcccgctgctggctacagtaggagcggcgacggctcgcactctgcctccgccatcgtcgccggcgctgtgaccggctcccacgtgcttaagatcgtgttctactcccgcactaaggaggtccccaatcgtcaggtcatctgctcccgtcacttccgcctgggaggacacacctggttcgtgaagtattaccccaatgggaacgccgccgacaaagccgatttcatatcgttgtatctcgctatccatggtgcagtagtcggcaagccagtgaaggcgcaggtcaccatcagtttactcgaccaggacgggaagccggtgccgtcgtacaccaaagtcacaccattcgtggacttcgctgcgaaaggggactggggatacacagagttcatcgagaggaaagctctggaggaatccgagcatctcagggatgactccttcaccgtcaggtttgatgtgaccatcatgagcgacatccaaaccgtagaaatgccgtcagtggtcgtgccgccgtccgacatgcaccggcactacgctgatctcctgctgagcaaggaaggcgccgacgtcaaattccgaatcggcgggcagacattcaccgcccatcggcttgttctctcgacacggtcg

SEQ ID NO: 712 - DNA, 1192 bp, Zea mays
  Clone ID: TF_ZmC1125_1
ccacgcgtccggtgagcaattcgtgttatagttcaacactttcagacgttactttcttggtagaaggttggtactatttcacgaccctgatttcatcagtataattcttttcaatcgtgtaccagataatcttaatcccttctacaggaaagcgattttatgcacacagaattgctttgcttgcttcttctgatgcatttcgtgcaatgtttgatggcgggtacagggaaaaggatgcaagggacattgaaattcctaatatcagatgggacgtctttgaactcatgatgagatttatctatacagggtcagttcaggttaccagtgaaattgcacaggatcttcttagagctggtgatcagtatctcttagaaggcctcaaacgcctatgtgaatatactattgcgaaggatgtgaatctagataatgtatctgacatgtatgacttgtccgaagcctttcatgccgtgtcactgagacatacgtgcatcttgtacattctggaacattttaacaagatctgcaccagagccggttctgcacagctgatccagcgtgttattccagagatccgcaattttctaaccaaggcactgagttcatcaagaagtccaagtccaagcgacaggaactcgcagacttgatgagtcccaattcattggcaccgacgccgtcatctgaccaaagttgctggagatcctgtacagtaaaatttctggcgctgagcgttcaatggtatctattttgggtacatggtggcgcggtccttgaaattaacatcagcaatgtaacaaaattttctaagatctagttgaggataaggataaggagaacatgtctcgtactcatgcatcgaccagcttacactgggataggctatagttggatggtcctggccgtaattcgtcggtctcagctttgattgagtttagtgttgttttcactttccagttcacagttcagtgtatgcccgcatctgtttatttaaagtattaagcgtgaacaagttagacattaggacatgtacaatgatgttgtgataaagctgtctgtgtagatccaccgattggagttaccgaaacaactatgtaacatcatagatgacattagatgcatgataattgctggtaaagcttggtcaaaaaaaaaaaaaaaaaaaaaaaaaaaaaaaaaaattaaaaaaaaattaaaa

SEQ ID NO: 713 - DNA, 2462 bp, Zea mays
  Clone ID: TF_ZmC2364_1
tctttccgctctcccggccatttctctcatttcgccctccctccgccggctagggttactgccaccgccttccacccctccccgactgcccgtgggtggaggaggctggttggcgtgcaggcgacctcggcggcggagatggagccggacttctcgaccgtgggcgggcccagctttgagttcgctttcaacgaggccaacttctccgaccgggaattgcggatcgaggtcgtcgccggggatgactacgctccggggtccagcggcgccggtgccggtcgacggcggggggagcccttttcctaatcttgctgctaccgcgcgctccctctcccccggccatttctctcatttcgccctccctccgccggctagggttactgccaccgccttccacccctccccgactgcccgtgggtggaggaggctggttggcgtgcagggtacctcggcggcggagatggagccggacttctcgaccgtgggcgggcccagctttgagttcgctttcaacgaggccaacttctccgaccgggaattgcggatcgaggtcgtcgcgggggattacgacgcgccggggtccactggcggcggttccggaggaggtggcctcgccgactgggcgcgccatcggaagcgccgacgcgaggagctcttcaaggagaaagaatctacaacctacatgccagaccaaactaattttaatgaagtcgaagcagaagagtgtgatgcatatgaagaaaatcaagaggaacctgtagcaatgatggaaggatctccacctgatgttggtcaagatggtgatgatgagcaaggtattgatccatcttgggctgctgtagttacgccggttttacgagtcaagacaatttatatcagttcggcgattcttgctgcgaagagtcctttctttttcaagcttttctcaaacggcatgaaagaatcggaccagagacatgcaacccttagaattactgactcagaggaaattgccctcatggagcttttaagctttatgtatagtggaaagttgacaactactgagcccactcttcttctggatatcttgatggctgccgacaaatttgaggttgtttcatgcatgaggtactgcagccagttgctcacaagcttgcagatgaccacagaatctgcacttctctacctagatctcccttgctcagtttcaatggcagctgcagttcaacctctgacagatgcagctaaggattttctcgctgtaaagtacaaggatttgattaagttccaagatgaagtgatgaacatccctcgtgctggaatcgaagccatcttgtcaagtaatgacctccaggtggcatctgaagataccatctatgacttcttactcagatgggcccgtgcacaatacccgaaatcagaagagagacgtgaggtccttagttctcggctgctccctcttgtgcgattcagtcatatgacgtgtaggaagctgcggaaggtcctagcctgcacagatatagaccacgagcaagcaaccaagtgtgtcaccgaggctcttctgttcaaagctgatgcaccacaccggcaacgagctcttgcagcggacgcaataacctgccggaaattcgccgagcgggcttacaagtacagaccactcaaagttgttgagtttgatcggccctacccacagtgcatagcatacttggatctcaagcgcgacgagtgctctcgactctttcctgcagggcggatatactcgcaagcgttccaccttgcagggcagggtttcttcctctcagctcactgtaacatggagcagcaaagcgcgttctactgcttcgggctcttcctggggatgcaagagaagggctccacgagtgtgacagtggactacgagttcgctgcaaggacgagaccatccggcgagtttgtgagcaagtacaagggtaactacacattcaccggtggaaaggcggttgggtacaggaatctctttgcaatcccatggcagaagttcttggccgatgacagcctcttcttcgtggatgggatgctgcatctgagagccgagcttacgataaagcaaccctagagcaatggtctctgtatagtggtagttgttacgacagatgaaaaatatatcggatgggatacctcacaagttccagttcgctgcaagtttccagattggccggtatctcactgccaatgagcttgtttgcctccgtaacggcgcagggtgtgtaatggcttatttattcctagtatatacaagttggggtgagatgtgcgaggagcagcagcggtggcggcgatctggatgaagactccgtcccccgacctgtgcaccaggacggcggggaagcacgccaacaagtacaaggtggtggacgcggtgacggtgctagagatgcaggtggacgcgttcaagaagcgcgtgaaggcggcgcggaggctcgccaacgatgaggtcaagacgg

SEQ ID NO: 714 - DNA, 939 bp, Zea mays
  Clone ID: TF_ZmC1239096_1
cagatgcagcgtcgacggatacgactgggagatccagttccgcttttcaccttacgagggcagtcctgaagactactggtagcgctcgtgcttgtgtacctcggcgcgccgtgcgacggcggtgtggcggtggctctgagctgtcatctggttgatcagagctgcgatcttcgtgttccattattaacaacaacacaaggtctaaacacaacgtttaggcgtcccttggaccgctctcctccgatttacttcggcaaagggaaggttagagacgatgtgcaggcagcagcagcagctggtcgcccgctaatattcaagggtggttcatttactgtggaatgccagatcgacgtgcacagcagcagggactcagattccgtttctctgccgtcctctgacctgccccaacacctcggggagctcttgcggaaccagtctggtgcagacgtcaccttcatcgtttctggcgagtccatcgcagcacacaagagcatactagccgcaaggtccccgatcttcatggcccagttctttggcaacatgctggagaggggctcccagtgcgtggagatccaggacatgcacccggccgtgttcaaggccatgcttcactacatctacactgacacagtgcctgaccttggtactgataccaccacggtcgaggagacagcggtgatggctcagcacctgcttgtagctgccgacatgtatgcgctgcacaggctcaaggagatctgcgaggaaaggctcacccgcggcatcggcattggcacggtggcgtcgacgctggctctagcagaccagcacaacttggcccagctcaaggctaagtgcatcgacttcatcactggagggtccagtgaaaatcttctagccgtcttgagacggaagagtacaggcatctggaggccagcgacagcaacggaattcgagctc

SEQ ID NO: 715 - DNA, 415 bp, Zea mays
  unsure (1)..(415): unsure at all n locations
  Clone ID: TF_LIB189-031-Q1-E1-F6
agcccacgcgtccgcccacgcgtccgcccacgcgtccgcccacgcgtccgcccacgcgtccggggctgcctgtcgcacatgctggcggactccatccacgcggacgtgaccatcaacacgacggacggggtgctgaaggcgcacaaggcggtgctggcggcgtgctcccccgtgttcaagagcatgttcgtgcacgacctgagggagaaggagtcgtcgacggtggacatcggcgacatgtgcgtggagtcgtgctcggcgctgctgggtttcgtgtacgggacgatcgagcaggggcagttctggaagcaccggctgccgctgctggcggcggcggacaagtacgggatcngcgacatcaaggactgctgcnanganagcctgctggaggacataggctcgggcaacgtgctgg

SEQ ID NO: 716 - DNA, 1043 bp, Zea mays
  Clone ID: TF_ZmC3490_1
gctcacttggacccggccgggtttgccctcacagccctcgaaggcaccacccgcgccgccgccaccgctccgaaaatacagccatcgtagtgcggcggctaggtcggccggcgtttggaggagctccgaagatgtggtgccagtcgtgcaaggaagggtacgacgaggaggacgccgggacctgcaaggagtgctacgaggaggccagcgagacggaggaggagctcaagcgggagatcgacgacctccgctcccgcctcctcttcctccgcctcccctcccctaccctagacgccgcatcagcccccaactgcgacctcctcctccacgccatcccctcgaccggcgcgggaggcgaacgcgatgctgggcgcacccccgacacacccgccgtgcccgcccatcgcgtcatccttgccagcagatctcctgttttcagagcgatgcttgagaatgagatggaagagagtaggagtggtgtcatcaagatctatgatgtgtcttacgacatccttcgtgcttttgtccattacatgtacactgcagaagcccttctagatgaacagatggcatctgacctcttggtgttggctgagaagtacgaagtaaagcacctgaaggcatactgtgagaagttcataacatccaaagtgaatgacgacaatgctattacccactacgccttcgcgcaccgtcacagcgcaaagcagctgctggaggcctcgctttctgtgctcatggccaacatgtctacgctatcggatcgtgaagaatacaaggagcttgtggagaaggacccaaggcttgttgtggagatttatgaagcatatctcaaccggcaagtcaacactgcagctgggaaggacacaaattgtagcaacaggaagtgataattacgaacagaactcgtgcagtagcaatattctaactacgcatttgtgcattcatgtaagcaagttaagaacatcatattctcatgctgtcttgatttaactgctaatttttttgatgataaatcaattaaaaaaaaaaaaaaagcggcc

SEQ ID NO: 717 - DNA, 1978 bp, Zea mays
  Clone ID: TF_ZmC1125_2
agcagctgctggggccttgcgtactttatcctttaaaaatgatgaaaataaaactcagattgtgcaatgcaatgctttgccaactttgatcttaatgctgcgatctgaagatgctgcaattcactatgaagcagttgcgatcattggaaggttggttcattcatcacctaagatcaagaaggaggttcttaatgcaggggcactgcaacctgtgattggattattaagctcatgttgtacagaaagccaaagagaggctgctttgttgctagggcaatttgcttcagccgactcagattgcaaggtccatattgtgcaaaggggtgcagtccgtccactaattgaaatgctacagtcggctgatgtccaactccgggagatgtctgcttttgcacttggcaggcttgcccaggacacacataaccaagcaggtattgcatataatggtggcttggtgcctttgttaaaacttcttgactcaaaaaatggatctctgcaacataatgctgcatttgccctttatggagttgcagataatgaggactatgtatctgacttcattaaagtaggaggtgtccaaaagttacaagatggagaatttattgtccaggcaacaaaggactgtgtggcaaaaacattgaagaggttagaggagaagataaatggacgagtgttgaaacacttgctttatttgatgcgagtaggagagaaatctgtgcaaaggcgtgttgctctggctcttgcacacctttgtgcccctgaagatcaaagggcaatttttattgataataatggtctcgacttgcttcttgatcttcttatttccatgagcccaaaacatcaacaagatggctcagcagcattatacaaattggccaacaaagctgcagcactttctcccatggatgctgcccctccatctccaacacctcaggtttatcttggtgagcaatacgtgaatagttcaacactttcagacgttactttcttggtagaaggaaagcgattttatgcacacagaattgctttgcttgcttcttctgatgcatttcgtgcaatgtttgatggcgggtacagggaaaaggatgcaagggacattgaaattcctaatatcagatgggacgtctttgaactcatgatgagatttatctatacagggtcagttcaggttaccagtgaaattgcacaggatcttcttagagctggtgatcagtatctcttagaaggcctcaaacgcctatgtgaatatactattgcgaaggatgtgaatctagataatgtatctgacatgtatgacttgtccgaagcctttcatgccgtgtctctgagacatacgtgcatcttgtacattctggaacattttaacaagatctgcaccagagccggttctgcacagctgatccagcgtgttattccagagctccgcaatttcctaaccaaggcactgagttcatcaagaagcccaagtacaaccgacgacaggaacttgcagacttgattttgagtcccaattcattgacactgacaccgtcatctgaccaaagttgctggacatcctgtacagtgaagtttctggcgctgcgcatttgatggcatctgttgtggtacatggtggccggctcctcaaaattaacatcagcagcttaacaaacttttgtaagatttagtggaggatatgggtaaagagaacccgcgtcttagtcatgcctcgaccagcttacactgggataggctgtagttgtgaatggtcttggccgtaattcgtcggtctctgctttgtttctgagttgtgtttgtttcaagttcacagttcagtgtatgcctgcatatgtttaaagtatgaagcttgagcaagttagaaattagcccctgtagtgataaagctgtctgtgtagatccaccgattggagttaccgaaacaactatgtaacatcatagatgacattagatgcatgataattgctggtaaagcttggtc

SEQ ID NO: 718 - DNA, 1767 bp, Zea mays
  Clone ID: TF_ZmC2315_13
ataaataccatgttacggtccaattccaatcaaccacgccgtctaaaaccacgagatccccggtgtcccactaatccatcagcagccgcacatagtaagggtgtacccagcaattcggccgcacgatgcacgagcaggaacaacccacggagtcccacaagggtcactgacagacacgcaagacagattcccttcaccttgctcccatcagcatttcatgggagccattctgccatgacaagagaattacaaagatgccctcgtcccggcattaaatacacctccccgctcggcctgatcccctcccccttccctcctctccgcctccgattggagtggctcgccttcttccccgcagccagcacgagcttgtcgagatttcagctcgtttctccgccagaggtcgagcaggccagcttcccaggaccgaagctctgcccggttcgccagtccaggaactgctgctctcccggggccagagatccaaacaaacctctgcgttggggttctccggggttccttgcgctggagggaggtttcgttctcgccggccatggtttggctgagaagaagcagcagcatattgatgcgaaatctctgagctttatgaagatcgccactcacctgcgccgctcctgcttcctccactccttctcggtcgtcttcctctactggttttatgtgatctcgtaacttgccctcctccggatccgccattccccgtgccctctctctctctctctctctctctctctctctctctctctctctctctctctctctctccgtcccctcttgcttctcccttctttcttgccttcccgaacaaccgccgaagaataatagcactagcactagcgctagcgatagaggaattttgttggaggtaaagtagccagaccgaccgggggaaaaaagagcgtgtcttgatgtcgtcgtcgtcgctgtcgccggcggggaggacgtccgggtcggacggcgactcggcggcggacacgcgccggcgcgagaagcggcggctgtcgaaccgcgagtcggcgcggcggtcgcggctgcggaagcagcagcacctggacgagctggcccaggaggcggcgctcctgcaggccgagaacgcgcgcgtggcggcccgcgccgcccgacgtcgcgtcgcagaacgcgcgcgtcgagcaggagaacgccgtgctccgcgctcgcgccgccgaactcggcgcccgcctccgctccgtcaacgaggtgctccgcgtcgtcgaggagttcagcggcgtcgccatggacatccaggaggaggtgccgccggcggacgacccgctgctccgcccctggcagttgccctgctacccggccgccgccatgcccatcggcgccccgcatatgctccgctactgatgagtgatgaatgattgcccccgccaaccatacgaggcagacagactgacagagccggggctggtcggcaaacgagacaagaagaattggctgcgtctcaacaacacatgattattgctgctgatctgttctctctgtgtgtatgagatgatgctcgtttacatatgtatctggttggttgtactttcggtattgtaatgttattatatcaataagtgttatgtaatctcctacgtttgagtgttattcgatgattcaatttttgtatacggttaacaagttactccatgaaaacatttctcatagagttcagtttggaaaaaacaaaacaaatcaagctaaaaaaaaaagaaaaatgagtagaaaaaaaaaaaaaga

SEQ ID NO: 719 - DNA, 1383 bp, Zea mays
  Clone ID: TF_ZmC69637_1
cattgggtacctcgaggccggccgggcccttttcccctcctccctcgctaaggttcctgtgcagcagccctgttgcatgccatcttcctagcttagctagcaagaatctcttgccctccttgcttcctgatcctgcgcccttggatcaccttccatgtgttcttggccttgttctctcgtgcatctgaccatcagttcttaagaatatatttccattggaagcaaattttagggtttcctgggagagactctgccaacctttttttttgccctggtgcatctgcatcaacttgttcgtttctctctcgtaaaaaaaaagctcactgtcgtaaacgttttcgccaattgatccatgatagactaacgtcgtgtagatgtcacaaatcctctccgaggtgagtcaccgctgcagatttatgatcaactcgacgctccggcgaggcacccatcttgttctctctttctccgttgtgttcctctattggttctatgtgttctcagtaagatcctaaccaccaatacaacatactagtatcatatccttggaaattataagcctctacatacaacaacttaattagtcagaggaaagctttcaagtctagatataaccccaagtatcttttgaggatgaccctgtccggtggggcctcgtctgggtctagtcatgggacccgtagcttggggtcagagggtgacatggtgcaccggatggagctcatgcgcaagagaaggatggagtcaaaccgggagtccgcgaagcgatcgaggcagcggaagcagcaacatctcgacgacctcaactcgcaggtggacaagttgaggacgacgaaacagcaactcatgtagcactgaacatgaccagcatgcattacgcgcaacaagcagctcagaactcggtgctgcgcacccagatgatggagctgcagagcaggctctgcgcactgcgtgagatcatatgccatatgtacgcaacaacaacgaatgtccatccagcaactgtcatgggcggtgctgctacctaccatacttttggcgaaactgcgtggaactctggcagctgcagcatgcaaatggtcgaccacttgttgcaccagtgcttctaggctctagctacgtacgaggaggtagaggccaagacaaacaaaggcatgcatatatatgtattccatgttttctatgtcacaactcacaagtagtgtgtacgtcatttgatttaatgtataaaagggtttgtgcaattaattgggcacatgcatgtgggttaaagccaacattattgttgttgcctctaatttgctcatgcgtgaaaaaacacatggcaactggcaacttgtgttttgttcacaactattgctaactgcaatattaatgatgatgatc

SEQ ID NO: 720 - DNA, 354 bp, Zea mays
  Clone ID: TF_LIB3245-236-P1-N1-H1
gcggcggcggaggatgatcaagaacagggagtccgccgcgaggtcccgagcgcgcaaacaggcttattcaatggaatttgaagcccaagttcaaaaacttaaaaaggcaaattaagaacctgagaaggaaccagccaaaattattggaattgcaaacaaccaaggtttaaaaattgtggaaggatcaattcgaccgaagaaaccggtgtgctctcgaagaacatttaccggcccctgtggacaaatgcctataacacaacataagtttcactttctacatacctgtaggggcgcttgggatctgtagataaattctctcctatagtgtggcgctgaactcatcatgtacatgta

SEQ ID NO: 721 - DNA, 1456 bp, Zea mays
  unsure (1)..(1456): unsure at all n locations
  Clone ID: TF_ZmC5838_3
atttgcgctcggcacgcaggcgacggctgcgggctgcggcgctcaggttgtggttctcatcgacggcgtcagcggcttcccctcccgcctctcgccagtcgcttcgcgccctcgcctccggtcctccgcacactggccggtgaccctgcatagtattatctgattttcctggaggacacattttaaggactgaggttacaatggcagatgccagccctagaacagaaacatcaacagatgatactgacgacaataacgggcttgaaccaggcagaggtggtcttgttgcttctgactccagtgacagatccaaagacaaacatggagatcaaaagacattgcgtcgccttgctcaaaatcgtgaggctgcaaggaagagccgactaaggaagaaggcatatgttcaacagttggagaatagcaggctaaaacttacccaactagagcaagagctgcaaagagctcgtcagcagatattttctctcacagggcatttttatatctagttcagttgatcagtcacactccatgagtggaaatggggcattggcctttgatatggagtatgcgaggtggttggaagagcacaatcggcaaattagtgaactaagggctggtgtcagtgctcatgcaagtgatactgatcttcgaagtgttgttgataagatcatgtcacactatgatgagatttttaggctcaaaggcaatgcagccaaggcagatgtttttcacgtcttatctggcatgtggaagacaccggcggagaggtgttttttgtggctaggaggtttccgaccatctgaggttttaaagcttctttcgacacaacttgaacctctcaccgaacagcagctgtcagggataagcaaccttcagcaatcttcacagcaggctgaggatgctctttcacaaggaatggaggcccttcagcaatcattggccgaaaccttggctgggtctctttcgtcttctggatcaacaggaaatgtggcaaactacatgggtcaaatggccatggctatgggaaaacttggaacgcttgagaatttccttcgtcagactctacaacagatgcaaaggatcctgaccactagacagtcagctcgggcgctacttgtgataagtgattactcttcacgtctccgtgccctaagctctctctggcttgctcggcccaaggaatagcaagaacatgctatttgactgcaatacttttcacaatttggttttcaatggtcaggagatttgacaaggctgcgacagacttgattcggacatatctgcacatactatgacccaaatggaaggggatgttcatgtagcttaggctgcttagctttgtagttaagtgttgttgatgtatcattaccaactgctgtaaaattctccctccgtatgcccctgatttgcagcgaaccaatagaatgcacatttatgntcacctgacgattttttg

SEQ ID NO: 722 - DNA, 776 bp, Zea mays
  Clone ID: TF_ZmC179456_1
cattgggtacctcgaggccggccgggatgcagtatgatcgatgcaatgcaagcagtctctctcatctcatgcaatattgcaaacgcagtgccccacctcacaaggccatccccccatgcatgtgcacacacacacacacacacacacaccatatatctctccacctacaccctgcctgcctgcttgcaattgcaattgcaaccaataaccatatacacacagctagctagcttcacatatcgcaagcacccagatcggcaggaccagcggcagcggcagcggtgccggcaagaagcaggccgcgcgctccactctccgaccccggccgaaacaaaggtgatggcgcagctgccgccgagggcgccggggggcgccgcgccgcaggaccactggtcggcggcgggggagttcctggggttcgccgcggccaggcgcggcgcgcaccgccgctcggcgagcgactccgccgcgttcctcgaggccctgcccatggaagacgtcatcggcggcgacggcttcgaccgcctcgacgacgaccagctcatgtccatgttctccgacgtcgacgcgccagccgtctccgccggggacgcggcgcagctcatggacgtggcggacgccgacgcggacgacgacgggtcggccgtcctcgtcgcgcgtcgccgtggacggcgtctccgttgacctcaaaaggttcaagacgataattggcaaacaggcagtcagcgcagaggtcacgagtcaggaagctacagtacatctccgagctcgaacgg

SEQ ID NO: 723 - DNA, 839 bp, Zea mays
  Clone ID: TF_ZmC342438_1
ttttgtgtctttctctgtcgatgtaaagggcaaaagcttataaagtgacaatcacagacaatctatctgcgcctataaggctttggattaatggcggtgtgaacaagggcgactctggccaccgtgtgtccatcttccccctactatacacactcctccttcacgagcgatactgctaggtacaggtccacgagcttaccacagacctgccaacgtcctccgcagacaaattctctttatcgtgggtccgacttgccgtctcattctctccaggacctcattcttttgcttctccagcatttcgacctgtttttttgcaactcatcgttcaactctttaagttttgccacctcagcttccaactccatcatatacgcctgtttcctcccacgcgacctcgcggccaactcccggttcttgatcatccggcgttgcctcctctcaaccaccttctccacagctggtggcttccttcccctcaaaccagcacaaaaaaacgtacgacaccggtgatggcgacagatgcgacaagtcgtctccttccatcttcccgaacccgcttgccgtcaccggccgcggcgataccgccggggcctcaagaacacctccctgctgctgactgagagcccccgacacaaacccattcccgaattggagcggaggcactaagggagcaaacacattgccatgtggaaacagcattggcggttgcagatgaggtggtgggcaacccggcgctggtggtacgggcgccgccgccatcatgtcctccctcaccacgccggcgcggacgaggaactcctccagcatgatctccccgagcgtcggctgccgttggg

SEQ ID NO: 724 - DNA, 973 bp, Zea mays
  Clone ID: TF_ZmC1889_3
atataacattggaccctctcctccacgcaaccggtagtgtcgtcgtcctttggagctgcacacacatctgtgaggagaaaccttgtgcttggcgatttggcaccctccagttaattatccttggtttgaggaagaacaacacttcagccagacatgctttaagcagggaggccatttttttttcctcgagcgcgctacgatggagctctactccggataccttgacgaccatttcaacccccacaagctaagcatcgccggcagcgccgtctcgccgccggagtacatggcgtcggcgtcgccggcgcagttcgcggcggcgcccctcaggatggggtacgggaggccggcgcccgcgccgcccccgcccgtgatgggcatgtggagcagcgagccgttcagggtcgacagcggcagcgcccacgccaccagcgcgtccaccgtcaacaccaagctggaggagacaaggctagaagacgacgtggtagcacttgagccggcaagaagtacggagcaggaaacgagcaggccgccagagagggcccagagaaggctcgcgcagaacagagaggctgcccggaagagtcgcctgcggaagaaggcctacatccagcagctagagacaagccgcatgaagctgtcgcagctagagctggagcttcaacgggcgcggcagcagcagggtgcatatgcgaatagggaagcatgggagactcggctctcggctacacatgcccgatagatccaggcgtcgcctgggttcgagatcgactactggcactgggtggacgagcagaagcggcacacgacggagctgatgtcggcgctccaggggcagcagacgtcgtcgacgtcggagctggagctccgcttgctggtggagacggggctcagcaactacgagcacctcttcaggatcaaggcggtggccagcaacgcggacgtgttccacgttatgtcaggcgtgtggaag

SEQ ID NO: 725 - DNA, 1946 bp, Zea mays
  unsure (1)..(1946): unsure at all n locations
  Clone ID: TF_ZmC5008_2
cctcgaggggccggccgggaanaaaaaaaaaaaaaaaaaaaggggcctacgcgcccaacacgtccccgtccagattcatccacccttccccttcgtctccctccctccatccaatccaccccctctcccccttctcgtcgtcgccgccgccgccgcccatccggggcttggactgtcctttccccgttctgctggtaggtaaggaattcctcttctggctccgacggattctctcgctccgtttgtctctggtacaattcgttcgctgctgcgagccctcgaatccgtttgtatccggagcagcggcggagtagtaatactagtacaattccttagtcgtgttcccaagtgggtggatgcgtctttgactgcccggcgcccgcccgcaccccgcagcagcaatggacgacggggacctggatttctccaacccggacacgtacctgtgtccggccctcggcaccgacccgcccagcagctgctccatggacagctacttcgacgagatcctcaaggacacggagcacctcgcctgcacgcacacccacacctgcaacccgccggtgcacgacctctcgcacacccacacctgcgtccacgtccataccaagatcgtcgcggcctcgccgggcgacgccgagtcgccgtccgagaacaacagcaacggcaacgccgcctctaagaagcgcccgtcggggaaccgcgccgccgtcaggaagtaccgggagaagaagaaggcccacaccgcatcgctcgaggaggaggtggtgcacctccgggcgctcaaccagcagctcatgaaaaagctccagagccacgccgcgctcgaggcggaggcggccaggctccgctgcctgctcgtcgacatcaggggcaggatcgagggggagattggtgcgttcccgtatcagaggccgccggcggtcaagaacgtcgacctcctgtctagtgttgaccaggaaagcctccttggcagcgctgctgcccaggttgccaactcctgtgattttagatgcaaccatcagatgtactgcaaccctgggatgcagggcgctatcagcggtcaggtgttgggacaaggtgcctgtgatgtcgccagtatgcaatgcattggaagcaccaagtctggatccactaagctacctgtttgtgggggtctggatacactacctgctgtctgcttaccaaatgttgaaaagaagtgatggactcctggcggtgtttatggtctctcctttccagagacatgctgtataaactgctagcttttctatgtaggactgcatctggttcaaactgctatactgctatgttagtatgtcactgagtttgtcgcccatgatgcttctatggtgtctgaggcgattcaagtttgttagctctaaagctgacaggacatcctcgtttactttgcctagtttccagacggtctatgatcaagtgcagaactgaaccggatcgtaaggagttgaacatgaacttgttaaaatctggcatatgtagatgcatggatcgcgaaatcccctcgtgtaggtgcagtgtccctcttctgctatgtgcgagatctgagggaacctggattcatttattgtttgaatgtttcactgtttctgtcgcaagtaaataatttattgcatgggaagtttataactctagacctggtaaaattctgagtagcagcaattctacatcttaccctgtgatgttaccgaccagacactgcaagtttggggcagccgtgcagggcgttacttttgtttgggggtgtttgaaaacatctcattctgtttggtgttgactgacttgtgggcattattattattaagggctagtttgggaaccctgttgcctatgtaaaaatatctactaaccatggatatggatcgctattacacaaacatatacgggtcgcacaacgactggtaacctgctagccccgtaattaa

SEQ ID NO: 726 - DNA, 858 bp, Zea mays
  Clone ID: TF_ZmC5008_5
attcccctccgccgcctacgcgcccaacacgcccccgtccagattcagttccacccttccccttcgtctccctccctccatccaatccaccccctctcccccttctcgtcgtcgccgccgccgccgcccatccggggcttggactgtcctttccccgttctgctggtagtgggtggatgcgtctttgactgcccggcgcccgcccgcaccccgcagcagcaatggacgacggggacctggatttctccaacccggacacgtacctgtgtccggccctcggcaccgacccgcccagcagctgctccatggacagctacttcgacgagatcctcaaggacacggagcacctcgcctgcacgcacacccacacctgcaacccgccggtgcacgacctctcgcacacccacacctgcgtccacgtccataccaagatcgtcgcggcctcgccgggcgacgccgagtcgccgtccgagaacaacagcaacggcaacgccgcctctaagaagcgcccgtcgggtaaccgcgccgccgtcaggaagtaccgggagaagaagaaggcccacaccgcatcgctcgaggaggaggtggtgcacctccgggcgctcaaccagcagctcatgaaaaagctccagagccacgccgcgctcgaggcggaggcggccaggctccgctgcctgctcgtcgacatcaggggcaggatcgagggggagatcggtgcgttcccgtatcagaggccgccggcggtcaagaacgtcgacctcctgtctagtgttgaccaggaaagcctccttggcagcgctgctgcccggttgccaactcctgtgattttagatgaaccatcagatgtactgcacccct

SEQ ID NO: 727 - DNA, 852 bp, Zea mays
  Clone ID: TF_ZmC30857_4
ctccgctgtccgctggctgcgatagtgctgcctgctgctctaagctctaacccaatccaggaggatgccgaggagcccgcagctgagcctgagcggctgcagctctctcttctccctgtccagcaccagtacgagccgcgacagcgccgccctgaaggcgccggtgcccccacggcgcacccctctcctgtcgctcagcgtcggcgaggaggaagaggacgagggtgaggacgaggaggagtacctgctgggggccggcgccctggatctgcagctgacggggcccggtggcggcagcaacagcagcggcggctacgacgacgagcggaagaacatccggatgatgaggaacagggagtctgcgctgcgctccagggcaaggaagagggtacgaacacgaatctaagcagctcaacccatgtctctctctgacacacaaacactacaggcctatgtgcaggagctggagaaggaggttcgtcgcctggtgaatgagaacctcaagctcaagaggcagtgcaaacaagtaacaaatagtagcacactttgtctcttatagctaaaaatgaatgaatactcatctgtttgtatataacatgtaccagctgaaactagatatggctgcactggtccagcaaagcagcagcaagagcagctcccacatcagaagaacctcctcatccactcagctctaggctgctaccaataggaatatgtatgtgaatttaaagccatatatgaccaaggaagaatgggaggaagacgaacaaagctagctagactagactgcagcccctctaatccatggccattcgctgattaatacgataatatctcttatttgttggcttc

SEQ ID NO: 728 - DNA, 671 bp, Zea mays
  unsure (1)..(671): unsure at all n locations
  Clone ID: TF_LIB4666-020-R1-K1-A2
cggatgcccccaaagcgaagcgttacccgtcctcttagcgcttcagcgcgctgaagcgtgcgcttagtgccccgccttttggaaccctagaattagccattgcgtgtagtgtggaggaagtggtgccaagcaaatgataagagggaaggcatcacataatctgaagtgctatggaaaacaactatccactgccttgaatatacccaaagatttagccttgaaaggaaaacaactattcacatgcctgaaccatgatttgtggtttctattaggtttcaactctagcctactatagtattatctgattttcctggaggccacattttaaggactgaggttacaatggcagatgccagccctagaacagaaacatcaacagatgatactgacgacaataacgggcttgaaccaggcagaggtggtcttgttgcttctgactccagtgacagatccaaagacaaacatggagatcaaaagacattgcgtcgccttgctcaaaatcgtgaggctgcaaggaagagccgactaaggaaagaggcatatngtcaacagttggagaatagcanggctaaacttacccaactagagcaagagctgcaaagagctcgtcagcagggcatttttatatctaggtcagttgatcagtcacactccatgagtggaaatggggc

SEQ ID NO: 729 - DNA, 758 bp, Zea mays
  Clone ID: TF_LIB4765-018-Q1-K1-C1
ctggccgggtttccttccccaccatcgcgtgtgagtcccggtgtgatgtcacggagcggtggcggctttcccgatccactgtgcgggagaaatccccgtgcagccttcttccagctcttcctactctttgctactcgtcttcgctgatttctgccttaattccatcccttccctgcctagaacttgctttgcttcaccccatcacagcttttggtgcctcgtcatcggcgacctaaccgccggcgaccagataaactaagccaggcccttcgctccgaaagtcgtctctcgtagagagcacttgctcacctgctcctcgccctcctctgctggcagtggacttgcgcggagtggagatccatccggacctggttcgatttcttcatctcgttagaaaacggacagagtggagccatggtcccggcttctaattcatctgaccggtctgacagatctgacaaacctatggaccagaaggttttacgacggcttgcccaaaatcgtgaggcagcaagaaaaagccggctgaggaaaaaggcatatgtgcaacagctagagagcagtaagctaaaacttgcaagcctggagcaagaactccagaaagctcgacagcagggaatcttcatttctagttctggagatcaaactcatactatgagtggaaatggagctatgaccttcgatttggaatattctcgatggcaagaggaacaaaataagcagataaatgagctgaggactgcagtaaatgctcatgc

SEQ ID NO: 730 - DNA, 2739 bp, Zea mays
  Clone ID: TF_ZmC1124_1
attccccctccccacgccatcccttgtccgtctctccgtcctctcctcccgaccctcaccctgccctcgcgcccgccgccgcgcacacaccaggttatccttccgccgttaacaagcacgctccattcccaactaattctctcttacccttccgcctcgctcttggggccgctgcaagtgcagatccgtctagactgactccgattggtttcggcttcttcgcttctccttctcggtcatatgattgcaatgaatcctgacatggtactactgtcttggaaacaacttccaccaacggtcgatcctgtgaaacactaagacacccgttgccactggaaaggagagagcaaagtgatttgctgtctcctggcgatcgttgctcgtgaggcctagtgatggcagatgctagctcaaggactgacacctcaattgttttagacgacaacgacaagaatcatagggatctcactacgcattggcacctctgaaggtcttcgttggatatgaccaaactatttcaaccaattttgaacaagcttttcttcaattagtgctacccctagcctatcagatggtcgggggaggtaccctcgaggccggccgggcggagacgtgctgcagagcctgcagaggcttttcttccccccaccccacccatcgcgtgtgagtccacggtgtgatgtcacggagcggtggcggctttcccgattcactgtgcgggagaaatccccgtgcagccttcttccagctcttcctactctttgctactcgtcttcgctgatttctgccgctccaattccatcgcttccctgctttagaaccttctctgctagcttctccccgtcacagcttttggtgcctcgtcatcggcgaccaaaccgccggcgaccggataaactaagccagctccttcgctccgaaagtcgtctctcgtagagagcacttgctcacctgctccccgcccccctctgctggcgctggacttgctcggagtggagatccatccggacctggttcgatttcttcatttcgggttcgattcggtttttctatcccagagcgaaagatcaatatcacctgacacaacataacgatttcgtggaagccgaggttgcttctctgctcagtgggtggataactggattgtggattttgctaactacatgctgggttatcagcctatcataaggaaagcaaagaagagacaacaaagcaatttgttgtctctttcttaggagctggcgagtactcggcatggcagatgctagttcaaggactgacacctcgactgttttagacatggatgataagaatcaaaggttagaaaatggacagagtggagctatggccctggcttcgaattcatctgatcggtctgacagatctgacaaacctatggaccaaaaggttttacgacggcttgcccaaaatcgtgaggcagcaaggaaaagtcggctgaggaaaaaggcatatgtgcaacaactagagagcagcaagctaaaacttgcaagcctggagcaagaactccagaaagctcgacaacagggaatcttcatatccagttctggagatcaaactcatgctatgagtggaaatggagctatgaccttcgatttagaatattctcgatggcaagaggaagaaaataagcagataaatgagctgaggactgcagtaaatgctcatgcaagtgaaagtgacctccgtcttatcgtcgatgggataatggcacattatgatgagatattcaggctgaagggtattgctgcaaaggctgatgtgttccatatactttcaggcatgtggaaaacacctgctgaaaggtgcttcttgtggcttgggggtttccgttcgtctgagcttctaaagctccttgtgaatcagcttgagcctctaactgagcagcaattgatggggctatccaatctccagcaatcctcccagcaggctgaggatgcattgtcacaaggcatggaagcattgcagcagtccttggcagaaacgctggctgggtcccttggtccatcaggatcttctggaaacgtggcaaactatatgggtcaaatggctatggccatgggaaaacttggcacactcgagaatttccttcgccaggctgacaatctacgacagcagaccttacatcagatgcaacgtatcctgacaatccgacaagctgctcgtgcgcttcttgcaatccatgactacttttcacgtttgcgcgcactgagttctctttggcttgctaggccacgagagtaacatcacccccgttggggtcactcgatgaactgatctgtgaatgtgggactgctggctgcaaactcgcaaagcatttgcagatgactggaggatcagtcctctctgtacaagttgtattaacatcttctggtctcatattgtgctccagtgttgtacaatttagggaaaagcttggattaacttgtaagttatcatgaatttgttattggcatattgtacaattgtattagcaataaaaatagaagtacataagtgctggaaggactatccagcgtctatattggttggaaacgagcagcagaagcttgtcatgtcgattttgaatagtcggttgaagtgtttttttgggggtctatagagaacaaagaaagcttcaggagaaatgtataggtattcaccagtctaccatagagtgtgtgcttcggggagctccttgtgatggtaaaatttgataacgaggatgagttctgtgacatt

SEQ ID NO: 731 - DNA, 2648 bp, Zea mays
  Clone ID: TF_ZmC1124_2
ctcgaggccggccggggtccgtctcataccatcccatcccatcccatcccatccccgtgcgccgagttcacggccgccaccaccaccaccacaaccgattgcacaaggccacgcggcttctggaagcttccttcccttgccttgccttccctctcaacccaaatcgccacggctcctccgcccgcagcgccctcggcacgaccgccggattcgcctctgggtggggttggttttgtctcccccaccaccctacccacccctctcctctcctccaaggcttggcttgcctcgtgtcgtgtgtccctccaccgcccgccatgccgacgaggcttgccccccaccgacgatcgcacacgatcatatgattgcaatgaatcctgacatggtactactgtcttggaaacaaattggcctgccggccgtgaaacacgaaacgaggaaggcgaggagacgtgctctgctgctgcagcctgcagcggctttccttcccccaccatcgcgtgtgagtccacggtgtgatgtcacggagcggtggcggctttcccgatccactgtgcgggagaaatccccgtgcagccttcttccagctcttcctactctttgctactcgtcttcgctgatttctgccttaattccatcccttccctgcctagaacttgctttgcttcaccccatcacagcttttggtgcctcgtcatcggcgacctaaccgccggcgaccagataaactaagccaggcccttcgctccgaaagtcgtctctcgtagagagcacttgctcacctgctcctcgccctcctctgctggcagtggacttgcgcggagtggagatccatccggacctggttcgatttcttcatctcggttgcttctctgtccagtgggtggatcactggattgtgggttgtgctaactgcaggctggcttgtcagcctatcataaggaaagtgaaaaagagacaacaaagcaatttgttgtctcattcttaggagctggcgagcactcggcatggcagatgctagttcgaggactgacacctcgactgttgtagacatggatgataagaatcaaaggattattttacgaaatttcaacttctctctgtgggacatctaatggtacaggtcttggagagatgcatgtaaagtgttagaaaacggacagagtggagccatggtcccggcttctaattcatctgaccggtctgacagatctgacaaacctatggaccagaaggttttacgacggcttgcccaaaatcgtgaggcagcaagaaaaagccggctgaggaaaaaggcatatgtgcaacagctagagagcagtaagctaaaacttgcaagcctggagcaagaactccagaaagctcgacagcagggaatcttcatttctagttctggagatcaaactcatactatgagtggaaatggagctatgaccttcgatttagaatattctcgatggcaagaggaacaaaataagcagataaatgagctgaggactgcagtaaatgctcatgcaagtgatagtgacctccgtcttatagtcgatgggataatggcacattatgacgagatattcaggctgaagggcattgctgcaaaggctgatgtgttccatatactttcaggcatgtggaaaacatctgctgaaaggtgcttcttgtggcttgggggtttccgttcgtctgagcttctaaagctccttgtgaatcagcttgagcctctaactgagcagcaattgatggggctgtccaatctgcagcaatcttctcagcaggctgaggatgcattgtcacaaggaatggaagcattgcagcagtccttggcagaaacgctggctgggtcccttggtccatcaggatcttctggaaacgtggcaaactatatgggtcaaatggctatggccatgggaaaacttggcacactcgagaatttccttcgccaggctgacaatctacgacagcagaccttacatcagatgcaacgtatcctgacaatccgacaagctgctcgtgcgcttcttgcaatccatgactacttttcacgtttgcgcgcactgagttctctttggcttgctaggccacgagagtaacatcacccccgttggggtcactcgatgaactgatctgtgaatgtgggactgctggctgcaaactcgcaaagcatttgcagatgactggaggatcagtcctctctgtacaagttgtattaacatcttctggtctcatattgtgctccagtgttgtacaatttagggaaaagcttggattaacttgtaagttatcatgaatttgttattggcatattgtacaattgtattagcaataaaaatagaagtacataagtgctggaagcctggaaggatatccagaatctatattggttggaaacgagcagcagaagattgttatagattgttatgttgctttgaatattcggttgtaagtgccttttttggggtatatagaacaaagaaagattcaggagagatgtagggattcaccagaggctatcggggattgtgcttctaggagctccctggactatctctagcaagtctcatattaagctctactctgtaaacagtgatacattgaattgaacgtgctacggttatgatggtaacatttaaaaaaaaaaaaaagcggcc

SEQ ID NO: 732 - DNA, 1061 bp, Zea mays
  Clone ID: TF_ZmC1124_8
ttgggtacctcgaggccggccgggaaacaaaaaacgaggaaggcgaggagacgtgctctgctgctgcagcctgcagcggctttccttcccccaccatcgcgtgtgagtccacggtgtgatgtcacggagcggtggcggctttcccgatccactgtgcgggagaaatccccgtgcagccttcttccagctcttcctactctttgctactcgtcttcgctgatttctgccttaattccatcccttccctgcctagaacttgctttgcttcaccccatcacagcttttggtgcctcgtcatcggcgacctaaccgccggcgaccagataaactaagccaggcccttcgctccgaaagtcgtctctcgtagagagcacttgctcacctgctcctcgccctcctctgctggcagtggacttgcgcggagtggagatccatccggacctggttcgatttcttcatctcggttgcttctctgtccagtgggtggatcactggattgtgggttgtgctaactgcaggctggcttgtcagcctatcataaggaaagtgaaaaagagacaacaaagcaatttgttgtctcattcttaggagctggcgagcactcggcatggcagatgctagttcgaggactgacacctcgactgttgtagacatggatgataagaatcaaaggttagaaaacggacagagtggagccatggtcccggcttctaattcatctgaccggtctgacagatctgacaaacctatggaccagaaggttttacgacggcttgcccaaaatcgtgaggcagcaagaaaaagccggctgaggaaaaaggcatatgtgcaacagctagagagcagtaagctaaaacttgcaagcctggagcaagaactccagaaagctcgacagcagggaatcttcatttctagttctggagatcaaactcatactatgagtggaaatggagctatgaccttcgatttggaatattctcgatggcaagaggaacaaaataagcagataaatgagctgaggactgcagtaaatgctcatgcaagtgatagtgacctccgtc

SEQ ID NO: 733 - DNA, 875 bp, Zea mays
  unsure (1)..(875): unsure at all n locations
  Clone ID: TF_ZmC592431_1
agggcgannattgggtaccccctcgagggcccggcccgggccggccggcaaaatcatcaaccaaaaaaacggacatctccgtttttttcgtcctcatcccttctccctccagcctaacggcctctctgcaaacgtaggggaggccgccgccccctcaacttgaatcaatggcagcagcgtgtgcatccgccgccgcctgcagcctcgcctcggccatgtcctggtagtctgctcgctgccccggcgtcgttacctagtaacgatctcggcatcgatcctggtctgcttctctttgaaaactattctccctacttggaatttctaccggccgattacaacgggtttgatggagcgacgtgggatttcgggaacatcgccaacaataataacaccaccgctgccaccaacgacaatgacgttcagaacttcagcggtgatgggctattcgacaatatcatgatcccggaattgaacgttttggatacacagtcttcgctcgatgtggctggagatggcttcctctctcaggagcagcctctcctcactgtcaactctacaacacccatcgagtaccctgctactgcaagctcttcatccagcactcctcatcccccaccaacgattagaaccaaatctccaacatcaacatccgccatcccaggaacatctaccttttctctccacccctccccctcttcatcatcatcatcgtcctcctcccgcaaacgcaaatcctctcccgaagaagaggactcagccgtcaccctcaagcgccagcgcaacaccctcgcggcacgcaagtaccgncagaagcgcatcgaccgcatcactgagcttgaggaggccttggctgccaaggcgaaggaatgcgatga

SEQ ID NO: 734 - DNA, 1500 bp, Zea mays
  Clone ID: TF_ZmC104_72
gccagtgtcagccatgtccatttctgacttttcatataaggtcttgttcgtttctatcggattgcacccggaattgttccagctaatcaaagtttatataaattagagaagcaatccggctaggaatcgttccgacccaccaatccggcacaaacgaacaaggcctaatgaaatctgaaaacaagtggttctatctttcaaaaaaaaacccgaaggaatacatgtgattaaggcatgcttgggagttgggaacaactacagtgcagttgatcaacaataaactccagtttttgcagttgatcaagtctgaatcttactcgcggggacgggaagcccagaggttgctgagagctctgaggcggctgtagtactccccaatggagaggaagcaccgcgcagcctgccgagtggtcaggatccggcgcatctgatgcaacgtctggtgccttagattgtcggcctgttgatagaaattttcgaggctggcgagcttctcaagtgcgacggccatgatgttcatgtagttgggggcggcggcgccgtcgttgagcgtgcccgcggcgactgtgtcggccagggactggtgcagctggtgcaggccctgggcgagagcttcctccgcttgctccgacgactgctgcagattgcagatccccagcagctgctgctccgtcagcgggtccagctgcggtatcaggatcttgagcagctcggacgggcggaagccgcccatccagaagaagcagcgctcggcgggggtggcccaggagccggtgaggaggtggaagacgtcggagcgcgcgagcgccgccttgagctggaacagctcgtcgtagtgctgcatgcactcctccacgatgagtcccaggttgccgtccagcaggtgcgcctgcagcccgcctcggagctccgccagccgcttggtgtcgtcgtcaagccaccgcgcgtactccatgtcgaacatggcggcgccagagctcatgtccccggcggcgctgcaccctccaacgaacaggccctgtgaccgtgctctctggagctcatgctcgacctgctgaagcctgatcctgctagtctcgagctgctgcacgtaagccttcttcctcagcctgctcttcctcgcagcctctctgttctgcgccagccgccgttccgtcttgtcatggtctccccctccctctcctccgtgcagctgcagcgggagcgggtggtgctgctgaaagctcggcggggcggcagcagcgggcgcagcggcgaggcctggcttgtagctgtaatcatcagtggtcaccatcatgacctcctgccgcggcgcagaggaggctggggacaccaactccatctgagacattgtgttctgagctgagctcgagtcagtgccggtgctccctactgactgcgaattcccactttgcctgcgcgacgtcgttcttgatgatcacgcccggatcgacgccgccgccggcgctggcggcgccaccaccgtggatgagggcctcc

SEQ ID NO: 735 - DNA, 1502 bp, Zea mays
  Clone ID: TF_ZmC14082_3
caaaagtccaagctttttcgacaggaatcctcctccgcttctgcttggcttgcgatgcttgtttgaatgcgcgggcctgcggtgaggcgacagcggcgccggacggttgcatgctgattgatggtagccgatggagagtagacgaggagggtcggtggcagaagatgcgagcggggcgatgacgagctttgggccacctcagcacggcatcaacacagatgtgaacagcatgcaaccttctcgagttactgactttggggcacttgcacagtctgctggattccgaatagaagatcttgttaaccttaatgcaaatgctttgttcaatctgaagtcgaatactcatacaattaacaacattcctcttcagtttggaagctacggaaagtttgaacaaggacttgttgctgtccccacagcttctgattctagtgacaaatcaagggacaaactagatcagaagacacttcggcgtcttgcccaaaatcgtgaagctgcccggaaaagccgtttacgaaagaaggcatacatccaaaaccttgagagtagcagattgaaacttactcagttagagcaagagcttcaccagactcgtcaacagggtatttttatttctacatcaggagatcaacctcaatcaacaagcggaaatggagctttggcatttgacatggagtatgcacgctggttggaagagcacaacaaacatgtaaatgagttgaggcttgcagtcaatgcacatgccggtgataatgatctccgtggtattgttggtagtgttatggcacactacgatgaatttttcaggctcaagggtgtggcagctagatcagatgtttttcatgtgctgtctgggatgtggaagacccctgctgagagatgtttcatgtggttaggtggcttccgatcatctgaggttcttaagcagtcctcccaacaagctgaagatgctctttctcaagggatggaagcattacaacagtcgcttgcagaaactctagcatctggatccctgggccctgctggaccttctggcaatgttgcaaattacatgggacaaatggcgatggctatgggaaaacttggcaccctagagaactttctacgacaggctgataatctacggctgcaaacacttcaacaaatgcaacgcatcttaaccacccgacaatcagcacgagccctacttgcaataagcgactacttctctcggctgcgtgctttgagttctctttggcttgcccgtccaagggaataaattcaattaactcataaataggattttttttgtactgtctctagtatgccaattagtttcttcacattactcatgtgttgatgggatatttggatctaagatcttatgaaggggtgacatgtctgtgtccaagtgaacgctcagttcatattttaggccatcatgggttaattttggagaaaaaacgagttgtaaatacatctggaataatctaagatcttatgaagagatgatattggaggat

SEQ ID NO: 736 - DNA, 1705 bp, Zea mays
  Clone ID: TF_ZmC14082_4
gaccacgcgtccgcttcgtccttcccaatcacctcgaaacacaacccctgtcatttcttccactgatcaccaggccgtgcaaaaggccgagctttttcgacaggaatcctcctccgcttctgcttggcttgcgatgcttgtttgaatgcgcgggcctgcggtgaggcgacagcggcgccggacggttgcatgctgattgatggtagccgatggagagtagacgaggagggtcggtggcagaagatgcgagcggggcgatgacgagctttgggccacctcagcacggcatcaacacagatgtgaacagcatgcaaccttctcgagttactgactttggggcacttgcacagtctgctggattccgaatagaagatcttgttaaccttaatgcaacaacacagatgtgaacagcatgcaaccttctcgagttactgactttggggcacttgcacagtctgctggattccgaatagaagatcttgttaaccttaatgcaaggcctaaagtatcccagcttactaattatatgcctatcagctttggagaactggggagagtcagctatggctggtagccctatgactgacacatctacagatccagacactgatgagaggaaccagatgtttgaacaaggacttgttgctgtccccacagcttctgattctagtgacaaatcaagggacaaactagatcagaagacacttcggcgtcttgcccaaaatcgtgaagctgcccggaaaagccgtttacgaaagaaggcatacatccaaaaccttgagagtagcagattgaaacttactcagttagagcaagagcttcaccagactcgtcaacagggtatttttatttctacatcaggagatcaacctcaatcaacaagcggaaatggagctttggcatttgacatggagtatgcacgctggttggaagagcacaacaaacatgtaaatgagttgaggcttgcagtcaatgcacatgccggtgataatgatctccgtggtattgttggtagtgttatggcacactacgatgaatttttcaggctcaagggtgtggcagctagatcagatgtttttcatgtgctgtctgggatgtggaagacccctgctgagagatgtttcatgtggttaggtggcttccgatcatctgaggttcttaagttactggcaggtcacctagagcctcttactgatcagcagcttgttggtatatccaacctgcagcagtcctcccaacaagctgaagatgctctttctcaagggatggaagcattacaacagtcgcttgcagaaactctagcatctggatccctgggccctgctggaccttctggcaatgttgcaaattacatgggacaaatggcgatggctatgggaaaacttggcaccctagagaactttctacgacaggctgataatctacggctgcaaacacttcaacaaatgcaacgcatcttaaccacccgacaatccgcacgagccctacttgcaataagcgactacttctctcggctgcgtgctttgagttctctttggcttgcccgtccaagggaataaattcaattaactcataaataggattttttttgtactgtctctagtatgtcaattagtttcttcacattgctcatgtgttgatgggatatttggatctaagatcttatgaatggatgacatgtatgtgttcaagtgaaaaaaaaaaa

SEQ ID NO: 737 - DNA, 753 bp, Zea mays
  unsure (1)..(753): unsure at all n locations
  Clone ID: TF_LIB4729-141-A1-K1-C7
agtccgtctctccgtcctctcctccccaccctcaccctgccctcgcgcccgccgccgcgcacacgccaggtcctccttccgccgttaacaagcacgctccatttccaactaattctctcttacccttccgcctcgctcttggggctgctgcaagtgcagatccgtctagactgactccgattggtttcggcttcttcgcttctccttctcgatggagaatggaagtggtgcggttgtaccttctaattcttcagataggtccgacaggtctgataaacctttggaccaaaagacaatgcgacggcttgctcaaaatcgtgaggcagcaagaaaaagtcggctgaggaaaaaggcatatgtgcagcagctggagagcagtaagctgaaacttgcacaactggaacaggaactccagaaagctcgccagcagggaatcttcatttctagctctggagaccaaacccatgccatgagtggaaatggagctttgactttcgacatagaatatgctagatggctagaggaccaaaataagcagataaatgagttgaggactgcagtgaatgctcatgcaagtgacagcgatctacgacttattgtagatggcataatggcacactatgatgaaatattcaaggtcaaaggtgttgctgcaaaggctgatgtgtttcatatactttcaggcatgtggaagacacctggctgaagtgcttcctatgggctggngggttttcgtccatctgagcttttaaa

SEQ ID NO: 738 - DNA, 798 bp, Zea mays
  Clone ID: TF_LIB4766-040-R1-K1-D1
ttgggtacctcgaggccggccgggccgcccgcaagcgccctcggcacgaccgccggattcgcctctgggtggggttggttttgtctcccccaccacccacccacccctctcctctcctctcctccaggcttggcttgcctcgtgtcgtgtgtccctccaccgcccgccatgccgacgaggcttgccccccaccgccgatcgcacacgatggagaatggaagtggtgcggttgtaccttctaattcttcagataggtccgacaggtctgataaacctttggaccaaaagacaatgcgacggcttgcccaaaatcgtgaggcagcaagaaaaagtcggctgaggaaaaaggcatatgtgcagcagctggagagcagtaagctgaaacttgcacaactggaacaggaactccagaaagctcgccagcagggaatcttcatttctagctctggagaccaaacccatgccatgagtggaaatggtaatatttcaattcgttatatctgtgcgtttctggatttgattagtctatcttgattgaatgctatctttatctctagaagtgcatctgaaattataaacttgttgttgcaggagctttgacttttgacatagaatatgctagatggctagaggaccaaaataagcagataaatgagttgaggactgcagtgaatgctcatgcaagtgatagtgatctacgacttattgtagatggcataatggcacactatgatgaaatattcaaggtcaaaggtgttgctgcaaaggctgatgtgtttcatatactttcaggcatgt

SEQ ID NO: 739 - DNA, 780 bp, Zea mays
  Clone ID: TF_ZmC1124_10
ggggtacaccccgggtttcgccgccgcccgggaattcccccaccccacgccatcccttgtccgtctctccgtcctctcctccccaccctcgccctgccctcgcgcccgccgccgcgcacacgccaggtcctccttccgccgttaacaagcacgctccatttccaactaattctctcttacccttccgcctcgctcttggggccgctgcaagtgcagatccgtctagactgactccgattggtttcggcttcttcgcttctccttctcggtcatatgattgcaatgaatcctgacatggtactactgtcttggaaacaacttccaccaacggtcgatcctgtgaaacactaagacacccgttgccactggaaaggagagagcaaagtgatttgctgtctcctggcgatcgttgctcgtgaggcctagtgatggcagatgctagctcaaggactgacacctcaattgttttagacgacaacgacaagaatcataggatggagaatggaagtggtgcggttgtaccttctaattcttcagataggtccgacaggtctgataaacctttggaccaaaagacaatgcgacggcttgcccaaaatcgtgaggcagcaagaaaaagtcggctgaggaaaaaggcatatgtgcagcagctggagagcagtaagctgaaacttgcacaactggaacaggaactccagaaagctcgccagcagggaatcttcttttctagctctggagaccaaacccatgccatgaagtggaaatggagcttttgacttt

SEQ ID NO: 740 - DNA, 961 bp, Zea mays
  unsure (1)..(961): unsure at all n locations
  Clone ID: TF_ZmC1124_3
gaagctttcctccttgcttgccttcctctcacccaatcgccacggctcctccgcccgcagcgccctcggcacgaccgccggattcgcctctgggtggggttggttttgtctcccccaccacccacccacccctctcctctcctccaaggcttggcttgcctcgtgtcgtgtgtccctccaccgcccgccatgccgacgaggcttgccccccaccgccgatcgcacacggtcatatgattgcaatgaatcctgacatggtactactgtcttggaaacaacttccaccaacggtcgatcctgtgaaacactaagacacccgttgccactggaaaggagagagcaaagtgatttgctgtctcctggcgatcgttgctcgtgaggcctagtgatggcagatgctagctcaaggactgacacctcaattgttttagacgacaacgacaagaatcataggatggagaatggaagtggtgcggttgtaccttctaattcttcagataggtccgacaggtctgataaacctttggaccaaaagacaatgcgacggcttgcccaaaatcgtgaggcagcaagaaaaagtcggctgaggaaaaaggcatatgtgcagcagctggagagcagtaagctgaaacttgcacaactggaacaggaactccagaaagctcgccagcagggaatcttcatttctagctctggagaccaaacccatgccatgagtggaaatggagctttgacttttgacatagaatatgctagatggctagaggaccaaaataagcagataaatgagttgaggactgcagtgaatgctcatgcaagtgatagtgatctacgacttattgtagatggcataatggcacactatgatgaaatattcaaggtcaaaggtgttgctgcaaaggctgatgtgtttcatatactttcaggcatgtggaagacacctngctgaaggtgcttccta

SEQ ID NO: 741 - DNA, 1112 bp, Zea mays
  unsure (1)..(1112): unsure at all n locations
  Clone ID: TF_ZmC1124_4
gaaaacttggcccaccccaaaatttcctttgtcaggctggcaattttggacaacagaccttgcatcaaatgcaacgcatcctgtcaatttgacaaactggtcgtgcgcttcttgcaaaacacgactaccttttacgtttacgcgccctgagttctctttggcccgctaggcccccaaagtaacatcccccccgttggagtccccccatgggccgatctgttaatgtgggggtgctggctgcaaactcgcaactcattttcaaatggctggagggtcagttccctctgtacaagttggattaacatcttctggtcccaaattccggccggggccctcggcacgaccgccggattcgcctctgggtggggttggttttgtctcccccaccacccacccacccctctcctctcctctcctccaaggcttggcttgcctcgtgtcgtgtgtccctccaccgcccgccatgccgacgaggcttgccccccaccgccgatcgcacacgatggagaatggaagtggtgcggttgtaccttctaattcttcagataggtccgacaggtctgataaacctttggaccaaaagacaatgcgacggcttgcccaaaatcgtgaggcagcaagaaaaagtcggctgaggaaaaaggcatatgtgcagcagctggagagcagtaagctgaaacttgcacaactggaacaggaactccagaaagctcgccagcagggaatcttcatttctagctctggagaccaaacccatgccatgagtggaaatggagctttgacttttgacatagaataatgctagatggctagaggaccaaaataagcagataaatgagttgaggactgcagtgaatgctcatgcaagtgatagtgatctacgacttattgtagatggcataatggcacactatgatgaaatattcaaggtcaaaggtgttgctgcaaaggctgatgtgtttcatatactttcaggcatgtggaagacacctgctgaaaggtgcttcctatggcttgggggttttcgtccatctgagcttttnaagctcctagcgaatcacctcgagcctctaactgagcagcaaatgctgggtttgaccaacctccagcaa

SEQ ID NO: 742 - DNA, 798 bp, Zea mays
  unsure (1)..(798): unsure at all n locations
  Clone ID: TF_ZmC1124_6
cagcgccctcggcacgaccgccggattcgcctctgggtggggttggttttgtctcccccaccaccctacccacccctctcctctcctccaggcttggcttgcctcgcgccgtgtgtccctccaccgcccgccatgccgacgaggcttgccccccaccgccgatcgcacacggtcatatgattgcaatgaatcctgacatggtactactgtcttggaaacaaatggagaatggaagtggtgcggttgtaccttctaattcttcagataggtccgacaggtctgataaacctttggaccaaaagacaatgcgacggcttgcccaaaatcgtgaggcagcaagaaaaagtcggctgaggaaaaaggcatatgtgcagcagctggagagcagtaagctgaaacttgcacaactggaacaggaactccagaaagctcgccagcagggaatcttcatttctagctctggagaccaaacccatgccatgagtggaaatggagctttgacttttgacatagaatatgctagatggctagaggaccaaaataagcagataaatgagttgaggactgcagtgaatgctcatgcaagtgatagtgacctacgacttattgtagatggcataatggcacactatgatgaaatattcaaggtcaaaggtgttgctgcaaaggctgatgtgtttcatatactttcaggcatgtgggagacacctgctngaaggtgcttcctatggcttgnnggttttcgtccatctgagcttttaagctcctagcgaatcacctcgagcctctaactgagca

SEQ ID NO: 743 - DNA, 894 bp, Zea mays
  Clone ID: TF_ZmC1124_7
accccgccgggagcaccaccaccaaaccgattgcacaaggccacgcggcttctggaagcttccttcccttgccttgccttccctctcaacccaaatcgccacggctcctccgcccgcagcgccctcggcacgaccgccggattcgcctctgggtggggttggttttgtctcccccaccacccacccacccctctcctctcctccaaggcttggcttgcctcgtgtcgtgtgtccctccaccgcccgccatgccgacgaggcttgccccccaccgccgatcgcacacggtcatatgattgcaatgaatcctgacatggtactactgtcttggaaacaacttccaccaacggtcgatcctgtgaaacactaagacacccgttgccactggaaaggagagagcaaagtgatttgctgtctcctggcgatcgttgctcgtgaggcctagtgatggcagatgctagctcaaggactgacacctcaattgttttagacgacaacgacaagaatcatagggatctcactacgcattggcacctctgaaggtcttcgttggatatgaccaaactatttcaaccaattttgaacaagcttttcttcaattagtgctacccctagcctatcagatggagaatggaagtggtgcggttgtaccttctaattcttcagataggtccgacaggtctgataaacctttggaccaaaagacaatgcgacggcttgcccaaaatcgtgaggcagcaagaaaaagtcggctgaggaaaaaggcatatgtgcagcagctggagagcagtaagctgaaacttgcacaactggaacaggaactccagaaagctcgccagcagggaatcttcatttctagctctggagacaaacccatgccatgagtggaaatgg

SEQ ID NO: 744 - DNA, 1684 bp, Zea mays
  Clone ID: TF_ZmC5838_1
ctaacttatgccagtcctgttataggttatcagttcctctccattcatcttcctcgcagcgccggcgctccatctcccgctcccttccttactcgcgctcggctctcaggcggcaattcgggacctcggactcacccgccgtttcttttacttgcgctccgcacgcaggcgactgcggtcgcccccacgttggggttttcccctacggcgtcattgcctttcccttgcatttctcgctaagcgatgcgcgctctggccttcggtcctaggcacgttggccagtgacggtccacaggctaatctgacattcctgaaggccacattttaaggactgaggttacaatggcagatgccagccctagaacagaaacatcaacagatgatactgacgacaataacgggcttgaaccagccagaggtggtcttgttgcttctgactccagtgacagatccaaagacaaacatggagatcaaaagacattgcgtcgccttgctcaaaatcgtgaggctgcaaggaagagccgactaaggaagaaggcatatgttcaacagttggagaatagcaggctaaaacttacccaactagagcaagagctgcaaagagctcgtcagcagggcatttttatatctagttcagttgatcagtcacactccatgagtggaaatggggcattggcctttgatatggagtatgcgaggtggttggaagagcacaatcggcaaattagtgaactaagggctggtgtcagtgctcatgcaagtgatactgatcttcgaagtgttgttgataagatcatgtcacactatgatgagatttttaggctcaaaggcaatgcagccaaggcagatgtttttcacgtcttatctggcatgtggaagacaccggcggagaggtgttttttgtggctaggaggtttccgaccatctgaggttttaaagcttctttcgacacaacttgaacctctcaccgaacagcagctgtcagggataagcaaccttcagcaatcttcacagcaggctgaggatgctctttcacaaggaatggaggcccttcagcaatcattggccgaaaccttggctgggtctctttcgtcttctggatcaacaggaaatgtggcaaactacatgggtcaaatggccatggctatgggaaaacttggaacgcttgagaatttccttcgtcaggctgacaacctgcggctgcagactctacaacagatgcaaaggatcctgaccactagacagtcagctcgggcgctacttgtgataagtgattactcttcacgtctccgtgccctaagctctctctggcttgctcggcccaaggaatagcaagaacatgctatttgactgcaatacttttcacaatttggttttcaatggtcaggagatttgacaaggctgcgacagacttgattcggacatatctgcacatactatgacccaaatggaaggggatgttcatgtagcttaggctgcttagctttgtagttaagtgttgttgatgtatcattaccaactgctgtaaaattctcactctgtatgcccctgatttgcagcgaaccattagaatgcacattgatgttcacctgacgattttttgttcactcttaggaacactagcgtaaacataatgttctgcccagtatcatctaaccagggtatatggctgatcccccgcact

SEQ ID NO: 745 - DNA, 895 bp, Zea mays
  Clone ID: TF_ZmC30857_3
cgaggagcccgcagctgagcctgagcggctgcagctctctcttctccctgtccagcaccagtacgagccgcgacagcgccgccctgaaggcgccggtgccagcgccaccggcaggcgcggtgcccccacggcgcacccctctcctgtcgctcagcgtcggcgaggaggaagaggacgagggtgaggacgaggaggagtacctgctgggggccggcgccctggatctgcagctgacggggcccggtggcggcagcaacagcagcggcggctacgacgacgagcggaagaacatccggatgatgaggaacagggagtctgcgctgcgctccagggcaaggaagagggagctggagaaggaggttcgtcgcctggtgaatgagaacctcaagctcaagaggcagtgcaaacaagtaacaaatagtagcacactttgtctcttatagctaaaaatgaatgaatactcatctgtttgtatataacatgtaccagctgaaactagatatggctgcactggtccagcaaagcagcagcaagagcagctcccacatcagaagaacctcctcatccactcagctctaggctgctaccaataggaatatgtatgtgaatttaaagccatatatgaccaaggaagaatgggaggaagacgaacaaagctagctagactagactgcagcccctctaatccatggccattcgctgattaatacgataatatctcttatttgttggcttcttctagcttgcttcaatttcctagtacagcagtttatgtagtatttcctagattgttagcgcaaagctgcctttttcacccatggcatccactctagtggtgtccaggtagtgtcgatccaattttagtatagaggtcactcaaacctctctccatgac

SEQ ID NO: 746 - DNA, 3183 bp, Zea mays
  Clone ID: TF_ZmC1889_1
ccatctccggctgacgacgctgcagcagatgcacaagatcctgacgccgcggcaggcggccaggggcctcctggcgctcggcgactacttccagcgcctccgcacgctcagctcgatgtgggcggcgcgcccgcgttattgcggcgatcagctagatgcctgcggcgtggcaggccaaaagctcgctcactggtgaggcgaccgtaccaaagaacacgacgccgacgacgacgaagactaaagagtggtagcctcgagcggccgggatactctactattgcatagtagccttcaacaacggtgctggtgctctgtcgatccgtctgtcgttactcacagcgcttcccggcccgccggctcttgtctctctgtttgccccgtggccagcatcgccagctccgcctccccgccgcagtacatgacgccggcggcgtcgcccgcgcagttcgcgccggcgcccctcaggatggggtacgggcggccggcgcccgtgatgggcatgtggagcagcgagccgttcaaggtcgacagcggcggccacgccacctgcagcgcgtccaccgtcatggaggcggacaccaagctggagacaagcaggctagaagatgttccgcaggtagcactcgagccagagaggagtacggatcaggaaacgagcaggccgccagagagggtcatgagaaggctcgcgcagaacagagaggctgctcggaagagtcgcctgcggaaaaaggcctacatccagcagctagagacaagccggatgaagctgtcgcagctagagctggagcttcaacgggctcgacggcagcagggcgcgtatgcaaatagtgaagcatgggagacccagctctcggatacacatgcccgatcgatccaggcgttgctgggttcgagatcgaagtgaagtcgtcctttggagctgcacacacatctgtaaggagaaaccttgtgcttggcgatttggcaccctccagttaattatccttggtttgaggaagaacaaggcatgaagaagctacagcagaacctcgccgagatcctgaccgccgaggctgaccccttcggggcccccgacgcctacatgctgcagatggccactgcggtggagaagctgaaagagctcgtcaacttcgtcacccaggcggaccatctccggctgatgacgctgcaacagatgcacaagatcctgacgacgcggcaggcggccaggggcctgctggcgctcggcgactacttccagcgcctccgcacgctgagctcgctgtgggcggtgcgcccgcgggaggcggcgattagctagatgcccgcggtgtgggtgtggccagccaaaggcccaccaaagaacacgacgacgacgaatagtagcagttcgctgtatactttcccaagctgtaaagtccagtggaggacgaaaaaagcgacctcacagtcactggggttcggttccgacgaaaggatgcaaggcttttaagtcaatggcggtgtctccgcagcagcagcagcagcagcaagcggtgtgcgtttgtcaagcgaagcgactagagaataaaacggaaatggattgaggccttctctatttgacgggcggaagacgtgtacatatattgttttgccacccggccgtggccttctagagaggcgtatgattcatgatgcaggccatactaggatcatatttgtacgtggtggaaccgagagcaaaacaatattacaatagtttaaattagggaaaaaaaaaaaaaaaaaaatgttcaagatcaaggcggcggcggccaacgcggacgtgttctacgtcatgtcgggcttgtggaagacccccgccgagaggttctttctctggatcggcgggttccggccgtcggaagtcctcaagatcctgagcccgcagctggagccgctggcggaggcgcagcgcatgctggtgggcggcctgcagcacacgtcggcgcaggcggaggacgcgctgtcgcagggcatggagaagctgcagcagaacctcgcggagaccctgacggccgaggccgacccgttcgggccccccgacccctacatgctgcagatggccaccgcggtgggcatactgaaagagctcgtcaacttcgtgacccaggcggaccatctccggctgacgacgctgcagcagatgcacaagatcctgacgccgcggcaggcggccaggggcctcctggcgctcggcgactacttccagcgcctccgcacgctcagctcgatgtgggcggcgcgcccgcgggaggcggcggtcagctagatgcgcctgcggcgtggcaggccaaaagctcgctcactggtgaggcgaccgtaccaaagaacacgacgccgacgacgacgaagactaaagatgagtggtagcagttcgctgtatacttgccccccaatgcaaggtgtaaagcccagtggaggacgaagagatcgacctcgctgtacgagtacgacgaacggaagggacgcttctcggtcagcggcggcggcgacctcgctgtacaaggcgattagtagacatacaaaatgtaaatggaaatcgatcgatgggcggaggatatgtacgtatcttgttttgatacccgcggccggggccctcctagaggcgtactgtatgattgattatgcgggccttctacaactactactggtgttgggctatatgtatatctctacaactattacggaaatcgattgatgggcggaagacatgtacgtatcttgttttgatacccgcggccggggccctcctagaggcgtactgtatgatggttatgcgggccgtctacaactactactggtgttgggctatatgtatatttatataaaatgtaatcacctgtaactatcgttggtcagattctaaagagcacgcggcatgcaggtgtggaacagttcagttcaaaaaaaaaaaaaaaaaaaaaaaaaaaaaaaaaaaaaaaaaaaaaaaatgtaaacggaaatcgattgatgggcggaagacatgtacgtatcttgttttcatacccgcggccggggcctcctagaggcgtactgtatgattgatgatgcgggccgtctacaactactactggtgttgggctatatgtatatttaatataatgtaatcacctgtaactatcgttggtcagattctaaagagcacggggcatgcaggtgtggaacagttcagttcaccac

SEQ ID NO: 747 - DNA, 635 bp, Zea mays
  Clone ID: TF_LIB4759-003-R1-N1-G7
ccggccgagaactggtagtgagtgtcctttgaagctgggctatagacgctagagcacatcctgtgctgtgagaaacgtaacctaataaaccttgtgttcagcgatttgacggcctccgttatccgaagaaacaacttcaaccagacatgtggcgagcgaggtgattagctagtgacaagtgttgatctaagggagatcgttttgagcatgctatgatggagctctactccggatatcttgaagatcatttcaacctccacaagctaaggtcatgagaaggctcgcgcagaacagagaggctgctcggaagagtcgcctgcggaaaaaggcctacatccagcagctagagacaagccggatgaagctggcccagctagagctggagcttcaacgggctcgacgacagcagggcgcgtacgcaaatgggagcatgggagactcagctctcggatacacagggtcgatcgatccaggcgtcgccgcgttcgagatcgaatacaggcactgggtggacgagcagaagcggcacacggcggagctgatgtcggcgctccaggggcagcagacgtcgtcgacgtcggagctggagctccgcttgctggtggagacggggctcagcaactacgagcacctct

SEQ ID NO: 748 - DNA, 440 bp, Zea mays
  Clone ID: TF_LIB3900-010-Q1-K6-E6
atcgctagcgtccgatacctatctcctgctgcaggcgcagcctctctcagacctcattaccgtgacgacttcctcttccagttccagtacagcgacctcctgctggcgcctgcgcacccttcgctctaccaagatgtcgctgatcacctggtcctcggagctagcttcccggctgctggtgacaacaggtccagctcggaggagtcggacgcctacctgcagcgcagcctcgcggaggagcgcaggaagaggaggatggtatccaacagggagtccgcccggcggtcgcgcgtgaggaagcagaagcagctgagcgagctctgggcgcaggtcgtccacctccgcggcaccaaccgccagctccttgaccagctcaagtgctcaaccgtgtcacggaggatacggtcgcagcccacgcgtccgctagttctagatcgcga

SEQ ID NO: 749 - DNA, 2213 bp, Zea mays
  Clone ID: TF_ZmC2115_2
ggggggattctcacacccatagaaactgaacctactacactgtcatatcacacaagaagagagcttcagcgtgtgagcaagagcaactctcagaaaagaaacaactagtcaagagtcaagactgcctgcggcctgcctgccctccaaggctccaactctccgaggctccaaagtccaagctacttcggcgtccctgactgggcttgtggtctcagtctcagcccttcgttgccgcagagaaccctcagtagttccgctgcaggttgctaattaattaatcgacgagaagtaggagggagcgctgatcgtgtgtgtgcggcatcgcaggatgggggatactagtagttctagccattcaaggcaggatccttctcttcttggctatggcttccatggcgccatcgccaactccactcctcctgcaaacttctttgaccaaggaggaggaggcacctatttcggagagctggaagaagcgttcatgcatcaggtcgcctcgctcagaagaactcaacaggctgcaaccgtctctgcacctcatcatggagacaccaagccctttcccactgctgctggtgctacagctgcaacggctacggctacggctaggccacctcctacactggacatcttcccagcttggcctatgaggtctcgtcttcacacgcccaaggagtgctcgaatgtgacagcagacagcacagacgactcggagagcagcagcaagaaccacagcaaccactcctcagaccagctcggagcagcagcagcagcaaacatggcgagccagttcgagcaagcttcacagcagcagcttcagcacaaaaatatggctacaagttccactccaagaactggcaaggctcttgatccaaaggtaatcagaaggctggctcagaatcgtgaggctgcacgcaaaagccggctgcggaagaaggcgtacattcagcagcttgagagctgcaagctgaagctttctcagatggaacaggacatgcagcgagcccgtacccagggcctctttcttggaggagatccgggtgcaagcaccagttcaggtgccgccatgtttgacgtggagtacgcccggtggctggacaaccacagccggcgcctggccgagctgaacggagccctgcacgcgcacctggcagacggtgacctcagagccatcgtcgacgacgccctcacccaccacgacgagctgttccagctcaaggccatggcggccaaatccgacgtgttccacctcatcactggggtgtggacgacccccgccgagcgctgcttcctctggatgggtggattcaggccctccgatctgctcaagacactgctgccccagctagatccactgacagagcagcaagtggtcggcatatgcagccttcagcagtcatcacagcaggcagaggaagctctctcgcagggcttggagcagctgcatcagtcgcttgctgacaccatggccggtgggtctctgactgacgacgccaacatgagcttcatgagccaaatggctcttgccctcggcaaactggccaaccttgaaggctttgtgatacaggccgataacttgaggcaacagactcttcatcagatgcaccggattctgacagttcggcaggcagctcgatgtctcttggcaattggcgagtaccacaaccgccttcgtgccttaagttccctctgggcttctagacctcgagagatactggtgaccgatgaaggcaattgtgagataagcattgcagcacaaccatcccaaaaccaattttcaaccttctgactgacacatgttgtggaactaaccctcagcataggagcaagagaaaaatgactgcgaagagagattgtttagatgcacgtggcagatatctgagagctacagaggaaagctgggaaatagaagaagctctaaaacaaggagtgtttctggaaattctttagttttcaaaaaacactttctgaaaatgtgtgtacaaggaaattccaggaaggtgaaattgcttcgttgactgcagtgggaaggggaaagagaaaagctagaatctcatgtcgagtactccagtacaatgtgttcttttgtctggtctaaattcttgtaacagctcttcctatgatggaagaatccattcaacaattccacctatgattactggattgagtatgttgaataggttggttgaggctatctagtaatttttatgact

SEQ ID NO: 750 - DNA, 1160 bp, Zea mays
  Clone ID: TF_ZmC2202_6
cttcgcaattgatttcccaagcttcctttgatggtgacatagatggggcaagcctagttacaaactctaatgtcatagaagatgatgattttcaaggcaagccaaccaacagtggcacatcaaaggaactgtcagacgatgatggtgaccttgaagagaatactgaccccgctaacgccaagaagatgaggagaatggtgtcaaaccgggaatcggctaggcgatcaagaaagaggaagcaagcacacttgaccgatcttgaatcacaggttaacgtctgagaatgcatctttgctgaagcgactggctgatatgactcagaaatacaaggacgcttccgttgacaataaaaatctaacagttgatgttgagactatgaggagaaaggtgtgaggagttgtaaaacgaaacaaaacattaaaagcgcacataccatgccgcaatgcgccaagtgtgtgtcccattaagcctgtggggtgttgcccttgccttgccttgtggatgggctgctctatctcaaatgataccgagaggagtccaaacagaatactaccatacaaacatttcttaatgcttgtgtgtgaacatagccgaggaagctgtcaggaggctaactgggatcaccctcatgctaccgaccgcttttgagaagcccacgagcagcgcgcccctgtcatcatgtccatctgatgcagcttctgcttctgcttctgccgccattgaagacagcgtgaagcatttcctccaggcgccacttgaaacagttggggatcattcccaaacgcagcagtttttcagaccaagccagcttctctgcaccgtgttgctagcctggagaacctgcagaagaggatcgtcggggatgcaatgtattccgagaccgcgtcaacgacattctcagatcctgaagctcttgccgataggtaaaggttgctcctgttctgtcctgtgatgaacagccgtgtgatgctctagcggcctaagtgcttctggtaatggaagttgtacactattttgaaggttaataataattgttgagaaatgatctcatccctttaaggcatctcttgggtgtagacacacctcttgggttggctccttcaaggcacccctttgtaagtaaagtattccattaataaaccgaatagagttttcactcc

SEQ ID NO: 751 - DNA, 1422 bp, Zea mays
  Clone ID: TF_ZmC2640_1
ccgggataggatggagaatggaagtggtgcggttgtaccttctaattcttcagataggtccgacaggtctgataaacctttggaccaaagacaatgcgacggcttgcccaaaatcgtgaggcagcaagaaaaagtcggctgaggaaaaaggcatatgtgcagcagctggagagcagtaagctgaaacttgcacaactggaacaggaactccagaaagctcgccagcagggaatcttcatttctagctctggagaccaaacccatgccatgagtggaaatggagctttgacttttgacatagaatatgctagatggctagaggaccaaaataagcagataaatgagttgaggactgcagtgaatgctcatgcaagtgacagcgatctacgacttattgtagatggcataatggcacactatgatgaaatattcaaggtcaaaggtgttgctgcaaaggctgatgtgtttcatatactttcaggcatgtggaagacacctgctgaaaggtgcttcctatggcttgggggttttcgtccatctgagcttttaaagctcctagcgaatcacctcgagcctctaactgagcagcaaatgctgggtttgaccaacctccagcaatcttcccaacaagcagaggatgcgttgtcacagggcatggaagcactgcagcaatctttggcagagactttggctggatctctcggtccagcaggttcttcaggaaatgtggcaaactacatgggtcagatggccatggccatgggcaaactcgggacgctagagaattttcttcgccaagccgacaacctgcgacagcagacgttgcatcaaatgcaacgtatcctaacgatccgacaggcttctcgtgctcttcttgcaatccacgactatttttcacgattgcgcgctttaagttctctgtggcttgctaggccacgtgaataacgaagggccgtcagtattttgagttccctctgccttacggtgctgctgcgtcgttcgcagcgatgcatcacagatctttggtggtactgtttttgttgtacaattacttttggccgctgcttggtccaaattgtactcaggtgggtgtacaagtaggtcaatataatcctgtaagttatggtgatttatgggtgtgttagcaatgcaataataattagagagggcaggatcagggtttctgttgtttgtactggttagagatttagtcctaatgtaacttcctgggacatggggggcggaatgggaagagagtaacaagaatcttcctttggttactgtagtatatgttggtattgttgcatcccatttgctcattttgctgttaggagaatgattattctgtccaataaaaaaaattttgagtaatgttgtttgtaacccccacatgattatggatatgactgctagttccttccc

SEQ ID NO: 752 - DNA, 1939 bp, Zea mays
  Clone ID: TF_ZmC14082_2
ggctttgcttttaccccccaaccttttcgacaggaccctgcttgctctacagggttctcccggaggcagaaactctttgcttccgcctggctcgcgatgcttgtttgggtgcgcgggctgcggcgaggtgaggcgacggcggcgccgggcggttgcatggtggccgatggagagtagacggggagggtcgtcggcggcggcggcggaagatgcgggcggggcgatgccgagctttgggccaacgcagcacgccattcgcgcagatgtgaacagcatgcaaccttctcgagttactgactttggggcactggcacagtctgctggattccgaatagaagatcttgctaaccttaatgcaaatgctttgttcaatctgaagccaaattctcatacgattgacaacagtcctctccagtttggaaattacggaaagtctatttcttctcatataaatactacagaagcaacaacagctgcaacaagaattgaccctcagctgtcagcacagcaaacaggagcacaaccaattctggtggcgttaccaactggtaacatggagaattggggagagtcagctatggctgatagccctatgactgacacatctacagatccagacactgatgagaggaaccagatgtttgaacaaggacttgttgctgtccccacagcatctgattctagtgacaaatcaagggacaaactagatcagaagacacttcggcgtcttgcccaaaatcgtgaagctgccaggaaaagccgtttacgaaagaaggcatacatccaaaaccttgagagtagcagactgaaacttactcagttagagcaagagcttcagcgggctcgtcaacagggtatttttatttcgacatcaggagatcaacctcaatcaacaagtggaaatggagctttggcatttgacatggagtatgcacgctggttggaggagcacaataaacatgtaaatgagttgagggctgcagtcaatgcacatgctggtgataatgatcttcgttgtattgttgatagcattatggtacattacgacgaaattttcaagctcaagggtgtggcagctaaagcagatgtttttcatgtgctgtctgggatgtggaagacccctgctgagagatgtttcatgtggttaggtggcttccggtcatctgagcttcttaagttactggcaggtcacctagagcctcttactgatcagcagcttgttggtatatccaacctgcagcagtcctcccaacaagctgaagatgctctttctcaagggatggaagcattgcaacagtcgcttgcagaaactctagcatctggatccttgggccctgctggaccttctggcaatgttgcaaattacatgggacaaatggcgatggctatgggaaaacttggcactcttgagaactttctacgacaggctgataatctacggctgcaaacacttcaacaaatgcaacgcatcttaactacccgacaatcagcacgagccctactcgcaataagtgactacttctctcggctgcgtgctttgagttctctttggcttgcccgtccaagggaataaattcaattaattcataactaggataatttttttgtactgtttctagtatggccattagtttcttcagaacgctcatgtgtcagtgagatatttggatcatattgtaggccatcatggtttactggacaactttgtaacaattttggagagaaaaaactgagttgtaaatacatctggaataatctaagatcttatgaaggggaaaagtatgtgttcaagtgaacgctcagttcatattttaggccctcatgggttaattttggagaaaaaacgagttgtaaatacatctggaataatctaagatcttatgaagggatgatattggaggataagatcgatgaacaaataatgcaacatcactggggg

SEQ ID NO: 753 - DNA, 365 bp, Zea mays
  Clone ID: TF_LIB3159-013-Q1-K1-D3
gtcggatagcttcagccacgacgatgacgactctaggccgagagacaaggttcagagacgggtcgcgcagaacagagaggcagctcggaagagccggctacggaagaaggcgtacatacggaacctcgagacgagccgcgtgaagctggcgcagctggagcaggagctcataatggccaggcgccagcaggtacgcacggcgcgtacggcgtgggaggaggagtcgcaccgccggcggcgcccgtggacccgcgcgtcgctgcgttcgagctggagtacgcgcactgggtggaggagcagagcaggcaggcgacggagctgcgggcggcgctgcagtcgcacgcgccggacgtccagctgcgggt

SEQ ID NO: 754 - DNA, 613 bp, Zea mays
  Clone ID: TF_LIB4741-023-Q1-K1-G4
atcttctttaggtcgcccgtcgaaaggctcctcttctttttattgcgcctttttggcaaaggtgggggggaggaactcttcgtcgtcgcgcaccagcagcagcgttacgcaattcacgaaagacatcgccggcagcgccgtctcgccgccggagtacatggcgtcggcgtcgccggcgcagttcgcggcggcgcccctcaggatggggtacgggaggccggcgcccgcgccgcccccgcccgtgatgggcatgtggagcagcgagccgttcagggtcgacagcggcagcgcccacgccaccagcgcgtccaccgtcaacaccaagctggaggagacaaggctagaagacgacgtggtagcacttgagccggcaagaagtacggagcaggaaacgagcaggccgccagagagggcccagagaaggctcgcgcagaacagagaggctgcccggaagagtcgcctgcggaagaaggcctacatccagcagctagagacaagccgcatgaagctgtcgcagctagagctggagcttaacgggcgcggcagcagcagggtgcatatgcgaatagtggaagcatgggagactcggctctcggctacacatgcccgatag

SEQ ID NO: 755 - DNA, 791 bp, Zea mays
  unsure (1)..(791): unsure at all n locations
  Clone ID: TF_LIB4765-063-R1-K2-F8
caggcggcggactttgcatagagccttcacaacggtgctggtgctctgtcgatccgtctgtcgttactcacagcgcttcccggcccgccggctcttgtctctctgtttgccccgtggccagcatcgccagctccgcctccccgccgcagtacatgacgccggcggcgtcgcccgcgcagtacatgacgccggcgcccctcaggatggggtacgggcggccggcgcccgtgatgggcatgtggagcagcgagccgttcaaggtcgacagcggcggccacgccacctgcagcgcgtccaccgtcatggaggcggacaccaagctggagacaagcaggctacaagatgatgttccacaggtagcactcgagccagagaggagtacggatcaggaaacgagcaggccgccagagagggtcatgagaaggctcgcgcagaacagagaggctgctcggaagagtcgcctgcggaaaaaggcctacatccagcagctagagacaagccggatgaagctggcccagctagagctggagcttcaacgggctcgacggcagcagggcgcgtacgcaaatgggagcatgggagacccagctctcggatacacagggtcgatcgatccaggcgtcgccgcgttcgagatcgaatacaggcactgggtggacgagcagaagcggcacacggcggagctgatgtcggcgctccaggggcagcagacgtcgtcgacgtcggagctggagctccgcttgctggtggagacggngctcagcaactacgagcacctcttcaggatcaag

SEQ ID NO: 756 - DNA, 1036 bp, Zea mays
  Clone ID: TF_ZmC30857_2
ccggggagagaagaggagtcgcatttcgcgtggtcgagtccgtccgtgtgtgtcctccgctgtccgctggctgcgatagtgctgcctgctgctctaagctctaacccaatccaaggaggatgccgaggagcccgcagctgagcctgagcggctgcagctctctcttctccctgtccagcaccagtacgagccgcgacagcgccgccctgaaggcgccggtgcccccacggcgcacccctctcctgtcgctcagcgtcggcgaggaggaagaggacgagggtgaggacgaggaggagtacctgctgggggccggcgccctggatctgcagctgacggggcccggtggcggcagcaacagcagcggcggctacgacgacgagcggaagaagatccggatgatgaggaacagggagtgctgcgctccagggcaaggaagagggcctatgtgcaggagctggagaaggaggttcgtcgcctggtgaatgagaacctcaagctcaagaggcagtgcaaacaactgaaactagatatggctgcactggtccagcaaagcagcagcaagagcagctcccacatcagaagaacctcctcatccactcagctctaggctgctaccaataggaatatgtatgtgaatttaaagccatatatgaccaaggaagaatgggaggaagacgaacaaagctagctagactagactgcagcccctctaatccatggccattcgctgattaatacgataatatctcttatttgttggcttcttctagcttgcttcaatttcctagtacagcagtttatgtagtatttcctagattgttagcgcaaagctgcctttttcacccatggcatccactctagtggtgtccaggtagtgtcgatccaattttagtatagaggtcactcaaacctctctccatgacagagctttttattcgtttcctgtcttttttttattgttctaatcataataagatacgcacacattcacctgtaaaaaaaaaaaaaaaaaaaactcgagactagttcctcgtgc

SEQ ID NO: 757 - DNA, 1968 bp, Zea mays
  Clone ID: TF_ZmC34730_1
tcgaggccgaaagggaaaaaaccatttttcctccgttccattcttctctcctcgcctcccctcgcctcccctcttgaaccctccgccgctccgaggaaaatccgatttgaattgaaaatcatccggagacagagatcttttcttcctcgaagctatcttctctgtcgactcgatccatagctgctcgcgtccctgttcctcgccggctggcaagtggcggcgacgggacgaggtcttcatcgcctcttcgcgagcgacgatcacccactagtttggtcggtctgaggcacatgatgatggccaacgcgaagctccacaagcaggccctgctgccgccgcggagccccttcccgacggcggcgccgtacgccgaccgcggcccaatcgcgcggccgcaggttggctccacgcaccaccgccacggccaccaccagcgcacgtcgtccgagagcttcatcgaggagcagccgccgtcgtggctcgacgacctgctcaacgagccagagacgcccgcggcgcggcagagcggccgggctgggcaccgcaggtcgtccagtgactcgtttgcgttgtttgacggtggagctgctggtgctggtgcttacgccaatggtttcgaggggatggggagaggaggtgggcaacctgcgccgtggggcggtgtgcaggagtactatgccaagctggccccgattgggagggcacatggccggccgtgggagcaaggcatgccgaattcggcgggcttcaggcatggtggtggcctgccaatgcccacaaaagataaggttggtgggcatcatgggccaccgaaagtgtcgagggagcatgaccatggcatggacaagagaactgatgatgctggccatgatcaaaaggttggagccaaggagggtgtgccgccgaagcatgcacagtcagaggcggacaacaagcgtgctaaacagcaatatgctcagaggtctcgtgtccggaagctgcagtatattgcagagcttgagagtagagtccaggcattacagtcagaaggggtagaagtgtctgctgaaatggagttccttagccagcagaatatcatgctagacctggaaaacaaagccttgaagcaaagagtggagagtctagcacaggaacaacttattaagcgttttcaacaggagatgtttgagcgggaaattggtcgtctcagaacaatatatcagcaacagcagcaacaacaggctcctgctcttgttcgtagtaacagcagggaccttgatgtgcagttcgccaacttgtctctgaaacacaaagaccccaacacgggccgggatgctctctctgggcctcttcgtacttagttctttccatccttccgttcttgtgggttctatcagtggccaccactgtgtctgtcatctccaccaagaaaggagaagtgcacttggattgtgtgaaaaacaccggaaaaaggctaatagctatggatctgatgtttattatttcgggatatgcacctggcggtcatcctcagctcgcgtccattggtgatgctcgaccagtcggcggtgtttagggtttttgtttttagctagatgcttttcaagcatcattgtaccatttttcatgctagggttctaatctgttactacccccgttttcctgaactgtgtgcttcaagcatcttagtcatgtttggattagttctgcgttatcagtgcctcagtggaatgtggagcactaggcagcatcaggtaagttgctttggagatgtgccacatccttgacaactgcatgttctgctattatttcttagtactcaataagctagtgcaaatgaggtattagcgatcttcagatttcaggttgttcttgatgtactcctatgaatatatctcaattgctcaacgtttcctttttatgttaaaatttggctccataattgtatattttgaatcaagcagtgctaaggtatggttgatttaattt

SEQ ID NO: 758 - DNA, 856 bp, Zea mays
  unsure (1)..(856): unsure at all n locations
  Clone ID: TF_LIB5117-060-A1-PF1-H9
gatttcgcttctcgaagcttccccgattcgcctccgctcccccaccaaatccccgacgccgcgagccggagctgctacaggaggaggagtcgccggcctccgggtagaaggcgcgcgtgaggccaggccgtaccggattcggtgccgcggctctgaagctctcccccatccatcccgggcgggggcccgtgggctgaccaccaaccatggccgcggcccgccggcgccacgccgagctccgctccgggcagcatcgccgaccgcacaccaccatacggttgtagtaaccccgagcagctactgatttggactcttggagagaaagggctgggctcaccactttgctgttagaaaggggggagcaaagtgatttactgtctccttgtgattgcggtccgctgagtgatggcagatgctagctcaaggactgacaactcaactgttctagacaacgacggcaagatctataggttagaacaaggacaaagtggtggggcaatcatggcttctaattcttcggataggtctgacaggtccgacaaacccttggaccaaaagacattgcgccgtcttgctcaaaatcgtgaggctgcaaggaaaagtcgactgaggaagaagtcatatgtgcaacagctagaaagcagcaagctgaagcttgcacaactagagcaggagctccagaaagctcgccagcagggaatcttcatttctagctccggagaccaaacccatgccatgagtggaaatggagcaatgactttcgatctagaatacactagatggcttgaggacaannacagcaaatccacgagttgaggactgccgttaatgctcaatgcagtgacagtgacctgcg

SEQ ID NO: 759 - DNA, 1887 bp, Zea mays
  Clone ID: TF_ZmC1399_1
cggccgggatccggctcgcgacaggtttctgggcgagcagtctgcgagatctcgattcgtctggaagacatcgctactaccccagccacagtacccattgggtatttatctgctcccttgctgaagctggaatgtgcagctcgatcggttagcgctacgagtcctcgctgaatccagccaaatgatccccttgagcttgccagttagagcacgcacctaatataatgctggccttccgtcagaagtaacagctagctaagagaagcacaagaaaaatctggtagcttgagttctgactcgaactcagagatggcttatgcaagccccgggactgatgatacgtcgacagatctagatactgacgagaagaatcacatgttggagctagggcagcttgtgtcccttacagcttctgattccggcaacaaagcaaaggacaagctactaggtcaaaaggcactgcgccgtctggcccagaaccgtgaagctgctaggaaaagccgtctaagaaagaaggcatacgttgagcaacttgagaatagcaggctgaaacttagccagctggagcaggaactccagcgtgctcgccaacagggcatcttcattcctactccgggagacgaccagcagccaaactctactagtgaaaaaggtgctttggcgtttgacaaggactacgctggatgggaagacgagcacaggaagcagataagcgagctgagggccgcgctcagcgcacacgccggtgacgacgagctccggcgcatcgtggacggcgtcatggcgcatcaccacgaagcgttcaggctcaagtgcgtggcagccagggccgacgccttccacgtgctgtcggggatgtggaagacccccgtggagaggtgctttatgtggctgggcggatttcgaccgtcagagattctaaagttcctcgcaagccatctggaccccctcaccgagcggcagctcgcgagcgtacacggcctgcagcagtcctcgcagcaagccgaagagggcatctcgcagcgggtgcaagcgctgcagcagtcggtcgcggagaccctcgcgtcgtcagggtccccgtgcctgcctgtgcctgcaggtcgtgctcctccgcctggcgacgacgccgctccagactgctcggggacgatggcggcggcggttgcgaagcttgtcgctcttgaaagcttggtgcatgaggctgacggtctgcggaggcagactcttgagcagatgcagcgcgtgctgaccacccgccagtccgcgcgggcgctgcttgtgatcagtgactacctttcccggctacgcgctctgagttctctctggatcgcacgaccacgggaatgaattcagctcggcttatgtatctttgtttgacccggccgtggagaaaaataagaatcgaagatgcctccgctccttccatcatcactgcatgtaattgtaatctgaacatcattataaacagccgtaaccgttggccatcatcacggtcagtccgcgcgggcgctgcttgtgatcagtgactacctttcccggctacgcgctctgagttctctctggatcgcacgaccacgggaatgaattcatctcggcttatgtatcttgtttgacccgtggagaaaaataacaatcgaagatgccttcgctccttccatcatcactgcatgtaattgtaatctgaacatcaatataaacatccggaattatttttttgttctcacgaacaccgtttcacattaaaaaccaaacgaacagcttggctgattataacctggtccttgtaactatattcaaaatctattctacaaacaatacggtctacaatgtaaaacaatgttttagatgaactatgagtggactgtcaaaaaagtcgacgcggccgcg

SEQ ID NO: 760 - DNA, 1410 bp, Zea mays
  Clone ID: TF_ZmC1399_2
cgagatctcgattcgtctggaagacatcgctactaccccagccacagtacccattgggtatttatctgctcccttgctgaagctggaatgtgcagctcgatcggttagcgctacgagtcctcgctgaatccagccaaatgatccccttgagcttgccagttagagcacgaagtaacagctagctaagagaagcacaagaaaaatctggtagcttgagttctgactcgaactcagagatggcttatgcaagccccgggactgatgatacgtcgacagatctagatactgacgagaagaatcacatgttggagctagggcagcttgtgtcccttacagcttctgattccggcaacaaagcaaaggacaagctactaggtcaaaaggcactgcgccgtctggcccagaaccgtgaagctgctaggaaaagccgtctaagaaagaaggcatacgttgagcaacttgagaatagcaggctgaaacttagccagctggagcaggaactccagcgtgctcgccaacagggcatcttcattcctactccgggagacgaccagcagccaaactctactagtgaaaaaggtgctttggcgtttgacaaggactacgctggatgggaagacgagcacaggaagcagataagcgagctgagggccgcgctcagcgcacacgccggtgacgacgagctccggcgcatcgtggacggcgtcatggcgcatcaccacgaagcgttcaggctcaagtgcgtggcagccagggccgacgccttccacgtgctgtcggggatgtggaagacccccgtggagaggtgctttatgtggctgggcggatttcgaccgtcagagattctaaagttcctcgcaagccatctggaccccctcaccgagcggcagctcgcgagcgtacacggcctgcagcagtcctcgcagcaagccgaagagggcatctcgcagcgggtgcaagcgctgcagcagtcggtcgcggagaccctcgcgtcgtcagggtccccgtgcctgcctgtgcctgcaggtcgtgctcctccgcctggcgacgacgccgctccagactgctcggggacgatggcggcggcggttgcgaagcttgtcgctcttgaaagcttggtgcatgaggctgacggtctgcggaggcagactcttgagcagatgcagcgcgtgctgaccacccgccagtccgcgcgggcgctgcttgtgatcagtgactacctttcccggctacgcgctctgagttctctctggatcgcacgaccacgggaatgaattcagctcggcttatgtatctttgtttgacccggccgtggagaaaaataagaatcgaagatgcctccgctccttccatcatcactgcatgtaattgtaatctgaacatcattataaacagccgtaaccgttggcc

SEQ ID NO: 761 - DNA, 775 bp, Zea mays
  Clone ID: TF_ZmC1399_3
cccgggcgattcgtctggaagacatcgctactaccccagccacagtacccattgggtatttatctgctcccttgctgaagctggaatgtgcagctcgatcggttagcgctacgagtcctcgctgaatccagccaaatgatccccttgagcttgccagttagagcacggtgagtcagcaaagattaaaatagcctccgcacctaatataatgctggccttccgtcagaagtaacagctagctaagagaagcacaagaaaaatctggtagcttgagttctgactcgaactcagagatggcttatgcaagccccgggactgatgatacgtcgacagatctagatactgacgagaagaatcacatgttggagctagggcagcttgtgtcccttacagcttctgattccggcaacaaagcaaaggacaagctactaggtcaaaaggcactgcgccgtctggcccagaaccgtgaagctgctaggaaaagccgtctaagaaagaaggcatacgttgagcaacttgagaatagcaggctgaaacttagccagctggagcaggaactccagcgtgctcgccaacagggcatcttcattcctactccgggagacgaccagcagccaaactctactagtgaaaaaggtgcttttggcgtttgacagggactacgctggatgggaagacgagcacaggaagcagataagcgagctgagggccgcgctcagcgcacacgccggtgacgacgagctccggcgcatcgtggacggcgtcatggcgcata

SEQ ID NO: 762 - DNA, 1358 bp, Zea mays
  Clone ID: TF_ZmC3233_1
ggctcgaggcttggcccagggagttgcaacctgcagcagctgctccttattactttggtgagttggaggaggcccttatccatggcacccgtacatctgttgatcacggcatgatcggaagtgatgtggacacagagcgtaagacagctggataccttgcagctaggccccccacactggagatcttcccttcatggccaatgagtcatctacagcagccatacagtggtaactcgcactcagtagggagcaccactgagtcgagctcaggtcagaacagtatgccacagaccgagctggtgtccccagggagcatgagggccgactctggacagcgtcaggagcttttgatggtgactgttgatgattacaactacgagcaaggactcggagccgcagcaaccacagctccaatctttcagcagcatgcagcaggccaagacaagggaaagcatggatccacaaggaaagacggcaggctgttagacgccaagaccgagaggcgattggcccagaacagagaagctgcgaggaagagcaggctgagaaaaaaggcctacgtacagcagctagagacgagtcggatcaggcttcagcaaatcgagcaggagctgcatggagcacgctcacagggtctgttcccgggaggaggtggtgcggctggagacttgagttcaggcgctgtgattttcgacatggagtacgcccggtggctagaagacgacgcctcgcgcatgacggagctccaggccgtgctgcagccccagatcatcgacgcgaacctgggggccatcgtcgaggactgcatgcggcactacgacgagctgttccacctgagggccatgctcgcaagatccgacgtgttccacctgatgaccggcctgtgggcgaccacggccgagcgatgcttcctctggatgggagggttccgtccttctgaaatcctcaagatgctgataccgcagctcgaccctctcgcggagccgcagctgctagggatgtacaatctgcaacggtcgtcggagcagaccgaggaggcgctcgtgcaggggcttcagcagctgcaccagtcgctggcggacgccgtgggcgctagtcctctcagcgacggcgcgaatgtcgccaactacaccgctctcatggccctggcacttgacaggctcgacaccctcgagagcttttaccgccaggcggacagcctgaggcagcagaccttgcaccagatgcggcggatcctgacgacccgccagacggctcggtgcttcgtctccatcagcgagtaccaccgccgcctccgcgccctcagctccgtctgggcatcgtcccgccctccaactcctccaagcgagggcgtcgtt

SEQ ID NO: 763 - DNA, 505 bp, Zea mays
  Clone ID: TF_LIB3279-234-Q6-N6-E9
aatgcacatcaacactgctagctttcactgcaacggcggcacgcacgcacccatccacagaccaccagagtctctgcaagcagagcagggttttgttcattcacatctcaaagcatcccaagtacagtacagtacagtacccccccgtagacgccctagagagagcccccccccgtgccctcgtcatcagaaagtggcggaattcgttcgccggaggtcgtggcggtgcttcggcggcagctgctgaatcggcggcggaggcggtggcggtggctgcggctgcttcctcttcggttgcggcggcggctgcttcttgttctgctccgccggtggcggctccagtggctccagtggtttcagcaccttgagctcaatgagacgcttgttctcctcctccagccgggccaccttgttctccagctcgatggtgtacgcctgcttcctggcccgggacctcgccgcggactcatggtatttgatcatgcgcttttgccgccggtccacc

SEQ ID NO: 764 - DNA, 518 bp, Zea mays
  unsure (1)..(518): unsure at all n locations
  Clone ID: TF_LIB3060-074-Q1-K6-A2
ggctgctcccaactcccatcctccccctcccggagtacgaagtactagnaaggagagcggctttcctctaagaatggcgggtggcggcgccggcgacgacgacgtggtggtggtgagctgcggcggcagaggcggcggcgaccccggcgcatacgccgcggtgctcaagaggaagctcgacctgtactgcgccgccgtcgccaaatccatggtgacatagatggggcaagcctagttacaaactctaatgtcatagaagatgatgattttcaaggcaagccaaccaacagtggcacatcaaaggaactgtcagacgatgatggtgaccttgaagagaatactgaccccgctaacgccaanaagatgaggagttaaatttcggtgttgtgatcagaatggtgtcaaaccggaaatcggctaggcgatcaataaagaggaagcaagcacacttgaccgatcttgaatcacaggtttccaggttaacgtctgaaaatgcatctttgctgaagcgactggct

SEQ ID NO: 765 - DNA, 1286 bp, Zea mays
  Clone ID: TF_ZmC3114_3
ggaaaggcaaggggaagggcgggggcgcgtcgcctgagaagggcagctctggggcgccctccggtgaggacgactccaggagcagtgacagcggcagcgatgagtcgtcagagacgagagatgatgacactgaccataagggttcatctgcgcccaagaaaaggaaatctggtaacacgtcggctgaaggtgaaccgtctcaagctgctgttgtgcgctatgctacggttgagtcgccatatcccgcaaagggaaggtctgcctcaaagcttccagtgtctgcacctggcagggcagcgcttcctagtgccaccccgaatctgaacattgggatggacatttggaatacttctcctgccttggctgttcctgcagtgcagggggaagcgaatcctgggttggcgcttgcccgacgtgatagcgttactcaactggatgaacgtgaattgaagagggagaggcggaaacaatctaacagggagtctgcaaggagatctaggttacgcaagcaggtagtactggaatcagtacatcctcatttcttgcagaatggcatggtgaaaaatatacaaacacacgcacacacacgcacatgctcactagttcctgtcaatctggtgaagatctgtttgcaagacaattcaaggcaagtaggctaggggatagtattacaacctggagccaaatttccccagaattagttgtatcctaggcccaccaagctttaactagagtcatcaaagatctttgaaattcatttattttgggttaactgatactagtttatttttaaacataaggatgcggttgcttggcctctggctctgggaagtgtttcgataaataaatggtacctgaacctacaggtgttgtaccattagttcagaacccagaaatttttttgtggctctctgacagagcaaccttatgtcatacagaggtggatgaggaagtgacaaagatgagatgagatgaggtgtttcttatctaaccacaacacccatcatcggtcagtgtgtgtgttttttcttagcgaagctgtcgttttagtcctcgcagcccgctggggccatgtagagtcgcccccactgcagccatgtattatttatggctcgtcacggtgtgctttgtgtttttttgtgtgttgtgtaaaaactattgatgtaacaaaacctagagagcctagaggtttttttttatgtctgctaactcctgacgagggatgtaatgtaaccggccaatttgttgcctgatcgttcgttagatgaaatgctagcaaatgtcac

SEQ ID NO: 766 - DNA, 1353 bp, Zea mays
  Clone ID: TF_ZmC3100_2
ctaggcgagagcacgcactgctggcggcgcggctaagaccgagagccgccgcgcacattattgttcgcgcgaggccagccgccggttgcattgcatggcgcagctgccgcccaggatcccgaccgaggtgcaccactggcccgaggggggccagcacggcgcggcggcggcggcgtgggcggacgacttcgccgagttcgcggcggcgcggcggggcgcgcaccgcaggtcgctcagcgactcggtcgccttcgtcgaggtggcgccggccgacggcggggccggcgagttcgacaggctcgacgacgaccagctcctgtccatgttcccacccgacgaggccggcggcagcggcggcggcggcgggtcgtccgcggccgggtccgagaacggcggcagcagcgacagcgacggcgataagcgtggcgcgcgcggcggcccggcgggaggcgctccctccaccggcagtggcggcggcgagcagaacggagtcgtggatgcgcaagcgccggcgactggaggacaagctgccgtcgtcgcctccacggagctgatccgggaccccaagagggtgaagaggatccttgccaaccggcagtcagctcagaggtcgcgggtgaggaagctgcagtacatctccgagctcgagcgcagcgtcacaacactgcagctaacttgctgcggccgtacacgctgagccctgttccagaagactccattcagccgcacatgtagtactgcacgtctactggaacctgaagccagagtgcaagggaggcaaaaaaaaaaatccagaccagtccaagaacatgcatggggatagtttttcgtttatggtctcgtcaacagtgccgcgtgtgaagaattttgtcggagttgcttgcttgcttgcttgctattgctctgcgagatgttgtgttgttgtaactttgtaaaccgaccgtctgtttgccctgcgcctgcctgcagaacgaggtgtcggtgctgtcccctcgcgtggcgtttctggaccagcagcggaccatactgagcgtcggcaacagccacctcaagcagcggatcgcagctcttgcccaggacaagattttcaaggacgctcatcaagaggagctcaagaaggagatcgagaggctgcgccgggtctacgaccagcagaacctcaggatgtcagccggcggcgccgccgcttctgaccatgggccgccaccgccggtggtgcgcgctgagaaggagctcatgagctagcgaaccagtctatgcgtgcccgatgtgcagtccgccttatcattaacatggagggaacattgcatcatgattttttatttccagattatgtggatgttttcttccttc

SEQ ID NO: 767 - DNA, 459 bp, Zea mays
  unsure (1)..(459): unsure at all n locations
  Clone ID: TF_LIB4699-001-R1-K1-D1
gacgggggggaggacgnccgggncggacggcgacacggcggcggacacgcacaggcgcgagaagcgccggcagncgaaccgcgagncggcgcggcggncccggcnccggaagcagcagcaccnggacgagcnggngcaggaggnggcgcgccggcgggccgacaacgcgcgcgnggcggcccgcgccgccgacancgcgacccagaacacccgcgncgagcaagagaacaccgagcnccgggcccgcgccgccgagcncggcgaccgccgccgcaccgacaacgaggagcaccgacncgacgaggagnncagcggcgncgccaaggacanccaggaggagangccggcggacgacccgcngcagcgncccagggaggagcccaacccggcggccgccangcccaacggcgccccgcacaagcgccacaacggangangggcnccaccaaccacaccacc

SEQ ID NO: 768 - DNA, 1539 bp, Zea mays
  Clone ID: TF_ZmC15860_2
cgcctccctttcctttctcctccctcactactcacacccctcacttttggcggcgccgactgggcacccgcgtcgttttccttcgtggcgccgactgcgcaaccggcaccaaccttcgccaggttttcgtgggctctttcaccgatacaaccatcctccagaagaacgcaagggatgctcgattgactctagttacttagcagaaccaaaagtggaaggccatcaaagatacgaggcttttttctcgccatgtctcggtcaccccacctcccaccccgctgcccaccgctgggtcctcagatcactcgaagggatgacggcatgttcacgcaaagctgcaggtttccatctggggatacgttcattggtgaaccaccgtgctggctggatgatctccttgaagattctgggaaagctcccaagctccctcctctcagaagggcctgcagcgattctgatgccatcttagatgcgctgtcgacattccagagcccaatttatccaatcgaggaatgtgatctaaactcaggtggtgaagctgaggacttgttgggtggagtcgaaggtgatgaaagtggttctgtggtcgaggctagctgtttctatggtccgaattcgccaagacagaagagtaggcttacaacttcagagagttccatggtaaatgctgtgcttgagaatgtccccggcaaccccttgcagtacctgaccatcgatgcctgcagtgatgtgaatggtaatgtggccaatgtaactgctgatgcctgtgatgcttttggccatcctgatcaagacaagtcatttaaaaggcgctcagggcaaagatctagggtccgaaaacttcaatacatcgctgaacttgaaagaactgttgaatcgcttcagaacattggtgctgatttggctgtcagagtgtcatcacttttccagcttcataatgctctatctatggaaaacaagcaactgagggtacagatttccagtcttcagcgtgcaaaactgattaaggatggtcagacgcaggccctaaagaacgaagccgaaaggttgaagcggatgtccgcccgccggagcagaagcgccacggcctcctgttacgacccgggctcgttctcgttcggagcagatgcttcgtcagtcagctggcagatgcctgacatggcaaggctcagcctgaacggcggctccccaagaggcagctatggcctgtgacagcagccggccctaacccccacccccaccgtcagaagaaaggccgaggcggttaccctagataacttttcgctaaccttacccaggcacagattttgaggggcccatctttgagtaggagagagtagggtgtttcggtctttcgctttcgcgggaattttaccgaggttgtcagcttattagtagttacaagtagagtggtgagtagggtgtttggtctttgctgtgtagcggcctgcggtctactcgtttgtttgacgctccatcataattgcagtgaagttgcagaccataccatcacacaaaaaaaaaaaaaaaaaagcggcc

SEQ ID NO: 769 - DNA, 1401 bp, Zea mays
  Clone ID: TF_ZmC13996_1
cgcttgatggcatgaggggaggagggcaggtggcttctttggccggtgcgcccgaattcttccctgagccagcctcatttgggcggccttgggagtccaggcagatgtaccggcagggtggtggcatgccaatgccaggcagggagaagaatggagggcgccatggtccgtccagctcatttggtgagcatgagcttggtcatgtgcccaatggggtgaataggaaggcccatggcgatgcggcttatgaccagaggattgtaatagagagaaaggagggcctgaggcactctcagtcggagactgacaccaaacgagccaaacaacaatatgctcagagatctcgtgtccggaagctccagtatattgcagagcttgagagaagagttcagtccttacagacagagggaatagaagtaactgctgaaatggattttctcggtcagcaaaatatcatgttagacttggaaaataaagccttgaagcaacggcttgagagtctatctcaggagcatctcattaaacgttatcagcaggagatgtttgagagggaaattggccgccttagaacattgttccagcagcagcaacagcaacaacatgtgccgcagcagcaggctcctacccatagccgcagtaacagtagagacctggattcgcaatttgcaaacctgtctctgaaacacagtgatcccagttcagggcgcgacgctatctctggcctccgcatttaagatccctttgttccagcttttggatccctgagctttgcagaacctgctgcccctttatgccactctttgtggttgttagtagcatcatgagaggagcagcaccggtgaaaccgggaatctcatcccacggtgaataaagctggaaaggttaataactgtggatctggtccttagttctttcagaatgtgcacctggcggtcatcgttagcttctgtccattattgatgcttgaccagtcggaggtgtttaggatctgtttgcagattgatgacttccatggatccttgtatcagtttgaatctagaacactaaggttctaatccattcctttttagtcgattctctgtcgagtttaggcgccatggcccttgtattagtgtggcacacgaatggaatgtgagctggtcctctttaggttatgccacatcctggaaaaccgttgcgtgaggagttgtcgggccatgtccattgtcctaataagatggtgaggttgaagggctggtgcagttcagtttcattttatttgtgatgtgcacagcaagatattggatactttgggttcttacatttatttgagcactgtatttttatcgcattgtgatgacagtatattccaagttcattttagctgccaaaaaaaaaaaaaaaagggcggccgctcgcgat

SEQ ID NO: 770 - DNA, 565 bp, Zea mays
  Clone ID: TF_LIB4762-034-R1-K1-F3
ggtaccctcgggttcggccgggtccttgtgggtaaaaaaagagaggaccctgccttgatgccccagacggcggtgtctacgacggcggggaggacgtccggctcggacggcgactcgtgggcggacacgcacaggcgcgagaagggccggctgtccaaccgggagacgccgcgtgaggctgggctccggaagcagcacaacctggacgagctggagcaggaggtggcgcgcctgtaggctgacaacgcgcgcgtgggggcccgcgccaccgacatcgcgtactatgacacccgggtcaagcaggacaacaccgtgctccgcacccgcgccgacgagctcatcgatcgtgttcaattcgtacatgaggtgctcaacctaggcgaggaactgagcgacgaagacgtggacagatatgaacgcgatgaccggacgacgacccggttgtgcatacctggtacgaggagtacccggatgtcatgatgcccatgtgagctgaggacatgcgtcactacggtagattgcctctagaaaccacaccaccgtacatcggaggctactagctgca

SEQ ID NO: 771 - DNA, 740 bp, Zea mays
  Clone ID: TF_LIB4698-005-R1-K1-E1
ccgggaggcacatcgaccgctgaacgcgacccaaagtatggccggattgtgatactgctcttaattaagtagcaattattgatgaattatttaaccgctcagtctacctacttgaaaagaaaacactacttgtcatcatttttgttgcactaattttgttccttgtttatggaccatgctgtaatgaacacgcctgcagacgctgagaaggctggcccagaacagggaggctgcaaggaaaagcaggctaaggaagaaggtgagcgagtctcgatactgatgacctacatcaagattggaacaaaagaacgagagaaaaatataatggcaaagaattaacatcgttttctttgttttttttaaaagtttgacatggttcaaattcttgtctccgccatccaatgacagtgtagatttatattgttttacttctcttttgctgcatgcaacaggcttacatccagcaactcgagtccagcaggatcaggctagctcagctcgaacaagaactgcacactgcaagagctcaggtatatgattagtatgcaacaaatttaataataaccacaaaggaaaaatgaaaaaaaaagaaacgtagtgcttgtatatcttgcctctcgacccttgttggtttcgtaaaggttgaatttttttaactgatctctggataaatatgtattctttctgcaaggagttttcttccccagcagtggcatcctcgctgacccaagtgtccccgg

SEQ ID NO: 772 - DNA, 316 bp, Zea mays
  Clone ID: TF_jC-zmX700344307a1
attcggctcgaggtaataaacacggattggcataagcagtctaacagggactttgcaaggagatatacattacgcgagcaacacgagtgcgaggagttagcccggaaggtaactaacctaaccaccgacaacagcgctttcagagtataccttgacaacctcaagaaggcttgtcaagacatggaagcagcaaatccacgtatgttggaatggggttggctgacacacaattaccaagtgtaacgaccacactgagaatgagcatcgagccgccaaatttgcagctgcagctgtagcagcattatgatgaggaggg

SEQ ID NO: 773 - DNA, 882 bp, Zea mays
  Clone ID: TF_700217015_FLI
gaggaacagagattccgccatgaaatccagggagaggaagaagtcgtacataaaggacttggagacaaagagcaagcacttggaggcagagtgccgtcgcctcagctacgcacttcagtgctacgcagctgaaaacatggcactgcgccagagcttgctgaaggataggcctcttggtgctcccacagccacgcaggagtctgccgtactcacgggtaagacatgttatccgtcctctaatctttattcattccctaaattagatgaatcgatttgtctaccatcagtgagtcctctctggcttgaaccgtggatatgataggtcagtcataaattaccaagcaagtaaccaatcaaaagcacaagtgcaaccaattttttgaaaggctggtgaagtaattcgtgatgctaagatgaattttctttttatgtgcagaaaccctgccgctggtttccctgctttggctggtgagcatcgtctgcctgttcctgatgcccgttctgcccaaccgaagcccagctgctccaagcagcggcggaagagacctcgtgatggcagccggaaagacaagcagtgagaccccagagatactggaactcatcctccatggaaggcgttgcaagagcacgagggcgaagattaagctatgtattttaccatttcatgcaggagctgcttgctagtagttgctaggctttgagcctcttgcaagcttacctctatatgtagtgtacccgcaaatcttaccgtgctcgctatgcgcctgtcttgcagagaagcctgtcgatatccatggagtagtaccttttttttgtttaatagctcctgtgctacccagaatatgtttaaaatctggattttgtgttattttctatttcttc

SEQ ID NO: 774 - DNA, 679 bp, Zea mays
  unsure (1)..(679): unsure at all n locations
  Clone ID: TF_ZmC3114_4
tccggcggtcagcgatgagtcatcggnanactagnanatgatgacacnntgaccataaggattcatctgcgcccaagaagaggaaatctggtaacacatcggctgaagatgagccgtctcaagctactgttgtgcgatatgctgcggttgagtcaccatatcccgcaaaaggaaggtctgcctcaaagcttccagtgtctgcacctgggcgtgcagcgcttcctagtgccaccccgaatctaaacattgggatggacatttggaatgcttctcctgccttggctgtgcctgcagtgcagggggaagtgagtcctgggttggcacttgtccgacgtgatggcgttactcaactggacgaacgtgaaataaagagggagaggcgaaaacaatctaacagggagtctgcaaggagatctagattacgcaagcagcaagagtgcgaggagttagcccgctggggccatgtagagtcgcccccactgcagccatgtattatttatggctcgtcgcggtgtgctttgtgtttttttgtgtgttgtgtaaaaactattgatgtaacaaaacctagagagcctagaggttttttttatgtctgctaactcctgacgagggatgtaatgtaaccggccaatttgttgcctgatcgttcgttagatgaaatgctagcaaatgtcactcg

SEQ ID NO: 775 - DNA, 371 bp, Zea mays
  Clone ID: TF_LIB3245-262-P1-N1-F7
ggccagtagggacaggtggcggtgggggcgcagtctgcgctgggcgcaaagaagcgcgggcgcacggcgggggacaaggagcagaatcggctgaagcggttgctgaggaaccgagtttccgatcagcaggcgcagtagcgggagaatgcgttcattacggaactggatgtgaaggtcaatggcctggaactacgcaatgcgtaactggagcagattgtgtgcactctacaaaacgagaacaacacgctccgccagattctgaagaacacgacggcgcacgcgagcatgacgtaccgcggcctccgcggctgccacggtaaggtctgatacggcggcttgaagcaccacctcgtcatgagctagtgagaaac

SEQ ID NO: 776 - DNA, 680 bp, Zea mays
  Clone ID: TF_LIB4762-036-R1-K1-F3
ggttccctgtgggtaaagagagagaggaccctgtcttgatgtcgtcgacggcgctgtctacggcggcggtgaggacgttcggcatgggaccggcgacgtcgtggagtggacacgcacaggctgcgagaagcgccggctgtccaaccgggagtcggctcgtggggctgggctccggaagcagaagaacctggacgagctggagcaggaggtggcgcgcctgtaggctgacaacgcgcgcgtgggggcccgcgccgtcgacatcgcgtactatgacacccgcgtcgagcaggagaacaccgtgctccgggcccgcgccgacgagctcggcgatcgtcttcgattctgtaacgaggtgctccgcctaggcgaggagctgagcggcgacgacatggacatccatgaaggagatgcccgaggacgacccggtgttgcatacctggtacctggcctacccggatgccgtcatgcccataggagcacaggacatgctccactactgatgattgtctccagcagccacaccatcatacatctgaggctgctggctgcagctggttggcctcgagactataagaattgactggctctatcagcatgcacatttactacgctatctgcctggtttgagaattacagggactctactatttgctgctgtgataaatgtaccttctgggttc

SEQ ID NO: 777 - DNA, 799 bp, Zea mays
  Clone ID: TF_ZmC19483_3
tgggaccctcgaggccggccgggaaattttcccgcctctaaccgccttctcgggctaccacgctgatccggcgtcgtctgcggtccttccgaccaactcttcaatcttgtgaattgcttttcgcccagttagggcagatcaccattccttgcaggagttcgttgccgtctctccaatcctccctggctcgactgctcagtggtgactgatgtggtccactgccctgccctgcacctgcaagttagtttcactcgtgatccgtcagcttgccacccagcaaccgctgattatcagaaatccacttctcaaagcttcaaggagcatccttcgaacaagttcctgattccttcgcctcccgccctccccctttcttctcgggcatccttgtccgttgaccacagagggaagaaatctgttccgggcaggcaggcgcattctccgccacaatggacgatggagctgacctcccctgccagttgctcttctcccacccggagatgcctcacagcttcgacgagttcttcagcggcgccacgaccacgaccacctgcacccacacgcacagctgcgaccctccgggcccctcggccgccatgcacacccacacgtgcctgcacacgcacacccaggtcctgggcagcggcggggaggacgacggctcagcgaagccgcggaggcccctggggaacagggaagccgtgcgcaagtaccgcgagaagaagaaggcgcgcgcgtccttcctggaagggggagtcaagaagctgcgcgccgccaaccagcagctcgtgcggcggctgca

SEQ ID NO: 778 - DNA, 1633 bp, Zea mays
  Clone ID: TF_ZmC2115_1
atggccagtgaattgaatttaggtgacactatagaagagctatgacctgctacttacctttttttacagcagtgcatgttcgtctcatggtgctgcattcagtttacaatgtgtctgaaggatttgaagaccccacccccagatagtggatgggcttttttttacatattgtatgtgtcaacaggtaatcagaaggctggctcagaatcgtgaggctgcacgcaaaagccggctgcggaagaaggcgtacattcagcagctcgagagctgtaagctgaagctttctcagatggaacaggacatgcagcgagcccgtacccagggcctctttcttggaggagatccgggtgcaagcaccagttcaggcgcggcaatgtttgacgtggagtacgcccggtggctggacaaccacggccggcgcctggccgagctacaaggagctctgcaagcgcacttgcccgacggtgacctccaagcgatcgtggatgacgccctgacccaccacgacgagctgttccagctgaaggctatggcggccaagtccgacgtgttccacctcatcactggggtgtggacgacccctgccgagcggtgcttcctctggatgggtggattcaggccctccgatctgctcaagacactgctgccccagctagatccactgacagagcagcaagtggtcggcatatgcagccttcagcagtcatcacagcaggcagaggaagctctctcgcagggcttggagcagctgcatcagtcgcttgctgacaccatggccggtggatctctgattgacgacgccaacatgagcttcatgagtcaaatggctcttgccctcggcaaactggccaaccttgaaggctttgtgatacaggccgataacttgaggcaacagactcttcatcagatgcaccggattctgacagttcggcaggcagctcgatgtctcttggcaattggcgagtaccacaaccgccttcgtgccttaagttccctctgggcttctagacctcgagagatactggtgaccgatgaaggcaattgtgagataagcatcgcagcacaaccatcccaaaaccaattttcaaccttctgactgacacatgttgtggaactaaccctcagcataggagcaagagaaaaatgactgggaagagaatgactgggaagagagattgtttggatgcacgtagcagatatctgagagctacagaggaaagctgggaaatagaagaagctctaaaacaaggagtgtttctggaaattctttagttttcaaaaaacactttctgaaaatgtgtgtacaagaaaattccaggaaggtgaaattgcttcattgactgcagtgggaaggggaaagagagaagctagaatctcatgtcgagtactccagtacaatgtgttcttttgtctggtctaaattcttgtaacagctcttcctatgatggaagaatccattcaacaattccacctatgattactggattgagtatgttgaataggttggttgaggctatctagtaatttttatgactatgtttatccattatctaggactatttggttactatattatataatctttatcatatatacatccatttagttcaccaaaaaaaaaaaaaaaaaaaaa

SEQ ID NO: 779 - DNA, 1581 bp, Zea mays
  Clone ID: TF_ZmC11397_2
cccacgcgtccgtgaccgtgctgcagattgtctgtttgcacggtcaaaggaaagaaaatctagatatataacagaactggagcggaaggttcaaactcttcagacagaggctactactctttcagcgcagctcacactattccagagagacacaactggactttcggcagaaaatgctgagctgaagataaggttgcaggccatggagcagcaggctcaactgcgggatgctctaaacgatgcgctgaagcaagaagtggagaggctcaagatagcgacgggcgagatgccgaagtccaacgaacaattcaacatggggatgcagcacgtctcgtacagcggcccttctttcttccatctcccggagcagcacgtagacattcagctgccgcaccatttccagcagcctccgcggaacgtccagatgctgtcccaccccaactccctctcggatatggcgcagcaagactcgcttgggcggctccgggggctggacattggaaaagggtccatggctatgaagccagaggcagaggtcgtggtgaagtcagagggcagctctgtatctgcaggtgaaagcaacaccaccttctagctatacaatacatctgccttccaagaagcctccgtttggtttagagttcttttgttcatagtctgacatcctccttccttgagctgcttcgtccttctcagtaggcctattttttttattccattggttatatctactagttaacattggtcggttgccaatcgttgttgtcgtggtggctgatttctatagggacattgatgtgttggtttcgagtttgttgttgttgttgtgtgtgtggttggttgtttcgagctaggggctgaaagggcaccgagtgtttttttctccacctgttttagttttgttatagatttgacaacaatcgttatgatttctccttctggaaaggtgtacattgtgttgctatgctaatttgtagtgatatttttgatgcttccaactaacagaaaaaaaaaaaaaaaagcggccgagcaacacaccaatgcagcagcatggaaacattcagctgccgcatcatttccaacagcctccgctgactgtcccgagccaccagatgctatcccaccccaactccctctcgaacatggtgcagcaagactcgcttgggcggctccaggggctggacattgggaaaggatccatggctgtgaagtcggaggctgaggtcgtggtgaagtcggagggcagctctatatctgcgggtgaaagcaacaccaccttctagctatacaatacgtctgccttccaagaagcctttgtttggtttagagttcttcttttgttcatagtctgacatccttgaactgcttcctccttccctatagtttttttattccattcgttatatctagttaccattgatcggttgtgtcgatcgttgttgtcgtggtggctgattttatagggacattggtgtgttggttttgagtttgttatgtgtgtggtatggttggttgtttcgagctagtgactgagagggcaccgagtgattttttggcaaaaaaaaaaaaaaaaaagcggcc

SEQ ID NO: 780 - DNA, 425 bp, Zea mays
  Clone ID: TF_ZmC42267_1
cgaagaagaagaagacggcgaggcgaggcgcccgaggcagccccgcgtcgcccctcgactacagcggcgcgtccactagcggcggcgaggacggcgccttctgctcccggccagagccagcgctcccgccggccgccgcgtgccagcagctcgcggcgcccacgcctcccagcaaggtgggtggcctcgccggacggcggacgacccccccggtgccggtgccagtgccactgccaccacctcggcccgccggacagcgggcgcggaagaagatgaggctcccggagatccagcagatggtgcggtcgctgtcggtggagaacgacgccctccgcaaggagatgagagcgttgcggagggattgcacggcgctgtcccaagagaacggcaagctagagacaaggctccatcagtccgttacgctg

SEQ ID NO: 781 - DNA, 931 bp, Zea mays
  Clone ID: TF_ZmC11397_1
gtcaaaggaaagaaaagctcgatatataacagaattggagcggaaggttcaaactcttcagacagaggctactactctttcagcacagctgacactattccagagagacacaactggactttcagcagaaaatgctgagctcaagataaggttgcaggccatggagcagcaggctcagctgcgtgacgctctaaatgatgcactgaggcaagaagtggagaggcttaagatagcaacgggcgagatgtcgaagtccaataacgagcatttcaatatgggaatgcagcacgtctcctacagcccttcattcttccagctctcggagcaacacacaatgcagcagcatggaaacattcagctgccgcatcatttccaacagcctccgctgactgtcccgagccaccagatgctatcccaccccaactccctctcgaacatggtgcagcaagactcgcttgggcggctccaggggctggacattgggaaaggatccatggctgtgaagtcggaggctgaggtcgtggtgaagtcagagggcagctctatatctgcgggtgaaagcaacaccaccttctagctatacaatacgtctgccttccaagaagcctttgtttggtttagagttcttcttttgttcatagtctgacatccttgaactgcttcctccttccctgtagtttttttattccattcgttatatctagttaccattgatcggttgtgtcgatcgttgttgtcgtggtggctgattttatagggacattggtgtgttggttttgagtttgttatgtgtgtggtatggttggttgtttcgagctagtgactgagagggcaccgagtgattttttggcagattttcttttcaccacctgtcttagttttgttatagaacaaccatgatttctccttctgggaatgtgtacattgcgtg

SEQ ID NO: 782 - DNA, 1771 bp, Zea mays
  Clone ID: TF_ZmC19483_1
tcgaggccggccgggggtattgcgagccaaaaaaacctcgctcgggccgggcccggccgggatcgtcccctccctccgtctccaccgcccaccactgatcggatcacgtcggcgtcccatctcctcctccacgacacagaacgccgctccctttccgggattctcctctccaatcgcagctaaaacgcaacgcactggatcggacgtcgccaaaaagatcggtggcgacaccataaagaaagaatccgagaaaaggcgaaaggggaggagagaaaggggaggtacaaaatttctacccgctagaggttagctagctcggcggcgagggaacgagagacgccctaccgtcgattccatatcgtcgctccgatattctgatgccggaatcctgcttttccggctagcttaccgatacctcctaggtggtttccagtcctcacccttccaacctctactatctttttttgtgaatttacctccaccgaattcgggcagctcaccatttcttggagtttggtgtcctttctcgagtgtttccttcctccctcccgggttctactgctgagtggtgaggtctactgccctgcacctgcaagtttgtttcatttgtgatgtgatccgttagtttgccccccagcaaccgttgctcagaaattcagttcttattaaagcttcaagacccttcaaggaacatcttttagacaagctcttgattccttcacctctctctctcttttcaggcatctttcttgtgcgacttgtccgttgaccacaggcggagaaatttgttctcggcacacattctctgccacaatggacgatggagctgacctcccctgccaactgctcttctcccacccggagatgcctgacagcttcgacgagttcttcaacagcgccacgacgacctgcacccacacgcacagctgcaacccgcccggcccctcggtcgccatgcacacccacacgtgcctgcacgcgcacaccctggtcctgggcagcggcggggaggacgacgacgacgccagggaggactcggcgaagccgcgcagaccgctggggaacagggaagctgtgcgcaagtaccgggagaagaagaaggcgcacgcggcctttctggaagaggaggtcaagaagctccgcgccgccaaccagcagctccagaggcggctgcagggccatgcagctttggaggcggaggtggcgaggctccggggtctcctgctcgatatccggggcaagatcgacgccgaggtcggcggcgtgctcccgtttcagaagccgtgcagtgtgggctccgtggcgtgtgccgatcctgctctgtgcttcaacggcaactcggaggttggaggcggctgggaggagagctcaagaccggcagccgcggactgtaggatcgatgaagtgcgagggatgtcacgggaaattgatgtcccagaaggattgcgtcattccatggatgttgttgcgagcttcgtgagttctgatcccctggctgaatgagcgcgtttgcctgattggcagttttttttttgggcctctgccagtgccagcttcttttggcttgcttgaaaggtcaaattttcatgtaattagaagaattgaggaactgataatgagtggaactacctccactgtggtccatgcttcttgtgctggtgttcagtgtgtatagggtacagaatacttacatatgactatatgggcactgaaagaaatctaaaatgcgaagctgtactgcaggtatgccaatgaagtgcccttgacttcc

SEQ ID NO: 783 - DNA, 1588 bp, Zea mays
  Clone ID: TF_ZmC2315_12
aattctttacaaccagtccatggagagattcatgccgatgtacgatgaccgctcggagctggcgccgagagacgtggttgcgaggagcatagacgaccagctgaagaaacgaggcgaaaagtatgtcctcctggacatcagccacagaccaagaaccttgtctcttgcccccttccctctcttccgcctccgattgagtggctcaccttctttcccagccagcacgagcttgcaagcaagcgagctcctgagatttcagctcgcttctcctccagaggtcgagcagaccagactcctccgaccgaagctctaccacttcccagttagcctgtccaggaactgcttggccggagatccaaacaaacctctgtgttggggttctccggggttccttgcgctggagggaggtttcgttctcgctggccatggtttggctgagaagcagcagcggcagcatcttgatgccaaatctctgagctttatgaagatcgccactcacctgcgccgctcctgcttcctccactccttctcggttgtcttcctctactggttttatgtgatctcataacttgccctcccccggatccgccattcccccgtgccctctctccgtcccctcaaccttctccctcctttcttgcttccctcaacaatcgccaaataacagcactagcggcagcggtagaggatcttttcgaggtaagctaggccggccggttccctgcgggaaaaagaaaagaaaaggaccctgtcttgatgtcgtcgtcgtcgctgtctccgacggcggggaggacgtccgggtcggacggcgactcggcggcggacacgcacaggcgcgagaagcgccggctgtccaaccgcgagtcggcgcggcggtctcggctccggaagcagcagcacctggacgagctggtgcaggaggtggcgcgcctgcaggccgacaacgcgcgcgtgggggcccgcgccgccgacatcgcgtcccagtacacccgcgtcgagcaggagaacaccgtgctccgggcccgcgccgccgagctcggcgagccgcctccgctccgtcaacgaggtgctccgcctcgtcgaggagttcagcggcgtcgccatggacatccaggaggagatgccggcggacgacccgctgctgcgtccctggcagctgccctacccggctgccgccatgcccatcggcgccccgcacatgctccactactgatgattgcctccaccaaccacaccaccatacatctgaggctgtcagctggggctggttggcaacaagacaagaagaattggctgcctctcaacaacattcacatctactacctacctggctgctttgagaattacagggcctctactatctgctgctgtgttaaatctacctcctggtttctccaataattgtcgctgttctgtactcttctcttctcttatgttctgtctgtcagtgtgtatgagatgatgctcatcttatgttataaggcttaatcatgtgtctagttgtactttctgtcttgtaatgttatcagttatatgaataataagtgttatgtaagctcccaaaaaaaaaaaaaaaaaatttgcggcc

SEQ ID NO: 784 - DNA, 3354 bp, Zea mays
  Clone ID: TF_ZmC491_1
ccacgcgtccggcctcgtcgtcttcttcgccccgccacccgtcctgcacactcacaactagacatcgtaccacccaggtgatctcgcgcgccactgcctccttccatcccttagccccagctttactctcccctcccgcgcccagatcccgaggctcctacccctcgatcgccgccttccagcggccgatccggcgctggctcgcggcccccgacaggttttgctttatgctggttcatttgtctacggacaatggactagttgctgcactgtttctgtgattcaccatgggaagcagtggagcagatacaccgtctaaggagcagcagccacctgctacctcaggtgctgcaataccacctgtttatccagattggtctagcttccaggcatatcccccaatcccaccacatggattcttcccctcacctgtggcatcaagtccacagggtcatcctttcatgtggggagctcaagctatgattccaccttatggaacaccgccaccatatgtcatgtacccccctggagtatatgcccacccatctatgcccccgggtgcacatccatttactccttatgccattacttctccaaatggcaatgctgatgctactctggtaatactgatggcaagccctctgaaggcaaagataaaagtccaacaaagcgatccaaaggaagtttgggcagcttgaacatgcttactggaaagaatcccagtgaacatggtaagtcctcaggtgcatcgggtaatggagtcacttctcaaagtggcgaaagtggcagtgacagttcaagcgaagggagtgaaggaaattctcacaatgattcacatcacaaggaaagtggacaggaacacgatggggatgttcgaagttcccggaatggtgtatcacgtttgcaatctgagggaaaattgaaccaagctatggcaatcttgcccataccatcaagtggcccagcaactgatccaactacaaacctaaatattgggatggactattgggccaacacagcaagctctgctcctgcaattcatggcaaagcgacgtcaacaacagttccaggggctgtggtcccagcagagcagtggacacaggatgaacatgaactcaaaaagcaaagaagaaagcagtccaatagggagtctgcacgtagatctaggttacgtaaacaggctgaatgtgaggaattggctcaacgtgctgatgttttaaagcaggaaaatgcttcacttagagatgaagtaaaccgtatcagaaaagagtatgaggaacttctatcaaagaataattcactaaaggaaaaacttgaaggcaaacaacacaaaactgatgaggcaggacttaacaacaagctgcaacattctggcaatgacatccagaaaaaaggaaactaatgctatcatgcaatgcttgcatagattggtcctaactagattattgggaggcgcaattgtagtatgcgtattaactccttactttattgcagttaattgttaccaggttgtgataatgttgatgccaaccttttgtgtgggtgtttcctgtttcagatctatcttggcttatcttttagaagccaagatgtgactgaagctataggctgtgacccaattcactatatctgttagaaatagtggataaagtcaaacttacaaatttgaagtgctgactaatattgttatgtatacctggcaaaagactggtttccttttaattcagtctggttgaacattttgctgggctttcactactgcctagtttgtgtacattttttttcatgtcggttgttcctagttattttttgtaataattaacaaatagatgagggacactgtctcaacctctgcaccaatatatatatggacacacacacacacacacacctcttttttgcgtctattttctgttttacttcaaagtttgcaggtttgtttcagccctgtttgattgtgagccttggcgctggcggtattttttctaagtttaaatgatccacctgctgtaggtaagtttggttaaaagacattcctatttttctgtttagtgatactgatattagtaatccttttttttcatccatctatttaagtgtcagcagaatcgtttgttaaacttgctttcctgaacttgctcttgattctggtaagtttttgggctcctggcactttacttttatgatcttattttgatttgctttttacaggaaaatggttctggactatgtcttagatgggaagcatagttcattagtatgtctgccttacaggttcttaagcagggatcgtggaagaacctgtgttgggaggtggtagagaagatgtgccaatgattggtttttggtcaatgtcttctctggtgccgcagaagttggagcggcatagcgagtgcatgttgccgcttttactctgtgttgctgtttgctttatgattccttttattccatggcacctgaataactcccccaagtggtagagatcaggacttgtgagctcgatgccggtgaagtagaacttttgacgcttgatgttggttacggtgatcgtgtcacccaagtggtgggtgggaactggggactatggttccattgggaagcctgatgaggtagttgaacacgaggggcacagtgatggaatgcctggataggaactccagcacctggctcagaaatggacgtgacagcagcctgtcgctgggcatcaggaaggtggtgttacggggtatcttctcctgcaccattctgatgagcatgacgaaggtgaagtagcgcactcgctgcatctcctatgccatggtggcaatgccacagctaaccatctttgtgtaagcaggcggcacacatgtttaaactacatggacacccttattatgaaaataaaaatatagaaaaaaccctctacctggatactgtttacagtctgagcacagtgacaggcttttttgtctactcttcgaccagttcggctctatcttaaggtgctggctgcagaaaatgagcttcatggcttcaataactagctgtatgatcttcagattcttggactgttgaactgtttaacggcagatattaacagttgcagccttacaggtgcttcgtcaaatgttgaggcattgctgcttaataactgtttgggggatagagtttgggttatacactgtaggtgaatcttcacgttgataccacaaacaatgtgtggaagtttcaaaaccattatcatatcaagtgtgcagtgaatcttaacgttgatgccagaaaccatgtgtggaagtttcaaatccttacaaaggaaaggtggttgaaaataacataatttacaaacgtgcttcgcaacgaattctattcctcatc

SEQ ID NO: 785 - DNA, 1878 bp, Zea mays
  Clone ID: TF_ZmC491_2
cgcagagcacagcactccacctcactgctccagtcgcgagccgcagctgcgcgtcgcgtcgcatcgcacgcatctctcctgccctccagctccaaagcttcgtcgtctgcgtcgccccgcgccccgtcttgctcgctccaagctagacaccataccacccaggtgacttcgcgcgccactccttccttccctccctttccccacagctttactctcccctcccgcgtccagatcccgaggcccctctccctcgatcgccgcctcccggtagcggatccggcgccggctcgcgccccccgacaggttttgttttatgcttgttcatttgtctatggacaatggactagttgctgcactgcttttgtgagtcaccatgggaagcagtggagcagatacatcgtctaagccaaacaaggcatccgccccacaggagcagcaacaacctgctacctcaggtgctgcaacaccggctgtttatccagactggtccagcttccaggcatatcctccaatcccaccacatgggttcttcccctcacctgtggcatcaagtccacagggtcatccttacatgtggggagctcagcctatgattccaccatatggagcaccgccatatgtcatgtaccctcctggagtgtatgcacacccatctatggcctcgggtgcacatccatttactccttatgccattacttctccaaatggcaatgctgatgctactggaactactgctgtagcttgtgatactgatggcaagccctctgaaggcaaagataaaagtccaactaagagacccaaaggaactttgggcagcttgaacatgcttactggaaagaaccccagtgaacatggtaagacctcaggtgcatcagctaatggagccacttctcaaagtggcgaaagtggcagtgacagttcaagcgaagggagtgaaggaaattctcataatgattcatacaagcatagtggacaggaacaagatggagacgtacgaagttcccagaatggtgcatcacgttctccatctgagggaaaatttaaccaagctatggcaatcatgcccatgccatcaagtggcccagtaactggtccaactacaaacctgaatattgggatggactattgggccaacacagcaagctctgctcctgtaattcatggcaaagtgaccccaacaacagttccaggggctgtggtcccagcagagcaatggatacaggatgaacgtgaactcaaaaggcaaaaaagaaaacagtctaatagggagtctgcacgcagatctaggttgcgcaaacaggctgaatgtgaggagttggctcaacgtgctgatgttttaaagcaggaaaatgcttcacttagagatgaagtaaaccgtatcagaaaagagtatgaggaacttctatcaaagaataattcactaaaggaaaaacttgaaggcaaacaacacaaaactgatgaggcaggacttaacaacaagctgcaacattctggcaatgacatccagaaaaaaggaaactaatcgagctatcatgcaatgcttgcatagcatggccctaactagattattgggaggcgcaattgtagtatgcgtattaactccttactttattgcagttaattgttaccaggttgtgataatgttgatgccaaccttgtgtgtgggtgtttcctgtttcagatctatcttggcttatcttttagaagtcaagatgtgactgaagatgtaggctgtgacccagttcactgtatctgaaatagtggataaactcaaatttacaatttgtattgctgactaatattgttatgtatacctggcaaaaggttttctttgaattcagtctctggttgaacaaaaaaaaaaaaaaaaaagcggcc

SEQ ID NO: 786 - DNA, 1759 bp, Zea mays
  Clone ID: TF_ZmC491_3
gcacagcactccacctcactgctccagtcgcgagccgcagctgcgcgtcgcgtcgcatcgcacgcatctctcctgccctccagctccaaagcttcgtcgtctgcgtcgccccgcgccccgtcttgctcgctccaagctagacaccataccacccagatcccgaggcccctctccctcgatcgccgcctcccggtagcggatccggcgccggctcgcgccccccgacaggttttgttttatgcttgttcatttgtctatggacaatggactagttgctgcactgcttttgtgagtcaccatgggaagcagtggagcagatacatcgtctaagccaaacaaggcatccgccccacaggagcagcaacaacctgctacctcaggtgctgcaacaccggctgtttatccagactggtccagcttccaggcatatcctccaatcccaccacatgggttcttcccctcacctgtggcatcaagtccacagggtcatccttacatgtggggagctcagcctatgattccaccatatggagcaccgccatatgtcatgtaccctcctggagtgtatgcacacccatctatggcctcgggtgcacatccatttactccttatgccattacttctccaaatggcaatgctgatgctactggaactactgctgtagcttgtgatactgatggcaagccctctgaaggcaaagataaaagtccaactaagagacccaaaggaactttgggcagcttgaacatgcttactggaaagaaccccagtgaacatggtaagacctcaggtgcatcagctaatggagccacttctcaaagtggcgaaagtggcagtgacagttcaagcgaagggagtgaaggaaattctcataatgattcatacaagcatagtggacaggaacaagatggagacgtacgaagttcccagaatggtgcatcacgttctccatctgagggaaaatttaaccaagctatggcaatcatgcccatgccatcaagtggcccagtaactggtccaactacaaacctgaatattgggatggactattgggccaacacagcaagctctgctcctgtaattcatggcaaagtgaccccaacaacagttccaggggctgtggtcccagcagagcaatggatacaggatgaacgtgaactcaaaaggcaaaaaagaaaacagtctaatagggagtctgcacgcagatctaggttgcgtaaacaggctgaatgtgaggagttggctcaacgtgctgatgttttaaagcaggaaaatgcttcacttagagatgaagtaaaccgtatcagaaaagagtatgaggaacttctatcaaagaataattcactaaaggaaaaacttgaaggcaaacaacacaaaactgatgaggcaggacttaacaacaagctgcaacattctggcaatgacatccagaaaaaaggaaactaatcgagctatcatgcaatgcttgcatagcatggccctaactagattattgggaggcgcaattgtagtatgcgtgttaactccttactttattgcagttaattgttaccaggttgtgataatgttgatgccaaccttgtgtgtgggtgtttcctgtttcagatctatcttggcttatcttttagaagtcaagatgtgactgaagatgtaggctgtgacccagttcactgtatctgaaatagtggataaactcaaatttacaatttgtattgctgactaatattgttatgtatacctggcaaaaggttttctttg

SEQ ID NO: 787 - DNA, 563 bp, Zea mays
  unsure (1)..(563): unsure at all n locations
  Clone ID: TF_LIB3594-052-Q1-K7-B11
cggggaagngcccancggagcnggagcnggaggccnnccnccgcggccgggaggacgccacggcggcggcggcggcggcggcgggggccgagcagaagccngcgcacgacgncgcngcgcnggcgccgnncggcgccggnggcgngnnccccnccagcgancngnccgccnncagcnncgcngacncgaacacccgcaagggaaccggaaacanccanaancaccnnnggncccanaaccacaacgncaggcancccgcagncnccacgacgancgagncgcagncgncgaacngngcagcngcagcagcaagnccaacancggcnaccaaccngnaccngaaagagagccaggcncngggcggcacgaggggnnccgacnccgacagcganncgcngcnggacaacgaggggggcccgngcgagcagagcacgaacccacaggacgngaagaggangcgacgganggggncgaaccgggaggcngcncgacgggccaggaagaggaagcaagcccacccagcngaccnngagacacaggncgaccagcngcgaagcgagaac

SEQ ID NO: 788 - DNA, 755 bp, Zea mays
  Clone ID: TF_ZmC458523_1
gaggataaattcattttcccgctatttaaaacaccgatattaatctctctctccaattcatcactatatttgtcttcttatagtctgtactatactcaacagtactatacagtctactatactaaaaaggctaccaaagccatctcagctgggggcacgcaggggtccctgccctgctgccgctgccgctgccgcctctcccacctcctccacctcgccgagccttctccgcaggccagcggcttcctctctgagcctggcgttctcacgagccacggcaccgtgcctggcgaccacgcggttgagctcgacaaggagcctctggttggcgccaaggagctcggcggcccgcaacgacagctcgtgcaggcgccgctgcctccgggcgcgcgacctccgcgcggacgctcggttcgacgccagccttctcctcttcctctcggcagacaccgagctgacgggggtggcaatagcaacgccgccatcgcagctgtgtgggcagtagtagtagtacgcggggtcgaggccgacggccacgtctaagtcgaacgagctggaataatcgtgggcgggaacaggaccgttccgcgccaggaagaggctggccaggtcctccagcccagggacgactgggagtgggagccttgctagattggccgccgcgcagctctgttgcatgcctgatgaaactctctggaaggactgactagtagctagtctttgcaatgtcccggccggcctcgaggtacccaatg

SEQ ID NO: 789 - DNA, 1372 bp, Zea mays
  Clone ID: TF_ZmC19483_2
gggtacctcgaagccggccgggaaaaaacatctgcaaatgttataggcttgtctacaaattgacaaggattcagtagcaatgctttgctagctggttttaacaaaaaaaaaaaaaaaaaaaaaaaaaaaaaaaaaaaaaaaaaaaaaaaaaaaaaaaaaaatttcatggctggcttgccagttctagttttacgggggccatgaagctctctcctaataaagataaatttatggaggtcattaggggaactggggatatcaatgcagatatggagaaattttgcacaaccttctctccttttctcaaaaaaaatcacgagtttctggcgagcgttggtcttgatgatatgaaggcttcgtaaagcgatctccaagggggtgagacgagagacgccctaccgtcgattccatatcgtcgctccgatattctgatgccggaatcctgcttttccggctagcttaccgatacctcctaggtggtttccagtccgcacccttccaacctctactatctttttttgtgaatttacctccaccgaattcgggcagctcaccatttcttggagtttggtgtcctttctcgagtgtttccttcctccctcccgggttctactgctgagtggcatctttcttgtgcaacttgtccgttgaccacaggcggagaaatttgttctcggcacacattctctgccacaatggacgatggagctgacctcccctgccaactgctcttctcccacccggagatgcctgacagcttcgacgagttcttcaacagcgccacgacgacctgcacccacacgcacagctgcaacccgcccggcccctcggtcgccatgcacacccacacgtgcctgcacgcgcacaccctggtcctgggcagcggtggggaggacgacgacgacgccagggaggactcggcgaagccgcgcagaccgctggggaacagggaagctgtgcgcaagtaccgggagaagaagaaggcgcacgcggcctttctggaagaggaggtcaagaagctccgcgccgccaaccagcagctccagaggcggctgcagggtcatgcagctttggaggcggaggtggcgaggctccggagtctcctgctcgatatccggggcaagatcgacgccgaggtcggcggcgtgctcccgtttcagaagccgtgcagtgtgggctccgtggcgtgtgccgatcctgctctgtgcttaacggcacgagttggaggcgctaggaggctccagcggaaattgatgtcccaaaaggcttgcgtcattccatggatgttgttgcgagcttcgtgagttctgatcccctggctgaatgagcgcgtttgcctgattggcagtttttttttttttggggcctctgc

SEQ ID NO: 790 - DNA, 1427 bp, Zea mays
  Clone ID: TF_ZmC25151_1
cattggtacctcgagccggcacccgccgctcgcagagcgacatcccgttcggcttcgcgcagctcagcccgccgctgcccccgccggcgccggtcaagcgcgaggtcaccgctgcggccgacggctgcagatcggacggcggcggcggtgatgacgccgccctctacgacctcgtcaacgcgtacatggacctggacgggctggacccgctcaactcgtctgaggaccgccacgacgaccgcgacagtcgtgccagcggcacgcgcgcggggagcgcggccgagagcagcgagaacgaggcggagagccagtccacgtccgcggacaggaaggacgggggcaagtcccgccattgtcgcagcctgtccatagacagcttcatgggcaagctcagcttcgccgcaggggaggagtctccgaagctgccgctgccgtctcctggtggcagcctcaccaggagcgggagtggctcactggaaggtggtgctgtcgcgctgttcaatatggagtttaccaacggagagtttaccgactccgagaagaagaaaattatggcgaatgagcgacttgctgagatagctctgacggatcctaagagggtcaagaggattctggcgaatcggcagtcagcagccaggtcaaaggagcgcaagatgaggtacattcaggagcttgagcataaggtgcaagtgctgcagacagaggctacgacactctcagcacagttgacaatgctgcagagggactcagctggattggctactcagaacaacgagttgaaaataaggcttcaagcaatggagcaacaagcacagctgagagatgcactgaacgaagcgttaactgccgaggtccagcgtctgaaactcgcgactggggaggtaaccgatggccggatgccgaagggcctacagcagcagatgaactcccagatgctccagatccagcagctgcaggttcagcagcaggcgccccaggcacagcagcagggccagcgacagcagcagcagcagcctcagaaatcggcatagatcaggtcaggtcgagagaaggacgctgaagctaattgagcttgagcatggccaattgaaggatgctgggtggggagaaaaaacccgagtcttttgcgtatatcagacatgttgtaggatagctgcaatagtagggcgacaggcgccgttggtttcgccgagtcaagtaccttagctggagtatgtcgtcttggtgtcgtagtaccatacatgattgcctgcctgcctgcctattgttgaggcgtcttggtagcgtccctgaacgttctctcggaggtgcttcttctgttcttttgtctaagagggctagggtgtcacaaatgtacctgcgtaatagtgtaattattatctatagcgcaccttcagcgtttgtactgtggaggggttcccaagttc

SEQ ID NO: 791 - DNA, 1111 bp, Zea mays
  Clone ID: TF_ZmC25151_2
ctcaacttcgccgcagggatgagtctccaaagctgccgctgccgtctcctcgtgccagtggcagcctcactaggagcgggagcggctcactggaaggtggtgctgtcgcgctgtttgacatggagttctccaatggagagtttactgagtccgagaagaagaaaatcatggcgaatgagcggcttgctgagatagctttgacggatcctaagagggtcaagaggattctggcaaatcggcagtcagcagcaaggtcaaaggagcgcaagatgaggtacattcaggagcttgagcataaggtgcaagtgctgcagacagaggctacgacactctcagcacagttgacaatgctgcagagggactcagctggactggctactcagaacaacgagttgaaaattaggctgcaagccatggagcaacaagcacagctgagagatgccctgaatgaagcgttaacgggcgaggtccagcgtctgaaactcgcaactggggagatgaccgatgggcctatgccgaagggcctgcagcagcagatgaactcccagatgctgcagctccagcagctgcagatccagcagcaggcgcccccacaacagacgcagcagcaaggccagcgacaacagccgcagaagtcggcgtaaagaccgtggctgagaggaggacgcggaagcgaattgagcattggccaaggccaactgaaggatgccgggtgggaaaagaaagaaccccaatcttttgccgtatatatatattatcagacaggttgtaggatagcagcaacagcagtagggcgggcgagggaccccgttggccccgcgcgatttgagttgttttcgccggataccgtaaccttagctggagtctgtcgtcgtcttggtgtcgtgcctgcctgcctagtgttgatgaggcgtcttggtagcgtcccttggaacgccctctcggagccggaggtgcttcttttgcttcttttgtctatatagataattatatgtgcatgggaacctgcgtagtactgcagttattattattatcattgttaatttattaaaaaaaaaaaaaaaaaaaaaaaaaaaaaaaaaaaaaaaaaaaaaaaaaaaaaaaaaaaaaa

SEQ ID NO: 792 - DNA, 780 bp, Zea mays
  Clone ID: TF_ZmC9417_4
atcgcaggcagatagggaaggagaagcggagggcgcgcggtccaaatctgcggggccggaggcggaggcggagggcgagcaagaatgcaggagcagccggcgagctcgcggccttccagcagcgagaggtcgtctagctccgcgcaccacatggacatggaggtcaaggaagggatggagagcgacgaggagataaggagagtgccggagctgggcctggagctgccgggagcttccacgtcgggcagggaggttggcccgggcgccgccggcgcagaccgcgccctggcccagtcgtccacggcgcaggccagcgcgcgccgccgcgtccgcagccccgccgacaaggagcacaagcgcctcaaaagattactgaggaaccgggtgtcagctcaacaggcaagagagaggaagaaggcttatttgactgatctggaggtgaaggtgaaggacctggagaagaagaactcggagatggaagagaggctctccaccctccagaacgagaaccagatgctccgacagatactgaagaacaccactgtaagcagaagaggttcaggaagcactgctagtggagagggccaatagttcagaatgacaggaaaatagtaatgcattatatgctaaacatatgtttatgctcagtggatttggtcagtttgctttgtggccaaaggagggaaccccaaaaactgggggtgaaggatttgtgcagacagtcatatatatcactgtattaatacgaatggttcagaaaaagaagaacttatggagtgc

SEQ ID NO: 793 - DNA, 459 bp, Zea mays
  Clone ID: TF_LIB4744-124-Q1-K1-A3
ctcgaggccggccgcgtcgtcacggcggcgctggccgaggccgaggccgaggcggcgagggacgcggacccggaggacgaggagcggctccggcgtcagcgccgcaaggtgtcgaaccggctctcggcgcagcggtcgcgcgcgcggaagcagcagcggctggaggagctccgcgaggcggcggcgcggctccgcgccgagaagcagcagctggaggcccggctgcaggccctggcgcggcacgacctcgccgtgcgctgccagaacgcgcggctcggcgccgaggcctccgcgctcgcgcgccgctcccgcgaggcgcgcaggctcctcgcgctgcgccgcctcgcgttcgccgccctgcagccgcggcccggcgtcgctcccgcgcccgcgccgccggcgcccctgctgggactggcctcgctcctgacgcatgtggcttggtggggtcgtgctgcc

SEQ ID NO: 794 - DNA, 1399 bp, Zea mays
  Clone ID: TF_ZmC3100_1
tcgcatcggccagctcgtcccgtccgtcacaacactgcagaaccaggtgtccgcgctgtctccccgtgtggcattgctggatcagcagcggaccatactgaccgtcggcaacagccacctcaagcagcggatcgcacgtgttgctcaggacacgagagatctggcgagcgagcgcgcacactgctggcggcaccaggctacgacgatcgagacagccgccgtgccagcacattgtccattgtccgcgcggcgggggatcgggcggacgcgcacataatatggcgcagctgccgcccagggtcccgaccgcggtgcaccgctggccggagggcggccaccacggcgcggcggcgtgggccgatgacttcgccgagttcgctgcgtcgcggcggggcgcgcaccgcaggtccctgagcgactcggtcgccttcgtcgaggtggcgcccgcggccggcgagttcgacaggctcgacgacgaccagctcatgtccatgttccccgacgaggccgccgccggcggcggcggcggcgggtcgtccgcggcagggtccgagaacaacggcggcagcagcgacagttacggcgataggcgcggcggcggtggccctgcggcgggaggcaccagcaccaccaccagctgcaatggcttcgatggtggcgagcacaacgaagccgcggacgcgcaggcgacggggcaagctgccgccgccgccgccgcctccacggagctgatccgggaccccaagagggtgaagaggatccttgccaaccggcagtcagctcagaggtcgcgggtgaggaagctgcagtacatctccgagctcgagcgcagcgtcacaacactgcagaacgaggtgtccgcgctgtctccccgtgtggcatttctggatcagcagcgtaccatactgaccgtcggcaacagccacctcaagcagcggatcgcagctcttgctcaggacaagattttcaaggatgctcatcaagaggcgttgaagaaggagatcgagaggctgcgccaggtctacgagcagcagaacctcaagatgtcagccggcgctgctgcctctgaccatggcccgccaccggtgcgcgcggagaaagagctcatgagctagctacccagtcgatccacgcgtgcccgctgtgcagtgcagcccgcccgccttatcattaattaacatggagggaacattgcatcatgatttctctttttttcggattatgtggatgttttcttctttctttctttcttcttccattgacacgtgtgcgttaattctttgtatgttgattttgggatttggttcactgtgcaaattgtggtaaagtcatcagggaaactgatctgttgtgtaaatcacttttttgaagcattacattcctgggaatctggttaccc

SEQ ID NO: 795 - DNA, 1239 bp, Zea mays
  Clone ID: TF_ZM3393.C1.o2.fg
atggcgtccgagatgagcaaaaacgtgaaggccctcgacgagcaggaggtcacctcgcagcactcacgcgcccagaccagcgacgctgccgaggagcagcagcagcaacagcaggcggtggacccgctggcgcggcagtcgtccattatgtcgctgacgctggaggagctgcagaactcgctgtgcgagccgggccgcaacttcggatccatgaacatggacgagttcatggccaacatatggaacgccgaggagttccaggccgccacagccggctgcaacaaggagggcgcggagcgtgagccggtgcccgtggcgacgacgacgggcacaggtgagaacggaggaggaggaggaagtgggaggggactggttcggcagggttcgttcgcgctgccgccgccgctgtcccggaagacggtggaggaggtctgggccgagatcagccagggcccggcggacttccaggccagcgcggcgccgcagcccgtggcgcagccccaggcggcgagcggcggcggcgtcgcggccagcgggcggcaggcgacgctgggcgagatgacgctggaggacttcctcgtgaaggccggcgtcgtgcggggcgccttcgccggccacggccacggcgtcggcatggtcccggccggcccgatgggcatgcagcacaacgcggctcctcccatgatgtaccaggtggcggcagcggcggcgccgccgcccggcgctgtatacccggtgatgggcgacggcatggggtaccacggcggcgggtaccccgggggcgtggcggtggtgccgcccccgccgccgtctcagtgcgtggcggccgccgccagcccggggtcgtcggacgggatgagcgccatgacgcaggcggagatgatgaactgcattggcaacggaggggtggtccgcaacggcggcggcggcgcgcggaagcgcgacttccccgaggacgggtgcaccgagaagaccgtggagcgacggcagcgccgcatgatcaagaaccgcgagtccgcggcccggtcacgcgcccggaagcaggcgtataccgtggagcttgaggctgagctgaaccatctcaaggaggagaacgagcgcctcagagcagaggagaggacgattctgctgtcgaagaaaaagatgctggtggagaagatgatggagcaggcaagggagaatgtgagcgccaagaaggtcggtcccggactgcgccggtggggcagcgccatgtggtga

SEQ ID NO: 796 - DNA, 2444 bp, Zea mays
  Clone ID: TF_ZmC2896_1
ttgggtacctcgaggccggccgggagtgatgcaccgctgcacacgccacacgggcacggcgccttcgtctccaacacggcgactaattaaccccactgattccgacgaccgagctcccccacactttttcctggcaaaccctgcacgcctccgcaaccgcaaccgcgtcgtcggcgtgcgcgatcccgagaggcccagccatcagcttccttggcggggtgtgtatgcgcgtacgtcggccgtgaccagatcggctgagccaaggccatggcggaaccggccctcctcgcgccggaccccttcgcggacctccccttccccgaatttcaggcgcccatcgacggcgacagcttcgcgctcgaggacttcgatctggaggatctggacctggacgtggacttcgacctcgacctcttcgcctcggacgggcaaccctcgcaaccgcccccgctcgcgacctcgtcctcctcggccgggtctccggttggaggctcgtcctcttccggtgccgtcggggacggcggagggctgaggaatgaggagtcttcggagtcgtcttcgaggagcgcgagcggcacggatggcagcggcaaggggaagggggaggaggacgaagcgaagcggcgcgcgcggcaggtacgcaaccgcgagagcgcgcacctgtcgcggcagaggaagaagcagtacgtggaggagttagagggtaaggtgaaggccatgcaggccaccatcgccgacctctccgccaggatctcctgcgtcaccgccgagaacgccgctctcaaacagcagctgggtggcgctgctggggccgcgccgccgccgatgccgatgtaccccacgatgtattctttgccgatgccgtggatgcacccatcgtatcccatgcgtggatcgcaggtgccgctcgtgccaattcctcggctgaaacccccgcagcctgcatctgctgtagcagagccaccggccaagaaggctaggaagaccaagaaggttgcaagtgttagtctcctggggttgatttgcgttgcaatgctttgtgggtgtttgattcctgcagtaaatcggatgtatgactctgttgatgctggagaaggtgctgcatacggtccatctcatcgtgggagggtgctggctgttgaggggcctcatgataatgtttcagatggtgtcgatccaaagccgccacagcgtgccagtgagacgcttccagcactgttgtatctaccaaagaatgggaagcatgtcaagattaatgggaatcttgttattaagtcgattgttgctagtgagaaagcttcattgcagatgtctggcaatgatgggaagcgtcctcaaaaccaagaggaggagactagactggcaattcctggctatgtgactccattgaaagctggagaggttatggaatcaaccgaaggaatgatgaacaatgaactgttggcgttagctcctgcagatggaagcatgtatagggaggaggatggattgctgccacagtggtttagtgaagcaatgtctggccccctgctgagctcaggaatgtgcactgaagttttccagttcgatgtgtccccatcatctgctcatccaaatggcatcattcctgtctattccaatgccatgtcaaactcgtcacagaacttcactcaagatcttccccctgctcgtgttcgcacggtcaagaacagaaggatttcgtactccgaggccattcctctgagaggttcaacatccaacgacactgagcacctcaagagctttggcagtacgaagcctgtttcgtcagtggtcgtctctgtgctggctgatcccagagaggctggcgatggggatggtgagggaaggatctcttcaaaatcattgtcccgcatcttagttgtcgttcttatagatagtgttaagtatgttacgtactcttgtgtcctgccgttcaaaagccatagccctcacctttaggtctgggttttggacgtgagttgataaagctgacctatacattttatagcagaagaggtgtaagacagctgcctttgttcatttattcaagttttgtgtgctcaaaaaaaaaaaaaaaaaaaaaaaaacaacgacactgagcacctcaagagctttggcagtacgaagcctgtttcgtcagtggtcgtctctgtgctggctgatcccagagaggctggcgatggggatggtgagggaaggatctcttcgaaatcattgtcccgcatcttagttgtcgttcttatagatagtgttaagtatgttacgtactcttgtgtcctgccgttcaaaagtcatagccctcacctttaggtctgggttttggacgtgagttgatagagctgacctatacattttatagcagaagaggtgtaagacagctgcatttgttcatttattcaagctttgtgtgctccatgatgtaaaaaaaaaaaaaaaaaaactcg

SEQ ID NO: 797 - DNA, 2186 bp, Zea mays
  Clone ID: TF_ZmC13853_5
ttgggtacctcgaggccggccggggcatcattcgcaatctcaggtcacggaactctatccactcgtcagcaccaagctagctagtactcgtgcccttcggacgagaggcgcatgtgactcggtaaggaggaggagggtggagatggaattcaagaactgcgggtcgtcgtcgcagccccggccggcggtggtagtgggcgaggcggcgttggcgagacagggatcagtctactcgttgacgttcgacgaattccagagcgcgctcggcggggccgccgccggcggtggcggtggcggcagcatccccaagggtttcggttccgtgaacatggacgaactgctccggagcatctggaccgcagaggagacccaggccatggcctccgcttccgctggagcgggtgcggggatgccccccacgccgctgcagcggcaagggtcgtcgctcacactgccccgcacgctcagcaccaagacggtcgacgaggtgtggcgcaatctcgtgcgcgacgaaccgccgcagggggcggacggcggcgggcaccagcagccccaccgccagtcaacgctcggggagatgactctggaggagttcttggtcagagctggcgcggtcaaggagaaccccgcttctgctcctccagcgccgccacccatggtgccgccgcggccggtacctgttgcccctaaaagctccgccttttttggggatttaccgggtgccgacgacgacgcagctacggcagcggtagggtttgcaccggtcggcatggtggatctggccctgataccgcccagggcggcaggcatgggaggcagcgccatggctgtgcaaacagcggtgagccagcttgattctgtcgggaagggatacagcgacctgtcgtcgctgacggagccgcaaactttttcgtttgaaagaatgattcgggggagaaggcatggaggcggagtggagaaagtggtggagaggcggcggcggaggatgatcaagaacagggagtccgccgcgaggtcccgagcgcgcaaacaggcttatacaatggagttagaagccgaagttcagaaactcagagagcagaatcaggaactggagaggaaacaggcagaaattatggaaatgcagaacaacgaggtatcagaaatgttgaaggatccattcggacggaagaaacggctgtgcttgcgaagaacgttgacggccccctggtgacgattgcctagaacagcacatgacttgcacttgctacgtacctgcaggggcgtttgggatctgtagataatttctctcctatagtgtagcgatgaacccatgaacatgaacgtaatctaaatgattgtactgttagctcccttctgccgcttacgtagtactgcagtaccgtagtggtggagtcgaaaactgacatgtaaattatgtacgtagtagagaacaaaatggagtgaagccggtcgcaagagttgtggcttcagtcatcctccagagcttgtgcagagttgcctaggttttgcatcttgctggcacatccagagcttgtgcagagttgtctaggttttgcgaaaaccctagcttggtgtcgcctcaccagcttgccaaatctctaaccctaggtgcagcggaggagatggcccccaagcgctcggctccacctccgccgcctccgcccccggatgcctcctccgagagagaccgcctctggttcgatctccgaggaggatgaggaggaggatgaagaggtggtggtcttatcaccagtggttttgaaatgtagtcagaagcttgcaacactcaaatataatctactacttattgtggtcaacagttgttaatatgtttatcgccttatcggggatagacttgtgaaaccatgctacctcactctggcaaaggactgtaacttagtcctttgcaatggaatgagcaaagaaaagatccaaagaatattgcgtttatggaagcaacttgataggttctgttacatgctaggctgctagctaatccatttgtaccagacatctgtaatcgctccatatttttttgtatttcctagatttgtctagaatcttacatttatcattgcatgaacgttcattttgtgctacatagcattcatttatctttttttttttcccgggatatatatatcaatcaaaatggtcctgggatatccagcgttctaaatcgc

SEQ ID NO: 798 - DNA, 1442 bp, Zea mays
  Clone ID: TF_ZmC5008_1
tacctcgaggccggccgggggtaccgccggacagggccaacacgtcccaaaaaaaaaacatccacccttcccctttctcttcgtctccgtccgctcccggcatcgtcccctcttccccgtctcgcggtcgccgcccacgggcttcgattgatcttcttccggtgctggtggcaggtggacggatcgtgtccttgcttggccgcccacagcagcaatggacgacggggacctggacttctccaacccggacacgtacctgtgcccggcgctcggcactgacccgcccagcagctgctccatggacagctacttcgacgagatcctcaaggacacggagcaccacgcctgcacgcacacccacacctgcaacccgccggtgcacgacctatcgcacacccacacctgcgtccacgtccacaccaagatcgtcgcggcctcgcccggcgacgacactgccgactcgccgtccgagaacaacaccaacggcagcggcggcaacggcagcaacgccgcctccaagaagcgcccctcggggaaccgcgccgccgtcaggaagtaccgggagaagaagaaggcccacaccgcgtcgctggaggaggaggtggtccatctcagggcgctcaaccagcagctcgtgaagaagctccagagccacgccgcgctcgaggcggaggtggccaggctccgctgcctgctcgtcgacatcaggggcaggatcgagggggagattggcgcgtttccgtaccagaggccgccgccagcggccaagaacgtcgacctcgtgtccggtgttgaccaaggagggttccttgccggggctgctgcccaggttaccagttcctgtgatttcagatgcaacgatcaaatgtactgcagccctggaatgcagggcgctgttggcggccaggtgttgggacaaggtgcctgtgatgtctcgagtatccaatgcgttggaagcaccaggtctgcgtccactaagctacctgtctgcggggggatggatgcagtacctgctgcctgcttgccaaatgttcaaaacaagtgatggattatataactgaagaagagtataactcggctctcttgtcgccgagccattgttttgtggttccattggtttcctgctgtctggctgaatgcaattttgagtgaattgccatctaattgtcaacgatgaagatcagatttgcttctgtcccatcttgtcaatccagagctagacttgctcttgtctattttcagctggatgtcttgtgccccttttaaaggcattgctagtcttgttgacacaccagaaactaagatgctctgtatgaatcaactggctgtttattctctgagatttgagaaaaattcttattagccttcttaagtctatttatcatgattattgtgtaatcatggtgtatgttgttgtttattcattttgctgtggcctattc

SEQ ID NO: 799 - DNA, 1674 bp, Zea mays
  unsure (1)..(1674): unsure at all n locations
  Clone ID: TF_ZmC5008_3
cattgggaccctcgaggccggccggggtccagattcatccaccctccccctttcccttcgtctccgtccgctcccggcatcgtcccctcttccccgtctcgcgttcgtcgcccacgggcttcgattgatcttcttccggtgctggtggcaggtggacggatcgtgtccttgcttggccgcccacagcagcaatggacgacggggacctggacttctccaacccggacacgtacctgtgcccggcgctcggcactgacccgcccagcagctgctccatggacagctacttcgacgagatcctcaaggacacggagcaccacgcctgcacgcacacccacacctgcaacccgccggtgcacgacctatcgcacacccacacctgcgtccacgtccacaccaagatcgtcgcggcctcacccggcgacgacactgccgactcgccgtccgagaacaacaccaacggcagcggcggcaacggcagcaacgccgcctccaagaagcgcccctcggggaaccgcgccgccgtcaggaagtaccgggagaagaagaaggcccacaccgcgtcgctggaggaggaggtggtccatctcagggcgctcaaccagcagctcgtgaagaagctccagagccacgccgcgctcgaggcggaggtggccaggctccgatgcctgctcgtcgacatcaggggcaggatcgagggggagattggcgcgtttccgtaccagaggccgccgccagcggccaagaacgtcgacctcgtgtccggtgttgaccagggagggttccttgccggggctgctgcccaggttaccagttcctgtgatttcagatgcaacgatcagatgtactgcagccctggaatgcagggcgctgttagcggccaggtgttgggacaaggtgcctgcgatgtctcgagtatccaatgcgttggaagcaccaggtctgcgtccactaagctacctgtctgcggggggatggatgcagtacctgctgcctgcttgccaaatgttcaaaacaagtgacgttactggactgctgtgagtcgttggtagaatttgttaatgaatgttcgtactgctcagatcttgcaatggaacttattcaagaaaaaaaaacaggatatgatgtcttattcttcaaatagtcctaaggactcccggcagtgtttatggtcccttccttttcagagactgctgggacttcccgttctgcctcgaaggaacgctgtataaaccgctagcttttctatgtagggccgaatctggttcaaactgctacgtgtgtgagttcgtcgtcgccgatgatgcttctatagtgcctgaggcgattcaagtttgttagctctagagctgataggatatcctcgtttactttgcttagttctcagatgctctccgtctccgatgaagtgcagcaactgaaccggatccgaaggagttggacatgaacaggttaaaatttggcatatgtggtctaagaagacgctgagatgtttgtagcgaatctcaagttcaatgcgaaccctgttgcctatgtnaaaaaaaaaaaaaaaaaaaaaaaaaaaaaaagaagaagaaaaaaaaaaaaaaaaaataaaaaaaaaaaaaaaaaaaaaaaaaaaaaaaaaaaagaaaaaaaaaaaaaaaaaaaaaatagaatgggggcccccccccc

SEQ ID NO: 800 - DNA, 1486 bp, Zea mays
  Clone ID: TF_ZmC5008_4
cctcgagccggcgggactgttcgttacatcccattggtgagtgggtgggtgggtgcctgggtggtgaggactggactcgttcggctcgggattcccctccgccgcctacgcgcccaacacgtccccgtccagattcatccacccttccccttcgtctccctccctccatccaatccaccccctctcccccttctcgtcgtcgccgccgccgccgcccatccggggcttggactgtcctttccccgttctgctggtagcagcaatggacgacggggacctggatttctccaacccggacacgtacctgtgtccggccctcggcaccgacccgcccagcagctgctccatggacagctacttcgacgagatcctcaaggacacggagcacctcgcctgcacgcacacccacacctgcaacccgccggtgcacgacctctcgcacacccacacctgcgtccacgtccataccaagatcgtcgcggcctcgccgggcgacgccgagtcgccgtccgagaacaacagcaacggcagcggcggcaacggcagcaacgccgcctctaagaagcgcccctcggggaaccgcgccgccgtcaggaagtaccgggagaagaagaaggcccacaccgcgtcgctggaggaggaggtggtccatctcagggcgctcaaccagcagctcgtgaagaagctccagagccacgccgcgctcgaggcggaggtggccaggctccgatgcctgctcgtcgacatcaggggcaggatcgagggggagattggcgcgtttccgtaccagaggccgccgccagcggccaagaacgtcgacctcgtgtccggtgttgaccagggagggttccttgccggggctgctgcccaggttaccagttcctgtgatttcagatgcaacgatcagatgtactgcagccctggaatgcagggcgctgttagcggccaggtgttgggacaaggtgcctgcgatgtctcgagtatccaatgcgttggaagcaccaggtctgcgtccactaagctacctgtctgcggggggatggatgcagtacctgctgcctgcttgccaaatgttcaaaacaagtgacggactcccggcagtgtttatggtcccttccttttcagagactgctgggacttcccgttctgcctcgaaggaacgctgtataaaccgctagcttttctatgtagggccgaatctggttcaaactgctacgtgtgtgagttcgtcgtcgccgatgatgcttctatagtgcctgaggcgattcaagtttgttagctctagagctgataggatatcctcgtttactttgcttagttctcagatgctctccgtctccgatgaagtgcagcaactgaaccggatccgaaggagttggacatgaacaggttaaaatttggcatatgtggtctaagaagacgctgagatgtttgtagcgaatctcaagttcaatgcgaaccctgttgcctatgtatattcacatcc

SEQ ID NO: 801 - DNA, 1885 bp, Zea mays
  Clone ID: TF_ZmC7838_2
aattcggcacgaggcttccttcctcggcagcagcagcagatgcgccagcatcgctcccaccgcccaccggcagcaggaggagcgacaagtacagtgacacggacagagagagagggagagggagcccatcacagcgcctacactagctagccaccgcccaccaggccgccaccaccgatcgaatcgggtgcgtgctgctcctcccggccggccgcccgctcgctcgctcgctcgctttataagccagccacccagccccgcccgatcgtcatctccatagccccgtatccgtccacgcacacccgccttgccaccagccagcactccccctcaacccccggcctcgccgccgccgccgcaccccccacacccgctgccgcgcaggccggttgctccgattgggagtgccaatcggagccaacagcagggggaagcacatgctgccgttcgcgcgccctagagttcctcattgatgtcgcctgtgatcagtgagatcctcctctcggggtttatgatcaactccacactccggcgccgcacccacctcgtccagtccttctccgtcgtcttcctctactggttctatgtcttctcataaactactcgcccccgtcaccgccacgcccctctcctcctccccgtccctgctgccttcttctcctccttcttcccgttccatctagtagcatccaccgtcaccctcttctcgtttcttctgcccagtctctgccttcttcttcgtcgtcgtcgtctcggtttcagtcgtttcctaaaactttaccttgcatgcacttccctactactgctgctgctagcgaagacctttattagttattagtagtgttaagttattaccaacaagaagcagaaagaaagaaagaaaaaagggatcaagaagcagagagctgttctgttcttttttttccccccctctcttgcaagaaagggcggttcttgcgcggacggaacgcaggaacaatggcttcctccagcgggagcgggagctcgggcttcctctcggcggcactggacgcggcggcgacggcgggaacggaggaggagctgcgcgcgctcatggcgcagcgccgcgccaagcggatgctgtcgaaccgcgagtcggcgcggcggtcgcggatgcgcaagcagcgccacctggacgagctcacggcgcaggccgcgcacctgcgccgcgagaacgcgcacgtggccaccgcgctcgggctcaccgcgcagggcctcctggccgtcgacgccgagaacgccgtcctccgcacccaggccgccgagctcgccgcgcgcctcggctccctcaacgacatcctcgcctgcatgaacaccaccaacgccgccgccgcctcctccgacccttacctcgccttcgacggcgcggccaccgccttggacgacctcctcaaatcctgccccgacagcatgatgttcgagtaccagctctgctagctcgggaccgaagtcgccatggacagcacaaagcatcgagaggagggaaaaaaacatttttttttttttgctgctggtgtttcaggttagtgatctgctagtgagatggaactgaagggcagatcagacgtggcggtgagccatgaaactaccgtcagctgtactgtgctatcaactgggggtgggaaaaaaaacccagctgggggctggggcactgcacctaattagctagctagatgatgctggggttatggttaatgaactactacttactactaattaccaggtgcaagtgtaactcgaggtctgatctgctttcgtgtactgtgtcactccactccaactgtgtagcaatcagagcagtaaccttactagtatctctgttcaaacaaaggaagtgcaccatacaatctacattttaaccgcg

SEQ ID NO: 802 - DNA, 1300 bp, Zea mays
  Clone ID: TF_ZmC2202_1
tccggatacaacatttcttaatgcttgtcgggaaggccacattgctcaggctgctcccaactcccatcctccccctcccggagtacgaagtactagaaagagagcggctttcctctaagaatggcgggtggcggcgccggcgacgacgacgtggtggtggtgagctgcggcggcagaggcggcggcgaccccggcgcatacgccgcggtgctcaagaggaagctcgacctgtactgcgccgccgtcgccaaatccatggaagctaaatcacaagaacattcgttgggctaccccaactcacaagcttcagatgcttcgcaattgatttctcaagcttcctttgatggtgacatagatggggcaagcctagttacaaactctaatgtcatagaagatgatgattttcaaggcaagccaaccaacagtggcacatcaaaggaactgtcagacgatgatggtgaccttgaagagaatactgaccccgctaacgccaagaagatgaggagaatggtgtcaaaccgggaatcggctaggcgatcaagaaagaggaagcaagcacacttgaccgatcttgaatcacaggtttccaggttaacgtctgagaatgcatctttgctgaagcgactggctgatatgactcagaaatacaaggacgcttccgttgacaataaaaatctaacagttgatgttgagactatgaggagaaaggtgaacatagccgaggaagctgtcaggaggctaactgggatcaccctcatgctaccgaccgcgtttgagaagcccgcgagcagcgcgcccctgtcatcatgtccatctgatgcagcttctgcttctgcttctgccgccattgaagacagcgtgaagcatttcctccaggcgccacttgaaaacagtgggatcatcccaaacgcagcagtttttcagaccaagccagcttctctgcaccgtgttgctagcctggagaacctgcagaagaggatcgtcggggatgcaatgtattccgagaccgcgtcaacgacattctcagatcctgaagctcttgccgataggtaaaggttgctcctgttctgtcctgtgatgaacagccgtgtgatgctctagcggcctaagtgcttctggtaatggaagttgtagcacccatgcgcctgggtggggtctacacagtgatttgtacactattttgaaggttaataataattgttgagaaatgatctcatccctttgtacctatataagtaaagtattccattaataaagagaatagagttttcactcttcaaaaaaaaaaaaaaaagcggcc

SEQ ID NO: 803 - DNA, 2374 bp, Zea mays
  Clone ID: TF_ZmC2202_2
gcgtccgatgaggagaaaggtgtgaggagttgtaaaacgaaacaaaacattaaaagcgcacgtgccatgcccaaatgcgggggggtgtgtcctattaagcctgtggggcttttctcttggtttgtcttggtgatgggctgaaactaaattaaatgatactgagaggagtgcaaactgaatactaccatacaaacatttattaatgcttgtgtggccggggctcaggctgctcccaactcccatcctccccctcccggagtacgaagtactagaaagagagcggctttcctctaagaatggcgggtggcggcgccggcgacgacgacgtggtggtggtgagctgcggcggcagaggcggcggcgaccccggcgcatacgccgcggtgctcaagaggaagctcgacctgtactgcgccgccgtcgccaaatccatggtgacatagatggggcaagcctagttacaaactctaatgtcatagaagatgatgattttcaaggcaagccaaccaacagtggcacatcaaaggaactgtcagacgatgatggtgaccttgaagagaatactgaccccgctaacgccaagaagatgaggagaatggtgtcaaaccgggaatcggctaggcgatcaagaaagaggaagcaagcacacttgaccgatcttgaatcacaggtttccaggttaacgtctgagaatgcatctttgctgaagcgactggctgatatgactcagaaatacaaggacgcttccgttgacaataaaaatctaacagttgatgttgagactatgaggagaaaggttcgttcgtcttgaatgcatcacagacctttttcttctttttgttgtacgagaactcttaactgcatccatttatcgatcataacatttttactgggctctgcgtatactcaccgtaatcaacgtttacatctctctagatggctgcaaagggcagtgaaagtaatatgattgctcatagttcttattttagaacctgcaagtacagttttagtttctaatggtttttaactgcacccaaaaggtatggcagcattttcatttgattctctgacattctgcatacattctgagagaggtgaacatagccgaggaagctgtcaggaggctaactgggatcacccttatgctaccgaccgcttttgagaagcccaggagcagcgcgtccctgtaatcatgtccatcttatgcagcttcagattctggttctgctgccagtgaaaacagcgtgaagaagttcctaaaggctcaactggaatacagttcggatcatccacaacgaaccagatcctcacaccaagcgcgcttctctgcaccgtggtgtcagccgggagagcctgcacgcggcgggtcgtccgggatcgacatcaaactgaccctgaagcatcacataccagcgcgcattgcgcccagtgtgagtcccattcatcacgcggggcttttgctgaccaagccagtgtggatggactgctctatctccaatgataccgagaggagtcggaacagaatactaccatacaaacatttcttaatgcttgtgtgtgagtatatgcacaactctgtactcttgtatcattagtaaaactgtgtttttttaaatatccatgctgaagggttctaacataatcatgttaagtttttatgaaaaaaatttgcttaaactatgactgttccaatcagttttttacctaaagaaggtattcacaagaatcttggcatttaacagacctgcacaccttgactttatgaaaagggacatgtcttcaggaacacagtactgttttaattccaggtgaacatagccgaggaagctgtcaggaggctaactgggatcaccctcatgctaccgaccgcttttgagaagcccacgagcagcgcgcccctgtcatcatgtccatctgatgcagcttctgcttctgcttctgccgccattgaagacagcgtgaagcatttcctccaggcgccacttgaaaacagtgggatcatcccaaacgcagcagtttttcagaccaagccagcttctctgcaccgtgttgctagcctggagaacctgcagaagaggatcgtcggggatgcaatgtattccgagaccgcgtcaacgacattctcagatcctgaagctcttgccgataggtaaaggttgctcctgtcctgtgatgaacagccgtgtgatgctctagcggcctaagtgcttctggtaatggaagttgtagcacccatgcgcctgggtggggtctacacagtgatttgtacactattttgaaggttaataataattgttgagaaatgatctcatccctttgtacctatataagtaaagtattccattaataaagagaatagagttttcactcttcg

SEQ ID NO: 804 - DNA, 1025 bp, Zea mays
  Clone ID: TF_ZmC2202_5
gaggccacttgctcagctgctcccaactcccatcctccccctcccggagtacgaagtactagaaagagagcggctttcctctaagaatggcgggtggcggcgccggcgacgacgacgtggtggtggtgagctgcggcggcagaggcggcggcgaccccggcgcatacgccgcggtgctcaagaggaagctcgacctgtactgcgccggcggcgccaaatccatggaagctaaatcacaagaacattcgttgggctaccccaactcacaagcttcagatgcttcgcaattgatttctcaagcttcctttgatggtgacatagatggggcaagcctagttacaaactctaatgtcatagaagatgatgattttcaaggcaagccaaccaacagtggcacatcaaaggaactgtcagacgatgatggtgaccttgaagagaatactgaccccgctaacgccaagaagatgaggagaatggtgtcaaaccgggaatcggctaggcgatcaagaaagaggaagcaagcacacttgaccgatcttgaatcacaggtttccaggttaacgtctgagaatgcatctttgctgaagcgactggctgatatgactcagaaatacaaggacgcttccgttgacaataaaaatctaacagttgatgttgagactatgaggagaaaggttcgttcgtcttgaatgcatcacagacctttttcttcttttttttgttgtacgagaactcttaactgcatccatttatcgatcataacatttttactgggctctgtgtatactcaccgtaatcaacgtttacatctctctagatggctgcaaagggcagtgaaagtaatatgattgttcatagttcttattttagaacctgcaagttcagttttagtttctaatggtttttaactgcacacaaaaggtatggcagcattttcatttgattttctgaaattctgcataccttctacaagtgtgataggaataatttagttccttggttttgttttcttgcagtatcatttc

SEQ ID NO: 805 - DNA, 353 bp, Zea mays
  unsure (1)..(353): unsure at all n locations
  Clone ID: TF_jC-zmX148064Q1E1B1b1
cccggaggacgnccggggcgggcggggactaataggcggacacccacaggcccccgaagcgccggatggcgaaccgcgagacggcgcggcggacccggctccggaagcagcagcaccaggacgagctggagcaggaggtggcgcgcctgcaggccgacaacgcgcgcgaggcggcccgcgccgccgacagggcgacccagaacacccgcgtcgagcaggagaacaccgggctccgggcccgagccgccgagctgggcgaccgacgtcgctccgacaacgaggtgctgccgcctcgcgaggagttcagcggcgtcgccatggacaagcaggaggagatgccggcggacgacccg

SEQ ID NO: 806 - DNA, 950 bp, Zea mays
  Clone ID: TF_ZmC773_10
gcccccaccgacctcctttgtctccccctcgcccagcgcccacctcttccgtcctcctgtttcccgtcccgcacagcgctacgcacacagactatttctctctctctctcgccctctatcgctcgtccgatctgcatctgcttttcttcccccctccgcgtgtcccctgtcccttccggcgtgcgcgaagatttgattttttttttgtcggggagaaggcggagtaagacagaccaggccgggaggaaggagatcctgatctgttcttggagtggggaggcgaggagaggagaggaggaagatggcggcgcaggagcacgagcacgagcacgagcacgagaagcagcaggcgaagacgagcaccacgagctcgctcccctccagcagcgagcgctcctccagctccgcccccaacaaccttagggaaggaggtaggtgccgctcccgcgcccatcccacgcaccgcccaccctctcagatctcctgcaccatctctcgtttcgtccgcaagccccttagctgaagctgccggcgcaggcgtggagagcgacgaggagatacggcgggtgccggagctgggcggcgcgtcggcgtcggcgtcggcgtcgtcgggcgcgggcaaggaggacggcgcgcgggcggtggccgcgggggcgcaggggcaccctccggcggccgggaagaagcgcggccgcgccccgggggacaaggagcagaaccggctgaagcggctgctgcggaaccgcgtgtcggcgcagcaggcgcgggagcggaagaaggcgtacctgacggagctggaggtgcgggccaaggacctggagctccgcaatgcggagctcgagcagcgggtgtccacgctccagaacgagaacaacacgctccgccagattctgaaaaacacgacggcgcacgccagcaagaggagcggcggcggcggcggcaagggtgga

SEQ ID NO: 807 - DNA, 837 bp, Zea mays
  Clone ID: TF_ZmC3503_8
cggacggagacctctccttctccgacctcgacttcccctccctctccgacgactccccggccgcctccgacccaaccccgcccccgccgctgccgcagccggccccggccccccgcccggccggcggggcccacacgcggagcctctccctcgacgccgccttcttcgagggcctcgcgtttcagggacccagcgggagcgccgggggtgggcccgggcacaagaggagcggctccatggatggggccacctcaccgtttgagggcgagtcggcgctctccagcggcctgccggactacgccaagaaggccatgcccgcagagaggatcgccgagctcgcgctcatcgaccccaagcgcgcaaagaggattctggcgaacaggcagtctgcggcgaggtccaaggagaggaagatcaagtacaccagtgagctggagaggaaggtgcagacgctgcagacagaggccaccacgctttcggcacagctcacgcttcttcagagggacacctctggtttaaccactgagaacagggagctgaaactccggttgcaggccatggaagaacaagctaaacttcgagatggtatgtccttgtctttctttggaaggtctaaagccactgtcatataaggcccagaaagagactccacttttcctgtttcaagaacattacgaggcaaatgctctaaatgatgccttgagggaagaagtccagcggcttaagatagccgcagggcaggtccccaacatgaacgggaatcccttcaatggaggactatcacagcagcagcaggtgccaagctattttttacatacacagcagatgcaatacttt

SEQ ID NO: 808 - DNA, 1287 bp, Zea mays
  Clone ID: TF_ZmC947_1
atggcgtccgagatgaccaagaacgtgaaggccctcgacgagcaggaggtcacctcgcagcactcacgcgcccagaccagcgacgctgccgaggagcagcagcagcaacagcaggcggtggacccgctggcgcggcagtcgtccattatgtcgctgacgctggaggagctgcagaactcgctgtgcgagccgggccgcaacttcggatccatgaacatggacgagttcatggccaacatatggaacgccgaggagttccaggccgccacagccggctgcaacaaggagggcgcggagcgtgagccggtgcccgtggcgacgacgacgggcacaggtgagaacggaggaggaggaggaagtgggaggggactggttcggcagggttcgttcgcgctgccgccgccgctgtcccggaagacggtggaggaggtctgggccgagatcagccagggcccggcggacttccaggccagcgcggcgccgcagcccgtggcgcagccccaggcggcgagcggcggcggcggcgtcgcggccagcgggcggcaggcgacgctgggcgagatgacgctggaggacttcctcgtgaaggccggcgtcgtgcggggcgccttcgccggccacggccacggcgtcggcatggtcccggccggcccgatgggcatgcagcacaacgcggctcctcccatgatgtaccaggtggcggcagcggcggcgccgccgcccggcgctgtatacccggtgatgggcgacggcatggggtaccacggcggcgggtaccccgggggcgtggcggtggtgccgcccccgccgccgtctcagtgcgtggcggccgccgccagcccggggtcgtcggacgggatgagcgccatgacgcaggcggagatgatgaactgcattggcaacggaggggtggtccgcaacggcggcggcggcgcgcggaagcgcgacttccccgaggacgggtgcaccgagaagaccgtggagcgacggcagcgccgcatgatcaagaaccgcgagtccgcggcccggtcacgcgcccggaagcagactcggtctcggtctgctcctggaatgatgccgatgctggtgcaggcgtataccgtggagcttgaggctgagctgaaccatctcaaggaggagaacgagcgcctcagagcagaggagaggacgattctgctgtcgaagaaaaagatgctggtggagaagatgatggagcaggcaagggagaatgtgagcgccaagaaggtcggtcccggactgcgccggtggggcagcgccatgtggtga

SEQ ID NO: 809 - DNA, 1591 bp, Zea mays
  Clone ID: TF_ZmC191_2
cgggattacaaaaaaaaaaaaaaaaaaaaaaaaaaaaaatccgggctcttctcttccaccaaaccaagtgcggccagagaaatttctcccaaatttcagatcaaatcctcgaaatctccgacacctagccccccggagacttctcctcaacagtgtcgcgatccgtctcgatccggcatggagcgcgtcttctccgtggaggagatccccaacccctactgggttccgccgcaccctcaatcggcggccgccggcgctgttgctgcaccagcgggggaggcggcggggctgatgaaccggtgcccgtcggaatggtacttccagaagttcctggaggaggccgtgctcgacagcccggttcccgtagccggcgccagtaggggcagcgttggagctggagttgaggctgcggagagcaagacaccgggggccgcggcgccggcggctgcctcgagctcggttgttgaccccgtggagtacaacgcgatcctcaagcagaagctggagaaggacctcgctgccgttgccttgtggagggcttctggtgcagcacctccagatcattctccagctggttcttccttgccaagtgtggatgttccacacgcaggccctcttaaacccatcggaggtactggaagtctagttcaaaacaagctacctggtgctccaggcgggggatcaagtccacatgtactacaaaatgccgatatccctgttaagcaaaccactagctcttcctcacgtgagcagtcagacgatgatgacatggaaggagatgctgagactactggaaacggaaaccctgttcaacacagattacagagaaggaagcaatccaaccgagaatcagccaggcgttcgagaagcagaaaggcagctcacttgaatgaactggaggcacaggtagcacagttaagagttgagaactcttcgctcctaaggcgacttgctgacgttaatcagaagttcaatgaggctgctgttgacaatagggtgcttaaggcagatgtcgaaaccttaagagcaaaggtgaagatggcagaggactcagtgaagcgggtaactggcatgaacacattgttccctgccgtgtctgatatgtcgtccctcagcatgccattcaatggctccccatctgactccgcctctgatgccgccgtacccatccaagatgacctgaacagttacttcgccaatccaagcgagatcggaggcagcaacggttacatgccagatatagcttcctcggttcaagaggacgacgatttcgtcaacggggctcaggtcgccggcaagatgggcagcactgactcgctgcagcgggtggcgagcctggagcacctccagaagaggatgtgcggaggcccggcttcatcggggtcgacctcctaggttcctactccatcggatatgataaaggccctgatgcccacggcaagaatatgataaattaacagtttcacatactttgtagtggacattgctaatgctgcgatgcgcattcgttcgttgtggacttacgggtctactgctattgatttattgttcgttctccatgtggatctcgtgtgtccatttgacgtgtact

SEQ ID NO: 810 - DNA, 940 bp, Zea mays
  Clone ID: TF_UC-ZMROTEOSINTE106E02_FLI
cttgaaacccatcggagtatggtctggattggatattggacacgtatcaggtactggaagtctagttcaaaacaagctagttggtgctccaggcgggggatcaagtccacatgtagtacaaaatgccgatatccctgttaagcaaaccactagctcttcctcacgtgagcagtcagacgatgatgacatggaaggagatgctgagactactggaaatggaaaccctgttcaacacagattacagagaaggaagcaatccaaccgagaatcagccaggcgttcgagaagcagaaaggcagctcacttgaatgaactggaggcacaggtatcacagttaagagttgagaactcttcgcttctaaggcgacttgctgacgttaatcagaagttcaatgaggctgctgttgacaatagggtgctaaaggcggatgttgaaaccttaagagcaaaggtgaagatggcagaggactcagtgaagcgggtaactggcatgaacacattgttccctgccgtgtctgatatgtcgtccctcagcatgccattcaatggctccccatccgactccgcctctgatgccgccgtacccatccaagatgacctgaacagttacttcgccaatccaagcgagatcggaggcagcaacggttacatgccagatatagcttcctcggctcaagaggacgacgatttcgtcaacggggctcaggtcgccggcaagatgggcagcactgactcgctgcagcgggtggcgagcctggagcacctccagaagaggatgtgcggaggcccggcttcatcggggtcgacctcctaggttcctactccatcggatatgataaaggccctgatgcccacggcaagaatatgataaattaacagtttcacatactttgtagtggacattgctaatgctgcgatgcgcattcgttcgttgtggact

SEQ ID NO: 811 - DNA, 1386 bp, Zea mays
  unsure (1)..(1386): unsure at all n locations
  Clone ID: TF_ZmC2730_1
cccagcgtccgccctgcgtccgcagctagcaaagcagcagtcgagcactccaccatccagcttcgcatcccgcaagttcccagtcagccgagcagccagcggcggtgccaagaaggccgagctgcgagctccactccccacacctcagaagaaaaaggtgatggcgcaactgccgccgcgggcgccgagcgccgcgccgcaggaccactggccgccggcggcgggggagttcctgggcttcgccgcggccaggcgcggcgcgcaccgccgctccgcgagcgactcggccgcgttcctcgaggccgtgcccattgacgacgacgtcgtcattggcggcggcggcggcggcggcgacgacttcgaccgcctcgaccacgaccagctcctgtccatgttctccgacgtcgacgtctccgtctccgtctccgtctccggcagcgccggggagagggcgcagctcatggacgcggggggtgcgggtgcggacgacggggtggcggactcgtcgccggctgccgcggacggcgtcgctgagcccaaaagggtcaagaggatattggcaaacaggcagtcggctcagaggtcacgagtgaggaagctgcagtacatctcggagcttgaacggagcgtcaccagtctccagatggaggtgtcggcgctgtcccctcgcgtggccttcctcgaccaccaccgctcactgctcaccgtcggcaacagccatctcaagcaaagaatcgcggcgctcgcccaggacaagatcttcaaagacgctcaccaagaggcgctggagaaggagatccagcggctgcgccaagtgtaccagcagcagcaggtcaaggtggccaccaccggcggcgccgacatcgccaccgccgcctcgccgtcgatgcaggccaggcaagagctgctcgcgtgcgagggcgctgctattcgatagcggaggcggcggcggcggcggcggcgttcacgcccctgttactgttagtagcttaattaacttttgtgcagtctgatcaatacgtgttggcttgtttgtttgctgcttcttaatttaattcgtatgtgatgtattctgctcaccctagcaaaaaaaaaaaaaaaaatgcatcgatgccaagttgtgaatgaattgtactattcagttatttggaccggcttagtcggaatatagtgagacggagtttgttggtgtgagttatccgttcttaatttattgttgtttagattgattttatttaaaaaaaaaaaaaaaaaaaaaccaagaaaaaaaaaaaaaagaaaaaaaaaaaaaaaaaaaaaaaaaaaaaaaaaananntnnnnaaaaaaaaaaaaataaaaaaaaaaaaaaaaaaaaaaaaaaaataatgggggggggcctttttagg

SEQ ID NO: 812 - DNA, 811 bp, Zea mays
  Clone ID: TF_ZmC233616_1
actgatatggtacctttattgctaccaaatgaactagtttctgtcaatcgttttcaaccattcctgtattttttttttcaagcccacaactggtagtctgataattacaaagcagttcgttcgcccacatctcgcatacacatcatacatggctaatatacacaggccgtagactctgttggtataagattgcttgtgagcaggtaaagagaaggtacaggtgatgttccaaggagaacaacaaggactgatgacgatgggcgatggtgcagctaaatattaaccacctcatctcatctttctgcctcacctagaggtaaaaagcctagctcacggatgccacactccaaaactaccactacccattgctaccagtgttgtttttattaccatgctggtcactgcttctatgatgcgcctttgttgtgtcaatctggatgctcagagtcgtcacaacgctaggcgcctcggactgctccagttcaccaattagctgtgaattctctgcttccatgtcttcacaggccttcttaagctcgtcgagttctgatctgagtgtgccattgacgacggtcaggtcagttaccttctgcgctagttcctcacattcttgctgcttgcgtagccttgatctcctagctgactccctgttagattgttttcttctctcccttttctgttctcgctcatccatcatcgacaaagtgctgccatgatgggaatgcgtcgcagcatttatttcaccctgtccagaggtctctgctttaactggagaaccagtccaaaggtccatcccaatttcaagttcggc

SEQ ID NO: 813 - DNA, 2579 bp, Zea mays
  Clone ID: TF_ZmC3114_1
cattgggtacctcgaggccggccgggggtgctttcctgtgagtattgattgaaaacaaggaaaagctagcagtggctattaggttgtatttgctgattccatttcgaacctcaactgtcatcgataaacgatcttgttttcctcttcgtttcatgctgtcgaccaagttcttggtgacacattttaactgaaccattgtgttgatccacaactggacgacttgagtgttccaatgtctggccattggtctgaagttcactgcactcatctgttaaatagtattgaaagcacaaatagctcttagcttcaagatatcaatacgagttaaagattctagttgagccggccgtactgtgaccttcatgcaaaatttccaattacatggtttggattgccaaggcggggctagagcctagaatatataatgtcaaattaggtatgtaatctaaggtgcctactctcccccagatacagcatataacagtatatgtaagtcaattgtggagcaaagctctcagtacaggaaatatggaagtgttgattccttgttgcatgcataccttgtagtaaaactcctatccttcattcttatgattacgaaataatgttcacacttaccatgtctcatgggccaccggtgctcgctccgcccaggaccagcgggggagcctccagatctcggcgcgccgcgcaggccagcatggcgtcgtcctccgacgagcagtccaagccgccggagtcgcccgccgccgccgccgtggtcaccgccgcagcaccgccacagacgcacgccgagtgggtcgcttcgcttcaggcctactacgctgccgcggggcacccctacgcctggccggcgcagcacctcatggcggcggctgcggcgggggcgcacttcggcacgccggtgccgttccccgtctaccacccaggcgccgccgcggcgtactacgcgcacgcgtccatggccgcgggcgtcccttacccgacgtgcgaagctgtccctgcggtggcgctgcccactggcagaaaattcacgtctattggtgagcgcggtagcgcgtcgcctgagaaaggcgggaatgagcatccagccgccaaggacgcttctaggagcgatgacagcggcagcgatgagtcatcagagacgagagatgatgacactgaccataaggattcatctgcgcccaagaagaggaaatctggtaacacatcggctgaaggtgagccgtctcaagctgctgttgtgcgatatgctgcggttgagtcaccatatcccgcaaagggaaggtctgcctcaaagcttccagtgtctgcacctggccgtgcagcgcttcctagtgccaccccgaatctgaacattgggatggacatttggaatgcttctcctgccttggctgtgcctgcagtgcagggggaagtgagtcctgggttggcacttgcccgacgtgatggcgttactcaactggacgaacgtgaaataaagagggagaggcgaaaacaatctaacagggagtctgcaaggagatctagattacgcaagcagcaagagtgcgaggagttagcccggaaggtagctgacctaacgaccgagaacagcgctctcagagcagaacttgacaacctcaagaaggcttgtcaagacatggaagcagaaaattcacgtctgttgggtggggtggctgacgcccaggtaccaagtgtcacgaccacactgggaatgagcatcgagccgccgaagttgcagctgcagctgcagcagcatcatgatgaggagggccagctccacaagaaatctagtaataacagcaatgggaactgtgctggaggcagccacaaaccggaggctaacactactaggtgagatacagaggtggatgaggaagtgacaaagatgagatgagatgaggtgtttcttatctaaccacaacacccatcatcggtcagtgtgtgtgttttttcttagcgaagctgtcgttttagtcctcgcagcccgctggggccatgtagagtcgcccccactgcagccatgtattatttatggctcgtcgcggtgtgctttgtgtttttttgtgtgttgtgtaaaaactattgatgtaacaaaacctagagagcctagaggttttttttatgtctgctaactcctgacgagggatgtaatgtaaccggccaatttgttgcctgatcgttcgttagatgaaatgctagcaaatgtcactcgataaaaaaaaaaaaaaaaaaaaaaacctcgggctccaaccttgatctttgcgggagtgcgtctaagaaagctgaccgccatagacgacgcccgtattgcttcagtgcgttttcacagcccgctggggggccatgtaaagtcgcccccccctgcagccatgtattatttatggctccccccggtgtgcgttgtgtgtttttttgtgtgtgtgtcgtgtaaacctattgatgtagctattgtaacaaaaacctagagagcctagaatttttatgtctgctaactcctgataaggggggatgtaaccggccaatttggtgcctggtcgatcgtttagatgaaatgcgagcaaatatcttttgtt

SEQ ID NO: 814 - DNA, 829 bp, Zea mays
  Clone ID: TF_ZmC3114_5
tcttaacattgggttggtcatttggcatgcttctcctgccttggctgtgcctgcagtgcagggggaagtgagtcctgggttgtcacttgctcatccacctgtgtatcttacctagtactgttagcctccagtttgtggctggctacaacacagttcccattgctgttattactaaatttcttgtggaggtggccctactgataatgattctgctgcaactgcacttgcttggctgtgcctgcagtgcagggggaagtgagtcctgggttggcacttgcccgacgttatggcgttactcaactgttccttgtttcttcaggacgaacgtgaaataaagagggagaggcgaaaacaatctaacagggagtctgcaaggagatctagattacgcaagcagcaagagtgcgaggagttagcccggaaggtagctgacctaacgaccgagaacagcgctctcagagcagaacttgacaacctcaagaaggcttgtcaagacatggaagcagaaaattcacgtctgttgggtggggtggctgacgcccaggtaccaagtgtcacgaccacactgggaatgagcatcgagccgccgaagttgcagctgcagctgcagcagcatcatgatgaggagggccagctccacaagaaatctagtaataacagcaatgggaactgtgctggaggcagccacaaaccggaggctaacactactaggtgagatacagaggtggatgaggaagtgacaaagatgagatgagatgaggtgtttcttatctaaccacaacacccatcatcggtcagtgtgtgtgttttttcttagcgaagctgtcgt

SEQ ID NO: 815 - DNA, 1506 bp, Zea mays
  Clone ID: TF_ZmC3503_1
ctggagctcacgtttccgggcgcctcccgcaacggccgctagaatgctgtgctaccccgcagtgccacttccacagtccccgcccagccaggtgcaccacgccgccaccacagcctccgccccggctgcgttcacccccgttgacctccgcccgcccggccgccatggacccgcgcttcccgccgccggcgccgtcgtcctgcttcggcgggggcggggagctcccagcacgggggcaccaccggcgggcgcactcggagacgttcatccggctgcccgacgcagacctgctgctggacccggacgccgacttcggcttctccgacatcgacttcccctctctctccgacgactcgcccgcggcgtccgacccgacgccgcagccccaggccccgccgctccagccgccgctgcagcaggcggcttccccggcgtccgcggcgccgccgaggccgccgagcggggcgcacatgcggagcctctccctcgacgccgccttcttcgacggcctctcgctgcagggaggcggcggcggcgggggggtaagagggggcgtggcggggcacaagaggagcggctccatggacggggacacctcgccgttcgagggcgagtcggcgccgccgtccgtgctgccggactacgccaagaaggccgtgcccgacgacaagctcgccgagctcgcgctcctcgatcccaagcgcgccaagaggatcctggcgaaccggcagtccgcggcgaggtccaaggagaggaagatcaagtacaccagtgagctggagaggaaggtgcagacgctgcagacagaggccaccacgctttcggcacagctcacgcttcttcagagggacacctctggtttaaccactgagaacagggagctgaaactccggttgcaggccatggaagaacaagctaaacttcgagatgctctaaatgatgccttgagggaagaagtccagcggcttaagatagccgcagggcaggtccccaacatgaacgggaatcccttcaatggaggactatcacagcagcagcagatgccaagctatttctcacaaccacagcagatgcaatacttcagcggccaccagggccagcatcaccatccgaagcatgacccccagaattcttcaaacggcggtggccagcccttgagtgactccatggatttcatgtgaggactcaggggagacagctcaggagtgttgcctgagatcacataccaacttcaactaaagtaatgtaaatgtagctgatgtataccatattcagtgttatgatatgaaccattgtagtttagctagctgttccttgtaccattaatcaaaagttcattcatggtgacaaacctatcatcgcttttgttctggcgttaaagtaaattggcttgactggttgacgagctgtcgttgtaaagttgttcctgtaacagtgaaggaatggtttgcggttggaacgtggttttccccctgctgaaagccgttgcatttcgtgattggcgtt

SEQ ID NO: 816 - DNA, 1203 bp, Zea mays
  Clone ID: TF_ZmC3503_5
gcggagcctctccctcgacgccgccttcttcgacggcctctcgctacagggaggcgggggcgtggcggggcacaagaggagcggctctatggacggggccacctcgccgttcgagggcgagtccgcgccgacgtccgtgctgccggactacgccaagaaggccgtgcccgacgacaggctcgccgagctcgcgctcctcgaccccaagcgcgccaagaggatcctggcgaaccggcagtctgcggcgaggtccaaggagaggaagatcaagtacaccagtgagctggagaggaaggtgcagacgctgcagacagaggccaccacactttcggcacagctcacgcttcttcagagggacacctctggtttaaccactgagaacagggagctgaagctccggctgcaggccatggaagaacaagctaaactccgagatgctctaaatgacgccctgagagaagaagtccagcggcttaagatagccacagggcaggtccctaacataaacgggaatcccttcaacggaggactaccccagcagcagcagcagcaggtgccgagctatttctcacaaccacaggggatgcaatacttcagcagccaccagggccagcatcagcatccgaaccatcaccctcagagttcttcaaacggtggtggccagtccttgagtgactccatggatttcatgtgaggaccgaaggagagacagctcaggagttgcctgagatcacataccaactaaagtactgtaaaaaggttgctgatgtataccatattcagtattattatgatacgcgtcattgtaggttagctagctgttccttgtaccattaatcagaagttcattcatgcatgaattgacaacctgtcattgctttcgtttctggggttcaagtaaaatcgtttgactgcttgacgagttcagtgtcggtgttgccatgtaaagtcgttcttgtaatagtgaatgaatagttcccggttggaactagtggttttttacactgctgaaagccatcgtggttggcaataatgtctcatggtcaatgaaacgtgaaataattctgcctgtaaaaaaaaaacgtggtaacaaatctcaacaagctggtggagctaccaaaatgatccatctgaagttactcagaacaagatgcaatcacagattgattatctttcgctgaaataaaaaaggggcttccgttt

SEQ ID NO: 817 - DNA, 1550 bp, Zea mays
  Clone ID: TF_ZmC562_1
aattcggcacgaggcggaattgaattccggtaggatttgagagcggagcggagcggagaggagaggagaagaaggcggtaggcggggaagatggagatgccggcagggagcggggccccagcgctggcgcggcagggctcggtctactcgctcacgttcgacgagttccagaccacgctcggcggcgccagcaaggacttcggctccatgaacatggacgagctgctgcgcaacatctggacagccgaggagtctaacgccatggctgcggccgccccggccacggccacggccacggcggccgcatccgtggacgcgcacgcgcagcagcagcagcagcagcagcacggggcgcccatccagcgccagggctccttcacgctgccccgcacactcagccagaagacggtcgacgaggtctggcgcgagatcgtgagcctcaccagcggcgaggacgcgcagcaggttgcggctcccgctcccgctcccgcgcccgagcccgagcccgcgcccgcgcccgcgccgctgccggcgcaggcgcaggcgcagcagacgctggggtccatgactctggaggagttcctggtacgcgccggcgtggttcgtgaggacatgggggggcaccagaccctcctgctgcagccgcacgcgcaggggcttttctcccaggggaatgcggtcgcgccgcagaccctgcagctgggaaacgggatggtggccggggtcgtcgggcagggcctcggaggaggggtgacggtggcggctccgacgacgccggtcgtgttcaacgggttgggaaaggtggaggcgggtgatctgtcgtcgctgtcgccggtgccgtatccgttcgacactgcgctgaggatgcggaagggacccaccgtcgagaaggtggtggagaggaggcagcgccgcatgatcaagaacagggagtcggccgccaggtcgcgtgcgaggaagcaggcgtacataatggagctggaagctgaggtggcaaaactcaaggaccagaatgaggagttgcagaaaaagcaggttgaaatgctaaagaagcaaaaggatgaggtcctggagcgaatcaacagccaacatggaccaaaggcaaagaagctttgcctgcgccgcaccctgactggcccatggtagcctgctgaagcttgcacaaaattgaccgaagtcaagatcgtcgggccagatgtgcccgtgtgtatatatcagatgaagtcaagagtactgagtaccccgttacccctgtagaccgccgctacttcagagctgccgttcttgttctgtgacgtgggtagtctgcgcctgacagttcgctgtttaggttcggttgcgcgatcctcacatgaacaatgaggcgtgccatctaatttgtttattaactcactcctatctatggtgagataatgcaagtaacctggagtatgtttggttgatttgccgttttgaaaaatatgctgtgagctgtgtggaaaaacagcggtggcccgtgtggaaaatagaagccgtttgattttacagctaaaaaaaagggcggccgccga

SEQ ID NO: 818 - DNA, 804 bp, Zea mays
  Clone ID: TF_ZmC737128_1
agacaaaaccaccagaagccagccacacatcgatcgagacgagttgatctcagctcaacgacgacctcacccctcgaaggtccccagcagcaagcacgcatgctgcaccagcaccagcaccattaccatggaggagtggctagcctccacagctacctctcgaatccggaccaggcattccacgctcactactaccaccacagcaacatcatcgccacgccgctgccgcccactccgtcgttccaccacctctggccttctacggcccaaaccttcgaacaacccgtcgtccacgaagctccggcggccgtcgccgccggcaacagcccagccgggtccggcagtgccgatgacggcggcggcggcggcacggcggaggctgagcggaggcggcggaggatggcctccaaccgggagtccgcccggaggtcgcgcatgcgcaagcagcgccagctcaccgagctgtgggcgcaggtcgtccacctccgcggcgccaaccgccgcctcctcgacgagctgaaccgcgccgtgaggggctgcagcgacatgcgccgcgagaaggcccggctccagaaggagaagaccgatctcggtaccaagctccagcgcctcacccagccgcagaacgccgccctgccaagctcctcctcggagccgcaaccgcaacacgacgccgctactgaataaattcattcttatcttcgcattttagcttccatatatacggtgcttctgttactatagtatacgaaataaaatatgttttcacaggttgtttctccgctgcgaaaaaaaaaaaaaaaa

SEQ ID NO: 819 - DNA, 420 bp, Zea mays
  Clone ID: TF_LIB3245-007-P1-N1-G2
gtgacactatagaagagctatgacgtcgcatgcacgcgtacgtaagctcggaattcggctcgagtgaaaccatgtgtgagcaccggtagtgacttgaaagttagtggtgcgacatgaaccgaatggccagctaaggacgacaaggaatcgaagcgtgaaaggaggaagcagtcaaacagggagtctgcccggcgctcaaggctgaggaagcaggctgagactgaagaactggctagaagagtagagctactgaccgcggagaacacgtccctccgaagcgagatcagcaggctaacggaaagctcccagaaactaaggatggagaactcggctctgatggagaaactagcggacggtacatcagaccaagcacaagaagcttccgccggccaccagacgacaccaacggcgccatcgtcg

SEQ ID NO: 820 - DNA, 512 bp, Zea mays
  Clone ID: TF_ZmC241156_1
agagagcgcgccgcgccgcggcgatcacggaggaggagcggcggcgcaaccgcatggcctccaacaggctgtcggcgcgcaagtcccgcatgaagcagcagcagcacgtcgacgacctgaccgcggtggcggagcgccttcggcgcgagaacgaggcgatgcgcgccggcgtcggcggcgtcgtgcggcagagcatagagctcgagcaggagaatcgggtgctcgccgcgcacgcgcgccagctgtgcgccacgctcctactgcggaactcccagctccgcctgctcggtgacgtggccggcctaccgctcgacgtgccgctcgtgcccgaccacctcgtgcaactctacggtatgctcgagttctgaggtgtgacgtgagtgcatgaactatttattgttatcgtgcgaattctgctctgtcgttggtgttgcgctatgtttgctgtatgtatcctgtgttgtgctgatatatcatacattctttatgcgaccacaaaccggacgctgggg

SEQ ID NO: 821 - DNA, 920 bp, Zea mays
  unsure (1)..(920): unsure at all n locations
  Clone ID: TF_ZmC32804_1
cgggcgacgctaagctcgccgagctcgcgcttgttgaccccaagcgtgccaagaggattttggcaaaccgccagtcagctgctaggtcgaaagaaagaaagatgcgctacattgcggagcttgaaaggaaagtacagactctccaattagaagcaactacactatcagctcagctggccatgttgcagcgagatacgactggtatgacaagtgagaatagtgatctgaagatacgtgtgcagacaatggagcagcaggttcagctgcaggacgctctgaacgacaggctaagagacgagattcagcagctgaaggttgcaacaggacaggtaaacgccagcattggaaaaacaggaaactctggtatgtcatcatttggaggtaatccacaaagttaccagcgtagccatatacagtctcttctggctgctcagcacctgcagcggctccggatccactcccaacatcagcaacagcagacgcattttcagcagcagcagcagccgcagccgcagctgctgctgcaggaggcgcatccatttccggtggacctaaagatgagaggattttctctgtcatcacatgctcagaacgcaggtgcatcagacagccatgctgccaagagcgaaccctgagatttagcatgtattcatgtgggttgttagaaataataatgtcgctctgttagcgtggtgtctaggtgaacttcaatttgtttgaggtgcttagattttgtgcagcctggagctcccatttggttgtaagcttcagtgctgactgaccggtcatttaccttgcctaatgcttgtacctgggtcctggccatgactttgtgcctggaggatggagccgttcgcgcatctgtgcaagagcagaatgaaattgttctttgggtcctttggaatagtccaaccctngag

SEQ ID NO: 822 - DNA, 653 bp, Zea mays
  unsure (1)..(653): unsure at all n locations
  Clone ID: TF_LIB4764-072-R1-K1-C5
cattgggtacctcgaggccggccgggatcgcgagatctagcgagcgagcgcgcacactgcntggcggcaccaggctacgacgatcgagagagccgccgtgccagcacattgtccattgtccgcgcggcgggggatcgggcggacgcgcacataatatggcgcagctgccgcccagggtcccgaccgcggtgcaccgctggccggagggcggccaccacggcgcggcggcgtgggccgatgacttcgccgagttcgctgcgttgcggcggggcgcgcaccgcaggtccctgagcgactcggtcgccttcgtcgaggtggcgcccgcggccggcgagttcgacaggctcgacgacgaccagctcatgtccatgttccccgacgaggccgccgccggcggcggcggcggcgggtcgtccgcggcagggtccgagaacaacggcggcagcagcgacagttacgccgccgcctccacggagctgatccgggaccccaagagggtgaagaggatccttgccaaccggcagtcagctcagaggtcgcgggtgaggaagctgcagtacctctccgagctcgagcgcagtgtcacaacactgcagaacgaggggtccgcgctgtctccccgtgtggcatttctggatcagcagcgtaccata

SEQ ID NO: 823 - DNA, 550 bp, Zea mays
  unsure (1)..(550): unsure at all n locations
  Clone ID: TF_LIB3354-121-Q1-K6-H1
gcaccacctgcaggcgtcgtaccagcagcccgccgcggcgtcgccggcgacttgctacgggccccggccccggaacgcgctcaccgaggccgagaaggaggcgaagcggctgcggcgcgtgctggccaaccgggagtccgcccgccagaccatcctccgccgccaggccatccgcgacgagctggccaggaaggtcgccgacctctcgtcgcagaacgagaacatgaagaaggagaaggacgtggtgatgcaggagtacctgtcgctcaaggaggccaacaagcagctcaaagaacaggtggcgaggacgacggccaagaaggcgccggcgggatccctggcggcggcggcgtccccgccggcgacgccgccgcggccggggntcctgtncagcgcggcgccgccgccggtgccctncgtctggggctcctggccgccgngcgccgccgccgtcgctgggttcgagctgctcggtcgcccgccgccgccgcctctctgcctgctgccctgcgcgtggtccttcccggtcgtggcggcggccccgcgcggg

SEQ ID NO: 824 - DNA, 1031 bp, Zea mays
  Clone ID: TF_ZmC30857_1
tcccgaacctcgaggccggccggagtggcattttccgtggtcgagtccgtccgtgtctgtcctccgctgtccgctggctgcgatagtgctgcctgctgctctaacccaatccaaggaggatgccgaggagcccgcagctgagcctgagcggctgcagctctctcttctccctgtccagcaccagtacgagccgcgacagcgccgccctgaaggcgccggtgccagcgccaccggcaggcgcggtgcccccacggcgcacccctctcctgtcgctcagcgtcggcgaggaggaagaggacgagggtgaggacgaggaggagtacctgctgggggccggcgccctggatctgcagctgacggggcccggtggcggcagcaacagcagcggcggctacgacgacgagcggaagaacatccggatgatgaggaacagggagtctgcgctgcgctccagggcaaggaagagggcctatgtgcaggagctggagaaggaggttcgtcgcctggtgaatgagaacctcaagctcaagaggcagtgcaaacaactgaaactagatatggctgcactggtccagcaaagcagcagcaagagcagctcccacatcagaagaacctcctcatccactcagctctaggctgctaccaataggaatatgtatgtgaatttaaagccatatatgaccaaggaagaatgggaggaagacgaacaaagctagctagactagactgcagcccctctaatccatggccattcgctgattaatacgataatatctcttatttgttggcttcttctagcttgcttcaatttcctagtacagcagtttatgtagtatttcctagattgttagcgcaaagctgcctttttcacccaaaaaataaaatctaggggggtccgaccccggtggatccaattttagtatagagctcactctctagtggtgtccaggaagtgtcgatccaattttagtatagaggtcactcaaacctctctccatgacagagctttttattcgtttcctgtctttttt

SEQ ID NO: 825 - DNA, 2115 bp, Zea mays
  Clone ID: TF_ZmC874_46
ccggccggggtccgacccggcgttgtgattgggggagtatgaagtgctcacaccatctcctctccattcacatcagcgctccacgcctgcgcccctgaattcccaaatcctgcgcgcctctgccccaaccccgctcgtcgactcctctctgccaaacacgtcggaggaatccttctccggaactcgtcttcgtcctgtctgtcgggctggcgtggagtggagatccatcaccacgtggataggtctcttcttctgctggttcaacgctgaatctgtccttcaatgccttcacaggctctacccctgaagaagttgcagagttagaagctattgccgcattttttgttgaagggaacattttttttgggtcatatccagattgaatacgaaacatgctcgtccttttgggactttaagagaataagaggcaaaaggaacataaggatagaggagagaaataaacaatggggaagggagatgtggctaccaggtcaaaatctcaaaaatcaccagcaatacagaatgagcagagtacacctgctaacccgcccacagcatatcctgattggtctcagttccaggcatactataatgctgctgggacagctccagtgaccccacctttttttcatccatctgtagctccaagccatcaggggcacccatatatgtggggtccacagatgatgtctccttatgggacaccaccaccatatgcagcaatgtatgcacaaggtacaccatatcagcaggcaccaatgccaccgggttcacacccatacagtccttatcctatgcagttaccaaacgggacagttcaaactccaacatctggtgctggtggtacagcgacagataaatcaaataaaaataagcggaaggcttccctcaagagatcaaaaggaagcttaggtagtctggatgttgttgcagtaaaaaataacaagtcaccggcaaagccttcaacttcttcctccaatgaaggttcttcacaaaggtaatttctttattttttttgttatactaacagataaattattgaatccactatctattatacagtgagagtggaagcgggagttcttctgaaggaagcagtacaaattcaaaaagtggttcaagggtgaaggataattctgagcaaggacagggtaatgatgctaggagtaaatgtactcaaagctctgtcgttgagcccacacaaccatcttcagggtctgttgtgcttaaccctatgatgccattttggcctgtgccccctcccatggctggcccagcaactactctgaatatgggagtggattactggggtactcctgcttctgtacccatgcatggtaaagttattgcagcaccgacatcagctccttcgtcaaattcacgtgatattgttctcagtgatccgactatacaggatgggagagaactgaagagacaaaaacggaagcaatcaaatagggaatcagctcgacgctcaagattgcgcaagcaggctgaatgggaggaagtagccaatcgtgcagttttgctaaagcaggaaaatagttcacttaaagaagaattgaaacaacttcaggagaagtgtgatggcttgacctcagaaaatacatctttacatgagaagcttaaagcgctcgaggatgagaaatcaaatggaaattggtacaaggattaaaggctgaaacttctctctctttctgactgctgatataatttggtggtaacctgataggacgacaactaaagaggtattcatatacggtattagacttttgtccgagggggtaaaattgtatcataggatttgacatggttgacggctacagattcttcttccagttgtgctgctgtgctgtgttgtctttcttccctcttcgtgctagatcctacagaagtacaactatgtagaaacccccaggtggtgtttgaagcctggggggattagcgtgtggtattggtatagctgttgtagagctgctcattgagcttcttgacagaaactgaagcgtgctaaagcagtcgtgtgatttacgattcagacggactaattttacggatagtactgtaactgcactaatgaatacaaatagcctttttactggtttcgccttgtat

SEQ ID NO: 826 - DNA, 427 bp, Zea mays
  Clone ID: TF_LIB3236-081-P1-N1-F12
gaaaaaatgcacacagcacaagtccaacaaccatattccttctcgatcttaactttgtactgctactgctaccaccaaatatataaatctatatatttcatttcccttcgccccttcagaattgggtggatgaggttctccgaagtgagctcttggttgggaggaccagtgccgctacctcccgtttcagctctttgcactgcttcttgagcttcaagttgtcatccactagccggcgaacctctttctccaggttctccacgtatgccctcttcctggccctggagcggagcgcggactcccggttcctcatcatcctgatgctcctccgatcgtcgccgctggcctgctgcacctccatgtcgacctcgttgccgacgaagcccgcgagcgagacgggcgtggagggcagcgcgtggccggcgcg

SEQ ID NO: 827 - DNA, 518 bp, Zea mays
  Clone ID: TF_ZmC9417_8
tggccctggcgctgcgggcgcagaccgcgcccttgcccagtcgtccacggcgcaggccagcgcgcgccgccgcgtccgcagccacgccgacaaggagcacaagcgcctcaaaaggttactgaggaacagggtgtcagctcaacaggctagagagaggaagaaggcttatttaactgatctggaggtgaaggtgagagatctggagaagaagaactcggagatggaagagaggctcgtccaccctccagaacgagaaccagatgctccgacagatactgaagaacaccgctgtaaacagaagaggttcaggaagcactgctagtggagagggccacggccaatagcactgaatgacggaaaaatagtaatgaatcatgataaatatatgtttatatggagtggatttggtgagcttgctttgtggccaaaggagggaaccccaaaaactggggtcagacagccaagtgccgacggttcagggaaaaagaacttatggaattaatgcatttgattttaac

SEQ ID NO: 828 - DNA, 769 bp, Zea mays
  Clone ID: TF_ZmC2730_2
cccacgcgtccgatctcggagcttgaacggagcgtcaccagtctccagatggaggtgtcggcgctgtccccaaaagggtcaagaggatattggcaaacaggcagtcggctcagaggtcacgagtgaggaagctgcagtacatctcggagcttgaacggagcgtcaccagtctccagatggaggtgtcggcgctgtcccctcgcgtggccttcctcgaccaccaccgctcactgctcaccgtcggcaacagccatctcaagcaaagaatcgcggcgctcgcccaggacaagatcttcaaagacgctcaccaagaggcgctggagaaggagatccagcggctgcgccaagtgtaccagcagcagcaggtcaaggtggccaccaccggcggcgccgacatcgccaccgccgcctcgccgtcgatgcaggccaggcaagagctgctcgcgtgcgagggcgctgctattcgatagcggaggcggcggcggcggcggcggcgttcacgcccctgttactgttagtagcttaattaacttttgtgcagtctgatcaatacgtgttggcttgtttgtttgctgcttcttaatttaattcgtatgtgatgtattctgctcaccctagcaaaaaaaaaaaaaaaatgcatcgatgccaagttgtgaatgaattgtactattcagttatttggaccggcttagtcggaatatagtgagacggagtttgttggtgtgagttatccgttcttaatttattgttgtttagattgattttattt

SEQ ID NO: 829 - DNA, 2293 bp, Zea mays
  Clone ID: TF_ZmC773_20
acatcaggtctccattcacgagctcttttgcatacaaaaggttcctctataatacgttcacgaatttcttcatacttctctttcgttgctataagcctccatttaaaacatttagcacattggacagtgaatgctccaatagatggcgatattccccttgttatgattgacttctgcaaacggttttcccccagttcatcttgctctttatctcctgcttcagagttgagaacgaccatttgatttgatgcagcttctgaagaaaaaccatcattgtcaaatcgggggccattactatcagaaggcaccacaatatgactgttctttgacgattgaggagatttagaagtttccatcggttttgtacaaattattagagcctgggtaccagcgaacgaagaaatcgatccgagcccggacggatctctaccacgccccgacccagtgtctacgatttgagcatgcagtaggcccccaacggcgggctccgaagatatcgaggtcggggggccgggggcggcgggggaacggggagggagtgctccggcgaagaacagcggggtttacggcggagccgcggaggggagggattgaggatgggagtgcttactcgcgttctccgcccacgcgtccgcccacgcgtccgcccacgcgtccggccccgcatggcaccccaggggcggagagcgacgaggagatacggcggggtgccagagatgggcggcgcgtcggcgtcggcctcgtcgggcgccggcgcggacgagcgtcccaagggggaggacggcaagcaggggcaggtggcggcgggggcgcagcctccagcgggcgggaagaagcgcgggcgcacggcgggggacaaggagcagaaccggctgaagcggctgctgcggaaccacgtgtccgcgcagcaagcgcgagagcggaagaaggcgtacctgacggagctggaggcgaaggccaagggtctggagctccgcaatgcggagctggagcagcgggtgtccacgctccaaaacgagaacaacacgctccgccaggttatagatgttagtggaaaagaattcaaattcacctgggcatctggacgtggcgaattgtgtgatatttatgaagaacgtcagagtggagaggatggaaatgggttgcttctggagtgtggctctacttggcgcaagtgaaccctatagcctgggcagttcctacaaaacatgagggtgatgccagtgaagaagcttctctcgccgatgagacacttgcatcagaagtagtgctaacccggaagaggaaaataggaagctctttgtcagtagagccaaaccatctctctgatgaacttgaaccaaagttggaggatgcttagaacggggagacgtctaactgaaaagtaaaagtgggcagcatcgtgatgccaacttacccccctgccatggttttattggtcctctgcttgtttctcgttttccttgggagtcagcttctctgttttatgtggtcgcacacggccttatttgtagtattacaccacagaagctggctgacccccactgagggagaggtgattgatgcaagcattgtgtatgatccttggacaagggaatcgcgggggtttggttttgtcaccatggctgctactaaggaggcagatcactgcatcaaatatctggattgttctgtgttgcaaggtcaggtcataattgtttagaagtactctacacagaacattttattgttttgtcttcaccaccgagaatccgagatcgcctcccatagcctccacatccataaggtcctgcttgactgcgacgacgtccaggctgatgccctcatcgtggatcgactcgcctcgctctagaaggagtggcccctctggagttgaatatgcagttataaccaatttttaccccttttatcctagaagagttgccaagacacggtataagaccatgataatagactaagagaggatttggctctaattactatatgttttatttatgcagtcccatgagaactttgagtatttgcagattgctttattaatttattaaagttaaagattgtatgtgttgagtatgtatccactcttgttggaagtgtcttgcaattccaatccaaggatgtataaaatactgcatgggctaagtatgtgttttttcatgtatttggagtatatatactttttgttgcttgagaacatgtatgtacactagaagcttgtcaattgtgtgaacttgagttgatccctgtctaacctgagtatatatatatatatatatatattttgttgcttgag

SEQ ID NO: 830 - DNA, 1079 bp, Zea mays
  unsure (1)..(1079): unsure at all n locations
  Clone ID: TF_ZmC2202_4
tcagttttaccgttcactcctaccattcactgcctttgaaggcagaaagaatccaatcacataaagctttatccaattatccatgcccttaaaaactttcaaaaactgttacattcctagaaaaattggtaattccgtctgaagttgcgggaatagaaaccacatataccttttgccattagtttcctttttctatagatctgtcacctttaccttgaatttacatgaaacatggtatgtgacgtcagaagcttaaccgtccatttctgtgatgaactgcttagttaaatttcggtgttgtgatcagaatggtgtcaaaccgggaatcggctaggcgatcaagaaagaggaagcaagcacacttgaccgatcttgaatcacaggtttccaggttaacgtctgagaatgcatctttgctgaagcgactggctgatatgactcagaaatacaaggatgcttccgttgacaataaaaatctaacagttgatgttgagactatgaggagaaaggtccgttcgtcttgaatgcatcacagacctttttctttttgttgtatgagaattcttaactgcatccatttatcgttcgtcatatttttactgngatctgcatgtagtcactggatcaacgttttactgggctctgcatgtaaacgtaaacgcaaagggcagtgaaagtagtattggntgttcatagttcttattttagaacctgcaagttcagttttagtttttaagaccattccagttcacttgccggtgttgctggcctgtcgtttgaccaaatgacgatcgtcggggatgcaatgtattccgagaccgggtcaacgccattctcagatcctgaagctcttgccgataggtaaaggttgcccctgttctgtcctgtgatgaccacccgtgtgatgctggtaatggaagttgtagttgtagcccccatgcgcctgggtggggtctccccagtgttttgtcccctattttgaaggttaataataattgttgggaaaaaatctccgctctttaagcccaaaaaaaaacaaaannnaaannnnnttnnnnnaggggattaaacaanggggt

SEQ ID NO: 831 - DNA, 638 bp, Zea mays
  unsure (1)..(638): unsure at all n locations
  Clone ID: TF_ZmC745477_1
aagcccactttccctccttcctagctagctcatcgaccgagtggtggtaaacatgtaccctgctgctgagatcgctagcgttccatacttatctcctgcggcctctttcaagcctcactaccatgtagctaccgacgacggcggcggcttcctctaccagcagtacagcaaccttctgctgcctcaccctccgtcctactaccaagaagttgcttacgaccagctggtccttgaagccagcttcccggttggtggtaataacagatccaattcggagtcagacgagtaccaacgcagtgtcgcggaagagcgcaggaagagaaggatggtatccaacagggagtccgcccgacggtcgcgcatgagaaagcagaagcagctgagcgagctctgggcgcaggtcgtccacctccgcagcaccaaccgccaactccttgaccagctgaaccatgccatcagagactgcgaccgtgtcctccgtgaaaactcccagctgagagatgaacagaccaaattgcagcagcagctcgagatgctccctgtagagaccacaagagagtggtgccatgagtcctggctcttgaagtatctactangattccaagtggtagatgagataatatgagatttaaaccaag

SEQ ID NO: 832 - DNA, 526 bp, Zea mays
  unsure (1)..(526): unsure at all n locations
  Clone ID: TF_LIB3960-021-Q1-K6-G3
gaattcaaaaaaaaccttttgccaggtatacataacaatattagtcagcaatacaaattgtaaatttgagtttatccactatttcagatacagtgaactgggtcacagcctacatcttcagtcacatcttgacttctaaaagataagccaagatagatctgaaacaggaaacacccacacacaaggttggcatcaacattatcacaacctggtaacaattaactgcaataaagtaaggagtctgcacgcagatctaggttgcgtaaacaggctgaatgtgaggagttggctcaacgtgctgatgttttaaagcaggaaaatgcttcacttagagatgaagtaaaccgtatcagaaaagagtatgaggaacttctatcaaagaataattcactaaaggaaaaacttgaaggcaaacaacacaaaactgatgaggcgggacttaacaacaagctgcaacattctggcnatgacatccagaaaaaaggagactaatngagctttcatgcaatgcttgcgtagggtgggc

SEQ ID NO: 833 - DNA, 476 bp, Zea mays
  Clone ID: TF_jC-zmX700222555b1
cggatgcgtgggcgaggtggtcccgtgccccccgcggtatctcccaggcctgtgacggccagcgcgttcgggaagatggagggagacgacttgtcatccttgtcgccatcaccggtcccgtacattttcggtggtgggttgaggggaaggaagccaccggctatggagaaggtggttgagaggaggcagcgccggatgatcaagaaccgggagtcggccgcgaggtcgcgccaaaggaaacaggtaaatacatttgtcggcgggttctgcctttacctagttgtatcaattcgtcacgtttcctgcttatattactagttatactgacacgtgtaacggtgtaactttaatgtctatgttttatttttttcctcccaacatgttaagtatttcgcactaatggcgttaagaattctgctgggccatgtgtctagtgttggcccatttacgtgtacacatatactacaagtgtgtgt

SEQ ID NO: 834 - DNA, 1705 bp, Zea mays
  Clone ID: TF_ZmC491_4
acaactagacatcgtaccacccaggtgatctcgcgcgccactgcctccttccatcccttagccccagctttactctcccctcccgcgcccagatcccgaggctcctacccctcgatcgccgccttccagcggccgatccggcgctggctcgcggcccccgacaggggttttgctttatgctggttcatttgtctacggacaatggactagttgctgcactgtttctgtgattcaccatgggaagcagtggagcagatacaccgtctaaggagcagcagccacctgctacctcaggtgctgcaataccacctgtttatccagattggtctagcttccaggcatatcccccaatcccaccacatggattcttcccctcacctgtggcatcaagtccacagggtcatcctttcatgtggggagctcaagctatgattccaccttatggaacaccgccaccatatgtcatgtacccccctggagtatatgcccacccatctatgcccccgggtgcacatccatttactccttatgccattacttctccaaatggcaatgctgatgctactggaactactgctgcagctggtaatactgatggcaagccctctgaaggcaaagataaaagtccaacaaagcgatccaaaggaagtttgggcagcttgaacatgcttactggaaagaatcccagtgaacatggtaagtcctcaggtgcatcgggtaatggagtcacttctcaaagtggcgaaagtggcagtgacagttcaagcgaagggagtgaaggaaattctcacaatgattcacatcacagggaaagtggacaggaacacgatggggatgttcgaagttcccggaatggtgtatcacgtttgcaatctgagggaaaattgaaccaagctatggcaatcttgcccataccatcaagtggcccagcaactgatccaactacaaacctaaatattgggatggactattgggccaacacagcaagctctgctcctgcaattcatggcaaagcgacgtcaacaacagttccaggggctgtggtcccagcagagcagtggacacaggatgaacatgaactcaaaaagcaaagaagaaagcagtccaatagggagtctgcacgtagatctaggttacgtaaacaggctgaatgtgaggaattggctcaacgtgctgatgttttaaagcaggaaaatgcttcacttagagatgaagtaaaccgtatcagaaaagagtacgaggaacttctatcaaggaataactcactaaaggaaaaacttgaaggcaaacaacacaaaactgatgaggcaggacttaacaacaagctgcaacattctggtgatgacagccagaaaaaaggaaactaatgctatcatgcaatgcttgcctacattggtcctaactagattattgggaggtgcaattgtagtatgcacattaactccttactttattgcagttaattgttaccaggttgtgataatgttgatgccaacctcttgtgtgggtgtttcctgtttcagatctatcttggcttatcttttagaagccaagatgtgactgaagctataggctgtgacccaattcactatatctgttagaaatagtggataaagtcaaacttacaaatttgaagtgctgactaatattgttatgtatacctggcaaaagactggttttcttttaattcagtctggttgaacgg

SEQ ID NO: 835 - DNA, 1921 bp, Zea mays
  Clone ID: TF_ZmC491_5
gggccggggtcttcttcgccccgccacccgtcctgcacactcacaactagacatcgtaccacccaggtgatctcgcgcgccactccctccttccatcccttagccccagctttactctcccctcccgcgcccagatcccgaggctcctacccctcgatcgccgccttccagcggccgatccggcgctggctcgcggcccccgacaggcaccctacccaccgaccggatctagccgccgcgtggtttttgaattgagctcccctcgcgtcgcatggcgctggcgcgggccgcgcgggttcctctctgggctgctgccggatcgacggcgatgctagggtttaggtgtggttcgtgtctagttagctgagtggcgcgtacgcgtttcgttttgtcttggggagccaagcgtggcccgaaatttatctggagcaggttttgctttatgctggttcatttgtctacggacaatggactagttgctgcactgtttctgtgattcaccatgggaagcagtggagcagatacaccgtctaaggagcagcagccacctgctacctcaggtgctgcaataccacctgtttatccagattggtctagcttccaggcatatcccccaatcccaccacatggattcttcccctcacctgtggcatcaagtccacagggtcatcctttcatgtagggagctcaagctatgattccaccttatggaacaccgccaccatatgtcatgtacccccctggagtatatgcccacccatctatgcccccgggtgcacatccatttactccttatgccattacttctccaaatggcaatgctgatgctactggaactactgttgcagctggtaatactgatggcaagccctctgaaggcaaagataaaagtccaacaaagcgatccaaaggaagtttgggcagcttgaacatgcttactggaaagaatcccagtgaacatggtaagtcctcaggtgcatcgggtaatggagtcacttctcaaagtggcgaaagtggcagtgacagttcaagcgaagggagtgaaggaaattctcacaatgattcacatcacaaggaaagtggacaggaacacgatggggatgttcgaagttcccggaatggtgtatcacgtttgcaatctgagggaaaattgaaccaagctatggcaatcttgcccataccatcaagtggcccagcaactgatccaactacaaacctaaatattgggatggactattgggccaacacagcaagctctgctcctgcaattcatggcaaagcgacgtcaacaacagttccaggggctgtggtcccagcagagcagtggacacaggatgaacatgaactcaaaaagcaaagaagaaagcagtccaatagggagtctgcacgtagatctaggttacgtaaacaggctgaatgtgaggaattggctcaacgtgctgatgttttaaagcaggaaaatgcttcacttagagatgaagtaaaccgtatcagaaaagagtacgaggaacttctatcaaggaataactcactaaaggaaaaacttgaaggcaaacaacacaaaactgatgaggcaggacttaacaacaagctgcaacattctggtgatgacagccagaaaaaaggaaactaatgctatcatgcaatgcttgcctacattggtcctaactagattattgggaggtgcaattgtagtatgcacattaactccttactttattgcagttaattgttaccaggttgtgataatgttgatgccaaccttttgtgtgggtgtttcctgtttcagatctatcttggcttatcttttagaagccaagatgtgactgaagctataggctgtgacccaattcactatatctgttggaaatagtggataaagtcaaactttcaaatttgaagtgctgactaatattgttgt

SEQ ID NO: 836 - DNA, 1675 bp, Zea mays
  Clone ID: TF_ZmC13853_2
gtcttgaggctttgagctctcctcacctcgtatccgtgtctttctggtgctgagctgagtctgagagacaggtaaggaggaggagggtggagatggaattcaagaactgcgggtcgtcgtcgcagccccggccggcggtggtagtgggcgaggaggcggcgttggcgagacagggatcagtctactcgttgacgttcgacgaattccagagcaccctcggcggggccgccaccggcggtggcggtggcggcagcatccccaagggtttcggttccgtgaacatggacgaactgctccggagcatctggaccgcagaggagacccaggccatggcctccgcttctggacgcaggagcgggtgcggggatgccgcccacgccgctgcagcggcaggggtcgtcgctcacactgccccgcatgctcagcaccaagacggtcgacgaggcgtggagaaatctcgtgcgcgacgaaccgctgcagggggcggacggcggcgggcaccagccgcaccaccgccagtcaacgctcggggagatgactctggaggagttcttggtcagagctggcgcggtcagggagaaccccgctccggctcctccagcgccaccacccatgatcccgccgcggccggtacctgtcgcccctaaaagctccgccttttttgggaatttaccgggtgccgacgccgacaccgccgcagctgcggcagcgctggggtttgcaccggtcggcatgggggatctggcccaaataccgcccagggcagcaggcatgggaggcggcgccatggctgtgcaagcagcggtgaaccagcttgattctggcgggaaggggtacagcgacctgtcgtcgccgacggagccgctcccgttttcgtttgaggggatgattcgagggaggaggcatgggggcggagtagagaaagtggtggagaggcggcagaggaggatgatcaagaacagggagtccgccgccaggtcccgagcgcgcaaacaggcttatactatggagttagaagctgaagttcagaaactcaaggagcagaatcaggaactggagaggaaacaggcagagattatggaaatgcagaagaacgagctaccagaaatgttgaaggatccattcggacggaagaagcgtctgtgcttgcgaagaacattgactgggccttggtgatgactatctgaaacagcagacgagtcgctgcatacctgcagtggtgcctgggatctgtacacaatttgtctcctatagactagcgatggacgtaacgtagtggggatgattgtactgttaccgcttatagtggagtcgggaaactgacacatgtagattatgttagtagagaaccaaatggagtgaagccggccgcgcaagactcggcggcttcggccatcctccagagcttgtgtagagttgcctagctttgcatcttgccagagccagcacgtcgtgtagagattggacggttttaaaagatcggtggctgggtgtaagtaggttggtgggattacaagcatgggcatggcgacgttcaggatgcaaccggcttgacgactgtacgtacatctgatggctgtagagctgtagtatgcaaactgtcccgctgctgcttgtgtgtaacggtgaaaccagatgaatcggttatttgtgtgagaaaaaaaaaaaaaaaaaa

SEQ ID NO: 837 - DNA, 1544 bp, Zea mays
  Clone ID: TF_ZmC1437_1
gcctgcgcgcccggccgcccctccccttcgggccccccgccgcgcaccctcgcggaactgggaggccggtgcggtcctcccccccttctgcccgttctctccccgtgtgggcctgcccccttccggcgcgacgagacgccttatgcttgttcaagacgtcaggtgttggtatttgggttgcaattgagtgattgggaaacctgactggacagaagcattgttggtcaaccaatgggaagcaatgaccctagcacaccctccaaggcttcaaaggcatcagaacaagtacttgaaacagtggatcaacctccagctaccacatccagtggaacagtttcagtttaccctgaatggcccagctttcaggcataccaagcaattccaccacatgggttcttcccccctaccgttgctgcaaatccacaggcccattcatacatgtggggagctcagcccatggtaccaccttatgggactccaccaccaccttatgtgatgtatccacctggagcagtatatgcccatccctctacacctcctactatgcatccgtttagtcattaccctatgccaacaaatggacatgctgaaactcctggaaccgcgccaagtgctccagaaatgaatgggaaaagtgagcctggcagaacatctgctccatctgccaatgggattacctcgcacagtgagagtggaagtgagagtgagagtgaaggaagtgatgccaattatgaaaatgattcacattcaaaggacaatgatggaaaggaagatggcaattctcagaatagcatatcttattcagcatcacaaggagtgttaaaccaaaccatggcgatgcttccaatacaaccgggcgcaatggttggaggagtttctagctccacagctaacttgaatattggagtgcactactgggaagctccaggttctgcagctgtctctgcaacgcatggcaaagcaccagctggttcagctcggggagaccaatgggatgaaagggaactcaagaagcaaaaacggaagcagtctaatagagaatcggcacgcagatcccggctgcgcaagcaggctgagtgtgaggagcttgggcaacgtgctgaaactctgaggtcggaaaactcgtctctcagggccgagcttgaacggatcagaaaggagtacgaacagctactttcgcagaacgcttcactcaaggaaaagctggggggcagcagtgacccgattcctgatatgaatgaacagaacgacggcaacggcagcgacaagaagcaatctgattccgatgcccagcctgggagcgagtcttgacccgtttagctcaggatccttgggaatgcacattgctatttattttctcgaacatggttgaacagaacataggagaaaaagaattgtttatgtaactcttaccccttgactgcctaatgtctctgacggcatgtatataatgtatgccctcactgctgaactagtactagtaattgaggaattgcagatattgacagctaaaaaaagggcggccgctcgcgatctagaactag

SEQ ID NO: 838 - DNA, 808 bp, Zea mays
  Clone ID: TF_LIB4739-086-R1-K1-F4
gctttgcccaagtgctcgctcgccggggccgcctttccttttgggccgcccgcacttgccatttcggagagagctagcggctagcgcagcgcattatttgccttcccgtcctcgcgccgattccatcccgcgaggctagctgctccgtcgacccgtctgtcgtttactcacgccgccggctcttgactctgccgccttgcctcggccagcatcgccggcagcgccgtctcgccgccggatacatggcgtcggcgtcgccggcgcagttcgcggcggcgcccctcaggatggggtacgggaggccggcgccggcgccgcccccgcccgtgatgggcatgtggagcagcgagccgttcagggtcgacagcggcagcgcccacgccaccagcgcgtccaccgtcaacaccaagctggaggagacaaggttagaagacgacgcacaggtagcacttgagccggcaagaagtacggagcaggaaaccagtaggccgccagagagggcccagagaaggctcgcgcagaacagagaggctgctcggaagagtcgcctgcggaagaaggcctacatccagcagctagagacaagccgcatgaagctgtcgcagctagagctagagcttcaacgggcgcggcagcagggtgcatatgcgaatagtgggagcatgggagactcggctctcggctacagatgcccgatagatccaggtgtttctgtgttcgagatcgactacagccactgggtggacgagcagaaaaacacacggcggagctgacgtcggcgctccaggggcagcagacatcggagctg

SEQ ID NO: 839 - DNA, 461 bp, Zea mays
  Clone ID: TF_ZmC874_33
atcagctcgacgctcaagattgcgcaagcaggctgaatgggaggaagtagccaatcgtgcagatttgctaaagcaggaaaatagttcacttaaagaagaattgaaacaacttcaggagaagtgtgatggcttgacctcagaaaatacatctttacatgagaagcttaaagcgctcgaggatgagaaatcaaatggaaattggtacaaggattaaaggctgaaacttctctctctttctgactgctgatgtaaggttacttgtgagctgccgttaggcttacagaataccaactctgattgccggtgtaatgttctccatattttttttccagataatttggtggtaacctgataggacgacaactaaagaggtattcatatacggtattagacttttgtccgagggggtaaaattgtatcataggatttgacatggttgacggctacagattcttcttccc

SEQ ID NO: 840 - DNA, 1799 bp, Zea mays
  Clone ID: TF_ZmC9417_1
ggagatagctagggaagggcaaatctgcagggcctgagagggtgaggtagagcgcgccagccagaatgcaggagcaggcggcgagctcgcggccttccagcagcgagaggtcgtccagctccgggcaccacgtggacatggaggtcaaggaagggatggagagcgacgatgagataaggagagtgccggagctgggcctggagttgccgggagcctccacgtcgggcagggaggctggccctggcgctgcgggcgcagaccgcgcccttgcccagtcgtccacggcgcaggccagcgcgcgccgccgcgtccgcagccacgccgacaaggagcacaagcgcctcaaaaggttactgaggaacagggtgtcagctcaacaggctagagagaggaagaaggcttatttaactgatctggaggtgaaggtgagagatctggagaagaagaactcggagatggaagagaggctctcgcgatctagaactaccggacgcgtggccgggcccgcactcctacggcgctgctcctcttcctgtgtctctctcgtctcccaacgacgcgattggcgattccatttctaccccgagacctccagccgtccgcccctgaaccctcagccttctccgtcccgcctcggcactcgacggccgccggcacacaccgcgcagtctcgagacaggaaccggaggaacgaggatggaggatgactcgccgctgacgaagacgatgaagggtgcggtgacaggactcgccgcggggaccatctggggcaccgtcgtcgccacctggtacgacgtgccccgtgtggagcgccacgtcgcgctccctggccttatccggacgctcaagatgtgcggcacctacggggccaccttcgccaccatcgggggcctctacatcggcgtcgagcagctcgtgcagagccagcgcaagaagcgcgacttcgtcaacggggccgtcggcgcgttcgttgccggagcctctgtctgcggctacagaggaaagagtattcagtcagccctcatcggaggctcctgtctggctttcacatctgctgtgctggacattggcggcaatacgaccagagttgacaacggcaaagagtactatgcctacacaactgagaagaagcctgcaaattgattccaagtctgcacttctagcaaacaatcttgcacgccatcaactcagtgaatttgaagctgatgtgcagttttatgtttgttttgctgatgcaattagttcttaagcaaatccatggcaacttgtttatcgctgatgcttgagggatggaaatgacactcagaataaatctttgatttgctttcttgtgatcgttgatcacattaaacgcagtggcgcgatatactgtgtaattgtctattttcccgtagtaagtattgataggaacgttgacctgataaaatagataatctaattttggtttaaaaaaaaaaaaaaaaaaaaaaaaaaaaaaaatacctccaccctccagaacgagaaccagatgctccgacagatactgaagaacaccgctgtaaacagaagaggttcaggaagcactgctagtggagagggccacggccaatagcactgaatgacggaaaaatagtaatgaatcatgataaatatatgtttatatggagtggatttggtgagcttgctttgtggccaaaggagggaaccccaaaaactggggtcagacagccaagtgccgacggttcagggaaaaagaacttatggaattaatgcatttgattttaacatggtttacaaaaaaaaaaacaaaaggcgggcaa

SEQ ID NO: 841 - DNA, 908 bp, Zea mays
  unsure (1)..(908): unsure at all n locations
  Clone ID: TF_ZmC59181_4
gtccctngatgttggaccaagtgctattttggagtcatactctgatggccacatttcttcaccgatgatgggtgcactttctgattctccgatgcctggtagaaagcgtggttccccaggagatgtggctgataagttggtggagagaaggcagaagaggatgatcaagaatagggagtcagctgctcgttcaagggctaggaagcaggcatacactaatgaactggaaaacaaggtttctcgattagaagaggagaataagaagctaaccacgttaaaggagttggaaaatatacttttctctgagcctcttccggaacccaagtaccaactgaggagaaccggctcagcgactttctgattgtatgcagaatatcttgttttgctgtaggttgtaagtcctgtagcttgtaagtttttttgtctctttggtttagaatcatttgctagcttgggagtttttgtttatcctagctcgatggtttgctctctccctccctccctttttctagactagcaggagccgagcatgtgctgtccgaggccttgctaccagtatagtatgtaaaatcttcaggacacatgtaggtggtcggagcttgtttacatggtgtgacttaacagatggatagtatgggagccctttctttggtaaccggagtttcctgtagctagtaagtttttttgtctctttggtttaaaatcatttgctagcttgggagtttttgtttatcctagctcgatggtttgctctctccctccctccctttctctagactagcaggagccgagcatgtgctgtccgaggccttgctaccagtatagtatgtaaaatcttcaggacacatgtaggtggtcggagcttgtttacatggtgtgacttaaggggtgtttggttgctcccgcta

SEQ ID NO: 842 - DNA, 818 bp, Zea mays
  Clone ID: TF_ZmC585007_1
cttctcctcatctctacctgcttatgcattagagcccccggagttgccttcgattcgcagctaagtcctgctttctttctcccttcccgttcttacgtttcagtccctgtagcttcttttttccttagagtgtactccccgttccgttgcaaataagcccctgagctctgtcacattctagcctcgactccttggcctcgggaggagttcgtcgcagatccgatctagagagcctccccgcaccacccatgtttaccttccccttcctctgacggccgccgccccccgatgaagctgcgcgttcgctgccgctcccactccttctccgtcgccttcctctactggttctacgacttctcatgaactcctcgcccctcgagaccgccgcatatccatcctgcctctagttgatttgtagatctagctccgtttctccccctttcttgccttcttccttcccaccatcacagaaaagagaaattttttccggttcttggatcgagaacccgaccatgtcgtcgccatcgcgccggagctccagcccggagagcaacatcgacggcggcagcggcagcggctccgccggcgacgagcgcaagcgcaagaggatgctctccaacagggagtcggcgaggcggtcccgcgcgcgcaagcagcagcggatggaggagctcatcgccgaggccagccgcctccaggcggagaacgagcgcgtggaggcccagatcggcgcctacacgaccgagctgagcaaggtggacggcgagaacgccgtgctccgcgcgcgccacggcgagctcgccgggcggctgcaggcg

SEQ ID NO: 843 - DNA, 1815 bp, Zea mays
  Clone ID: TF_ZmC1757_1
tttctttttttttgcctctccagaagtttccgcagggaggcacagcaagagagagagcccagcactagataagtagggggggaaagaagagcatccaaccggggcgtactcctcgatctccttcaagcagctaacataattaactcatgggtgcatagagatatgccgccgacgacccatcatatctatgggtccctccccttgcactgcatctccttcaattcctagtgtttgcttctcccttccttgacctttgcttggaaccattgattgatagttacttattattgggcatggagcacgtcatctcaatggaggagatcctcgggcccttctgggagctgctaccaccgccagcgccagagccagagccagagcgagagcagcctccggtaaccggcatcgtcgtcggcagtgtcatagacgttgctgctgctggtcacggtcatggtggcggcgacatgatggatcagcagcacgccacagagtggacctttgagaggttactggaagaggaggctctgacgacaagcacaccgccgccggtggtggtggtgccgaactcttgttgctcaggcgccctaaatgttgaccggccgccggtgatggaagaggcggtaatgatggcgcctgcggcggtgagtagtgccgtagtaggggaccccatggagtacaatgccatactgaggaggaagctggaggaggacctcgaggccttcaaaatgtggagggcggcctccagtgttgtgacctcagatcaacgttctcaaggctcaaacaatcacactggaggtagcagcatcaggaataatccagtgcagaacaagctgatgaacggcgaagatccaatcaacaataaccacgctcaaaccgcaggccttggcgtgaggcttgctactagctcttcctcgagagatccttcaccatcagacgaagacatggacggagaagtagagattctggggttcaagatgcctaccgaggaaagagtgaggaaaagaaaggaatccaatagagaatcagccagacgctcgagatacaggaaagccgctcacctgaaagaactggaagaccaggtagcacagctaaaagccgagaattcttgcctgctgaggcgcattgccgctctgaaccagaagtacaacgacgctaacgtcgacaacagggtgctgagagcggacatggagaccctaagagctaaggtgaagatgggagaggactctctgaagcgggtgatagagatgagctcatcagtgccgtcgtccatgcccatctcggcgccgacccccagctccgacgctccagtgccgccgccgcctatccgagacagcatcgtcggctacttctccgccacagccgcagacgacgatgcttcggtcggcaacggtttcttgcgactgcaagctcatcaagagcctgcatccatggtcgtcggtggaactctgagcgccacagagatgaaccgagtagcagcagccacgcattgcgcgggggccatggagctcatccagacggcgatgggatccatgccgccgacctccgcctccggatctacaccgccgccgcaggattatgagctgctgggtccaaatggggccatacacatggacatgtattaggcactgcgggtttcgtgatcgctgggaacattttatttgcaggcgtcgctgaataaggctggttgtctcgatctcccttgacatgaaatccaaataactcacaattaaccatgagtgttccgtttggtcccagaaaaaaaaaaaaaagcggcctttcgaaggtattgttaatcataatagtgttgttctgtacttc

SEQ ID NO: 844 - DNA, 1588 bp, Zea mays
  Clone ID: TF_ZmC1757_2
cttcaagcagctaacataattaactcatgggtgcatagagatatgccgccgacgacccatcatatctatggttacttattattgggcatggagcacgtcatctcaatggaggagatcctcgggcccttctgggagctgctaccaccgccagcgccagagccagagccagagcgagagcagcctccggtaaccggcatcgtcgtcggcagtgtcatagacgttgctgctgctggtcacggtcatggtggcggcgacatgatggatcagcagcacgccacagagtggacctttgagaggttactggaagaggaggctctgacgacaagcacaccgccgccggtggtggtggtgccgaactcttgttgctcaggcgccctaaatgttgaccggccgccggtgatggaagaggcggtaatgatggcgcctgcggcggtgagtagtgccgtagtaggggaccccatggagtacaatgccatactgaggaggaagctggaggaggacctcgaggccttcaaaatgtggagggcggcctccagtgttgtgacctcagatcaacgttctcaaggctcaaacaatcacactggaggtagcagcatcaggaataatccagtgcagaacaagctgatgaacggcgaagatccaatcaacaataaccacgctcaaaccgcaggccttggcgtgaggcttgctactagctcttcctcgagagatccttcaccatcagacgaagacatggacggagaagtagagattctggggttcaagatgcctaccgaggaaagagtgaggaaaagaaaggaatccaatagagaatcagccagacgctcgagatacaggaaagccgctcacctgaaagaactggaggaccaggtagcacagctaaaagccgagaattcttgcctgctgaggcgcattgccgctctgaaccagaagtacaacgacgctaacgtcgacaacagggtgctgagagcggacatggagaccctaagagctaaggtgaagatgggagaggactccctgaagcgggtgatagagatgagctcatcagtgccgtcgtccatgcccatctcggcgccgacccccagctccgacgctccagtgccgccgccgcctatccgagacagcatcgtcggctacttctccgccacagccgcagacgacgatgcttcggtcggcaacggtttcttgcgactgcaagctcatcaagagcctgcatccatggtcgtcggtggaactctgagcgccacagagatgaaccgagtagcagcagccacgcattgcgcgggggccatggagctcatccagacggcgatgggatccatgccgccgacctccgcctccggatctacaccgccgccgcaggattatgagctgctgggtccaaatggggccatacacatggacatgtattaggcactgcgggtttcgtgatcgctgggaacattttatttgcaggcgtcgctgaataaggctggttgtctctcccttgacatgaaatccaaataactcacaattaaccatgagtgttccgtttggtcccagtttcgaaggtattgttaatcataatagtgttgttctgtacttcaga

SEQ ID NO: 845 - DNA, 1263 bp, Zea mays
  Clone ID: TF_ZmC3114_2
cccacgcgtccgcccacgcgtccgggaaaggcaaggggaagggcgggggcgcgtcgcctgagaagggcagctctggggcgccctccggtgaggacgactccaggagcagtgacagcggcagcgatgagtcgtcagagacgagagatgatgacactgaccataagggttcatctgcgcccaagaaaaggaaatctggtaacacgtcggctgaaggtgaaccgtctcaagctgctgttgtgcgctatgctacggttgagtcgccatatcccgcaaagggaaggtctgccggcaaagcttccagtgtctgcacctggcagggcagcgcttcctagtgccaccccgaatctgaacattgggatggacatttggaatgcttctcctgccttggctgttcctgcagtgcagggggaagcgaatcctgggttggcgcttgcccgacgtgatggcgttactcaactggatgaacgtgaattgaagagggagaggcggaaacaatctaacagggagtctgcaaggagatctaggttacgcaagcagcaagagtgtgaggaattagccaggaaggtagctgacctaacaactgagaatagtgctctcagagcggaacttgacaacctgaggaaggcttgccaagacatggaagcagaaaattcacgtctattggtgagcacggtaccaagtgtcacaaccacactgggaatgagcatcgagccgccaaaggcgcagcagcatcatgacgacgagggccagctccacaagaaatctagtaataacagcaacgggaaaggaagccacaaaccggaggctaacactaggtgagagacaggtgaatgagaaagtgacagagatgagatgaggtgtttcctatctaaccacaacacccatcatcaaccagtgcgttttcacagcccgctggggggccatgtagagtcgccccccactgcagccatgtattatttatggctcgccgcggtgtgcgttgtgtgtttttttgtgtgtgtgtcgtgtaaacctattgatgtagctattgtaacaaaaacctagagagcctagaatttttatgtctgctaactcctgatgaggggggatgtaaccggccaatttggtgcctggtcgatcgtttagatgaaatgcgagcaaatatcatttgatagcccgcctcacaaaaaaaaagttttggattttttttgcgactttgcgggagtcttttatacaggctattgaatttttaaaaaaaaaaaaaaaaaaaaaacccaaaccaag

SEQ ID NO: 846 - DNA, 523 bp, Zea mays
  Clone ID: TF_LIB4740-086-A1-K1-E10
acctcgagccggccgggaaagtgttggtgctccggcccggacctctctagctcgtctccttactaatagctagctatccgtcatggcggccaactaccaccactaccagatggcggtgcacgcggcggctgcggcggcggcgtggaggagggagccggacagcccgcagctgagcttcgtgagcgggtgcagctccctcttctccatctccacgctgcaggacgacgacgacgaccgagccgccgccgtcgtcatcgccgccggccacgcgctgccctccacgcccgtctcgctcgcgggcttcgtcgccgacgaggtcgacatggaggtgcagcaggccagcggcgacgatcggaggagcatcaggatgatgaggaaccgggagtccgcgctccgctccagggccaggaagagggtcagtatagtaaactcactacacaaaaacatgtacgtcggtctgtactataaagtatatatatacaaaacagatcgtacgtttgtatttggatacagtacgttttcg

SEQ ID NO: 847 - DNA, 1526 bp, Zea mays
  Clone ID: TF_ZmC3533_1
cctcgaggccggccgggcatcattttcataaggggaggttctgcccaagttttctcctgtgacgacgaccatcagttttccaggggggagattctgccaaaattttctgcactgaccatcagtcttccaggggaggttctgccaaaattttcttctctcactgtcacttctccaaggccaagccctgccaaaatttccttcatatatcacatgcatcgtagacatacagacaataaactctaatttgcaaaggtaacaaaaaaaagagagagagtgctttcctccttggccttgatggtaggctagtagagaaaaccgcgcgcagcatctgtttacatgttgttgctcgtcctgtccgagcaccttctttccagatttatggtcggttctgccctaacccgccttgtccagtccttctctgttgttttcctctactggttttatgtcttctcagtaagccgccagtagttggactcaccttttcaagttatctaggcatttcctatatatttaccacatataaaaattatactaaggcagtaacaaaagaggtgcctttatatctgacaaacagaagggagtgaaaaagtttagattacacctcagtttgcctgtggtgacaactatgtcaagtggcacttcgtccggatcgagccggtgggtccaaagttctagatccgaggatgacctagatctccaggcccagatggagaggaggagaaagcggaggaaggagtcgaatcgggagtcagctcggaggtctaggcaacggaagcaagaacaccttgacgacctcacctcacaggtaaatcagctgaaggaccagaacaagcagctcagcatggcactgagtataaccagccaaaaccttgtggcagtgcaagcgcagaactctgttctgcagacccagaagatggagctggacagcaggctgggtgccctgacggagatcctctggtacatgaactcaagcaccagcaccagcactgctcctacaaatccagccatagcgaacgacttcacagcatggagcagagcctctgatattcttggtggaaccagctacagcgccatagacctgtaccaatgcttctagctctaagctctagctctagaagagagaaggtggctgtggcatatgacatagtggtagggccaggaagaaaggaggcgggcaggcatcaagttctgttcaatcgtgtggggcctttgtgtcactgttgatgtgtgcagtgtgtgcttgatgcttctccctccactgtttattttcgaggcgacggcgatgttttggtttggtagagactcaaggacggacaaaatggcagaaagttgccttggctttgtgtgacgtaaatgcagttgttctccggtatttatatggcaaataatattgggccagctagtgaaaaagacaggcagatgatttgatgtggctcttgatatatagggaaataatatgcgtaacgatgattataatgtttattaagatgtcgatttgatgtcaattgatatccgtttccagtctc

SEQ ID NO: 848 - DNA, 696 bp, Zea mays
  Clone ID: TF_ZmC245141_1
ggcaggttcatacatggctagtgagtggcgcgctcagccattgtctattgctacaggtgctactttggattcaatttactctgatgaccagattacttcgccatcatttggtgcactttcggaccctcagacacctgggcgcaagcgtggtgccttaggggaggtagtggataaggtggttgaaagaaggcagaagaggatgataaagaatagggaatcagctgcgcgatcaagagcgagaaagcaggcttatactaatgaacttgaaaacaaggtattccgtctagaagaggagaataagaggctaaagaaacagcaggagttggatgagatactgagctctgctcctcccccagaacccaaatatcaactcaggagaacgggttcggctgccttttgagtttcggcgctgacaatgctcatagtgatttttgtacattatacaaggattctactttatatggtttccttccttttgtattagaaacatttgatagattgagggtatagctttttcccggcccggtaggtcagtgtatgtaggtcgctagcaagctgtagcatgtcctggcggatcatttccttggtgtctgtcagtgtgtacatcttctagacacatgtctaagtctgagagcttccttatacgagaaggtattcaggtatgtgttgcccaggtgtctcctgctgttctgtttc

SEQ ID NO: 849 - DNA, 1104 bp, Zea mays
  Clone ID: TF_ZmC773_12
acacagactctttctctctcctcccctctctcgtcctttctctctcgtccgatctgcatctgcttttctccccccttgtctgtctccctcctgtccgtggcgtgcgcaaagatttgattttttttttctcggggaggagccggagtccgagcagcagtggcggctggagggaggagatcctgatctgttgtcgcagcggggaggggaggaccggaggaggaagatggctgcgcaggagcaggagcaggagaagcagcaggcgaagacgagcaccacgagctcgctgccctccagcagcgagcgctcctccagctccgctcgcaacaacctcacggaaggaggggcggagagcgacgaggagatacggcgggtgccggagatgggcggcgcgtcggcgtcggcctcgtcgggcgccggcgcggatgagcgtcccaagggggaggacggcaagcaggggcaggtggcggcgggggcgcagcctccggcgggcgggaagaagcgcgggcgcaccgcgggggacaaggagcagaaccggctgaagcggctgctgcggaaccgcgtgtccgcgcagcaggcgcgggagcggaagaaggcgtacctgacggagctggaggcgaaggccaagggcctggagctccgcaatgcggagctggagcagcgggtgtccacgctccagaacgagaacaacacgctccgccagattctgaagaacacgacggcgcacgcgagcaagaggtccggcggcggcgccggcggcaagggcggagacggcggcaagaagcaccacctcgccaagagctagtgagaaatgagagagggagctggttcgtgccctgctcgcgctcgcctgatctgaccattgctggcgtgttgctgttcctgacgacgccttctctttttcttctttttctcctactgttacccgtgtttcgtctctcgcctcgctgatgcacactgttttaactgttagccatcccgtctactcaccagtgaacactgctgctagttaatttctcggtggtttagggtgccgtgccagaacgccgtgtaacttcgttcttgtactatcttgtagttcagccttgcggtttggcaattcgattc

SEQ ID NO: 850 - DNA, 1304 bp, Zea mays
  Clone ID: TF_ZmC773_19
gactctttctctctcctcccctctctcgtcctctctctctcgtccgatctgcatctgcttttctcccccttgtctgtctctctcctgtccgtggcgtgcgcaaagatttgattttttttttttctcggggaggagccggagtccgagcaggagtggcggcgggagggaagagatcctgatctgttgtcgcagcggggaggggaggaccggaggaggaagatggctgcgcaggagcaggagcaggagcaggagaagcagcaggcgaagacgagcaccacgagctcgctcccctccagcagcgagcgctcctccagctccgctcgcaacaacctcacggaaggaggggcggagagcgacgaggagatacggcgggtgccggagatgggcggcgcgtcggcgtcggcctcgtcgggcgccggcgcggacgagcgtcccaagggggaggacggcaagcaggggcaggtggcggcgggggcgcagcctccggcgggcgggaagaagcgcgggcgcacggcgggggacaaggagcagaaccggctgaagcggctgctgcggaaccgcgtgtccgcgcagcaggcgcgggagcggaagaaggcgtacctgacggagctggaggcgaaggccaagggcctggagctccgcaatgcggagctggagcagcgggtgtccacgctccagaacgagaacaacacgctccgccagattctgaagaacacgacggcgcacgcgagcaagaggtccggcggcggcggcggcggtggcggcaagggcggagacggcggcaagaagcaccacctcgccaagagctagtgagaaacgagagagggagctggttcgtgccctgctcgcgctcgcctgatctgaccattgctggcgtgttgctgttcctgacgacgccttctctttttcttcttttctcctactgttacccgtgggtttcgtctcttgcctcgctgatgcactgttttaactgttagccatcccgtctactcaccagtgaacactgctgctagttaatttctcggtggtttagggtgccgtgccagaacgccgtgtaacttcgttcttgtactgtcctgtgtagttcagccttgcggtttggcaattcgattcaagattactgtacgctgccagctcttggagagaaaaaaagaagttttcggtgcatgtaaataaccatgcgcgggaaagaaaaacgtgataacaatcacacgacgtcaagcggcgagggtctgaattaaggtcatggttgtttacctctagtagattatataatacaacttaaataaagtaacgatctgttt

SEQ ID NO: 851 - DNA, 1194 bp, Zea mays
  Clone ID: TF_ZmC2315_11
tgggaccctcgaggccggccggaacccccttccctcctctccgcctccaattggagtggctcgccttcttccccgcagccagcacgagcttgtcgagatttcagctcgtttctccgccagaggtcgagcaggccagcttcccaggaccgaagctctgcccggttcgccagtccaggaactctgctctcccggggccagagatccaaacaaatctctgcgttggggttctccggggttccttgcgctggagggaggtttcgttctcgccggccatggtttggctgagaagaaacagcagcagcagcatattgatgcgaaatctctgagctttatgaagatcgccacccacctgcgccgctcctgcttcctccactccttctcggtcgtcctcctctactggttttatgtgatctcgtaacttgccctcctccggatccgccattccccgtgccccctctctctctctctctccgtcccctcttgcttctcccttctttcttgccttcccgaacaaccgccgaataataatagcactagccagaccgaccgggggaaaaaaagaccgtgtcttgatgtcgtcgtcgtcgctgtcgccggcggggaggacgtccgggtcggacggcgactcggcggcggacacgcgccggcgcgagaagcggcggctgtcgaaccgcgagtcggcgcggcggtcgcggctgcggaagcagcagcacctggatgagctggcccaggaggcggcgctcctgcaggccgagaacgcgcgcgtggcggcccgcgccgccgacgtcgcgtcgcagcacgcgcgcgtcgagcaggagaacgccgtgctccgcgctcgcgccgccgagctcggcgcccgcctccgctccgtcaacgaggtgctccgcgtcgtcgaggagttcagcggcgtcgccatggacatccaggaggaagtaccgcccgcggacgacccgctgctccgcccctggcagctgccctgctacccggccgtcgccatgcccatcggcgccccgcatatgctccgctactgatgagtgatgaatgattgcccccgccaaccatacgaggcagacagagccggggctggtcgtgtgctagacaaagaagaattggctgcgtctcaacaacacatgattattgctgctgatctgttctctctgtgtgtatgagatgatgctcgtttacatatgtatc

SEQ ID NO: 852 - DNA, 745 bp, Zea mays
  unsure (1)..(745): unsure at all n locations
  Clone ID: TF_LIB4765-003-R1-M1-E5
ggccgcttttttttttttttttttaaccatcaaatcgacatcttaatcagcattttatcatcatcattacgcatataatttcccttatacatatatatgaggagctttcaaatcacctacctctctttcactatctggcccaatattattatttcctatatactccctcaactacaagagaacaactgcgctgcattcacgtcacagaaagccaaggcaaagttgccattgtccgtcctttaggctcgtccgcaatcaagaaaccaaaacgtcgccgtcgcctccaaaacaaacgatggagaagcaacaagcctcctttcctccgcattatctctattagcaccggtacgcgtctatgggctgctgctgctggttccatgcgctggcgccaagaatatcaccagaggcgtcgctccagctccatgtcgtcgtgatgccgtccgccatggctggattcgtaggagcagcagtgccggtgcttgagctgatgcaccataggatctcggtcagggctcccagcctgctggccagctccatcctctgggtctgcaggacagagttctgcgcttgcactgccacgaggttttggctggtcatgctcagcgccatgttcagctgcttgttctggcccttcagctgatctacctgtgacgtgaggtcgncgtggtgttgctgcttccttagcctagacctcccagctgactctcggttcgactcctttcttggcttcctcctcttctccatc

SEQ ID NO: 853 - DNA, 1363 bp, Zea mays
  Clone ID: TF_ZmC34339_1
cagcgacactgcggcgggggcggcggtcccgcgttccctgtcgtcgcctggcggctccgagcagcaagtgccgtccgcgtccggcctgccgccgcgcggggcggggcaccggaggtcccgtagcgatttcctcgtcgggttctcgcgcccgaatcagctctccctgccgatgactcctgcagctggggaatacaggtcgagggaagcctccgtactcgaggagctattccgctcgtacagggacccgaatctcagctcctccggggataacaacagtgaaaggaacgatcacttaggcagacaactcaccggccaaggcgcttggagccccggtgatagcagcgacaatgacgctgagagctgggcggctagtggcagcgcagccgcaggcaccagcgctagccatactcgccattgccgcagcctgtcggtggacagcatcatgggcaatctcaattttggaggcctggaccaggtttctctgagagtgccacctctgtctccggtggcagacgccagtgtcagcctctcgcgcactggaaccggagcatcgggcggtgcggttgcgactgcctcttctcaacctgccaacggagagttcagcgagtctgagatgaaaaagatcatggccaatgatcgccttgctgagctcgctcttgttgatcctaggagggtcaagaggattctagctaatcggatctcggcagcgaagtctaaggagcgcaaggtgaagtacatgggtgagcttgagcgcaaggttcgtgtgctgcagatggaaactagtacgttatcttcaaaagcagcatcgtcgcagagggaatgcgaggcacttagaattctgaacaatgagatgaagatcaggctgcaagcaatggagcagcaagcacagctgaaagatgctctgaatgaagcactgactgctgaagtgcagcgcctgaaacaaattgctggtgaggccagtgatcctcatgtgccgaatatgagccgcaagattgtcgaacagcagctgcagaagcagccatcggaggcccagctggctgagcagcagcagccacaggaatcagaggagttcaaagctcagcagaagcagtggaaccattaataagacgcgtttcacagaggacatgcttgaaggtctaatccatacagcagatccatgaagggacaccttgtgttctcccggacattcgttttttttttccttaggttttagaacgacagcggttggacatcctgtcttttgtggtttcttgcaaaggtatttggttggttggcagttggtaatgcatggtgtgggttctgtgttgtacaagcttccagtctctttagttttccgctagagctattcaaaccattttcaggt

SEQ ID NO: 854 - DNA, 1719 bp, Zea mays
  Clone ID: TF_ZmC3163_1
cttagcttttccatctccttttctcctccaccgaaaatgattcgatttggcgatttttttctctctctctctcactctaaaaccgcccattttttcagctataaatggccccctcgtccatgcttcgggggaaggccctttccccctctccccgaactcccttgctaggttaccacgttcttctgcccttcaggccctccctcatctgatcatctctctcactctttcagtagcagcgcagttttgttactgacacacgccccctgtcctgcctgtctgtgttgacctgatagtactagcaaagtttggagactccatccaacctcttgtctctgaaacttggacttgttgccgatcccaaggggaggttctgccaaaatttcggcttctgaacatccatttccagaggggatcgagggaggttctgccaaattttgctcctttgatcataagtttcccagggggaggttctgccgaaatttcatctcctgtgctgtgacgaccatcagctttccagggggagagggggagattctgccgaagttttgtgggctgaccatcagtcttccaagaggaggttctgccgaaattcccttctctcatcatcacttctccaaggccaagcagtcctcctggtcctgccgaagtgttctctgaacaagagggcatgcatgcactccttcttgtccctgatgttagactagctagctagcactagcagagactgaggccgcagcgtctgttgagaattcagatgttgttgttgctcgtcctgtccgagcacctcctcctgtccggatttatgatcggttccgccataacccgcctcgtccagtccttctctgtcgttttcctctactggttctatgtcttctcagtgagctgccactgccagtagtgccagtagttgatctcacctttttcaagtattaataactcggcactataacaaagaggtagctagctatgtcaagtggaagctcgtttgggtcgagccagtggactcagagatccaggtcggcggaggatgacgtggacctggacctccaggccgagatggagaagaggaggaagcgaaggaaggagtcgaaccgagagtcggctcggaggtctaggctaaggaagcagcaacaccacgacgacctcacgtcacaggtagatcagctgaagggccagaacaagcagaactctgtcctgcagacccagaggatggagctggccagcaggctgggagccctgaccgagatcctatggtgcatcagctcaagcaccggcactgctgctcctacgaatccagccatggcggacggcatcacgacgacatggagctggagcgacgcctctggtgatattcttggcgccagcgcatggaaccagcagcagcagcccatagacgcgtaccggtgctaatagagataatgcggaggaaaggaggcttgttgcttctccatcgtttgttttggaggcgacggcgacgttttggtttcttgattgcggacgagcctaaaggatggacaatggcaactttgccttggctttctgtgacgtgaatgcagcgcagttgttctcttgtagttgagggagtatatatagtaggaaataataatattgggccagatagtgaaagagaggtaggtgattttaaagctcctcagtagatatgtataagggagagttatatgcgcaatgatgatgataaaatgctgactaagctgtcgt

SEQ ID NO: 855 - DNA, 2020 bp, Zea mays
  unsure (1)..(2020): unsure at all n locations
  Clone ID: TF_ZmC31647_1
acgaatacggcagcagcagcggcctgcgtgcctgcctgcctatccacccttcctcctccggcctctggctcggacacctgcgctcgccctcgtgcggacagagccgagagcggcagcgacggaggcggggctgcgccggcctctcaatgcagcagcagccggagcctgccgatccgccgggccgggccttaccgccaccggcggtgccggcgccggcgcctgtcgccgcgcgcgcggcgcaccaccgccgggctagatctgaggtggccttccgcctcccggacgacctcggcatcggcggcggcggtggccctgacggcgacaccttcgatgatatcggctcggaggacgacctcttctccaccttcatggacatcgagaagatctcatcctccgggccctccgaccgcgaccgcgccgccgagacgtcgtctcccccgcgccccaagcaccgccacagcagctccgtcgacggctcgggtctcttcttctcgcccggcattggcggcggcgcgggcaaggatgctgcggcgtcgctggccgaggtcatggaggccaagaaggccatgactcccgagcagctggccgagctcgccgccatcgaccccaagcgcgccaagagaattctagctaacagacaatcagcagctagatcaaaagaaagaaaggctcgttatatgacagaccttgagcggaaggtccaaactcttcagactgaagccaccaccctgtcagctcaacttacactatttcagagggacacgaccggactttctacagaaaatgcagagcttaagataaggttacaggccatggagcaacaagctcaactccgtgatgctctgaatgatgcactaaagcaggagttggagaggcttaaacatgctactggtgagatgaccaattccagcgaggcatataacatgagattccaacatgttccatacaactcttccttcttcccgctttcccagcaaaatgcatccccacaccttggtagcacccagctgccactgccgttccacccaccccatcccaacgtgccaaaccaccagatggtgtcccaccgaaacactctcccggacataatgcagcaagagtctctcggacggctgcagggtttggacattgggaaggggccactggttgtgaagttagagagcagctcgatctctgcaagtgaaagcagcagcaccttctaacgaggcctacaagtgaaaacccaccgtttcagtaggttccattgttcatagtagcctgacatccttgtgctgcttcctgctctgtaagcccatttgttatttaattcattcaattagttgaaattatacgctgtcgcactggctgatcaatcatgttgtagaatggtccatgaacccttcaattctgtttgttttgggttcgtttcctgtttctgtgactggtatcatcagggcatttgggttttggagtgaatttctctggtggtactttgttgttgttttagctatgttccctcatggatcctctcattggaacacacatatgtatagggtttggacattggaaaggggccactggttgtcaagtcagagagcagctcgatctctgctagtgaaagcagcagcaccttctaacgaggcctaccaatgagaatctgccgtttcaatacgtcccattgttcataatagcctgacatccttgtgctgcttcctgctctgtaagcttatttgttatttaattcattcaattagttgaaattgttccttgtcgcactggcagatcgatccatgttgtagaatgatccaggaacccttctagtctgtttatgttttgggaccatttcatgtttatgtgttcggtattagggcatttggattttggagtgaaattctctgatgatacttttgttgtgttcaaaaaaaaaaaaaaaaaaaaaaaaattttggacatactcactctgtaccaaattcgttttaggccaatgnnnnnnnnnnnnnnnnnnnnnaaaaaaaaaaagaaaaaaaaaaaaggtgtgtgg

SEQ ID NO: 856 - DNA, 927 bp, Zea mays
  unsure (1)..(927): unsure at all n locations
  Clone ID: TF_ZmC99570_1
gggtacctcgaggccggcncgggaaccaaaccaaaccaaagcatcacaagcaagcaagtaatataagcgctaactagcaaagaagaagagaaccccgtcgagcaagactagaagagagagcaataattatgtaccaccaccatttccatggcgaggtggctagcctccgcttcctgtcccctccgaacgcctcgacgtccttcgcggcgcaccaccacatgaacatggcactgccgcctccgtcctacttccaagacgacgacgctacccttgcagccatcgacggcggcggcgacgcggcctgttttgatgagcttgacaccatcgtcgtcgtccgggaagcagatgccgcagccgcagcccgctgccacctcaccggcagcaacaatggcggcttgtcgggctccgaccagctgctggacgctgctgtgattatggcggccgacgaggagcgccggcgccggcggatggtgtcgaaccgggagtcggcgcggcggtcgcgcatgcgcaagcagcggcagctcagcgagctgtgggcgcaggtctcgcacctccgcggcgccaaccgccgcctcctcgacgacctcaaccgcgcgctcaggagctgcgccgacgcccgccgggagagcgccaggctgagggaagagaaggccgagctgacgaagaagctcgagcagctgctgcaggcggagaagggctcgttatcggaggcggccgagccatgcaagtcgtattgctgaatgaccaagaagatggagagttaattaattatcatccgcccgggcgacccagtttttagtcgagaggagttaattatttatatctcgataactaataagaacatgcatgtgtgatgatcaagctaattctgttctataaagggagttttggtaccctaattaaggataaggataagttaacgaggat

SEQ ID NO: 857 - DNA, 1636 bp, Zea mays
  Clone ID: TF_ZmC1391_4
ggttcgaactccaaaccaaacgccccagccccgccgcacgcatacggcatacgcatccctcatctccctctcctcgccttcccgccgcggcgccgcctctcctttccgaattccgactcccacctccccggagtgcgtgtttccgcatccggctcgtccgccgatcctcgcgaggcttcctcgaccccgacccggaccggcgcggccacaccggttcaagacattcacaaaaaaaacatgggtcatgatgaagctgtagttactcagaattcagtaaaagcaccatcaccacccaaggatcagccagctatttatccatgctttgattggtcgactatgcagactatgccaccggctgcctttggaaaatcatatgctgcaatatacccgcatgctggtggtttcctgcatcaactcatgcccctagtggtaaacccattgagtgcagagccagctaagtctgggaacagcaagcatgctagtttaaacatgaacctaaaggaaattcatggatctgctgtgtcaagttgcatcagtcagaaaacacctggtgatcctcgccttgcaggctccggagatggtgaatctttcgcgaagggcgtcaattccgtcggcgtcgaggcgactgcctccgcgcctgtctcccactgaaatcgccttgccaacatcactgctcccccagatctaggcctccctgcctcagccacgtgaacgtcgagtcgcttctgccacgcaaaaccatgtgtgagcaccggtagtgacttcaaagttagtggtccaacatcaaccgaatggccagctaaggccgacaaggaatcgaagcgtgaaaggaggaagcagtcaaacagggagtctgcccggcgctcaaggctgaggaagcaggctgagactgaagaactggctcgaagtgtatagctcctgtctgaggagaacacgtcccgcagaagctagataagcaggctaacggaaagcgcccagaaactaaggatggagaactcggctctgatggagaaactagcggacggtacatcagatcaagcacaagaagcttccgccggccaccagacgacaccaacggcgccatcgtcggcttgcgtcgtcaaaaacttactctggatgatggacggcgaagctgcgtcaagaggcggaggcgtcagcggcttcctaagccggcgcagggatcacggtgcgcccatgctccgccagctcctgagctcgggtcctctggcggctgacgccgtggccgcgagctgatcagtgccgtgcttcccttgtgccgagcgcgtgtggactggcgatttttgttaaaagagcgcacaagccgccccgcgagactaacgcacggacgacctgtaaattacagtagctatgcctatgtatgaggcatcgttccggccactctgctgagagccgatatacggatcccgtcactgagcttggtagctctctgtcgttagagtggctgtgccaaactgaatcaactgacacgattcagcagtactaataataaccatcaggatgtttgcctctgtatccgtcgtcgctcgtttcgtctcacctcccacttcgcctttgccggtgctgatcagcctagaagggaccagcgatggaaaaacccaaaggtgagcggaactcc

SEQ ID NO: 858 - DNA, 1636 bp, Zea mays
  Clone ID: TF_ZmC11253_1
acgaaaggccatgctccatcatcatcgccccttcgtgggccccacgcccgcttcggttggagacggcccatacggtccaccgagaaccgtgtccacgccagctcttcctcctcctcccctactctgacctatcggccaatgtcgacaaagaaaatggcaagcccccgcccggcctgtcttattcaggatcgcaaggagtggtaaacccgacctcgccgatgcatccagtgcggccgcgagcagtggtccctcgcgtgcctagctccccggcagctaacctgaatatcggaggggactactgggcagctccgggttgtgcggctgtccctgcagggcacgggaaagcgccagctggatcagctacctttcagcccattggtttcctcgagctgaaccagctgacgccaacaccacgaccctcgaaggcttcaaaggcgtcagaacaagatcaacctccagctaccaccacatccagtggaacagcttcagtgtaccctgaatcgcccagctttcaggcctactcagcaattccaccgcatgcgttcttcccccctaccgttgctgcaaatccacaggcccatccatacatgtggggggctcagcccatagtgccaccttacgggacaccgccgccaccaccttatgtgatgtatccacctggaacagtatatgcccatccctctacacctcctgccatgcatccatttggccattatcctatgccaacaaatgggcatgttgaaactcatggagctgcgccaagcgctccggaaatttcagggaaaagcgagcctggccgaacgtctgctccatccgccaacgggattacctcgcacagtgagagtggaagcgagagtgagagcgaaggaagtgacgacaattctcaaaacgattcacactcaaaggacaatgatgggaaggaagatggcaattctcagaacggcatgtcttattcaggatcgcaaggagtggtaaaccaaaccatggcgatgcttccaatgcaaccgggtgcaatggtcggaggagttcctagctccacggcagctaacctgaatatcggagtggactactgggcagctccgggttctgcggctgtccccgcagcgcacggcaaagcgccagctggttcagctcgaggagaccaatgggatgaaagggagctcaagaagcagaagcggaagcaatccaacagagagtccgctcgcagatcccggctgcgcaaacaggctgagtgcgaggagcttgggcaacgtgctgaggctctgaggtcggagaactcctcgcttagggccgagctcgagcggatcagaaaggagtacgaacagctactttcacagaacgcttccctaaaggaaaagctgggggctgccagtagtgattcgcttcctgatatgaacgaacagaacgaccagaacgacggcgacggcggctacaggaagcagcctgattccgatggccaccagcctgggagcgagtcctgacccgtttttagctcaggattcttttggaatgcacattgcttatatattcattctcttgaacgttgtggaacgcagcataggaaggaaatccaactttaattagaatcgatacgctgtcatccctcatgcatggcgggagaggtcaggagagggtt

SEQ ID NO: 859 - DNA, 580 bp, Zea mays
  Clone ID: TF_ZmC11253_2
cggagtggactactgggcagctccgggttctgcggctgtccccgcagcgcacggcaaagcgccagctggttcagctcgaggagaccaatgggaaaaatacatcctactcaccacagactgtgtttgtatcacgtgcaaattgttcaggatgaaagggagctcaagaagcagaagcggaagcaatccaacagagagtccgctcgcagatcccggctgcgcaaacaggctgagtgcgaggagcttgggcaacgtgctgaggctctgaggtcggagaactcctcgctcagggccgagctcgagcggatcagaaaggagtacgaacagctactttcacagaacgcttccctaaaggaaaagctgggggctgccagtagtgattcgcttcctgatatgaacgaacagaacgacggcgacggagacggcggctacaggaagcagcctgattccgatggccaccagcctgggagcgagtcctgacccgtttttagctcaggattcttttggaatgcacattgcttatatattcattctcttgaacgttgtggaacgcagcataggaaggaaatccaactttaattag

SEQ ID NO: 860 - DNA, 740 bp, Zea mays
  Clone ID: TF_ZmC5008_9
tcttccgggggcgcccaacacgtccccgtccagattgatccacccttccccttcgtctccctccctccatccaatccaccccctctcccccttctcgtcgtcgccgccgccgccgcccatccggggcttggactgtcctttccccgttctgctggtagcaaatggacgacggggacctggatttctccaacccggacacgtacctgtgtccggccctcggcaccgacccgcccagcagctgctccatggacagctacttcgacgagatcctcaaggacacggagcacctcgcctgcacgcacacccacacctgcaacccgccggtgcacgacctctcgcacacccacacctgcgtccacgtccataccaagatcgtcgcggcctcgccgggcgacgccgagtcgccgtccgagaacaacagcaacggcaacgccccctctaagaagcgcccgtcggggaaccgcgccgccgtcaggaagtaccgggagaagaagaaggcccacaccgcatcgctcgaggaggaggtggtgcacctccgggcgctcaaccagcagctcatgaaaaagctccagagccacgccgcgctcgaggcggaggcggccaggctccgctgcctgctcgtcgacatcaggggcaggatcgagggggagattggtgcgttcccgtatcagaggccagcagcggtcaagaacgtcgacctcctgtctagtgttgaccaggaaagccttcttggcagcgct

SEQ ID NO: 861 - DNA, 1388 bp, Zea mays
  Clone ID: TF_ZmC27955_1
cgccgttcaaccctcttctcgcctgatcgcctcccgcacgtacctctctatatttgtttctcccatccatgcgaagctccggcatctagctagcaggtcgctcgatcgccatgtccgacgatagcgacggccagcggcaatgccgccggggcgtcaccgtcgacgtcgagctcggcgccgccatggcgcttgccgacatggccggggtcgccggaccgggcggcgaacagccgccgcccgtgcggcgcgctactcccgctccttctgctcaccaggaggacgaggcgagcacgcggctgagcctggagctaggggaggtgagcatccaggcctccccgtgctccagcagctccagctttggcgggcacccgccgccgccgccgtcccaccaggcggcgtaccagcagcccgccgtaccggagccagcgacgactggctacggaccccggccccggcacgcggtcaccgaggccgagaaggaggcgaagcggctgcggcgcgtgctggccaaccgcgagtccgcccgccagaccatcctccgccgccaggccatccgggacgagctcgccaggaaggtcgccgacctgtcgtcgcagaacgagagcatgaagaaggagaaggacgtggtcatggaggagtacctgtcgctcaaggaggcgaacaagcagctcaaagaagaggtggcgaagacgtccaggaagccggcgatgccagcgcagcagcaggcggcagaatccttggtgccggcgccgccgcggccggggttcctgtactcagcggcaccgccggcaccagtgccggtgccctatgtctggggctcctggccgcccagcgccgccgccgggagcgagcagcacggcagcccgccgccgctctgcctgcagccctgcgcgtggtactacccggccgtagcggacccgcgcgggtcgccatcgtccgcgcacgcgcagcagccgccggcgttccaggacccgcgcgccgcaacgggcgaggaggacacggacgacgacccgtgctcgctcacgctcggcctcgaggtcgacaagcggagcgcgcccgtcggtatcgtcgcgggcccggcctccggctccggctccggcggcgggggagcgcagagcgacagggacagggcggcgcaggcgaggaggcggaggagggaccttaccaagctcaagcacacgcacgccgccgcccgccccggctcctccgagcagtggtaggcgcggcaaaaagcttggacaggcattgcgggcatgcacggcatcgcggtgccggtggtgactccattggttttcttctcggcggcgaactaaacagcttcgtgatctcttccgttttcttttcttagtatattctttgctgcaatatgtaactgaagaaattaaacg

SEQ ID NO: 862 - DNA, 1878 bp, Zea mays
  unsure (1)..(1878): unsure at all n locations
  Clone ID: TF_ZmC3163_2
cctcgaggccggccgggnaaaaaattcccaaaaaaaaaaaaaaaaaaaaaaaaaaaaaaaaaaaaaaacccttttccccctcctccccgaactcccttggctaggttaccacggttcttctgcccttcaggccctccctcatctgatcatctctctcactctttcagtagcagcgcagttttgttactgacacacgccccctgtcctgcctgtctgtgttgacctgatagtactagcaaagtttggagactccatccaacctcttgtctctgaaacttggacttgttgccgatcccaaggggaggttctgccaaaatttcggcttctgaacatccatttccagaggggatcgagggaggttctgccaaattttgctcctttgatcataagtttcccagggggaggttctgccgaaatttcatctcctgtgctgtgacgaccatcagctttccagggggagattctgccgaagttttgtgggctgaccatcagtcttccaagaggaggttctgccgaaattcccttctctcatcatcacttctccaaggccaagcagtcctcctggtcctgccgaagtgttctctgaacaagagggcatgcatgcactccttcttgtccctgatgttagactagctagctagcactagcagagactgaggccgcagcgtctgttgagaattcagatgttgttgttgctcgtcctgtccgagcacctcctcctgtccggatttatgatcggttccgccataacccgcctcgtccagtccttctctgtcgttttcctctactggttctatgtcttctcagtgagctgccactgccagtagtgccagtagttgatctcacctttttcaagttaataactcggcactataacaaagaggtagctaggtatatacctgccaaacaaacaagagggagtgaaaaaacttcagattacgcctcagtttgtgagctagaggtgaccatgtcaagtggaagctcgtttgggtcgagccagtggactcagagatccaggtcggcggaggatgacctggacctggacctccaggccgagatggagaagaggaggaaacgaaggaaggagtccaaccgagagtcggctcggaggtctaggctaaggaagcagcaacaccacgacgacctcacgtcacaggtagaccagctgaagggccagaacaagcagctcaacttggcgctgagcacgaccagccaaaacctcgtggcagtgcaagcgcagaactctgtcctgcagacccagaggatggagctggccagcaggctgggcgccctgaccgagatcctctggtgcatcagctcaagcaccggcactgctgctcctcctacaaacccagccatggtgaacggcggcgtcacgacgacatggagctggagcgacgcctctggtgatattcttggcgccagcgcatggaaccaccagcagcagcagcccatagacgcgtaccggtgctattattagctagctctacaagctagctagagagaaggcggtggtagggccaggaggaaaggaggcttgttgcttcgccatcgtttgttttggaggcgacggcgacgttttgttggtagagcggaggagcctaaaggacggacaatggcaactttgccttggctttctgtgacgtgaatgcagcgcagttgttctcttgtagttgaggagtatatatataggaaataataatattgggccagatagtgaaagagaggtaggtgatttgaaagctcttcatatatatgtataagggaaattatatgcgtaatgatgatgataaaatgctcattaagatgtcgatttgatggttacaacttgatatccgttgtgcctctctataaaccctacgtacgggtgcactctcg

SEQ ID NO: 863 - DNA, 1493 bp, Zea mays
  Clone ID: TF_ZmC3503_2
ccggccgggattgccaacccgctgctcacacactcacacacacacacacacactctacacgcgagcgagaccacgcgccggaccgccgcaagccggtcgccgccgccgcgacctggagcttgcgagctagctctggcctcgctgcctgcgccgactgagatggacccgcgctttccgctgccggccgcggcggcgccgtccacgggcggcggcggcggcgccagagggcaccaccggcgggcccactcggagacgttcctcagcttccacgacgcggacctgctcctcgacccggacggcgacttcttctccgacctcgacttcccctccctctccgacgactctccggccgcctccgaccccaccccgccgccgcatccgcagcagcagccgccgcaggcttccccggccccacgtccgcccggcgggacccacacgcggagcctctccctcgacgccgccttcttcgagggcctcgcgtttcagggacccagtgggagcgccgggggtggaggtgggcccggccacaagaggagcggctcgatggatggggacacctcgccgttcgagggcgagtcggcgctctccagcggcctgccggactacgccaagaaggccatgcccgccgagaggatcgccgagctcgcgctcatcgaccccaagcgcgcaaagaggattctggcgaacaggcagtcggcagcgaggtcaaaggagaggaagatcatgtacactagtgaactggagaagaaggtccagactctgcaaacggaggccactacgctgtcagcacagctgaccctgctccagagggatacaactggtttaactgccgaaaacagagagctcaagcttcggttgcagtccatggaagagcaagctaaactgcgggacgctttgaatgaagccctgcgagaagaagtccagcgacttaagatagccgcaggacaagtcgggaacatgaatgggaaccccttcaatggtggactccagcagcagattccatcctatttcgtgcagcagcagcacaggatgccgtactttggtggccaccaggctcagcttcacaatcaaaatcaaaaccatcgtcaccagatctcgtcaaatgttgggcagacgctcagtggtcagtccctaaacgactccatggatttcatgtgaggagtacaatatcagggccagtattacatcgtataccgactgcagttcagcactgtaaagatagctaaatgtacaatgtatgcatgtgcctcattggtagtgtgtagttagctcttctttgtatcattattctgaaaatggctcgtgtatgtcaaaatgatgtctcttttcttctttgctggtttctggagtaatgtgttagactgactagctacctttaacaatttatgtaaatctttagctttttttttaatggtggaaggttcttatacatacatacatacctgttaacttatttacagagtggagtttataagattttaccattttttaac

SEQ ID NO: 864 - DNA, 1625 bp, Zea mays
  Clone ID: TF_ZmC28236_1
ccgggctcccttggtgcctccactgcaattcgggaatgggttcgtgtcgggggctgtcggtcagcagcgaggtggtcccgtgccccccgcggtatcgcccaggcctgtgacggccagcgcgttcgggaagatggagggagacgacttgtcatccctgtcgccatcaccggttccgtacattttcggtggtgggttgaggggaaggaagccaccggctatggagaaggtagttgagaggaggcagcgccggatgatcaagaaccgggaatcggccgcgaggtcgcgccaaaggaaacaggcatatatgatggagctggaagctgaagtggcaaaacttaaagagctgaatgatgaattgcagaaaaagcaggtatgcttatacaatgtttgcatttttgtttcttggggcgcattaacttatgaaagtatttctcctgaaatagtgaaattcaaatagtttgttaatattcattcctgaattcgagaacctttggaattccagagaaccttttgtactttagcacattcttacatctttttcatcaatacttgtacattgtttactttattaggttttcaaaagtcaagttatcaatttttttacattttttgtcaatcatcacagtgcatttagtgttttttagcaaaaaggcactctggagcatttttggtgacgatgatttaatggtaaattggtaatcaccatagagcatttgacaaagtgaaatgcagtcgaagtccatctgataactgaaccatagatctttagtgtccatcagataaaaggcactatggagtagttcataagagttgtccttttcttctgtattttcttcttaaattagtttatcagacaaggaactgctgtaacttccatttgtgaatagttgcttcttggattctgatttatgacaatatagcttattgtcagcaatatttctgatgaactagaacatgtcagctttgcagccttatatgactaagttctatgtgtagtgagatcgcattctttatatctgctgttgtttagtaaatgactatcttttctaatttgcaggttgaaatgttggagaagcaaaagaatgaggtcctggagaggatgagacggcaagttgggccaacggcaaagagaatttgtctgcggaggacattgacaggaccatggtgagctgtagacccgtacggctgtacctattagcagtatatatgtagtaggtgaaggtgaacacacaaaggccagagttgccctggttgacacagccattaatccggagcttcggtctcgtaggcggatagattgcctgtgatttccacttcataggttttgcccatttgcaacaacaaaaaaggaaaaggaaagaaagaaagttcgggcgaatagaggagtttgtatgtagaaagaaagtttagattgtttgactcttataatgcgagatgaagacttattttgggacggagggagtatattgcttctttaggctttctggtttggtgatctcgggtataactgtatcatcagtccttgtgctttggaaaacgcaaaaccattttgtgatgtaaactttagatctgcagatgtccgctgtgcccatactgtagagattgcttaagatagaatacgttgt

SEQ ID NO: 865 - DNA, 2145 bp, Zea mays
  Clone ID: TF_ZmC7838_1
ccgccgccgccccccaccggccgccaccaccacgggaacccgctgcctttgccaaaacccaaagccaaatcctttgccaaacccaccgccgccgccgccaccacctccgccgccgccgccaccaagaccaccacccttgccgaatccggcacccatgccatgcccacttccaccgccaaggccatcgccgccgccaagaccaccacccttccctctccttcctcacatcttccttcgtcagccgcagatgcgccagcatctctcccacgggcaggaggaggaggagcgagaggcacagtgacagacagagagagagcgcgcgcggggggagcccagcacagcacctacactagctagccaccggccaccaccaccaccaccaccgaccgaatcgggtgcgcgcggcgcgctgctcgtcagctccggccggccggccgctttataaagccacccacccagccccgcccgatcgccatcgccatacccccgcctccgtccacggacacacacccgccttgccagccggcaccctcccggcctcccccacctgtgtcctccggcctcgccgccgcaaaacccgccgcgcaggccggttgctccgattgggagtgccaatcggagccaacagcgagggaagcacatgctgccgttcgtcctagagttcctcattgatgtcgcctgtgatcagtgagatcctcctctcggggtttatgatcaactccacactccggcgccgcacccacctggtccagtccttctccgtcgtcttcctctactggttctatgtcttctcatgaactactcgcccccatcatagccacgccccttctctcccactcctcctcctcctctttcccttccatctagtagcatctaccgtcctcctcttctctccgtgtcagtctctgccttcgtcgtcgccgtttcagtcgttccctaaaccttctttagcttgcatgcacttccctactgctgctagcaaagacctttattactagtgtcaattaagttacgaaagaagaagaaagaaagaaaatttcgaggccgagaaaaaagacggctttgatctctgctagtgtggtgtggtagtgtgtgcttctagtaagtaagcgagccagggatcaagaagcagagagctgctctgtctcttttgtctcttgcaagaatggcttcctccagcgggagcgggagctcgggctccctctcggcggcaacggcggccctggccgccgcggcgggcacggaggaggagctgcgcgcgctcatggagcagcgccgcgcgaagcggatgctgtccaaccgcgagtccgcgcggcggtcgcggatgcgcaagcagcgccacctcgacgagctgaccgcgcaggcggcgcacctgcgccgcgagaacgcgcacgtggccaccgcgctcggcctcaccgcgcagggcctcctcgccgtggacgccgagaacgccgtcctccgcacccagaccgccgagctcgccgcgcgcctcggctccctcaacgacatcctcgcctgcatgaacaccaacgccgtcggcgccgtcgccgtctccctcacagccgccgccgccgccgccgccgcttcctccgacccctgcctcgccttcgacggcgccaccgccctggacgacctcctcagatcctgccccgagaacatgttccagtaccagctctgctagctccagaccgcgcgaagtcaccatggcagcgcaaaacaccttcttttgttttgttttgtttttgtttttttttcttcttcttcttctggtgtttcaggtttagtaatctgctagtgagatggaagaactgaggtcagatcagacgtggtggtgactagccatgaaagtgaactttactgttactgtactgtgcgatcaactggtgggggtaattagctagctagctagctgctggggttatggttaatgcatgaactgctattagttaccaggtgtaagtgtaactctcgagtcctgctcttgttactgtttgtgtactgactgtgtcactccactactatgtaagaatcagagcagtaagtttactagtgtctctgctgtcaaacaaaggaagtgcaccatataatctacactttaattactcttgcctgtgtgccctgcagcgatcaaaaaaaaaaaaaaaa

SEQ ID NO: 866 - DNA, 738 bp, Zea mays
  Clone ID: TF_ZmC95773_1
cccacgcgtccggccgccagctccggcgccggggccagaggcggcggcggcgccgcggagatgacgctggaggatttcctcgccagggattcctgcgccatggcggcggtgatggagggggacatggcgctggggttccctgacggtgacggagatgcggcagggagcgtggcggggggagtgggcggcgtgaggggaggcgggaagcgggcgcttctggatcccgcggaccgcgccgtgatgcagcggcagaagcgcatgatcaagaaccgagagtccgcagcgaggtccagggacaggaaacaggcatacgtcgcggagctggaatcgcaggttatgcagctcgaggaggagcagacagaactgttaagggagcaggaggaccgacgccaaaagagacttaaggagctaaccgaaagggcagttccagtcatcaggaaaaaatcaccacaagatcttagaagaaccaactccatggaatggtagaaatgaccctgagccctgatgttcttctcttagaagttacagggtttgtttttctttgacttctgtttcttctagttttctttgatagctatttaggaatagtggaacgtgcgtgatcaagaagtcacgccatttagaattgatctgttgtcagattgacggttttcttgtgaatgtggccgggtgttgtataaataagaacaataaggttagcttgaagagtggaccaaaatatcctaattacaggcatct

SEQ ID NO: 867 - DNA, 1420 bp, Zea mays
  Clone ID: TF_ZmC1133_1
aggccggccgggcctcgggagaggtggtacttcctctcctccggataaaagataaggagtgtctctcctctctttcagctaagtccctgccccctctctttttcttacattcaggtcctcgcagctcctctcttttttcttgtttctttctttcgatctgcgagccgtccaggtccagtactctcctttccgtgaaggaactcttgcagccggcccctctggtttcctcgaattcttgttccccggtccctcctcctgtccccgcgtagatccgtccgtccgaggagcacaccgtccccacccccatgtttacccaccagttcctctgacggccgccgtgctccgatgaagctgagcgtgctccgtatccgccgctcccactccttctccgtcgccttcctctactggttctacgtcttctcatgaacgcatcgcccctctccacctgctgatccttcgccgtctctccctctctctttctctctctctagatagtctttcgaatccatctctagggctcttgtttctccccatcctccccccaccccaccccccaccaaacagattcaatccgacaagacaagcatccatgtcgtcgtcacgccggagctcgagccccgacagcaacgacacgacggacgagcgcaagcggaagcggatgctgtccaacagggagtcggcgcggcggtcgcgcgcgcggaagcagcagcggctggaggagctggtggcggaggtggcccgcctgcaggcggagaacgcggcgacgcaggcccgcaccgcggcgctggagcgcgacctgggcagggtggacggcgacaacgcggtgctgcgcgcccgccacgccgagctggccggccgcctgcagtcgctgggcggcgtcctcgaggtgctccagatggccggcgccgccgtcgacatcccggagatggtcaccgacgaccccatgctccgcccctggcagccgtccttccccccgatgcagcccatcgggttctgagaatctgagcctcagccggcgggagagagccaatttctgtcgtcgtgccgctgtctatctcgtattggtatatctattcataaatcatccttgtcatggtttgctcttcttgtcagtgttataaatttgcttcttgttagtgttataaatttggccatcggaaaggatgtgtttgtagttgtaatatcttgtttggagttgtaatatcttatcttgcttatgaaatcgaatatgcctatatatatatgttatgctgtacgagtatgtggctccaaatttgtgagccttctgtctgttatggtgaggcgatgaatccaatttgtgagcacacatgaaccaaaaaaaaaaaaaaaaaagcggccttctaactaccgggctcgtttctatataaaaaaaaaaaaaaaaaaaaaaaaaacccccccc

SEQ ID NO: 868 - DNA, 1371 bp, Zea mays
  Clone ID: TF_ZmC1133_2
ctccggataaaagataaggagtgtctctcctctctttcagctaagtccctgccccctctctttttcttacattcaggtcctcgcagctcctctcttttttcttgtttctttctttcgatctgcgagccgtccaggtccagtactctcctttccgtgaaggaactcttgcagccggcccctctggtttcctcgaattcttgttccccggtccctcctcctgtccccgcgtagatccgtccgtccgaggagcacaccgtccccacccccatgtttacccaccagttcctctgacggccgccgtgctccgatgaagctgagcgtgctccgtatccgccgctcccactccttctccgtcgccttcctctactggttctacgtcttctcatgaacgcatcgcccctctccacctgctgatccttcgccgtctctctctctctctctctctctctctctctcttagatagtcttttgaatccatctctagggctcttgtttctccccatcctccccccaccccaccccccaccaaacagattcaatccgacaagacaagcatccatgtcgtcgtcacgccggagctcgagccccgacagcaacgacacgacggacgagcgcaagcggaagcggatgctgtccaacagggagtcggcgcggcggtcgcgcgcgcggaagcagcagcggctggaggagctggtggcggaggtggcccgcctgcaggcggagaacgcggcgacgcaggcccgcaccgcggcgctggagcgcgacctgggcagggtggacggcgacaacgcggtgctgcgcgcccgccacgccgagctggccggccgcctgcagtcgctgggcggcgtcctcgaggtgctccagatggccggcgccgccgtcgacatcccggagatggtcaccgacgaccccatgctccgcccctggcagccgtccttccccccgatgcagcccatcgggttctgagaatctgagcctcagccggcgggagagagccaatttctgtcgtcgtgccgctgtctatctcgtattggtatctattcataaatcatcgttgtcatggtttgctcttcttgtcagtgttataaatttgcttcttgttagtgttataaacttggccatcggaaagtagtaataatgatcagttcgtcgtggttctcaactttgtgtggtgaatgtgaatgtcaaaaaagatgtgtttgtagttgtaatatcttgtttggagttgtaatatcttatcttgcttgtgaaatcgaataggcctatatatgttatgctgtacgagtatgtggctccaaatttgtgagccttctgtctgttatgaatccaatttgtgagcacacatgaatcaatttcgagattcgacatgtc

SEQ ID NO: 869 - DNA, 1316 bp, Zea mays
  Clone ID: TF_ZmC1133_3
ggcggcgagaatggcagcagcgtcttccgaaggagtgcgcagggaggagatgatggcggacggctgactgtagacagtggtcggcagggggcagccacgaacggggcccccgccagtcgtggtgacatgtggaaaaccgggcgctcgcagctcctctcttttttcttgtttctttctttcgatctgcgagccgtccaggtccagtactctcctttccgtgaaggaactcttgcagccggcccctctggtttcctcgaattcttgttccccggtccctcctcctgtccccgcgtagatccgtccgtccgaggagcacaccgtccccacccccatgtttacccaccagttcctctgacggccgccgtgctccgatgaagctgagcgtgctccgtatccgccgctcccactccttctccgtcgccttcctctactggttctacgtcttctcatgaacgcatcgcccctctccacctgctgatccttcgccgtctctctctctctctctctctctctctcttagatagtcttttgaatccatctctagggctcttgtttctccccatcctccccccaccccaccccccaccaaacagattcaatccgacaagacaagcatccatgtcgtcgtcacgccggagctcgagccccgacagcaacgacacgacggacgagcgcaagcggaagcggatgctgtccaacagggagtcggcgcggcggtcgcgcgcgcggaagcagcagcggctggaggagctggtggcggaggtggcccgcctgcaggcggagaacgcggcgacgcaggcccgcaccgcggcgctggagcgcgacctgggcagggtggacggcgacaacgcggtgctgcgcgcccgccacgccgagctggccggccgcctgcagtcgctgggcggcgtcctcgaggtgctccagatggccggcgccgccgtcgacatcccggagatggtcaccgacgaccccatgctccgcccctggcagccgtccttccccccgatgcagcccatcgggttctgagaatctgagcctcagccggcgggagagagccaatttctgtcgtcgtgccgctgtctatctcgtattggtatatctattcataaatcatccttgtcatggtttgctcttcttgtcagtgttataaatttgcttcttgttagtgttataaacttggccatcggaaagtagtaataatgatcagttcgtcgtggttctcgatgtgtttgtagctgtaatatcttgtttggagttgcaatatcttatcttgcttatgaaatcgaatatgcctatatatatatgccatgctgcac

SEQ ID NO: 870 - DNA, 1345 bp, Zea mays
  unsure (1)..(1345): unsure at all n locations
  Clone ID: TF_ZmC1133_4
gccggccgggccgggttccccatctccggataaaagataaggagtgtctctcctctctttcagctaagtccctgccccctctctttttcttacattcaggtcctcgcagccgcagctcctctcttttttcttgtttctttcgatctgcgagcagtccgtccaggtccagatccagtactcttctttccgtgaaggaactcttgcagccggcccctctggtttcctcgaattcttgttccccggtccctcctcctgtccccgcgtagatccgtccgtccgaggagcacaccgtccccacccccatgtttacccaccagttcctctgacggccgccgtgctccgatgaagctgagcgtgctccgtatccgccgctcccactccttctccgtcgccttcctctactggttctacgtcttctcatgaacgcatcgcccctctccacctgctgatccttcgctgtctctctctctctctctcttagatagtcttttgaatccatctctagggctcttgtttctccccaccccaccccccaccaaacacaagtccccttgttcaatccgacaagacaagcatccatgtcgtcgtcacgccggagctcgagccccgacagcaacgacacgacggacgagcgcaagcggaagcggatgctgtccaacagggagtcggcgcggcggtcgcgcgcgcggaagcagcagcggttggaggagctggtggcggaggtggcccgcctgcaggcggagaacgcggcgacgcaggcccgcaccgcggcgctggagcgcgacctgggcagggtggacggcgacaacgcggtgctgcgcgcccgccacgccgagctggccggccgcctgcagtcgctgggcggcgtcctcgaggtgctccagatggccggcgccgccgtcgacatcccgggcggggtcaccgacgaccccatgctccgcccctggcagccgtccttccccccgatgcagcccatcgggttctgagaatctgagcctcagccggcgggagggagccaatttctgtcgtcgtgccgctgtctatctcgtattggtatctattcataaatcatcgttgtcatggtttgctcttcttgtcagtgttataaatttgcttcttgttagtgttataaacttggccatcggaaagtagtaataatgatcagttcgtcgtggttctcaactttgtgtggtgaatgtgaatgtcaaaaaagatgtgtttgtagttgtaatatcttgtttggagttgtaatatcttatcttgcttgtgaaatcgaataggcctannnaaaaaaaaaaaaaaaaaaaaaaaaaaaaaagtaccttcggccggcgaccaccgctaa

SEQ ID NO: 871 - DNA, 981 bp, Zea mays
  Clone ID: TF_CC-ZMPO148024B07_FLI
tgcgttgattcctcgggtcgaaccaacgcgcggcgcggggtcccggtcgcggccatggcgcagctgccgcccaagatccccaccgtggcgccggcgtggccggagttcgggggcgggcaccagcagcagcgcagcccctccgtgggcacgttcctcgccgccgcgcccatgcagccgtcgtgggtggacgagttcctcgacttctccgccgccaagcgcggcgcgcaccgccgctccgtcagcgactccgtggccttcctcgagcccgtccgaccacaacagcatcaacgacgagaagacggataggggcgacgccgaggaggcacagagcaagtgccacggcgccgccgcggccaccgcggtggatcctaagcgcgtcaagaggatcctggcgaaccggcagtccgcgcagcggtcgcgcgtgcgcaagctgcagtacatctcggagctggagcgcagcgtcacgtcgctccagacggaggtgtcggcgctgtccccgcgcgtggcgttcctcgaccaccagcgctcgctgctgacgctggggaacagccacctgaggcagcggatcgcggcgctcgcgcaggacaagatcttcaaagatgctcatcaggaggcactgaggaaggagatcgagaggctgaggcaaatctaccagcagcagagcctgaagagcggcagggagcccgacgcggccccgtcggtccgcgacgacaaggacatgatcggcagcgaggggaccgccgcgcccggcccgccctcgtgatgaggaggaggtggtggggcgacacgtccagacatccgagtcggtcgctgtagtcggggatggccctgtcgcccgccctgcagcccatcacagcgaggttgccgctgccgctgctaggattggtgtgtgtgtgccgtgtgcgtgtccgtgtgtgcattctttgggggtgtgtaacgtgatgtgatgtaaagagaagaggaactgcatcggttcggttt

SEQ ID NO: 872 - DNA, 1277 bp, Zea mays
  Clone ID: TF_ZmC2362_1
agcccacgcgtccggtttccggcgttgcgccaccgttcccgcgtgttgcgttgattcctcgggtcgaaccaacgcgcggcgcggggtcccggtcgcggccatggcgcagctgccgcccaagatccccaccgtggcgccggcgtggccggagttcgggggcgggcaccagcagcagcgcagcccctccgtgggcacgttcctcgccgccgcgcccatgcagccgtcgtgggtggacgagttcctcgacttctccgccgccaagcgcggcgcgcaccgccgctccgtcagcgactccgtggccttcctcgagcccgagcccggccccggcgacggcaatgccggggcgcatgacttcgaccgcctcgacgacgatcagctcctgtccatgttctccgacgacctccaaccgccgccgccgcagccgcagacgcaggccgcgcccgcgccggtggcgagctcgtcgtcgccgtccgaccacaacagcatcaacgacgagaagacggataggggcgacgccgaggaggcacagagcaagtgccacggcgccgccgcggccaccgcggtggatcctaagcgcgtcaagaggatcctggcgaaccggcagtccgcgcagcggtcgcgcgtgcgcaagctgcagtacatctcggagctggagcgcagcgtcacgtcgctccagacggaggtgtcggcgctgtccccgcgcgtggcgttcctcgaccaccagcgctcgctgctgacgctggggaacagccacctgaggcagcggatcgcggcgctcgcgcaggacaagatcttcaaagatgctcatcaggaggcactgaggaaggagatcgagaggctgaggcaaatctaccaccagcagagcctgaagagcggcagggagcccgacgcggccccgtcggtccgcgacgacaaggacatgatcggcagcgaggggaccgccgcgcccggcccgccctcgtgatgaggaggaggtggtggggcgacacgtccagacatccgagtcggtcgctgtagtcggggatggccctgtcgcccgccctgcagcccatcacagcgaggttgccgctgccgctgctaggattggtgtgtgtgtgccgtgtgcgtgtccgtgtgtgcattctttgggggtgtgtaacgtgatgtgatgtaaagagaagaggaactgcatcggtttggtttggtttggttatccttgcatgcatatgcatctgcatcctctaaagctgccttccaccacctcccctgaattgtaatttttggtcgagcattttggg

SEQ ID NO: 873 - DNA, 614 bp, Zea mays
  Clone ID: TF_ZmC1049640_1
gcgaagaaggcgatgtctgccgcaaatcttgccgagcttgccctaatcgatccaaagaaagcaaagaggattataaataatagacagtcggcggcaagatcaaaagaaaggaagatgaggtacattgctgagcttgagcggaaggtgcagttcatgcagagagaagccacagcactggcaacccagctggcattgctacagagagacacggctgggctgactgttgagaacggcgacctgaagatacgtctggagagcacagagcagcagatccacctacaagacgcactgaacggggccctgaaatcggagatgcagcggctgaagatggcgacagggcaggcgggcaaccagatgatgaacttcgccgaaccgccgcacacgttcggcggtgcgaaccagcaggtcttccaccacccgggccaagcagtgccgccattcctggtggcgatgcaacagcagcagcagttgctgctgccgcacatgaaccagccgttgcaccctctgcagagccagccgctgcatcaggcggcgacgctcagcatcgacatggccgggctgccggcgcctccacctggccagtggcaatggggtggtgacacgtggtcggagag

SEQ ID NO: 874 - DNA, 640 bp, Zea mays
  Clone ID: TF_ZmC2315_10
ccggccggttccctgcgggaaaagaaagaaaagaacctgtcttgatgtcgtcgtcgtcgctgtctccgacggcggggaggacgtccgggtcggacggcgactcggcggcggacacgcacaggcgcgagaaacgccggctgtcgaaccgcgagtcggcgcggcggtcccggctccggaagcagcagcacctggacgagctggtgcaggaggtggcgcgcctgcaggccgacaacgcgcgcgtggcggcccgcgccgccgacatcgcgtcccagtacacccgcgtcgagcaggagaacaccgtgctccgggcccgcgccgccgagctcggcgaccgcctccgctccgtcaacgaggtgctccgcctcgtcgaggagttcagcggcgtcgccatggacatccaggaggagatgccggcggacgacccgctgctgcgtccctggcagctgccctacccggctgccgccatgcccatcggcgccccgcacatgctccactactgatgattgcctccaccaaccacaccaccatacatctgaggctgtcagctggggctggttggcaacaagacaagaagaattggctgcctctcaacaacattcaaagcagccaggtaggtagtagatgtgaacccacgcgtccg

SEQ ID NO: 875 - DNA, 1462 bp, Zea mays
  Clone ID: TF_ZmC2315_14
cccctctgtgcgagtttaccgaaacgacctcggcccggcattaaataagcctcccaggctcacctgatcccctcccccttccctctcttccgcctccgattgagtggctcaccttctttcccagccagcacgagcttgcaagcaagcgagctcctgagatttcagctcgcttctcctccagaggtcgagcagaccagactcctccgaccgaagctctaccacttcccagttagcctgtccaggaactgcttggccggagatccaaacaaacctctgtgttggggttctccggggttccttgcgctggagggaggtttcgttctcgctggccatggtttggctgagaagcagcagcggcagcatcttgatgccaaatctctgagctttatgaagatcgccactcacctgcgccgctcctgcttcctccactccttctcggttgtcttcctctactggttttatgtgatctcataacttgccctcccccggatccgccattcccccgtgccctctctccgtcccctcaaccttctccctcctttcttgcttccctcaacaatcgccaaataacagcactagcggcagcggtagaggatcttttcgaggtaagctaggccggccggttcccctgcgggaaaaagaaaagaaaaggaccctgtcttgatgtcgtcgtcgtcgctgtctccgacggcggggaggacgtccgggtcggacggcgactcggcggcggacacgcacaggcgcgagaagcgccggctgtcgaaccgcgagtcggcgcggcggtcccggctccggaagcagcagcacctggacgagctggtgcaggaggtggcgcgcctgcaggccgacaacgcgcgcgtggcggcccgcgccgccgacatcgcgtcccagtacacccgcgtcgagcaggagaacaccgtgctccgggcccgcgccgccgagctcggcgaccgcctccgctccgtcaacgaggtgctccgcctcgtcgaggagttcagcggcgtcgccatggacatccaggaggagatgccggcggacgacccgctgctgcgtccctggcagctgccctacccggctgccgccatgcccatcggcgccccgcacatgctccactactgatgattgcctccaccaaccacaccaccatacatctgaggctgtcagctggggctggttggcaacaagacaagaagaattggctgcctctcaacaacattcacatctactacctacctggctgctttgagaattacagggcctctactatctgctgctgtgttaaatctacctcctggtttctccaataattgtcgctgttctgtactcttctcttatgttctgtctgtcagtgtgtatgagatgatgctcatcttatgttataaggcttaatcatgtgtctagttgtactttctgtcttgtaatgttatcagttatatgaataataagtgttatgtaagctcct

SEQ ID NO: 876 - DNA, 1468 bp, Zea mays
  Clone ID: TF_ZmC2315_15
ccggccgggccgggcccccttccctctcttccgcctccgattgagtggctcaccttctttcccagccagcacgagcttgcaagcaagcgagctcctgagatttcagctcgcttctcctccagaggtcgagcagaccagactcctccgaccgaagctctaccacttcccagttagcctgtccaggaactgcttggccggagatccaaacaaacctctgtgttggggttctccggggttccttgcgctggagggaggtttcgttctcgctggccatggtttggctgagaagcagcagcggcagcatcttgatgccaaatctctgagctttatgaagatcgccactcacctgcgccgctcctgcttcctccactccttctcggttgtcttcctctactggttttatgtgatctcataacttgccctcccccggatccgccattcccccgtgccctctctccgtcccctcaaccttctccctcctttcttgcttccctcaacaatcgccaaataacagcactagcggcagcggtagaggatcttttcgaggtaagctaggccggccggttccctgcgggaaaaagaaaagaaaaggaacctgtcttgatgtcgtcgtcgtcgctgtctccgacggcggggaggacgtccgggtcggacggcgactcggcggcggacacgcacaggcgcgagaaacgccggctgtcgaaccgcgagtcggcgcggcggtcccggctccggaagcagcagcacctggacgagctggtgcaggaggtggcgcgcctgcaggccgacaacgcgcgcgtggcggcccgcgccgccgacatcgcgtcccagtacacccgcgtcgagcaggagaacaccgtgctccgggcccgcgccgccgagctcggcgaccgcctccgctccgtcaacgaggtgctccgcctcgtcgaggagttcagcggcgtcgccatggacatccaggaggagatgccggcggacgacccgctgctgcgtccctggcagctgccctacccggctgccgccatgcccatcggcgccccgcacatgctccactactgatgattgcctccaccaaccacaccaccatacatctgaggctgtcagctggggctggttggcaacaagacaagaagaattggctgcctctcaacaacattcacatctactacctacctggctgctttgagaattacagggcctctactatctgctgctgtgttaaatctacctcctggtttctccaataattgtcgctgttctgtactcttctcttatgttctgtctgtcagtgtgtatgagatgatgctcatcttatgttatgtaaggcttaatcatgtgtctagttgtactttctgtcttgtaatgttatcagttatatgaataataagtgttatgtaagctcctacgaaaaaaaaaaaaaaaaaaaaaaaaaaaaaaaaaaaagaaaaaaaaaaaaaaaaaagcggcc

SEQ ID NO: 877 - DNA, 776 bp, Zea mays
  Clone ID: TF_ZmC2315_9
gccgggttccctgcggggaaaagaaaagaaaaggaccctgtcttgatgtcgtcgtcgtcgctgtctccgacggcggggaggacgtccgggtcggacggcgactcggcggcggacacgcacaggcgcgagaagcgccggctgtccaaccgcgagtcggcgcggcggtcccggctccggaagcagcagcacctggacgagctggtgcaggaggtggcgcgcctgcaggccgacaacgcgcgcgtggcggcccgcgccgccgacatcgcgtcccagtacacccgcgtcgagcaggagaacaccgtgctccgggcccgcgccgccgagctcggcgaccgcctccgctccgtcaacgaggtgctccgcctcgtcgaggagttcagcggcgtcgccatggacatccaggaggagatgccggcggacgacccgctgctgcgtccctggcagctgccctacccggctgccgccatgcccatcggcgccccgcacatgctccactactgatgattgcctccaccaaccacaccatacatctgaggctgtcagctggggctggtcggcaacaagacaagaagaattggctgcctctcaacaacattcacatctactacctacctggctgctttgagaattacagggcctctactatctgctgctgtgttaaatctacctcctggtttctccaatattgtcgctggtctgtactcttctcttatgatgttctgtctgtcagtgtgtatgagatgatgctcatcttattttatgtaaggcttaatcat

SEQ ID NO: 878 - DNA, 646 bp, Zea mays
  unsure (1)..(646): unsure at all n locations
  Clone ID: TF_LIB3596-021-Q6-K6-F2
ggaattgcggacacgtcgtacgtagtgcaacggcaaccgtggggggagaagctacaaggagagatgctgtccgtgcaggaagcccttgagcttgcgtcgtccagctgcggcacgacgatggacgttaccacgtgcgggttcacgccgtgggggcccgagtcgtgccctagcctggagcaggtgatggcggcgtcgacgccggccgcggcagcgaggcacccggaccccgaggaggaggaggaggaggagcggcgccggcggcagcgccgcaagctgtcgaaccggctgtcggcgcgccggtcgcgcgcgcggaagcagcagcagctggaggagctccgcgcggaggcggcgcggctccgcggcgagaagcgggagctggaggccagcctgcaggccctggcgcggcacggcctcgccgtgcgctgccagaacgcgcggctccgcgccgaggccgncgcgctcgcgcgcaggctcctcgcgatcgcgtcgtacgccgcccagatgccgcagcataaggccggagtcgcgcccgcgcccgcgcccgcgccggcgggggcgctgctggggccgctggcgtcgctgacgacgtangcggctggcgagagggacgttcttctgcccgtggaacgagtctcgcgccactcgc

SEQ ID NO: 879 - DNA, 1370 bp, Zea mays
  unsure (1)..(1370): unsure at all n locations
  Clone ID: TF_ZmC13853_7
gggtacctcgaggccggcatcattcgcgcacgagggtcacggaactctatccactcgtcagcaccaagctagctagtcctcgtgcccttcggacgagaggcgcatgtgactcggtaacagtcttgaggctttgagctctcctcacctcgtatccgtgtctttctggtgctgagctgagtctgagagacaggtaaggaggaggagggaggagatggaattcaagaactgcgggtcgtcgtcgcagccccggccggcggtggtagtgggcgaggaggcggcgttggcgagacagggatcagtctactcgttgacgttcgacgaattccagagcgcgcccggcggggccgccgccatttttcgggcggtggcggcagcatccccaaggatttcggttccatgaacatggacgaactgctccggagcatctggaccgcggaggagacccaggccatggcctccgcttctggcgctggagcgggtggcgggatgccgccaacgtcgctgcagcggcaagggtcgtcgctcacactgccccgcacgctcagcaccaagacggtcgacgaggtgtggcgcaatctcgtgcgcgacgagccgcnnnnnnnnnnnnnnnnnnnnnnnnnnnngcagcaccaccgccagtcgacgctcggggagatgactctggaggagttcttggtcagagctggcgtggtcagggagaaccccgctccggctcctccagcaccaccacccatgatcccgccgcggccggtacctgtcgcccctaaaagctccgccnnnnncgggaatttaccgggtgccgacgccgacaccgccgcagctgcggcagcgctggggtttgcaccggtcggcatnnnnnatctggcccaaataccgcccagggcagcaggcatgggaggcggcgccatggctgtgcaagcagcggtgaaccagcttgattctggcgggaaggggtacagcgacctgtcgtcgccgacggagccgctcccgttttcgtttgaggggatgattnnnnnnnnnnnnnnnnnnnnnnnnnnagagaaagtggtggagaggcggcagaggaggatgatcaagaacagggagtccgccgccaggtcccgagcgcgtaaacaggcttatactatggagttagaagctgaagttcagaaactcaaggagcagaatcaggaactggagaggaaacaggcagagattatggaaatgcagaagaacgaggtaactgttaattctaaacttcgtgtgtttgacccctgtatattatcttgatgccctttctggtttgctnnnnnctatggcagagatagatagagaattagagaatagagattcaggctgtaagcataccattccttctattactttgccaa

SEQ ID NO: 880 - DNA, 1281 bp, Zea mays
  Clone ID: TF_ZmC3110_1
gcacgggcctcgaggccggccgggatcaggcaaacgatacagcccttccctcttcaatcctctcgtcatttcctctcgcttctgctcagctgcaacccagcgcgtagatcttattcttggacgagaacgatgaggagctcttctccatgttccttgacgtcgacaagctgaactcatcgtgcggggcgtcgtcggaggccgaggctgagtcctcctcggccgcgggtggcggcggtgagggggctgagctggccgacgcgcccaggccaaggcatcagcacagccagtccatggatgggtccatgtcgatcaaggcggaacagctggtgggtgcgccggggatggaggggatgtcgtctgcagaggccaagaaagcagtgtctgcggcgaaactggctgagcttgctcttgttgacccaaagagggctaaaaggatttgggctaatagacaatctgctgcaagatcaaaggaaaggaagatgcaatatattggcgaactcgagctcaaggtgcaaaccctgcaaacagaagccacaacattgtcagctcagctagcattgctgcagagagacaccactgggctaacaaccgagaatagtgagctgaagattcgcctgcagaccatggaacaacaagtccacttacaagatgctttgaatgacaccctgaaaacagaggtccagcggctgaaggtggcaacaggacaggtgggcaatggtggtggagggatgatgctgaactttggggccatgccacgcctggtcggaggcaaccagcagatgttccacagcagccaagcgatgcaatccgtgctggcgacgcaccagctgcagcagctccagctccactcccagcctcagcagcagcaactgcactcgctgcagctccagcaggtggcgagagacctcaagatgaaagggcatctgggcggccaaggccagtggggcgatgggaagtctgggagtgggagcaggagcagcggcagctgagcctactggcaccgtggcacgggagttttggtgtatgtggtgagcaggaatggtgatcccttgttttgggggatgttgctgtgcaggtgtaattatcgttaactcagttgtctatctataggcccagttcagcttgagttttatggttaactcggcgatctttataggctcagctcacctgcaacgcacttcagttcagaaactcggatggtggcagatgtttgtctgttggatgttgtttgtatctcttttgctagtttaagggtaaaaatggttggcatttcagtgtttc

SEQ ID NO: 881 - DNA, 1106 bp, Zea mays
  Clone ID: TF_ZmC69637_2
tctcggtaacggccgggccaccaatacaacatactagtatcatatccttggaaattataagcctctacatacaacaacttaattagtcagaggaaagctttcaagtctagatataaccccaagtatcttttgaggatgaccctgtccggtggggcctcgtctgggtctagtcatgggacccgtagcttggggtcagagggtgacatggtgcaccggatggagctcatgcgcaagagaaggatggagtcaaaccgggagtccgcgaagcgatcgaggcagcggaagcagcaacatctcgacgacctcaactcgcaggtgaatttgacacaaagcaaaagtcagatgaaaaaaacgagacttgtgcttcaggatatgctgaagcaagcaaactccgataatgcgcggtgccccttaatttctcagggtccaccacccaataaaattgattcaaaataggccattccaacctaagcaaagaacgatgcacgacgtgccaccgtcgaaatctttctcaaaaaaagggaaaaaagggaaaaaaaattccacaccaattcattggctgtctcggcaaaatcaacacggtcatatatatatcaatcattttttttcttcttcttctacccgacgtcgcgtttatatcggaataattgaatcgtcttctgtataaaataaaacaaaacaaaacaaacaggtggacaagttgaggacgacgaaacagcaactcatggtagcactgaacatgaccagccagaactacgcggcagcagcagctcagaactcggtgctgcgcacccagatgatggagctgcagagcaggctctgcgcactgcgtgagatcatatgccatatgtacgcaacaacaacgaatgtccatccagcaactgtcatgggcggtgctgctacctaccatacttttggcgaaactgcgtggaactctggcagctgcagcatgcaaatggtcgaccacttgttgcaccagtgcttctaggctctagctacgtacaaggaggtagaggccaagacaaacaaaggcatgcatatatatgtattccatgttttgtaagtagtgtgtacgtcatttgatttaatgtataaaagggtttgtg

SEQ ID NO: 882 - DNA, 1513 bp, Zea mays
  Clone ID: TF_ZmC2931_1
agcttcaaaatgtgccagtcaccaaggttccttgcagagagcgagataaaaaaaaaggtaatccgacggaaacgacaagggcgcggcgagggcggggacagggtcgggaaggccctgggcgcgggggcgccaagcgcatggcatcgtcgagggtgatgccgtcctcctcgccgtcgcacacggcctctgatctcgcgcgcctagcgcaggccgccagcaggcccggcggcgggggcagcgggctgggctccatgaacgtggaggagctcctccgcggcatctacagcgacatgcccaccccggcgccgcccgcgtcggagcccgaacgcccgaggtcgccggccccggcgccggaggtcgccacgcggaggacggcggaggaggtgtggaaggagatcactggcggaggtggcagtggggaagccgtggctcccgtggcggctcaggctgtcgctcccgatggtggcgccggcacaggcggcccggaggtgacgctggaggacttcctggccagggagagcgcggtgaaggaggatgaggttaagatttctgtcccccccgcgccggtcatggggttaccgggcggagcggagggcgtgagtgtgcctggcggcggaggcgggagggaacggaagcggcagctcatggatccagtggatcgcgccgcgatgcagcgacagaaacgaatgatcaaaaaccgcgagtctgctgcccggtcacgggagaggaagcaggcttatatcgccgagctagaatcgctggtaacgcacctcgaggaggagaatgccgagttgttgagagaacaggaagagcggcaccagaagcggcttaaagagctcttggaacgggtgacgccagtcattctgaggaaaaaaccatcaggagatcttagaagaacgaactcaatgcagtggtagattggagccaagctcagtcgccgtctctttacagttataacatagaatttgcccctgtatgtcatttttctatttatatatgcgccaactaagttgtagtatcttagctgaaatagcatgggcaattagccgacacaaaggttaaacgaaatcatattatgtaggagtgctcatgaccaagaaaggttgctgttcctgcctgctctcaactaaacatacaacttggatgatcatatccccagaaagatgatcccattcccatccaacctcgccttctaactaagcacactcttttatggctcttcagtttggctttggatttactgacttgagcaatgttaatttgcttttcttggggtagccgttttatatgtttctctaaagaatacatttggttgatgcagctcttggaacgggtgccccctgccgttctgagcatagaacctgcccctgttcgtcgttgttcgatctcaatgcaggcgccgactggggcctagctccgtcgccggctcttgcctgggctttcagccgactcgcccctgtatcgcattttcctattttgttgggcgccctcttggccgtagtaaaaaaaaaaa

SEQ ID NO: 883 - DNA, 1593 bp, Zea mays
  Clone ID: TF_ZmC2884_1
acgcactctgacccccgcccccgccgcagcgagacgagagcgcccgcaccaaggcaagccgaggcggcgagcgggacaggtagcggctgcctaccaccgccagcctccgcccacccaacaacagcaccaccaccacagtccggtcccgtgccttccaattcggtcgtcccacgcatcgattgagcccgcgcacgagcccatcgctttcgctttggcgtcttcgagaacccgcaagcaacctatatagcccgccgcgaattccgcctggcttcctcgtcgcccgcctcgtcgtcgcgccgcagtgagaggagggggaggcgatggatctcaacgaatgcgagaggagggggccggcggggccggatccgctgtcgaggcaggggtcgatctactcgctcacgttcgacgagttccagaacacgctcggcgggatggggggagggcttggcaaggacttcggctccatgaacatggacgagctgctgcggagcatctggaccgccgaggagagccaggccatggcgtcggcttcggcctcggcctcggcctcggtgtccgcgctgggggcagccgtcgacggcggggcggcgctgcagagacaggggtctctcgcgctgccgcgcactctcagcgtcaagacggtggacgaggtctggcgggacttcgtgcgggaggcgccgcccgggacggctggcggcgaggagccgcagcccaaccgacagccgactctcggggagatgacgctggaggagttcctggtcagggccggggtcgtccgtgacaaccctgccgcggcagctgctgctgtccctgcgcagccggttgctccacggccgattcaggcggtcagtaatggcgcctccatctttttcggcaactttgggggcgccaatgacgccggggctggagcgatggtgtttgcgccggtggggatcggggatcaggccatgggcaacgggttgatgcctggggtggctgggatggcaggtggtgcggtcaccgtgagtccggtggatacgtcggtggcccagctggattctatgggcaagagcgatgaggatctgtcatcgccaatggctccggtgccatacccctttgagggagtgataaggggaaggaggagcggtgcgggtgtggagaaggttgtggagcggcggcagaggaggatgatcaagaacagggagtctgcagctagatcccgtgcccgtaagcaggcttatacaatggagttggaagccgaagttcagaaactgaaggaacaaaatgcagaattgcagaagaagcaggaacaaataatggagatgcagcaaaaccaggtcccggaattggtcagcaatccatatgcacaaaagaagcgatgcctgcggagaacattgacaggtccctggtaactgagttgttgttgatcggactcgacaggatatttaacattatggtacttgtacattcttcaggatttggagaacccaaatttctgttgtatattagcgatcaacagagtcgaatgtaccagtgcataactttcttctcctgacactatgaaaaaaaaaaaaataaaaaaaaaaaaaaaagggcggccgccaccgcggtgga

SEQ ID NO: 884 - DNA, 299 bp, Zea mays
  Clone ID: TF_LIB5075-003-R1-XP1-H2
aacaaagactccagagaaggaagcaatccaaccgggaatcagccaggcgttcgagaagcagaaaggaggatcacttgaatgaactggaggcacaggtagcagaggtaagagtcgaaaactcttcgctgctaacgcggcttgctgctgttaaccacaagctcaatgaaactgctggtgacaatacggtgctaaaggcagacgtcgaaaacttactaccaaacgtgaacatgggagaggactcggcgaagaggccaacagggatgaaccccctgtaccctggcgagacggatatggcctcc

SEQ ID NO: 885 - DNA, 2683 bp, Zea mays
  Clone ID: TF_ZmC15321_1
cattggtactctcgaggccggccgggagggagtgacacgtcccgagcacgagctcgtcaacacccgaccccgtccgcactctagagtcgctacccgtgaatccgtgatttccattctaaaaattatccttcctcccgtgcctacagtcctacacctcgacgatgccaaaaccctagcgcagcagcgcgaactacacctctccccgtcctgttcctcgtggcgcggtagccatggcggagccggccatcctcgacccctcccccttcgatctccgccactatccggcgcacctcttcgacccggacatccccctcgccgccgccgacttcccactcggtgaattcgccggagatgacggctgtgatggcctagacttcgacgtgcccgtagatttctctatcgacgacttcctcctccggtctcctgaccgcgggcacgacggcgacgactccggcgagggctctgctgccggatccggccccaccgcatcttccttggcctccccggccacctccggcactaactccgccgtggccaacgtcggcaaccgcaaggtgaagcacgaggactcggacgagggaaggagcggcgccaccccgaattggagcctcaagcggaagcaggtgagtcccggagaagcaacctccgatggggccaagtgccgccgatccggcgatggggatgtttcgccatctgcatcggcgtcgcgtgcagccacggaggactccgatgagaggggcgtgggcggcgaggaagaggacaagcgccggactgcgcgcctgatgcggaaccgtgagagcgcgcagctctctcggcagaggaagaagcggtacgtggaggagctggaagagaaggtgaaatcgatgcactcggtgataaatgacctcagttgtaagatctccttcatcgctgcggagaacgccacactgaggcagcaactcggtggtgtgggggtgagtggaccaccacctggggtgtatccaccgccaccgccaggcattcatttcccttgggtttctgggtatgcaatgcggcctcatggctcccatgttccacttgttccaatcccgcgattgaagccgcagcatgcagcagctgcagtgaaggtatccaagaaaccagatgtcaagaagtctgtggagagcaagagtaagaccaagaccaagaccaagaccaagaaggtggcaagtattagccttcttggtttgctgtttgttgcatttgtctttggcgcttttgttccggggttcaatcatagtctcggactgagaggaaggagcgacaatgtgatgtttggaaattttggccagtctgatgctagggtgtttagtgtcactaaccatggtaaaggacctaaaggcagtttcaacagtagtgacatgatcagtactgatcatgacatgatgactgggcatgatgatggagcggggcagaaacaccgagctgcaaataactctagtgagatcttgcctgctttgttgtatgtgccgaggaatggaaaacatgttatgatcaatggcaatttgattattcattctgtgatggctagtgagaaagcagtggcacataagggctcaaatagtcagtcagttaaagatcacaaggagaccagtgttgctatagctcgctatctgtcaccacctggaaaggatatgaattcaaaagagatgttcccgccagatgcaccactgccacaatggttccgtgaaggaatggaaggacctgttttgaactcgggaatgtgcagtgaggtatttcagtttgatatttctccagcttcggccaaatctggtggcattatacctgcttcggccaaatctgcctcaagtgtcaatgctacccagaaaattctgaaaccttctcctgcttataggggcaagctgaaaaacaggaggatcatgtataacgaggcaattccacttactggaaaaacagcgaacaacacaaagcctcaggcttttaacagtactgctgaaagcagcaaggtacctgatactgatagcaagcctgcatcatcagttatcgtctctgtgctagctgatcccagggaggctggcaatggggatggtgatccaagagtatcaccaaaacccctctccaggatatttgtcgtcgttctgctcgatggtgtcagatacgtgacttactcgtgcacacttcctttcaagagtgccagcccacaccttgtggaactaaccttggggccggtgcagctttctggtccatgagcggctaaatagttggggttttctgatgcattggaggtagatgaatgaatacagtaatgtggtgttgcttgctaacaatgaaaacagacttcaagactcgcactcggcctgaggtaatttgagtttgtcgaaggtttgtagtgtggactggcgaaatgttgtgcaagttcaaccttaacccatgaggtttgtgcttctatgtagtcgagttattatactcacctctttctctggtactctttattgcggagctggaaaatataacagctgatgagagaagacaatatttggaaaataactttgtactagtatatattatatatatagtgtactatatatagggatgtaatatggttcggaaaatatccgtccggatccggattctaagatggtgaacactggttcagatggaattttcggaaaaaaaaaagaaaaaaaaaaaaaaaaaagcggcc

SEQ ID NO: 886 - DNA, 554 bp, Zea mays
  unsure (1)..(554): unsure at all n locations
  Clone ID: TF_LIB5025-063-A1-XP1-D12
gccggccggtccgggagttgaataatcaatttccattgggtggtggtttattcttttgttttgtttataaaaatgtcaagcaatagcagcaatactgatttaatcaatcaattattatctttacctgttgatttcactatggatccacttgttattcctacaaccacaaatgtagttcgtccaaagaaatcaagagttacacttgaagataaagatcaaaagacaaaagaaagaattttaagaaacagagcagcagctcaagagtctcgagataaaaagcgtcgttatgtttccgatttggaatcgtcaaataagagacttgaagaagaaaatggtcaaatgaagaaaaagatgaagcacttggaagaagaaaatatgtcgttggcttgtcaactggaatctatcagtaaacaatttgctgctctacaggctcaaatcaagtttaatacaaattctacttttctctttaatgacttttgcggntcagcacggatcgtanagaaggaaataatttgtggctaaagaaagaaaaaaaaaaaaaaaaaagggcccta

SEQ ID NO: 887 - DNA, 1742 bp, Zea mays
  Clone ID: TF_ZmC191_1
ccggccgggaaaaaaaaaaatcttctcttcttcgcctcttcggtttccctttcactttttttaatctccgcttccactgttccaccaaaccaagccgagaaatttctcctaaatttcagatcaaatcctcctcctcctcctccccctccccctctccgaggattctgcccagcagcgcggcgatccgcctcgatccggaatggagcgcgtcttctccatggaggagatccccaacccctactgggccccgccgcaccctcaaccggcggccggcggcgctgttgctgcaccaggtggagtaggaggagcgggggacgcggcgggcgcgatgaaccggtgcccatctgagtggtacttccagaagttcctcgaggaggccgtgctcgacagtccgggtcccgtcgccggcgtgggtagaagcagcggacaagctggagttgaggcggcggagagcaagccgctgggcgccgcggcgccggcgtccgtctcgagctcggtcgttgaccccgtcgagtacaacgcgatgctcaagcagaagctggagaaggacctcgctgccatcgctatgtggagggcttctggtgcagcacctccagatctttctgcgactgctgcttccttgccaagtgtcggtgttccgcatgcagctcctcttaaacccgtcggaggtactgaaagtctagttcaaaacatgctagctggtgctccagtaggggggtcaggtccacatgtagtacaaattgctgatatccctgttaagcaaaccactagctcttcctcacgagagcagtcagatgatgatgacatggaaggcgatgctgagacaaatggaaatggaaaccctgttcaacaaagacaacagagaaggaagcaatccaatcgggaatcagccaggcgttcgagaagcagaaaggcagctcacttgaatgaactggaggcacaggtagcacagttaagagtcgaaaactcttcgctgctaaggcgacttgctgatgttaaccagaagttcaatgaggctgctgttgacaatagggtgctaaaggcagacgtcgaaaccttaagagcaaaggtgaagatggcagaggactcggtgaagcgggtaacaggcatgaacgcattgtaccctgccgtgtcggatatgtcttccctcagcatgccattcaatggctccccttccgactccgcctctgatggcaccgtccccatccaagatgacctgaacagttacttcgccaacccaagcgaaatcggaggcaacaacggttacatgccagatatagcctcctcggttcaacaggacgacaattttgtcaacgggtatcaggctgctggcaagatgggcagaacagactcgctgcagcgggtggcaagcctggagcacctccagaaaagaatgtgcggaggcccggcttcatccggctcgacctcctaggtttcatatgaaaaagtccctggtgcctaacggcaagaatgctaaattaacaatttcaacatgctttgtactggacattgataatcctgcgatgcgcattagtgcgttatggacttgtgggtcaattgctatttggcgtgtgctggctgctcactgtagtgagcagaacaagttccagtttctatcgaagagcaccctctccttttcgctagtgacttatgaatggtcgatggtttattagcaacattgtgtctttcgcaagttcagtaatgaatggtcgaccagggatgaaaataaataacttataaag

SEQ ID NO: 888 - DNA, 1280 bp, Zea mays
  Clone ID: TF_ZmC191_3
ctgacgcgtgggcggacgcgagggggattctgcccagcagcgcggcgatccgcctcgatccggaatggagcgcgtcttctccatggaggagatccccaacccctactggaccccgtcgagtacaacgcgatgctcaagcagaagctggagaaggacctcgctgccatcgctatgtggagggcttctggtgcagcacctccagatctttctgcgactgctgcttccttgccaagtgtcggtgctccgcatgcagctcctcttaaacccgtcggaggtactgaaagtctagttcaaaacatgctagctggtgctccagtaggggggtcaggtccacatgtagtacaaattgctgatatccctgttaagcaaaccactagctcttcctcacgagagcagtcagatgatgatgacatggaaggcgatgctgagacaaatggaaatggaaaccctgttcaacaaagacaacagagaaggaagcaatccaaccgggaatcagccaggcgttcgagaagcagaaaggcggctcacttgaatgaactggaggcacaggtagcacaattaagagtcgaaaactcttcgctgctaaggcggcttgctgatgttaaccagaagttcaatgaagctgctgttgacaatagggtgctaaaggcagacgtcgaaaccttaagagcaaaggtgaagatggcagaggactcggtgaagcgggtaacaggcatgaacgcattgtaccctgccgtgtcggatatgtcttccctcagcatgccattcaatggctccccttctgactccgcctctgatagcaccgtcccggtacaagatgacctgaacagttacttcgccaacccaagcgaaatcggatgcaacaacggctacatgccagatatagcctcctcggttcaacaggacgacaattttgtcaacgggtatcaggctgctggcaagatgggcagaacagactcgctgcagcgggtggcaagcctggagcacctccagaaaagaatgtgcggaggcccggcttcatccggctcgacctcctaggtttcatatgaaaaagtccctggtgcctaacggcaagaatgctaaattaacaatttcaacatgctttgtactggacattgataatcctgcgatgcgcattagtgcgttatggacttgtgggtcaattgctatttggcgtgtgctggctgctcactgtagtgagcagaacaagttccagtttctatcgaagagcaccctctccttttcgctagtgacttatgaatggtcgatggtttattagc

SEQ ID NO: 889 - DNA, 1274 bp, Zea mays
  Clone ID: TF_ZmC3759_1
cgaacccgcttccttcctgtcccgactcggggcgggaaggcccacataagcggacgcgcgatcaggcacctgggctgcgatcatagcgacaaaatatctcgccgttcccatggacatcgacctcttccccgacatcgaccttgacgccctcctcgcctccttctccggcgaccccgccgccgtctccggcctcatcatcccgtccccgcctccgccggcgccggcgacggcgcacgatgcggaggcggggtcgccggagtcggtgacctcccggacgaacccgctcggggaggtggcgctctcggagatcgagaggctcctgatgcaggagggggaggcggaactgggcggggaggtcgatgggatcagcgtggaccagttcttcgacgcgctgtacgacggcgaggaggcgaaaggtgagcgggaggcgggggcaagcgcggatgtggactccggcagggacgatgtgctggaagtcgtgacgccagaggcggggacggtggaggtggatggcgatgatcccatcagcaagaagaagatgaggcaaatgaggaacagagattccgccatgaaatccagggagaggaagaagtcgtacataaaggacttggagacaaagagcaagcacttggaggcagagtgccgtcgcctcagctacgcacttcagtgctacgcagctgaaaacatggcactgcgccagagcttgctgaaggataggcctcttggtgctcccacagccacgcaggagtctgccgtactcacggaaaccctgccgctggtttccctgctttggctggtgagcatcgtctgcctgttcctgatgcccgttctgcccaaccgaagcccagctgctccaagcagcggcggaagagacctcgtgatggcagccggaaagacaagcagtgagaccccagagatactggaactcatcctccatggaaggcgttgcaagagcacgagggcgaagattaagctatgtattttaccatttcatgcaggagctgcttgctagtagttgctaggctttgagcctcttgcaagcttacctctatatgtagtgtacccgcaaatcttaccgtgctcgctatgcgcctgtcttgcagagaagcctgtcgatatccatggagtagtaccttttttttgtttaatagctcctgtgctacccagaatatgtttaaaatctggattttgtgttattttctatttcttcaccttatctgtagttgctcctgatataaagttccttcgctcgaaaaaaaaaaaaaaggccccta

SEQ ID NO: 890 - DNA, 788 bp, Zea mays
  Clone ID: TF_ZmC382380_1
gcagctagctagagctccattttagattttactaactcatatcatgaaagaatatagatacagcaagtgatctcctatatgctgatatatatatatgctccttctccttgcacaaatgcaccaccgaaattagtactaagtattttttacctacgtactcaacagtactactacagggctactgagcacggcatttctaagccacctcagggctcagggctgcagcttcggcctctcccatcagttccatctcgctgagtcttctctgcaggccagcagcttcttctctgagcttggcgttctcacgagccaggagagcatgcttggcggtcacgtggttgagctcgaccagaagcctctggttggtgcccaggagctcggcgacctgcaatgagagttcgtacaggcgcctctgcttcctcacgcgcgacctcctcgcggactcacggttcgacgctaaccttctcttcttcctctcgacgtcgttgccacgcctctcctgatgcttgtccgccgccgcggcagacactgagctgacggtggtagtagtaacgctgccattgcagctgcacggatatgggtcgagatcgaccatgtcgaaggtgctgaaatcatacataggatcgtcattctgtggtaggaaaaggctgcccaagtccaagccagggaggcaagctaaatcggctgcccagttttgttgcatctctgaatggagtaggcttggtggcttgcaatgtggagaaagaagggaagaggcagtacgtggtgttctactgcaattgcaaaag

SEQ ID NO: 891 - DNA, 1637 bp, Zea mays
  Clone ID: TF_ZmC3890_1
tacctcgaggccggccgggccgggctttcttcgcctccgaattccgatcaccaaaaaaaggcctttcttttcttttcgtcgccctctcggtgctctgcttcgctgcgtcgcccgcccgtctctaaaagccttgtgtggatcgtggacgccgacgcggccgcagcagcagccacgggacgggagtagaggcgcagagagagagaaagagagaaagagagagaggttgtgctcgctgcctgccgctgagagacggatgaagaagtgcccatcggagctggagctggaggccttcctccgcggccgggaggacgccacggcggcggcggcggcggcggcggtggccgagcagaagcctgcgcacgacgtcgctgcgctggcgccgttcggcgccggtggcgtgttcccctccagcgatctgtccgccttcagcttcgctgactcgaacaccctcaatggaactggaaacatccataatcacctttggtcccataaccacaacgtcaggcatcccgcagtctccacgacgatcgagtcgcagtcgtcgatctgtgcagctgcagcagcaagtccaacatcggctaccaacctgtacctgaaagagagccaggctctgggcggcacgagtggttccgactccgacagcgattcgctgctggacatcgagggtggcccgtgcgagcagagcacgaacccacaggacgtgaagaggatgcgacggatggtgtcgaaccgtgagtctgctcgacggtccaggaagaggaagcaagcccacctagctgaccttgagacacaggtcgaccagctgcgaggcgagaacgcgtcgctcttcaagcagctgacggacgccaaccagcagttcacgaccgcggtcacggacaacaggatcctcaagtcggacgtggaggccctcagagtcaaggtgaagctggcggaggacatggtggcgcgcggcgcgctgtcgtgcgggctgggcagcctggggctgtcgccagcgctgaacccgcggcaggcgtgccgcggccccgacgtgctgtccgtgtccggcctggacttccccggcgccgacgacgcctgcttcacggggctgtccccggcggagcagctgcagctccagagctcccccctgcagagcatcgccgccagcctcgagagcctggacaaccggatggccagcgaggtcaccagctgcggggggcccggcgtcgacgtctggccgtgggaccaccactccaacggcggcctgtccaagtgaagccggagacgccgggtgggagtggggtgagactcgcgccgctcgccgacggcacctatcctgtcctagtgtatgcgtatatcgatatgcatggcgggcgctagctatgaccatgagccgccgttatttctgtgttcgctggagtggtgaaagtgaacggacttgagtttttcagagtccctcgtctccgtcggtacatttactagttctgtaatagaactgactagcttaagctcgtgctactacatatatatatgtatgctgagagactgaactcgaagcataatcatgctaccatattatgtcatcattacatttctatctctaaaaaaaaaaaaaaactcgagactagttctctcctcgtgccgccgatatatttattccg

SEQ ID NO: 892 - DNA, 1236 bp, Zea mays
  Clone ID: TF_ZmC3890_2
gcaacaattagttcgaagatcattcagaacagtgcgcagtgccttctgtgctacggatttgaaaatcattcagaacttgtgctttttgaataaaaccagctgcagccgctaggcaactcgcggtttcgacagaaattagatgtttgcagcagacaagttgggcttaaataattgcagggcgtaatcctaggttctttctagtagctcacagtaccgactaccgagttcaatcattggcatgcagctgctgcagcagcaagtccaacatctgctaccaacctgtacctgaaagagagccaggctctgggcggcacgagtggttcggactccgacagcgattcgctgctggacatcgagggtggcccgtgcgagcagagcacgaacccacaggacgtgaagaggatgcgacggatggtgtcgaaccgtgagtctgctcgacggtccaggaagaggaagcaagcccacctagctgaccttgagacacaggtcgaccagctgcgaggcgagaacgcgtcgctcttcaagcagctgacggacgccaaccagcagttcacgaccgcggtcacggacaacaggatcctcaagtcggacgtggaggccctcagagtcaaggtgaaactggcggaggacatggtggcgcgcggcgcgctgtcgtgcgggctgggcagcctggggctgtcgccggcgctgaacccgcggcaggcgtgccgcggccccgacgtgctgtccgtgtccggcctggacttccccggcgccgacgacgcctgcttcacggggctgtccccggcggagcagctgcagctccagagctcccccctgcagagcatcgccgccagcctcgagagcctggacaaccggatggccagcgaggtcaccagctgcggggggcccggcgtcgacgtctggccgtgggaccaccactccaacggcggcctgtccaagtgaagccggagacgccgggtgggagtggggtgagactcgcgccgctcgccgacggcacctatcctgtcctagtgtatgcgtatcgatatgcatggcgggcgctagctatgaccatgagccgccgttatttctgtgttcgctggagtggtgaaagtgaacggacttgagtttttcagagtccctcgtctccgtcggtacatttactagttctgtaatagaactgactagcttaagctcgtgctactacatatatatatgtatgctgagagactgaactcgaagcataatcatgct

SEQ ID NO: 893 - DNA, 285 bp, Zea mays
  unsure (1)..(285): unsure at all n locations
  Clone ID: TF_700154561H1
gcggacctgagtacggccggaatccgggcgaccacgcgccgggacgctggttttataagggtttcggcggaggcgcccggtcgctggcgatggccgacgacggcgagaccacgagggcagcggcggcggcggaggcgtccgggagcaggaccggttcctgcccatcgccaacatcagccggatcatgaagaaggccgtcccggccaacggcaagatcgccaaggacgctaaggagaccctgcaggagtgcgtctccgagttcatatcatcgngtacagcgaggcc

SEQ ID NO: 894 - DNA, 549 bp, Zea mays
  Clone ID: TF_LIB4729-029-R1-K1-G4
gccaacccattcacactgacgaatccagcggcggcggatcacaccaacccaactgcaagccctagccatgtcccccgccaccgccgacgaacccagcgtcgcaatggaggagcagcccggaaaggagagcgaggaagccgccgatgcaatggaagagcaactcggaaaggagagcgaggaggcggcagagtccgccgaggcagcgcggcaagtcgaggtggagccagaggagggcgtcgaccccgccgaggcaatggagaaggctggagaggaggcggaggccgaagagggggcgtcgctgcggccggcgctgccggtggggagggtcaagcggatcatgcgggtggaccgggacatcaagaaggtgacgagcgaggcggcgctgctcatcgccgccgccaccgagctcttcctgggcagcctcgcgacaggggcccacgccgcggcggcgcggcgcagccggcgcactgtgcgtgccgtgcacgtccgcgccgcgggccgcgcgcacaggcccacggcggacttcctgcttgactgcctcgctgccga

SEQ ID NO: 895 - DNA, 614 bp, Zea mays
  unsure (1)..(614): unsure at all n locations
  Clone ID: TF_LIB4744-036-R1-K1-A1
gaggctggccgggaacgactcgcgccgcctccggtcgcgccgggtccaggtaaagcggcttccatctcctcggtctcagcgcgtcatcccctcctccttcctcttccgtttcccttagggttggagtagacacgtcggctcaaggatccttcgaggacacttattgattttgaacaaagatctagcatggaaccatcctcacagcctcaaccaatgatgggtgttgggtcacaaccttatcctgctgctgctccctatgtgccagtacctggatctcttgctgttcctcctggctcacagccagcagcagcattccccaatccaactcaactcagtgctcagcaccagatggtgtaccagcaggctcagcaatttcatcaacaacttcagcaacagcaggaacaacagctcagggagttctggactacccagatggatgagatcaagcaagcaaatgacttcaagatccacaccttgccacttgcaaggataaagaagataatgaaggctgatgaggatgtgcggatgatctctgcagaagctnctgttgtgtttgcgaaggcatgcgaggtattcatattagagctgacattgaggtcatggatgcacacaga

SEQ ID NO: 896 - DNA, 608 bp, Zea mays
  unsure (1)..(608): unsure at all n locations
  Clone ID: TF_LIB3689-246-Q1-K6-E11
gggggaggtcgacgagncagagagnagaggccaagaggcttcctctccccattcctcccttccgtgccctagccgagccagccgcgaggaaggaggcatcccgccgtctcgcctggcgcccgcccgtcggccgaccttctgccgcagcttccaattgtaaaaagatcatagatttttgggcaggagcgagtggatatggaaccatcccctcagcctatgggtgtcgctgccggtgggtcacaagtgtatcctgcctctgcctatccgcctgcagcaacagtagctttacagtcagggcagccattcccagccaatcctggtcatatgagtgctcagcaccagattgtctaccaacaagctcaacaattccaccaacagctccagcagcaacaacaacagcagcttcagcagttctgggttgaacgcatgactgaaattgaggcgacgactgatttcaagaaccacaacttgccacttgcgaggataaagaagatcatgaaggccgatgaagatgttcgcatgatctcagctgaagctcctgtagtctttgcaaaagcttgtgagatattcatactggagctgacacttaggtcgtggatgcacactga

SEQ ID NO: 897 - DNA, 799 bp, Zea mays
  Clone ID: TF_LIB4826-107-A1-N1-C9
gcgattgggttcctcgaggccggccgggataaggagtgaagccatggatttcatccggctttggattgggtgaatccatacctcacacccaatcccatggtgggattaaaaatccatgtactctaaaagaattggattggtgtgaaggaagtcctagtgatggtgtagaccgatgatatgtggacattgaaggtctagaccgttgctgagatgtcacgtcacacggttacttgctgccataactgaccttctttgtctgtagtgcaccagcaggtggcggcatcggcgccaccgaggaggcgctggtggtccccgctgccggtgcagctccatgccacagcgcgtacacgtcagtatcacgcgccagctccgtgacgtcaggcacggacggcaggcccagttgcagcgtgaggttcggcggcggcggcggcactgccgtcgtcgtccctctctgcacggtcggtgccggcggtgctacggcctgctgctggttattaacggcctcacggtacagacgtaggtacacggacatgggctgcacgtagtcagccagtccgaggttagcaaagccgacgatcaggtcgtcggcggtgatggtggaggcggcggtctcgccggcactcttgcgtggcggcgcgtacgagggccgtggagaattggacgatgcactggtccatggtctccttggcgccgccggtgaccctcgagtcttgcggcaggacttggcgcatgatacgcgttatggtgcctttcgggatggtgtactcttctagtgggtttgaccctgcagatatttttt

SEQ ID NO: 898 - DNA, 1454 bp, Zea mays
  Clone ID: TF_ZmC4739_2
accgagcgcggattcgttctattcctatcaggacttcaacgccttatttgtacccgccttaccgcgcgccctaaccctaggccctcaattccactctgcccgagcaagccgaattgtcgtccgaattcgctcgcggggagcacttgctacctcgcgcccgccttctgtcgcgcggattcgttgctgcgcctggagatggacccgatggacatcgtcggcaagtccaaggaggacgtctccctccccaaatagttgtttaaaatcttctactgctgattgaactttctgctttgcactttagcaacaatgtttaagataattaaggagatgcttcctcctgatgtacgagtggcaagagatgcacaggatcttcttgttgaatgctgtgtagagttcatcaatctcctttcgtctgaatcgaatgaagtgtgcagcagagaagagaaaaaaacgattgctcctgagcatgttatcaaggctctaagtgatcttggcttcagagagtacattgaggaggtttatgctgcatatgaacagcacaaacttgatactttggattctccaaaagctggcaaattcactgggattgagatgacagaggaagaagctgttgctgagcaacaaaggatgtttgctgaggctcgagcaaggatgaataatggagcccccaaaccaaaggagacagaacaagagccgccacagcaaccacaagcacaaccccaacttcagctgcatactgaaccacagcaacccgtgcaatctcaagtgcagttgcattcgccaacacagcattccctccaacctcaagtgcagctgcacccccagccacaacagctcccacaagtgcaggtgcactctcagacgcagctgcaccctcagccacagcagccccaagtgcaggtccatccgcagctgcagcaactcccacaattacaggcccactcgcagccaccgcaaccccaagtgcaaatccaccacagccgcagcagcccccacaagtgcagttgcagtcatcagtccagcagacctcccaaccccaacctcaggtacatctctacaatcacagggggggctcacaagcgcagctgcagccccaactgccaggtcagctgcagacacaggggcaaaccggacctggcattgacagttagagactactgctggcatatactaggaacctgtatgcttgcttgtgactcgttagatcctgatttaggtttctgtgcttcctgtacaatgtaaatccagtgtgattgcagttgccttgttgctaataatgcgaaaccgttagttactgatgatgtccttactgtgtcgaatactgaatgtcatggcgtggcttatgtgccatgctgaatgatgttctgtggtcattgtaatagcctaacttgacatctgtccatgatgatagtgattgatttgaatgagctcttggtgcaaaaaaaaaaaaaaaa

SEQ ID NO: 899 - DNA, 1578 bp, Zea mays
  Clone ID: TF_ZmC30175_1
ctcgaggccggccggggacacccttggtcccaacttacaaagcacagagaagacctacaccgcacctgcacacaaggtagcaacatgaataatccccaaaaccctaaagccagtgctccttgcaccttgccatcggagcttcccaaagaagcagtggcgaccgacgaagcaccgccgccaatgggcaacaacaacaacacggaatcggcgacggcgacgatggtccgggagcaggaccggctgatgcccgtggccaacgtgtcccgcatcatgcgccaagtgctgcctccgtacgccaagatctccgacgacgccaaggaggtgatccaggagtgcgtgtcggagttcatcagcttcgtcaccggcgaggcgaacgagcggtgccacaccgagcgccgcaagaccgtcacctccgaggacatcgtgtgggccatgagccgcctcggcttcgacgactacgtcgcgcccctcggcgccttcctccagcgcatgcgcgacgacagcgaccacggcggtgaagagcgcggcggccctgcagggcgtggtggctcgcgccgcggctcgtcgtccttgccgctccactgcccgcagcagatgcaccacctgcacccagccgtctgccggcgtccgcaccagagcgtgtcgcctgctgcaggatacgccgtccggcccgttccccgcccgatgccagccagtgggtaccgcatgcagggcggagaccaccgcagcgtgggcggcgtggctccctgcagctacggaggggcgctcgtccaggccggtggaacccaacacgttgttggattccacgacgacgaggcaagctcttcgagtgaaaatccgccgccggaggggcgtgccgctggctcgaactagcctagcttctcagttccccgtgtacaataagaggggcggtcgcggcgccgcgccgcgcccttgggttgggccgggcgctatgctgcagtttggtttgtaaactaacgagcctagggtagctggtgcacgcgcgccacctcgccggacgtcgccgtcgtcgtcggcatggacttaaccggcgggccctgttgttatttctcaagtttgtagccaacgcactgttcggtgcgttccataatttaatttaccatgttgctctcgaaaaaaaaaagaaaaaaagaaaaaaaaaaaaaaaaaagcgtgggcggcgtggctccctgcagctacggaggggcgctcgtccaggccggtggaacccaacacgttgttggattccacgacgacgaggcaagctcttcgagtgaaaatccgccgccggaggggcgtgccgctggctcgaactagcctagcttctcagttccccgtgtacaataaagggggcggtcgcggcgccgcgccgcgcccttgggttgggccgggcgctatgctgcagtttggtttgtaaactaacgagcctagggtagctggtgcacgcgcgccacctcgccggacgtcgccgtcgtcgtcggcatggacttaaccggcgggccctgttgttatttctcaagtttgtagccaacgcactgttcggtgcgttccataatttaatttaccatgttgctctgg

SEQ ID NO: 900 - DNA, 1424 bp, Zea mays
  Clone ID: TF_ZmC2163_1
ttaagaacctagtaggcagacccggccggctaggaggggactagggggaggtcgacgagacagagagagaaggccaagaggcttcctctccccattcctcccttccgtgccctagccgagccagccgcgaggaaggaggcatcccgccgtctcgcctggcgcccgcccgtcggccgaccttctgccgcagcttccaattgtaaaaagatcatagatttttgtgcaagagcgagtggatatggaaccatcccctcagcctatgggtgtcgctgccggtgggtcacaagtgtatcctgcctctgcctatccgcctgcagcaacagtagctcctgcttctgttgtatctgctggtttacagtcagggcagccattcccagccaatcctggtcatatgagtgctcagcaccagattgtctaccaacaagctcaacaattccaccaacagctccagcagcaacaacagcagcagcttcagcagttctgggttgaacgcatgactgaaattgaggcgacgactgatttcaagaaccacaacttgccacttgcgaggataaagaagatcatgaaggccgatgaagatgttcgcatgatctcagctgaagctcctgtagtctttgcaaaagcttgtgagatattcatactggagctgacacttaggtcgtggatgcacactgaggagaacaagcgccgcaccttgcaaaagaatgacattgcagcagcgatcactaggactgacatttatgacttcttggtcgacattgttcccagggatgagatgaaggaggacggaattgggcttcctagggctggtctgccacccatgggagccccagctgatgcatatccatactactacatgccacagcagcaggtgcctggttctggaatggtttatggtgcccagcaagggcacccagtgacttatttgtggcaggagcctcagcaacagcaggagcaagctcctgaagagcagcaatctgcatgaaagtggctgagaatattgctcagaagctatcacctgattcagagttctcattttaggttgtccaaactgcaggttttcttagtaatatcgttggttatcaaactgaaacaggcgattctaagtagggtgtagcatcatggtagtttcatttctgcttgtgatgttagttgaaaggataatgattagtggctagtggattaaagttaccataccatttccttctattccgaaagtttgcctccatgaggcctctgatataaaaatgctgggtgttaatgcttcaaagcaaagcatgtgttgtgccgttcatgcttctttattgattcgcgtggaaggtgttctgttaattcatggaaattctgttccgcttgtgttgggcggttaaaaaaaaaaaaaaaaaaaaaaaaaaaaaaaaaaaaaaaaaaaaaaaaaacaaaaa

SEQ ID NO: 901 - DNA, 673 bp, Zea mays
  Clone ID: TF_LIB4764-066-R1-K1-E2
attgggtacctcgaggccggccgggagccgccagcgatcccaacccccgactcctccggcagcccgcaacgactcgcgccgcctccggtcgcgccgggtccagggtcaggacacttattgattttgaacaaagatctagcatggaaccatcctcacagcctcaaccagtgatgggtgttgggtcacaaccttatcctgctgctgctctctatgtgccactacctggagctcttgctgttcctcctggctcacagccagcagcagcattccccaatccaactcaactcagtgctcagcaccagatggtgtaccagcaggctcagcaatttcatcaacaacttcagcaacagcaggaacaacagctcagggagttctggactacccagatggatgagatcaagcaagcaaatgacttcaagatccacaccttgccacttgcaaggataaagaagataatgaaggctgatgaggatgtgcggatgatctctgcagaagctcctgttgtgtttgcgaaggcatgcgaggtattcatattagagctgacattgaggtcatggatgcacacagaggagaacaagcgccggaccttgcagaaagacgacattgcagctgccatcacccagactgatatatatgacttcctggtggacataatcccgagggatgaaatgaa

SEQ ID NO: 902 - DNA, 523 bp, Zea mays
  Clone ID: TF_LIB3732-044-Q6-K6-C4
cccagcgtccgaggaaggctacgggcaccagggccacctgttgagccccgtgggcagcccgctgtcggacaacgagtccggcgccgcggcagcggccggcggcggcgggtgcgggagcagcgtggggtactgcggcggcggcggcggtgagtcgccggccaaggagcaagaccggttcctgccgatcgccaacgtgtcgcgcatcatgaagcgctccctgccggcgaacgccaagatctccaaggaggccaaggagacggtgcaggagtgcgtgtccgagttcatcagcttcgtcacgggggaggcctccgacaagtgccagcgcgagaagcgcaagaccatcaacggcgacgacctgctctgggccatgaccacgctcggcttcgaggcctacgtcgccccactcaagtcctacctcaaccgctaccgcgaggccgagggcgagaaggccgccgtgctaggcggcggcgcgcgccacggcgacggcggcggcgcggcggacgacgccggcccactcgccggg

SEQ ID NO: 903 - DNA, 825 bp, Zea mays
  Clone ID: TF_ZmC10894_3
gcacgagtgaccgccggaacaccctaggcaatggagcccaaatccaccacccctcccccgccccccgtgatgggcgcgcccatcgcgtatcctcccccgcccggcgccgcgtaccccgccgggccgtacgtgcacgcgccggcggccgcgctctaccctcctcctcccctgccgccggcgcccccctcctcgcagcagggcgccgcggcggcgcaccagcagcagctattctgggcggagcaataccgcgagatcgaggccaccaccgacttcaagaaccacaacctgccgctcgcccgcatcaagaagatcatgaaggccgacgaggacgtgcgcatgatcgccgccgaggcgcccgtcgtcttctcccgcgcctgcgagatgttcatcctcgagctcacccaccgcggctgggcacacgccgaggagaacaagcgccgcacgctgcagaagtccgacatcgccgccgccgtcgcgcgcaccgaggtcttcgacttcctcgtcgacatcgtgccgcgggacgaggccaaggacgccgactccgccgccatgggagcagccgggatcccgcaccccgccgccggcctgcccgccgccgatcccatgggctactactacgtccagccgcagtaacgaatttgcttccttatcatggtttcgcttccatgcagcctttgcgggtttttagtaaactattattattactgagagtgccctgttgttacccattgctctgttgttgccacccaataactcgatgacctgatgattgatgtgcccgttccgtaacaagtgtaaaaaaaaaaaaaaagggcggaaaagaaa

SEQ ID NO: 904 - DNA, 1079 bp, Zea mays
  Clone ID: TF_ZmC11482_1
cgagcccgcgtccggagagagcaagggacggggcgactattagctagtactagtagcgaaaaattaaggccaaacgacaacgacgcacggcggcatggcggccggccaccacgggcagccgccggacggggacgacgggcgcatcccccagtcggtcgtcggggggtgagccagaccggctgctgcccatcgctgaacgtcgggccggatcaatgaaggaaatcgctaccgcccaacgccaagatctccaaggaggccaaggagacgatgcaggagtgcgtgtccgagttcatctgcttcgtcaccggcgaggcctccgacaagtgccacaacgagaagcgcaagaccatcaacggcgacgacctctgctgggccttcggcgccctgggcttcgacgactacgtcgaccccatgcgcggctacctccacaagtaccgggaggtcgagggggaccgcgctgccgcagccgcgtcctcctcccgcggcggcggagaccaccaccccgcgtccgcgtccacgtccacctcgccccccgccgcagccccacccgccggtcatttcatgttcggcgccgcagccatcgaccgccccgacaacaacacctcatccgccaggcccttttgatccaacttctacttcgccagctgctctttaatttgcttgttattcgtcagatcaacaacaaaagctacgcgcttatcttattattttttactactgctcattttttgagaggtgaatcgtcataccaaatccaaattactagctatctctatctatctatctatgttccacagttccacacacataaatagcttatttgccttattccttattagtgctagctagccacaacaaaagctatgagcatgcatgtacccagtagtagctagctagaggaggtggactagagttcttgctgctaccgattcatctctggggtacgtatcatcggtgaataaggacttggggttgggacgatggtggatgaagacgaagaccctgccgcctactataccgcgagtcgatgtaactacttcgagtgcccatcatcgatgaatttgattcgattttttatt

SEQ ID NO: 905 - DNA, 806 bp, Zea mays
  Clone ID: TF_ZmC587803_1
acgtttcaccctaaccctagctacgatccccttctgcaacccggtcgtgtctcagggcgcatcgccgaaggccaagccctccctccctagcagcgcccggacccatcgatcccggcgggacgcgccgtcggcgccccaggctcaagctccatcgcgcgctcgacggcgagggatggatccgatggacatcgtgggcaagtccaaggaggacgtctccctccccaaatcaacaatgaccaagattattaaggagatgctaccgcctgatgttcgagtagcaagagatacacaagatcttcttgttgaatgctgtgtagagttcatcaatcttctttcttcggaatccaatgacgtgtgcagccgggacgacaagaagactattgctcctgaacatgttattagggctctgcaggatcttggcttcaaggagtacgttgaagaagtttatgcagcctacgaacagcacaagcttgaaactctggactctccaaaagcaaccaagttcactggtatagagatgactgaagaggaagctgttgcggaacagcagagaatgtttgctgaagcccgagcaaggatgaacaatggagctgccaaaccaaaggagcctgcattagaaccacagaatcaaccccaacagcccccacaacctcaactgcagctgcatcctacagcacagcagcctccacaaccgcaatcgcaactgcatcatcctcaatcacagcagcccctgcatcctcaactgcaaccgtatactcaggctgcaccacagcaacccctgcatcctcaactgcaaccgtatactc

SEQ ID NO: 906 - DNA, 1075 bp, Zea mays
  Clone ID: TF_ZmC11482_2
ctcagtctcaaactccccgctctcccccgcccgtccagctcgtgctccgcctccgctgctctgtcctcttccctcctctgcgtttctcctcagagctgtttgacttgaccggacagtgctgttcggtggctcggccgcgatgccggactccgacaacgagtccggcgggccgagcaacgcggagttctcgtcgccgcgggagcaggaccggttcctgccgatcgcgaacgtgagccggatcatgaagaaggcgctcccggccaacgccaagatctccaaggacgccaaggagacggtgcaggagtgcgtgtccgagttcatctccttcatcaccggcgaggcctccgacaagtgccagcgcgagaagcgcaagaccatcaacggcgacgacctgctctgggccatgaccacgctcggcttcgaggactacgtcgagccgctcaagctctacctgcacaagttccgcgagctcgagggcgagaaggcggccacgacgagcgcctcctccggcccgcagccgccgctgcacagggagacgacgccgtcgtcgtcaacgcacaatggcgcgggcgggcccgtcgggggatacggcatgtacggcggcgcgggcgggggaagcggtatgatcatgatgatggggcagcccatgtacggcggctccccgccggccgcgtcgtccgggtcgtacccgcaccaccagatggccatgggcggaaaaggtggcgcctatggctacggcggaggctcgtcgtcgtcgccgtcagggctcggcaggtaggacaggttgtgaccgtcgccgtccatgcttgcatggccatggcatggctcagtcccgccgccggcttcttgcttggtgtcggtaattagcgctggttaagttaaccttcggtttttccccccttttcttttcgtggtaagtaatgttgtgctgaatggagacagtgatatggttaagatagctccataacctctcggtaattaatcctgtgatttgtactcctaagctgctgctaaactgagctatgacacaatacaaatgctgccattaacccaaaaacaaaaaaaaaaaaggagg

SEQ ID NO: 907 - DNA, 1128 bp, Zea mays
  unsure (1)..(1128): unsure at all n locations
  Clone ID: TF_ZmC9362_1
attgggtacctcgaggccggcctggactctcccgtcgcagcctgaagctgtgcgccccggttcggtgggcgtgaaaggggagaaaagagggcgggaaggaccgcggattttgctagggtttgcggtttctgcttcacactgcctcctcagtcctcaccaccacagccgtcgcgcgcaggagggtagggaggatgccacgtaagatcaccttggtcaaggagggggagccgcagccggtggacgctgctcaaggggagcccgctccggcaccggcggcaccgacggccgcgttgacggaggcggaggtggacgagctgcccagggccatcgtgcgccgccttgtcaaggacaagctttcccacgtcgccggtggggaaggagccgaggtcatcgtcaacaaggacgccatggccgcgttcgccgagagcgcccgcatcttcatccactatctctccgccactgccaatgatatgtgcaaggaatcaaagaggcagaccatcaacgctgatgatgtcctcaatgctcttgatgacatggagttttcggagtttgtagagccccttaggacttcactgcaagagtttagaaacaaaaatgcagacaaaaggtcagaagcaaagaaacaacagaaggaaaagagaaggaaattaaatgaagagacacttccgcagaaagaaaatgatccagctgatgatgccaaggagaatggagtagcttaatcgcaagaaaaatgaagaatgaatacaattaacttctctgctggaggggcagtaacacgcagaatcaaaaccatggcagtatttgttggtagttgtatttgcttttgctccatgtagcctctactccaaaacactttcttgacttgatatgatgctgtataattctagtgtcctatcagttttcagcttgcttatggtgcaattaaaattctatgtgcctgatgaaattgttcttatgaatgaagaatgataccagcactatgttcgttggcaaattaaaaaaatttattcttccagtatgtaacatcacattccctccacagtcccaccatctctgattagatccagattacccccagntactgtgattcttatcctctngtgctctgtttggggttggaatttggaa

SEQ ID NO: 908 - DNA, 1560 bp, Zea mays
  Clone ID: TF_ZmC10894_1
accacacgtccgcccacgcgtccgcctacgcgtcggcggactcgtgtgccgaccacgcgtccgggcttggcttgggactgggccgcccggccgcgaggaataaactcactcctgccttcatacgtatccatagccgcggcagtacgtgtatgtggttagctatacgcgacctcagctcgggcgcaagctacaaccccgaccaggcgagaagaagcatcgatagtgtgacgagctaacccaccagcagcaacgtaatccaaatccatggacaaccagccgctgccctactccacaggccagccccctgcccccggaggagccccggtggcgggcatgcctggcgcggccggccggcacgagaagcaccttcctcttcctcttcctccgccccccaatccccctcgtctcacaaccctagctgcccccgaatccatggatcctaacaaatccagcaccccgccgccgcctccagtcatgggtgcccccgttgcctaccctccgcctgcgtaccctcccggtgtggccgccggcgccggcgcctacccgccgcagctctacgcaccgccggctgctgccgcggcccagcaggcggcggccgcgcagcagcagcagctgcagatattctgggcggagcagtaccgcgagatcgaggccactaccgacttcaagaatcacaacctcccgctcgcccgcatcaagaagatcatgaaagccgacgaggacgtccgcatgatcgccgccgaggctcccgtggtgttcgcccgggcctgcgagatgttcatcctcgagctcacccatcgcggctgggcgcacgccgaagagaacaagcgccgcacgctccagaaatccgacattgccgctgccatcgcccgcaccgaggtattcgacttccttgtggacatcgttccgcgcgacgacggtaaagacgctgatgcggcggccgccgcagctgccgcggctgccgggatcccgcgccccgccgccggagtaccagccaccgaccctctcgcctactactacgtgcctcagcagtaatgtatcatcatcacgttattgttccgtctatgtgcctgagcaataatgtatcatcattgccttattgttccggggcagttgtgttatttgtgtctgtttagttgctgctgctgttaccgcgtaatagcatatgtgttatttgtgtctgtttagttgctgctgctgttgccgcgtaataaaacttggtcatttacggggctccctcaagattaagaattgagttgtttgatggtagaatcctggtaaggttgttgtaactggggggcgcctttgtttgggctggtagtgtatgcctaggcctcacttatctgatgctgtaatgcgacaagtattatgtggttgtctggtaattattgtccaattactgctcttcaaaaaaaaaaaaaaaaaaaaaaaaaaaattcagaacgaataaggcggggcgtgtgaggccgtaagagtacgtagtactaatatgtagatgcacgtgacgtgcctattaatcaaaccattaactatgctagttaattaaattagatcctctct

SEQ ID NO: 909 - DNA, 479 bp, Zea mays
  Clone ID: TF_ZmC10894_4
cggacgcgtgggtcactctctcactccactgcctccggaacaccctagcaatggagcccaactccagcatccctcccccggtgatgggcgcggcggtggcgtaccctccggcggccggcgccgcgtactccgccgggccgtacgcgcacgcgcacgcggcgttgggcgcgctgtacccgcctcccccggcgccgggtcccccctcctcgcaccagggcggcgcggcggcggcgcagctgcagctgttctgggcggagcagtaccgcgagatcgaggcgacgacggacttcaagaaccacaacctgccgctggcccgcatcaagaagatcatgaaggcggacgaggacgtgcgcatgatcgccgccgaggcgccggtggtgttcgcccgcgcctgcgagatgttcatcctggagctgacccaccgcggctgggcgcacgcggaggagaacaagcggcgcacgctgcagaagtcggacatc

SEQ ID NO: 910 - DNA, 1528 bp, Zea mays
  Clone ID: TF_ZmC598014_1
ttttataccaatgcgctattgcaccactgcagctgctttaagatggatttttgcttaagatggaattttacaagcaagcatctttagtaacttcagttcgattatttgctgctctcaagagtagcgtccaagctacaagaataaataagataaaggccagcgatttttttcatacacaaaaggcattcccaatcccatccatcaacatagatctgagaatttttagtgttgtaccctgaaatacatcttttgcattgacggcaggagcgatcccaatccccgactcctccggcagcccgcaacgactcgcgccgcctccggtcgcgccgggtccaggtaaagcggcttccatctcctcggtctcagcgcgtcatcccctcctccttcctcttccgtttcccttagggttggagtagacacgtcggctcaaggatccttcgagggactgactggttgtgcaaatacctacttttaaattattgaaagtgggagcatgaaagggtcaggacacttattgattttgaacaaagatctagcatggaaccatcctcacagcctcaaccaatgatgggtgttgggtcacaaccttatcctgctgctgctccctatgtgccagtacctggatctcttgctgttcctcctggctcacagccagcagcagcattccccaatccaactcaactcagtgctcagcaccagatggtgtaccagcaggctcagcaattttatcaacaacttcagcaacagcaggaacaacagctcagggagttctggactacccagatggatgagatcaagcaagcaaatgacttcaagatccacaccttgccacttgcaaggataaagaagataatgaaggctgatgaggatgtgcggatgatctctgcagaagctcctgttgtgtttgcgaaggcatgcgaggtattcatattagagctgacattgaggtcatggatgcacacagaggagaacaagcgccggaccttgcagaagaacgacattgcagctgccatcaccaggactgatatatatgacttcctggtggacataatcccgagggatgaaatgaaagaggaggggctcggacataatcccatagttggcctgccgcctgctatgggggctccagctgatcatggttctcatccatattactatgtgccagctcagcaggtgcaaggagcaggtatgatgtatggtggccagcagggtcacccagtgacttatatgtggcagacgccgcaagggcaagcggcagagccccccgaagaggagcagcagcagtctgcctgaatgtagcaaatagacgagaacagcaaagcaattacatcttgatctgaagttctgaacttagggcctgtttggtgtggcgccgaaaccgccgcaccgcgtctaagccgcgacgctcgatttggtcgccacaactgcggcacaaaatctgtggcgcgtgtgggcgtgggcggcggtcaaccaaacatgctcttagttctctaaacaaacaaatatgatttggttatgttaattgtgc

SEQ ID NO: 911 - DNA, 1400 bp, Zea mays
  unsure (1)..(1400): unsure at all n locations
  Clone ID: TF_ZmC10894_2
aaaaaaagaagcttgccatttcgctcagggccctgcaacgcgcggcagctacacgcgggagagagtcttgggactgggccgcccggccgcgaggaataaactcactcctgccttcatacgtatccatagccgcggcagtacgtgtatgtggttagctatacgcgacctcagctcgggcgcaagctacaacgccgaccaggcgagaagaagcatcgatagtgtgacgagctaacccaccagcagcaacgtaatccaaatccatggacaaccagccgctgccctactccacaggccagccccctgcccccggaggagccccggtggcgggcatgcctggcgcggccggcctcccacccgtgccgcaccaccacctgctccagcagcagcaggcccagctgcaggcgttctgggcgtaccagcgccaggaggcggagcgcgcgtccgcgtcggacttcaagaaccaccagctgcctctggcccggatcaagaagatcatgaaggccgacgaggacgtgcgcatgatctccgccgaggcgcccgtgctgttcgccaaggcctgcgagctcttcatcctcgagctcactatccgctcctggctccacgccgaggagaacaagcgccgcaccctgcagcgcaacgacgtcgccgcggccatcgcgcgcaccgacgtcttcgatttcctcgtagacatcgtgccccgcgaggaggccaaggaggagcccggcagcgccctcggcttcgcggcgcctgggaccggcgtcgtcggggctggcgccccgggcggggcgccagccgccgggatgccctactactatccgccgatggggcagccggcgccgatgatgccggcctggcatgttccggcctgggacccggcctggcagcaaggggcagcggatgtcgatcagagcggcagcttcagcgaggaaggacaagggtttggagcaggccatggcggcgccgctagcttccctcctgcgcctccgacctccgagtgatcgatcggcgcgtctcttggtcctggcctcctggcttagctacatgtgcatgatgtcaatcgttcaatgtgccatgctgtgtatactctacagcaaacgtggtaatggagctgctatgcatatacagaacgaataaggcgtgacgtgtgagaccgtaagagtacgtagtactaatatgtagatgcacgtgacgtgccaattaaccaaagattaacatgcagttaattaattagtcctcccnnnnncnnncnncnnnntcnncnctttctgcnnccccnnngccgnctgggtcnnnccgncgccctgctcctggncggcnncnccctcngctttttcggcnncngcgtccccctcnncctggtggtcgccgtggtcgcggnggtcgtcctcctcggcggcgcc

SEQ ID NO: 912 - DNA, 385 bp, Zea mays
  Clone ID: TF_uC-zmflteosinte066e07b1
tttcggacttcaagaaccaccagttgcctctggcccggatcaagaagatcatgaaggccgacgaggacgtgcgcatgatctccgccgaggcgcccgtgctgttcgccaaggcctgcgagctcttcatcctcgagctcactatacgctcctggctccacgccgaggagaacaagcgccgcaccctgcagcgcaacgacgtcgccgcggccatcgcgcgcaccgacgtcttcgatttcctcgtcgacatcgtgccccgacctccgagtgatcgatcggcgcgtctcttggccctggcctcctggcttagctacatgtgcatgatgtcaatcgttcaatgtgccatgctgtgtatactctacagaaacgtggtaatggagctgctatg

SEQ ID NO: 913 - DNA, 361 bp, Zea mays
  Clone ID: TF_uC-zmflb73001e01b1
tcgtccacgcgtccggccggaccgtcacgtgtacttcaggggccgatcttacgctgacatccctgaccgagggtctcacagcgtggacctgccccggtacgcggtcgacggcgctgggtggcgtgcacagagatagcacccgggctgatatgaatgcgggaggagcagatgggggaagcttgggggagccatggcggtagcggtgggagccacaagagcgggagccccaggggcggaggaggcggaggcagccgcagggagcatgacaggaacctgcccataggcaacatgaggcgcatcatgaagaaggccatgccgtataacggcacgatcgcctaggacgctaaggagaccgtgctag

SEQ ID NO: 914 - DNA, 1527 bp, Zea mays
  Clone ID: TF_ZmC4739_1
ccggccgggatagctctactcctatatcttagtggtgacaatttccccgtgcggcagccagaaaactgcactcgaatccgagcagccacaattgtttttatgacaaagaaaaggaccggccgggccggtccggatatcaacccctcccctcgtattaggccccacctccccgcgcgccctaaccctagcttctcgattcaactctgcgcgagacgaattctctcccgaattcgctcgccgaaagcacctgctacctcgcgcccgccttccgtcgcgcggattcggtgccgtgcgtggagatggacccgatggacatcgtggggaagtctaaggaggacgtttccctccccaaatcaacaatggttaagataattaaggagatgcttcctcctgatgtacgagtggcaagagatgcacaggatcttcttgttgaatgctgcgtagagttcatcaatctcctttcgtctgaatccaatgaagtgtgcagcagagaagagaagaaaacaattgctcctgagcatgttatcaaggctctaagtgatcttggcttcagagagtacattgaggaggtttatgctgcgtatgaacagcacaaactcgagactctggattctccaaaagctggcaagttcactaggattgagatgacagaggaagaagctgttgctgagcaacaaaggatgtttgctgaggctcgagcaaggatgaataacggagcccccaagccaaaggagccagaacaagaaccgccacagctaccacaagcacaaccccaacttcagctgcatactgaaccacagcaacccatgcaatctcaagttcagttgcattcgcaaacacaacactccctccaacctcaactgcagctccaccatcagccacaacagctcccacaagtgcagctgcactctcagccgcagctgcaaccccaagtgcatctgcaccctcagccgcagttgcccccacaattgcaggtccatcagcagctgcagcaatccccacaagtgcaggtccacgagcagccccaagtgcagccccaagaagcgcagttgcaatcatcagcccagcaaacctcccaaccgcaacctcaggcacaactacaatcacaggggcactcacaagcgcaactgcaagccggactgctgggtcagttgcagacacaggcgcaaaccggacctggcatggatagttagagactattgtgtagcctgagtataagcaaaaaagggaaaaaaaaccaggcacttttgctgcatctactagaaacctgtatgcctgcttgtgactcattagatcctgatttaggtttccgtgcttcctgtagaatgtaaatgcagtgtgattgcagttgccttgttgctaataatgcgaagccgttagttactgatgatgtcattattgtgtggaatactgaatgtcatggcgtggcttatgtgacgtgctgaatgatgttctgtggtccattgtaatagcctaacttcgacatctgtccatgatgatagtgattgatttgaatgagctcttgct

SEQ ID NO: 915 - DNA, 1395 bp, Zea mays
  Clone ID: TF_ZmC4739_3
attcggctcgagatttcactctgcccgagtttgccgaattgtcgaccgaattcgctcgcggggagcacttgctacctcgcgcccgccttctgtcgcgcggattccttgctgcgcctggagatggacccgatggacatcgtcggcaagtccaaggaggacgtctccctccccaaatcaacaatgtttaagataattaaggagatgcttcctcctgatgtacgagtggcaagagatgcacaggatcttcttgttgaatgctgtgtagagttcatcaatctcctttcgtctgaatcgaatgaagtgtgcagcacagaagagaaaaaaacgattgctcctgagcatgttatcaaggctctaagtgatcttggcttcagagagtacattgaggaggtttatgctgcgtatgaacagcacaaactcgatactctggttggtaccacttgttactcacagggctctgcatatcattccctctaatctgtgtactatgcttgacaccaatatgttttgagcaggattctccaaaagctggcaagttcactaggattgcgatgacagaggatgatgctgccgctgagcatcaaaggatgtttgctgtggctcgagcaaggatgaataacggagcccccaagccaaaggagccagaacaagaaccgccacagctaccacaagcacaaccccaacttcagctgcatactgaaccacagcaacccatgcaatctcaagttcagttgcattcgcaaacacaacactacctccaacctcaactgcagctccactctcagccgcagctgcaacccctcagccgcagttgcccccacaattgcaggtccatcagcagctgcagcaacccccacaagtgcaggtccaccagcagcccgaagtgcagccccaagaagcgcagttgcaatcatcagcccagcaaacctcccaaccgcaacctcaggcacaactacaatcacaggggcactcacaagcgcagctgcaagccggactgctgggtcagttgcagacacaggcgcaaaccggacctgacatggatagttagagactattgtgtagcctgagtataagcaaaaaagggaaaaaaaaccaggcacttttgctgcatctactagaaacctgtatgcctgcttgtgactcattagatcctgatttaggtttccgtgcttcctgtagaatgtaaatgcagtgtgattgcagttgccttgttgctaataatgcgaagccgttagttactgatgatgtcattattgtgtggaatactgaattcgtgacaagtgtcatggcatggttttatgtgacgtgctgaaagatattccgttgccattgtaatagccgaacttcgacatttgtccatggtgatagcgactgatttgaatgagttcttgctgc

SEQ ID NO: 916 - DNA, 705 bp, Zea mays
  unsure (1)..(705): unsure at all n locations
  Clone ID: TF_ZmC29745_2
tgggacctcgagccggcgggacaccctccgtagcctcctatttaacgtatcctcgcacatcacaagaaggacactctccaccagccagccagagccagtagccagtagcccccaccagatcggcctccccgttgctcatcaccagcaagagcaactcagcaacctagctagctataggtttaggtagcaagagccaatggactccagcttcctccctgccggcgcggacaatggctcggcgggcggcgccaacaatggcggcgcggctgctctncaggcgccgccgatccgcgagcaggaccggctgatgccgatcgcgaacgtcatccgcatcatgcggcgcgtgctgccggcgcacgccaagatctcggacgacgccaaggagacgatccaggagtgcgtgtcggagtacatcagcttcatcacgggggaggccaacgagcggtgccagcgggagcagcgcaagaccatcaccgccgaggacgtgctgtggcccatgagccgcctcggcttcgacgattacgtcgagccgctcagcgtctacctccaccgctaccgcgagttccagggcgaggcgcgaggcgtcaggctcgccccggcccctccgtgcagcgaccaccaacaccaccactccgcggcgccaccgaagctcaataagacccgcgagcccgcctccggagccgccatgttaccgcacccccacga

SEQ ID NO: 917 - DNA, 780 bp, Zea mays
  unsure (1)..(780): unsure at all n locations
  Clone ID: TF_LIB4172-014-Q1-L1-H5
tggtacgcctgcaggtaccggtccggaattcccgggtcgacccacgcgtccgaatgtggctaggataatgaaaaatgccatacctcaaacaggaaagatcgcaaaagatgccaaagaatgtgttcaggaatgtgtgagtgaatttataagcttcatcacgtcggaagcaagcgaaaggtgtcatcaggagaagcggaagacaatcaatggggaggatattctgtttgccatgtccactctaggctttgacagctacgtggagcctctgaaactgtaccttcagaagttcagagaggccatgaaaggagagaagggtatcgggggagcagtctccgccacagatggactaagcgaagagctcacggaagaggcattcactaaccagttaccagctggcttaataactgcagatggtcaacagcaaaacgttatggtttacacaacgtcttaccaacagatttctggtgtccagcaaattcagttttcatgatcggaaggacggacggaaccgggcttgtgtggagagagtctgatggagtctgaagcagaggcatgggcggaagtgagggtgaagctgcctccttgtaccataagtagctgtaatgtagcttcctgatgcttgactaattgaggtgttaattctgacttgagaatctttttcatgaatgattntaaaagaaaaaaaaattggattttaaaggtattaaaatatttttggtttgtacgagagtttgntgctctgtatgacgcctgtatgcattgtatattgcaatttatact

SEQ ID NO: 918 - DNA, 1201 bp, Zea mays
  Clone ID: TF_ZmC29745_1
tgggcaccacgcgcccgccaccagccactactcctcctccaccacgagcgcgcgataaccctagctagcttcaggtagtagcgagagccaatggactccagcagcttcgtccctgccgccggcgcggagaatggctcggcggcgggcggcgccaacaatggccgcgttgctcagcagcaggcgccggcgatccgcgagcaggaccggctgatgccgatcgcgaacgtgatccgcatcatgcggcgcgtgctgccggcgcacgccaagatctcggacgacgccaaggagacgatccaggagtgcgtgtcggagtacatcagcttcatcacgggggaggccaacgagcggtgccagcgggagcagcgcaagaccatcaccgccgaggacgtgctgtgggccatgagccgcctcggcttcgacgactacgtcgagccgctcggcgcctacctccaccgctaccgcgagttcgagggcgacgcgcgcggcgtcgggctcgtcccgggggccgccccatcgcgcggcggcgaccaccacccgcacccccactccatgtcgccagcggcgatgctcaagtcccgcgggcccgtctccggagccgccatgctaccgcaccaccaccaacaccaccacgacatgcagatgcacggcgccatgtacgggggaacggccgtgcccccgccggccgggcctcctcaccacggcgggttcctcatgccacacccacagggtagtagccactacctgccttacgcgtacgagcccacgtacggcggtgagcacgccatggctgcatactatggaggcgccgcgtacgcgcccggcaacggcgggagcggcgacggcagtggcagtggcggcggtggcgggagcgcgtcgcacacaccgcagggcagcggcggcttggagcacccgcacccgttcgcgtacaagtagctagttcgtacgtcgttcgacttgagcaagccatcgatctgctgatctgaacgtacgctgtattgtacacgcatgcacgtacgtatcggcggctagctctcctgtttaagttgtactgtgattctgtcccggccggctagcaacttagtatcttccttcagtctctagtttcttagcagtcgtagaagtgttcaatgcttgccagtgtgttgttttagggccggggtaaaccatccgatgagattatttcaaaaaaaaaaaaaaaaaa

SEQ ID NO: 919 - DNA, 2542 bp, Zea mays
  Clone ID: TF_ZmC16020_1
cgaccaatcccgcctcccccgcccacggccgcgcctggagcggcgggccgcgcgcggccaccctcgcggcctcgccgtctcgacgccaccgctgggagcgcgatgcccacccgcgcaccgtgcgcaccctcccccacgtgtcccccctgccgcccgagggccccgcctgtcacccaccgtccccggggtgggcagccgaaagcgacgcgtgaagcgctctgccctgcctgctgccctcagcgctcgcctctcgtcacgcgccccctccacaacccccgatgcgatgggtgcccctgcccctcgatagccgcgccgctctcctgcccccgttccccatttgcatcctcgtccacctccctgccctagcaccgtcctcccctattcgacccaacgccgccgccgcctccgccgccgcataggcctcgccgcggcctctgctccgccccgcggcctccggaggttctactcgcgcgcgatccgccgctgcgtccgttgctccgccatcgattcggtggcgcgtggagtatgtctctggtgcaagagtgctgaagatgaaggagaggagctctttatgcgaaagtgcagccgatggaaactggggtttgaaatataaaaggaaaagaagcaagttaacagttagcccatctaatgagaatgaggctacctcaccaacatctgactctccaatgagccatggttccaccaaaaagaagttgaagcatgacactaacatttctccatcagccaagaagataagaggacacgatgggtatttttttgagtgtgtagaatgtgatcttggtggcaatttgctatgttgtgatagctgtcctcgtgtttaccacttggaatgcctcaatcctcctcttaagcgtctaccccctgggaagtggcaatgtccaagatgccgtccgaaaaaaggtagcttgaagatgttaggtaatgcagaggttggcacttctaaacatgaaaaaagtacaaggacatatgcaggtacgacatcaggtagtccaccttcgcatacaaaagtctcctttaagaccaggaactccacacaagacaaaactggatcaaaaaaaaaaaaaaagggcggcgctcgcgatctaatgaatgggggtgaaaccaatacgaagaataatgaagttgagaaaaagaagacactgatattacatttgaagaagcgttcaaccaaggaattgtcagagaacactaaaccctcgaagtcagaatttgttgaactttcagaagagaaaattgtaaaacatggaagtgttttgaaactcaagaaacatccacatcgtatggacttgtctccaagtaaatctaaaaccaggaggcaaagtagccagagagagagtaaaagatctggcacaaaaaagattaaatattccatgtctgatgatgacagtgtttcctcatcagaaccatcgacatctcttgataacagtgaatcaccaccaaaaagaaaacactcagatggaaaagcaccttcatccagtaccaagaaagggaaaaagaaagtgaaatttgttgagaaaaagcactctgaggagcagggcgtggtaggtgacaaaatgatgactacccaggaggatcagcaggtcgatcgcatcctaggctgccggcttcagatgagccaaatcaacccgccgtcccatgcttcattggagcagtttgaatcagctaatctccaggtggatggtatggttcttccacatgcttccgctggcattcctaataggcctcatgatggaacagagtcttctagaaatggtacaattgaggatatatgtgctgatgaatcagccaatcatagtggtcacaatttagaaatgcgaaaggatacggacagtaaatcccatgaaaaggagtcacataagcgagaacaagtcaagaagatattatcagtatgttctggtgatgagaccaatataatgagagatgatcaagtagtcagagaaaatgtttcagcttccaaaaaaggtgaagatgagacatctgatttgccagcagaaaaggatgataccatacttccagtcaccagagcttgtacaatgatcaggaccaatcaagatcatacagatgaaagtaaacagcatgggaaaatagaacaaataacaaataaggactacaatgatgctggatatgagttcttgatcaaatgggttggaaaatcaaatattcacaacagttgggtttctgaatccgaggtaaaaatattagcaaaaaggaaactagaaaactacaaagcgaagtatggaatgagtttgataaacatttgcaaggaacagtggtgccagccacagcgagttattggtcttcgtgcttctgtagatgaagtggaagaggttttaatcaaatggtgtggtcttccttatgatgaatgcacttgggaaagatcagatgaacctaccctgatgaaatatagccatttggtcactcagttcaagaattttgaatgccaggctttggataaagatgtggtaaaagattatgcaaatgcaaggaaccgacatgagcttaatgtgttagttgatcagcc

SEQ ID NO: 920 - DNA, 546 bp, Zea mays
  Clone ID: TF_5108360
acacgttgatcagagagtagctagaggaatataattctgttacatttcataaccctctctctcatgcactcacgcctttatgcagccaggcaacacgccggcatctcacctcccataggccacgcacacgttacatggagttcacccactccgggcccaacagcctctggttcaacttacgctcacgtgtacctctccttggcccagctggctcctctttctcctttgaacggcccacattgtccagtttagctcccgcgccttcaggttcagcagcttgtggcgccctgctggtaacatccccccggcgacgagaacctgcttgcccccaagcaggtgcattgggaaatgtttgcttcaatgtctcaagatcttcccaagttgccaacgacgatgacaatcctgaccacttgataagcccttgagccacaccactggtattcatccgacgttgtaacacttgtacagggatttgtagaccttggtggtgttggggagcaggctgcggagcttggcgaggtggccgttgatgcgctggcggcggct

SEQ ID NO: 921 - DNA, 657 bp, Zea mays
  Clone ID: TF_LIB3060-107-Q1-K6-E10
gattagcccaccatccggccgcagccggccaaggttctccaaatcctccacacccgctcaaggttcccctgttctctttttaatcccctctccaatctcactggcaaacagaacgcacacaccctagtgggtccattccagcccactcaaccttgagttgggcctctttcacgtcttggcctgctcctcactgttggttcattagatgtcatgacattctcccctccttcagtgacggcttgtccccaagccgcgacttccgggaatctggcgatgatcgcagcttcgtcttcccatgttgcaagttcttcaggccagtcagtccattgtatcagcagttggggtaccactcctgtgtgtgtttgcatctggcgacgctgcaaaatcctcacaggtttctgtaatgaatctggtaaaggtggtagagtggagcttacttgcatattggaccccaaagcctttttcagaagtgaaacatggaataccgggtgtatagatgaagaaggtgggagacccaatttataagcgactgacccgattttggcaattactggatatggaccaaaaaacttgaatgccaatttgtgatttgcccgcttgaccaaagacgattggacgtaaggttgtagtttcaaatataccatatcacccaccatg

SEQ ID NO: 922 - DNA, 4299 bp, Zea mays
  Clone ID: TF_ZmC1278165_1
tcagtccgcgtcttcagtcatgacatctccccgggcctcagataacgcttgtccccaagcgtttgcctctggaaaccgtgccctggccactgcataatcctcccatgttgcagcttccttaggtaccccactccatttcaccagcacttgaacaatagctcgattgccctttctcaccatccttcgatcaaggacctgctctggctctatacccccttgagacaaatccaccgcaggaggtagctctgagaaaactggagaataacagggcaggaatggcttcagttgtgacacatgaaaaaccggatgtacttgtgcatccccaggtaattcgagcttgtatgccacctccccaatccttgatatcaccttgaaaggaccaaagtacttaaatgccaatttaggacaggatcggttcaccacagtcttttgtgcataaggttgtaacttcagcaaaaccagatcgcccacttgaaattccctgggagttctgcccttgtcagcatactgcttcatgcgaagctgagctcgtgctaactgctcctttagcatgactgaaaatgcattcctttcagcaaaccagtcagctatctccctatcttccatgcccagcgtttttggtgcaacaagcaatggtgcttcatagccatacaacaccttgaagggcgtacatcccagcaccgaatgatatgtagtattataccagtactcagctaaagcgagccagctcttccacttgttaggttggtcatgtacagcacacctgagatacatttccaagcactgattcactcgctcactctgaccatccgtttgagggtgatatgcagtggacatcagcaacttcactcccataagttggaatagatttttccaaaaggcactggtgaaaaccttgtctctgtcagacactatagatctgggaaccccatgcaacttcaccacattctcgagaaatacttgggcaactcctttagcagtaaaggggtgctttagaggaaggaaatgactgtatttcgagaatctatccaccactaccagaatggtatcaaacccctcagactttggtaacccttctatgaaatccatagtcacatcttcccaaataccttgcggaactggtaaaggctgtagcagccctgcggggtgcaccctctcagccttggccttttgacagattgcacattgctgcacatactgtgtcacatcattttttaaacccttccaccagaacaccttctttaccctctgatatgttgcttgaattccagagtgccctccaactgcactatcatgcagtgctgcaattagtttagtgcgcagagctgagttgcacccaatccagatccggtttgcttttctgataataccttgctgcaaagaaaacccctgttcatccgggctctgaattaacagttgagtgatcaattgctgtgcatcctcatctgtggcatacgagttcactacttcttgaatccatataggctgaatttcagagagaacagacaaccccatcatatgctccacccttgataatgcatccgccactacattctctgtgccctttttatacaccacctgaaactgcaagcccataagcttggtcatggctttcttctgcagatcagactgtaactgctgatctccaagataagtcagagatttgtgatctgttttaatcacaaaggcacccctctgcaaatattgtctccacctgtccactgctaggatcagagccaaaaactccttctcataaattgaaaggtgtttgttcttctcacccaatgccttgctgatgaaggctatgggcctgccttgttgcatcagaacagcccccaatcctatatctgaagcatcagtttctaccgtaaatggcaagtcaaatcttggtaaagccagaactggagtagaggccatagcttgtttcaagttttcaaaagctatctgagcttcttctgaccatgcaaacccttgctgtttttgcaacagccttgtgagaggtttagccaacaacccatagttcttcacaaatcttctatagtaacctgtaaggccaagaaatcccctaagctcagtgacattcctgggcatcacaaattttctgaggaaactctgcaatattgaattcatggcacactgaaagctagctggagcattggtgagcccaaatggcatcaccctgaactgataatgaccatggtgtgtcttaaaagcagttttgaactcatcctcagcccccattcggatctggtgataccctgaggtcatgtcgagacttgtgaaaaatttagttccagctaattcatccaatatctcctccaccaaaggcattggaaatctgttcttaattgtcatgtcattcaattttctgtaatccacacaaaacctccaacttccatccttcttttgcaccaataacacaggagaggcaaaaggactcacactaggaactatcaatcccgcagccaatagttccgacacttgcttttcaatctcagttttgtgatgtggtgaatacctgtagggtctggaattcactggtatagaacctggcaagagtgggatatgatggtcatatggtctagtgggaggcaactgggtgggcaccgcaaacacatccgcaaactcttccagaattcctgttagtgtctcatttccagcctcatcttcctctcctttaacctcctccagcatcacaaacacccatacttcatctcccttcacccacttttctaactgcaaaacagacacctgttgcacctctctctttaggtctgcttccccttgaagtttaacctccaccccttgatcacagaaggttagcaccttgttgatccagtcacaatgcattgggctatgctgtttcaaccagtcataccctaatatcacatcataagcctccaacgccaacaccctcatggcagttctataaacatgccccccagccttccacttcacctctctgacatttttttcacacaccatgatctctccattagctaccttcaccttcacaggaggacaatcttctgtgctcaaccccagtttagtcaccatcctctgactaataaaagttgtggaactcccggagtcaatcagcataaccagcacctgatcttgaatcagagatagcaccctcatacaaccatcacactctgtcccctttatggcattccaggacagctgatgtaatccttccactatatgctcctcctcctgttccagcttcagcaacacttcgtcagttagaactgtgctcatatcctccactgtcaactgatgtatttgagtcactactcgcttgggacatttggcttgatgcccaggttcaaatttgtctccacatatgtaacatagcccattggcccttctataatctcttaactgcctttccttattcaattcaggattcagaattccacttctactccctattgcttgagtcttgattcccataactcccttctgacttctcatcctattcttctcggcaatttcctgatataattgggctaatctcatggccttatccactgtcttgggcgtccgggccatcacttgggactgaatctcaggcttcaaacccctcacatagtgggtcacaaacaaagtctcatccaactccggattatgcaaagtagctgcatatctgatatcattgaaagcctgggaatattcttctaccccatgctgttgtttcacattgaccagcgctctcatggcatgagggtactcttccaccccaaacttctccctcaccgcatgggtgaactgctcccagtctcccaaaccatgtttcagtttatacacctgcagccacttcgacgcatttccctccatgtgcgtcgaggcagtgcttgcccagatccattcgggcacctgataaactgtgaaatattccacacacctatcaaaccagattcctggatcattcccatggaacttaggaaacgaccacttcggtagagaactgggcctgaactcccttccttcaccccattgctccctccgttctctacctccttccctgccgaatcctccgcccctctcatccccgcgatggacacggtgttctcgctcagagttggattcgttaccttccaaatccttcgccagcagctcgagtcgaagacgcgagacagtctgctcggtctcctgcagttgacgagccatgagcgcccgatcctcctcagccttcctctgaccgacctccatcgcctccatcttgcccgtcaggcgctccaccgctgtcaacatgcgctcccatcgctcttctcctttctgctcagctcccgccat

SEQ ID NO: 923 - DNA, 226 bp, Zea mays
  Clone ID: TF_700168802H1
cttaaacatcacatctgataaatggagctgcccagaatgtgtaagtccattaacagagatggagaggattctagatattgaagtgctggaagcacctcgtgaagattctagttccacagagcctcgatcaaagaagatggagcgatatcttatcaagtggaaaggattatcatacattcactgctcttgggtttcagaaaagagaatattcagaagccgcgaatat

SEQ ID NO: 924 - DNA, 2217 bp, Zea mays
  Clone ID: TF_ZM4892.C1.o1.fg
atggaggagcatgttcttcaggtgaaacaagtgtttcagaaactaaaggatcatcagctgaaactgaaactgtcaaagtgtcggtttgcacagaccacccttgagttcttgggacacatcatcagtgcagaaggcattgccactgacccagaaaaggtgcaggttattcgagactggcccattcccaacaacgtcaaggaggtgaggagttttctcggcatggccgggtactaccgtcgatttgtcgctcactacggcataatcagcaaaccccttactagcttgctcaagaaggaccaaatttttgtgtggaatgatgaagctcagaaagcctttgaagctctgaaggcagcattggtgcaagcaccgttgatcactggcgcccttacctccaacatggagaatttttttatcaagactgatcagcaaagcctaacccatctagaagaccaaaagttgtcgactatctggcaacaaaaagccataaccaagctattgggtctccaattccgcattatatataagaaaggggtggaaaaccgtgtggcagatgctctttctagacggccaaacctatgcactgatggttccaaactgcaactcaacgtgttagcaacttcgacagtggtaccaagttggctcaccgaggtgactaacagctatgaggagaatgaggaagctaagagcattctgagtacgcttgctgcaggggatacaatagagccattcactttggtatcaggagtgatcaagcataaaggaaggatttggctgggtagcagtaaccaagtgcaattaaaggtgatgactgcccttcatgacagtcctataggaggtcattctgggttcccggtaacctatcatcgcatcaagaagctgttttactgggctggcatgaaaggacagatcaaggagttcgtgcagtcttgtgagatttgcacaaaggccaaggccgacagaaatagataccccggtctgctattgccattacccataccggatcaggcttggcaagttattagcttggattttatttctggattacctacatcccgacgcttcaactgcatattggtggtagtagataaattttcaaaatatgctcacttcctagccatgtcccatccttttactgctctatctgtggccaagctgttcctatcacaggtctacaaactccatggcctaccattgtctatcatctctgacagggatccaatattcaccagtaacttgtggcaggaattgtttaagttggtgggcacaaaattatgcctcagtagcgcatatcacccccaatccgatggccaaactgaatgggtcaaccaatgtgtggaagcttatcttcgatgctttgtccatggctgccctaaacagtggtccaattggctatctcttgcagagttttggtataatacttgttttcacactgcactgggtcagtccccgtttgaggttttgtatggccacactccatcccagttaggactgtcaactattgaacaatgtcaaagtgctgatctgcaaacatatctggcaacaagacaacttatgctccaacgggccaagttacatcttcaaagggctcaagatcggatgaaaaaacaagctgacaaaggaagatctgaaagggtgtttcaagtgggacaacgtgtatttttgaaactgcagccaatttgtcagagttcgatggggagcagattgaacactaaattgtcatttcgctattttggatcgtttctgatcacaaaacaggtgaatcccgtggcttataaactggcattaccagaaggaagtgcgattcatccggtctttcatgtgtcccaacttaaatcagccgaagaaactcgtatcacaaccgatgcaaccatgccagacctgctgcaggagctgaaaatacccacagaggtgctggagtctaggctgcttcgcaaaggtaacaaggtaatacctcaactcctaatccgatggtctaactggccggcttcattgtctacctgggaagatgaacacgccatcaagcagcagttcccacgggctccagcttggggacaagctgtctgtcaaggggaaggggatgttagcagcacagggcacctgaacaccgggaaggatgctgcgatggaagaggcggacgctgaggttcaggaagcaaagaggagcactcgggctaaaaggccgaatccaaagtatatagaaaatgtgtggatgaattag

SEQ ID NO: 925 - DNA, 1396 bp, Zea mays
  unsure (1)..(1396): unsure at all n locations
  Clone ID: TF_ZmC1646_4
gcgaccaagtggaactgatggacaaaccaatacaggttcgggctcgggttgatgatggaggtatcatgtggagtgagaatatagttccaaactgtaactgggagtctggagaaaccatgttttattctgaattcaaggtgctgctacttaagggaattacttctgacattgagtgggctggtgacgaccacctcatttacattacaacggagagtatacttcggccaggccttcaagcttccgaaagcaagagatatttatttgttaaatctggaagcaaaaatacaaggtttatattctacctggacatattaaaacaaaacaaggaacttgctgttttgacaccttgtgtgtatggcgttgatacaacacctagtcattgtggaaatcatgtctttatgaagagacggagtgatgaattgtataattctgaattggttgcttgtccactggataatgttgctgagatcacttctcctgaccactgctctagccctgagttgcaggacctgttgcatacccgacaacagatgttacaacaggtacagatgcatttgcagagagctcaagttcggatgaaacgccaggctggcaaaggaaggatggaacggtccttcagtgtgggtgatcgagtgtatgtgaagctccagccatactgccagtcatcagcagccgagagagtgaaccacaaactggcgtttaaattctttggccccttaagcatggtcaggaaggttaacccggtagcgtatgaagtcgctttacctgaaggaagcaatgtgcaccctgtctttcacgtatctcaattgaagtcatttgttcctgcaaatgttatttccagctcggttttaccagctctgactccagactaccagatccctgaagaggttatggactcacgactgcaacgaagggcaggcaaggaggtacctcaactgctggtacgttggactagttggccgccatctctggccatctgggaagatgagcactggatcaaggagcaatttccaagggcgccagcttggggacaagctgtctctgaaggaggaggagatgtgaacgacgctggtattcaggatggcatgggtaaagctactcaagggggcgcgggagaatcaccagcaggaggcgagggcgacgctgttccagcagctcaggcgcggcctgcggaccacaaggcccaacaagaggaggtgcacaggccttgagtgggtgaattagacctatgactatgtatcgtggctccactatatatgggttgttcgtagacagggagagggtgtttttttggctgtaagaactcaggcggcggcggcgatccgaggtgatcgtcttccgaatcggaccgtactttccacaccaccataatcaagcgtgtgctccgtcttaanna

SEQ ID NO: 926 - DNA, 482 bp, Zea mays
  Clone ID: TF_uC-zmromo17027b12a1
ggattacaagcattttataagccacaaaatttgttacaaggcggttatgccaactataaacaggtgtcaaccccaatccaattggttacaagggtgttaagccagttatcaccagttgggtcacatgcaccaaatgctaatgctattaaggaaatctttactgacttactaatctccttcagctgggacatttgcccctcctggaatacttgcttgtccccaaggaagtgcatttggaaacctagcccgaatcacattatagtcctcccaggtagttgctgttactggcaaacctgaccatttaatcaacacttgggtaagggccgcccctccctttttgacgagacgtttgtccagaatatccattggttgaacaatttcatgtcccaaatccagcacctttggtaattttgagaagactggcccataattgggagtaaatggtttgagttgggaaacatggaaaaaaggggggttttggg

SEQ ID NO: 927 - DNA, 938 bp, Zea mays
  Clone ID: TF_ZmC925537_1
cttcttttttttttttagcgaggaaggagccagttcattgtattccttgatagtccatacctccagtcattacactccttataacccacaccagacagggctcagtcgaccccacacacatggtgccattacagaacccagttcccattgtggaaacgagagttcgaaatctttgtgcgcatgctccgtctggtcgtaacattccccccttattgcgccgaagcttgaccccaagccggcgccgaaggaaactggcgacgaaggaggtcttcatcttcccatgtagccagagattcaggccactgcgaccacttcaccaatacctgatggtgggggcgaagtccgtgagacaagagccgtcgacgaagaaaagactctggaacccgcaaatgagtgatgtcagatggaacagctgcaatgacctaaacatccctgggcgccgacttcttgagctgtgagacatgaaaaactgggtggaggaagaagacgctggcaagtcgaacttgtaggccacagaaccgattcgagcaatgactttgtagggaccaaagaacctgtgagcaagtttctggttggcccttggcgctagtgaagactgaatatacggctgcaatttgacccaaaccatatcaccctcctggaacctgcgttctgaatgatgcttatcagcttgacgtcgcatacgtgcacgagaacgagctaaatgttgtttgatcagtgctgtcatagcttcgcgatcgcgtagctaggtgtccagatccgaagacgccacaacagtgtctggctggataccgaaatgtcggggctcatagccatagagggcgacaaacgaagaccgtccaatagcagagtgaggcgaagaattataccagaactctgcgagatgtagccaagaaacccacttcgatggacaggcattcacgaagcagcgaagaaag

SEQ ID NO: 928 - DNA, 4881 bp, Zea mays
  Clone ID: TF_ZM4576.C1.o6.fg
atggcggctgccgatgtcgccgtgtcgcttccagctctggcaggctccctcgttgtcatgacccaggagatcgccagagccttctcgccacggacatcacaattggtatcagaggctcgtcgccatccttctcgttctcggatccaggcgggtggctcggttgctgtcaagcgttggagagaagttgcagacacggctcctaacaagccatccgcgcaggcgcgacatctggttgccgcgatggaagatgtagagaaacgcctggccgagaagttccagcaagcactggattcctcagcgacaactttgatggaactatctaagaagatggacggcattggagtgctggcaagcaagttgggagaaatcgagagtcgacaaatggagagcgacaagatggtgcagtatctacaggcaaagatggacctctctatgaagtccttggctcaggtgtcgcaggagcagaccaagttggcgaatatggtgactaatgctgcaagaggaatggcgtcgacctcaaaatcccccgctggagacggattgatgggagctcatcccataggccctcaggtatggcagaatgttccacccaagcagacactcaatgtggaaggaggatttaaaagggtggaagatcttgggaatattggggaagtggattctgcaaacaagagggtgtggctacctaaaatggattttcccatatttgaaggagaggatgctagagtatggattgatcattgcgaggcttattttgcattatattcgattcctgaggagtttaaagtcagtgctgcttatttgcacttgaaagggagagcagcacattggttccagtcttgtagagagagtgtagagttgtttgaatggttccagtttaggctggctgttcttaatgagtttgaagtatctacacatgcagataagatgttggagttactcactctgaaacagactggaactgcattggaatataagattcaattcgaaaagttggtgtatcacatcaggctgtttgacaaatccattagcgagacattcttggtcacacagttcgtgttgggtctcaaaatggaattaagggcttgtgttgaagtacaatttcccaagtcggtctctatggcagcacaacttgcactgaaacatgaggcatttcagtctagacagggaacagggaacaagaggtttggcctggtgaaacctgcatttgtttctcatgtgaacaacagggaatcatctgatttgcatggagaggtttggaaggccaaacagttgaaggagtataggagagttaatggactatgttacaagtgtggtgaaaagtttgtgccaggccacaagtgtaaaactgcagtccaaccacagctgaatgttattgccatagaggaagggggtgatgggggtccaattctggatgatgaagtgttggactatttggaaactggtattcaccaagatggggatgaggtgactctatctctcaatgctatgagaggaacagataattctaagtgcattaagctcagagcactaatcaacaaccaagtgatactgcagttgctggattcggggagttccaatacatttgtcagtaatatgactttagccagactacattgtgagctacaacaaattgaaccagtggatgttaaggtggctaatggacaagttttgcgttgcacccagaaggcaatacaacttgagtggtggagttgtggcagaactttccatgctgatgcttttgttattccagtagctgcttatgatatggtgttgggaatggactggctagagcagtacagccctatgttgtgtgcatgggaccagaagtgggtggaattctattatgaaggaagtataattaggttgcaaggagagaaagacaaaagaaacaaggagatattggaagtttctggagaccagattcaaggttggactaaaagaaatgatatatgggccatggccttattacaaaaggtggaggtggaagagaaaaaaaatgctgagacagttcctcctgtggttgaagatctattggaacaattctcaggggtgtttaaagtaccaaactctcttccaccctacagagattatgatcatgctatttctctacttccagggtcagctccagtgaattgcagaccttatagatattctccattgcaaaaggatgagatcgaaaggcaagttaaagagatgttgcaaactggcctgattactagaagtgtgagtccgtttgcttcccctgtacttctggtaaagaaaaaggatggtagctggagattttgtgtggactataggaaactgaatgacattacagttaaaaacaaatttccaatgccaattattgatgagtttcttgatgagttggttggagctacctgtttttctaaactagacatggcctctggatttcatcagattagaatggctgcaggtgatgaggagaagacagcattcaaaactcatcatgggcattttcaatttcgagtcatgccttttgggctcactaatgctccagctacgttccaatgtttgatgaatgccatttttcagcattgcatgagaaagtttgtcctcattttcatggatgatattttggtgtatagttctagcttggagcaacatgttaatcatttacaggaagtttttagtgtgttgcagaagcatcagttgtatgccaagaggagtaaatgctcttttgcagtgaagcacattgaatacctggggcatgtaatttctgagaatggtgtttccactgatccctccaaaacagcagtgatgcagaaatggccaatccctacatctcacacagatcttaggggttttttgggactcacaggctattacaggaaatttgtgcaacattatgggatattggcaaaaccacttacaatggttctgcagcaaaaacagtttgtttggccacctgctgctcaagaggcttttgaggcattgaaggctgctatggctactacaccggtattagctcttcccaattttgcagaaacatttgtggtggaaactgatgcctgtgataagggagttggagctgtgctgtctcagaaaggacaccctatagcttattacagcaaggcattgggagtccagaatagtaaactttctatatatgagaaggagtttttagctatattgatggcagtggacaagtggaggtgctacttacaaagggggctcttcattattaagactgaccacaagagcttaactcatttgcaagatcaaactctagcaactgagctgcaaaagaaggcaatggctaagctagctggactgcaattcaagattcaatacaaaaagggagctgaaaataaggttgctgatgctttatccagggtggctccaaacatggaattaactgccatatctgtaggcactccagtctggattcaagagatagtgaagtcctatgagttggatgttcagtctcagaatctgttgagagagctggcagtgcaaagtccaaattctcagggtttcagacttaaggatgggctaatctataagaatcatcaattgatggtgggacagaatgtgggcttacagactaagttgattgctgctttccactcatcagctgtgggaggtcattctgggatacaagcaacttatcagagaattaagaggttgttttactggcaaggcataaaaaacgacgtggaaacatttgtcaaacaatgccaagtctgccaaagagctaaacatgagcactgtaagtacccaggattattacagcctcttcctattcctcaaaactgctggcaggacatttctatggatttcatagaggggttgcccaaatctagtggttattctgtcattatggtggtggtggacagacttaccaagtatgctcatttcatccctatcaagcatccctacacagcccacagcatagctcacacattcttttcaaatgtggtcaagttacatgggttgccaaagtccatagtttccgatcgagacaaaatttttacaagtttgttttggcaagaattgttcaagttgactggcacccaacttcatctaagctctgcctaccacccccaaactgatggacaaacggaacgcgttaatcagtgtttggaaatgtttctccgctgtgcagttcatgacaccccttctcagtgggcaaagtggttggattcagctgaattgtggtataacagtagttaccacacttctctgaaatgctccccatttaaagcattatacggtgttgatcctaatgtgggcatgatgccattcgagatgggggaaagggagaatgatgcttctattacttttcagaatagacatcattacttggagatgatcaaggcacatttggcggcagcacaaaataagatgaaatattatgctgaccagaacagatcattccggcagtaccaagaaggagacatggtctatgtcaagctgcaaccatttgctcagtcctctgttgctcatagaccttgtgccaagctgtcctttaaatactttggaccatttcagattttatctcgcattggttccgctgcttacaaactcaatatgcctgaatcagcagctgttcatcctgttttccatgtatcacagctgaagactcatgttcccaacaataccccagtgtactcccaattgccatctgctgcttttgctgaaggagtgtcacctgaacctgaagtcattctggatcgtcggttggtgcaaaagggcgcagccgctgtggttcaagtacttatcaaatgggtcggtcttccagcagagatgtcatcttgggaagactatacagtgctgaaagatcgatttcctgatgccatcatctggagtccagatgctgctcgagggggggaaaatgtcatgacccagggtgcgtga

SEQ ID NO: 929 - DNA, 639 bp, Zea mays
  Clone ID: TF_LIB5075-002-R1-XP1-E11
gccggccgggccgggatttcaattccagcttcttcctcgcggcgtactgcttgttcggtttgttcgaggccacaaatggtcatcgtgagtggcagcaacttccaaacggattcgtgatccttccgctatggatcccgtctccaaaggtgcgtggcagaagcgattcttcagcgtcgcgccgccggcggcgctggtcttcttcttcgtgctgatattcgtcgccggtgcagccgtcacgctagatcataaggagcctcaatgcattctccaacgccgactggtcaagaaaggtggcgcggctattgtacaagtgctggtgcgatggcaaggacttccagctgattcggctacatgggaagactggacggtgatgcaagctcgtttccctgattcaagcgcttggggccaagcttccattccaggagggggtgatgtaacaccggcgccaaccatcaccggagttacggcataagtgtaatacgtgtttcattgtcgtttacgtatttgtaataatgttggtccactgtcaggccgtagggctttctgttaagacttgtataaggtgaacctcgtggagagggacgaacagaaaagaaaaatagaaatacctgctccaaaaaaaaaaaaaaaaaggcccta

SEQ ID NO: 930 - DNA, 688 bp, Zea mays
  unsure (1)..(688): unsure at all n locations
  Clone ID: TF_LIB4172-012-Q1-L1-E4
tggacgcctgcaggttccggtccggaattcccgggtcgacccacgcgtccggtttgcggtggagagcatccggaagaagcgcgtgcggaagggcaaagttgaatatctggtgaagtggaaaggatggccccccaagtatagcacctgggagccagaggagcacatcttggaccctcgccttgtcatggcctacgaggagaaggaggagagagaccgagcctcagggtataggaagagaggtccgaaacccaggcggcttctgctgcaggagtcagcagccccagacgttgtgcagacccccggagactgggagcctatggagcaggcccctgaagaggaggcagaagcagacctgaccaatgggccgcctccctggacacccacgctcccctcaagtgaagttaccgtgactgacatcaccgccaactccgtcaccgtcaccttccgcgaggctcaagccgccgagggcttcttccgagaccgcaacgagaagctgtgaatagcggcttcccctcttaaaactgtgcttcttggggcttgggtgaggatttccagagacaggaagggctgggagcagggtaaatatttttattttttaaaaaaagcagaatcacggngaagaccccagcacccgcccttgctccccgatggttgtttacaaagaggcctcanaacngggtgtgggggg

SEQ ID NO: 931 - DNA, 1239 bp, Zea mays
  Clone ID: TF_UC-ZMROTEOSINTE048H12_FLI
gaaggtcttcctcgctctgatggcttcaattgcattttggtggtggtggatcgtctcactaagtacgcccattttattcctctacgtcaccctttcactgccaatcaagttgcttcagccgtgctcactcatgtggttaaactccatggtgtgcctgcttctattgtctcggatcgtgaccggattttcactagtgccttttggaaagggctgttcaaactgttggacacaaagctgttagtcagtacagcatatcacccacagacggatggccaaaccgaacgcgttaatcaatgtctggagatgtatttgcgttgcactatctacaactctccagccaagtggaaggcatggctgcctctggccgagctgtggtacaactcttcgtatcactcatccttgcaatgctccccattcaaggcattgtatggatatgaaccaaaattaccttcttttcctgtgctggctgatgtttccactactgatctttcctcactgatcaaggaaagggatcttcatctggaattattgaaacacaatttgctggctgcacaaactcgtatcaaacttcaagctgataagaagcgtattgatcggcagtttgcagaaggggagatggtacttctgaaactgcaaccttacacccaatcctctgtggccagtcgaccctttcctaaattggccttcaaatactttggtccttataaaatacttcagaagattggcgtggcagcttataaactggagttaccggctgggagtttggtgcaccctgtttttcatgtttcccaattgaagccctatactgctgactactctccagtatatgctgaccttcccaagatacctgatcttactcaaagggacctgcagcctcaatgcattctccaacgccgactggtcaagaaaggtggcgcggctattgtacaagtgctggtgcaatggcaaggacttccagctgattcggctacatgggaagactggacggtgatgcaagctcgtttccctgattcaagcgcttggggccaagcttccattccaggagggggtgatgtaacaccggcgccaaccatcaccggagttacggcataagtgtaatacgtgtttcattgtcgtttacgtattttgtaataaggttggtccactgtcaggccgtagggctttctgttaagacttgtataaggtgaacctcgtggagggagacacacagaaaaagaaaaatagaaatacctgctccac

SEQ ID NO: 932 - DNA, 1759 bp, Zea mays
  Clone ID: TF_ZmC38719_1
tttttttttttttttttttttttttaacttagcatataatacacgcaataatgttttgaagtcgtacaacttgctagtcattctagctaaccgatttgtacgattaatcatgattaatcaccattagtcggatgactttgacgattaatcatgattggtccaaatcgacttgaacgattaatcatgattatcacgattaataagacaatttgaaaacagtgacaatatcgagcagttagtttgacaaaccatgctatcatgtttcacttgcactcagcattggctacttactaattatctacttactcaaataatactacaaatgcatctagcacaaaaaatgctacatttaaatacatttccatttgttccaaacataggtgcagcacatgcaactgaaacccagcagcgtcaatgcatccttatcacgaggtggggttatagcgaaggtgttgctcatagtaatcaataagcaccaggggctccttagctttcaactgcttatcgtccacgaataccatttccccgtcagacctgagagccttgaatgttattgcaacttgctgcacaccatccataactgtggcaaaatagcgcactggcttaatgatcttaatgatcttaggcatatgaatttggttaccagagtcctcccctttgttcttatcaccaggatctccttctgtggaatcaacagtctcgttgcctggcttgtcacttgttcgatcacggatatctccttgctcctgtgttacttcatcctgcttgaaccttcttacacatccagacttgcgcttcttagcacctgtcacctgtccaccctgaggtgtgattgctcgtatttcattgtccatcttcaatgaaccattagcagggtgctgcacatcttgttgatcagtcaagctaacagataagggagcctcttgagatggaaacccagctgagaccacaccagaactaccctcctgtactattctttgcccaagcaagttcactgctgcgccaaggcccccaggtgaggtcttgttactattattatttgctctcctactacttgtcctgcagggcagtttcttcacttctgaggcatgtatgctatgcatgctccgggcctccgaccgaggtggtcgaccacgtttgccacgagaagcgttaggatcggatgttggagttgttggagtcttgcgctttcgctttccacaggatctgggcgaccttgaccgcttattgaaagcatcaacaatgtcagaacaggccttcaggttttcaaggggttcccatgtgttagcactctctggccacccacgccacttgacgaggtactggagctgacccttgcggaggcggcggcggcggatggcctcgatctcgaagtagccctcagccagcttcggcggctccacagcttcctgcgccggtgtctccgcttcaacttcgtcctcctcaccacatccctcctccgtctgttcctcctcttcctcgtcgccctcctcagtcagttcctccgcctcatcctcctcccctagagccgccgtcggatagccggaatccttcctgttccgccgcatggcgaatcttgtttcactcgacggcccaccacacgttagctcgtgttatccaaatcaagggcggatcttgtacagattttgctgatgagatctggtttttggagccgccttttctcggagggattcggaaggaacaaggctcgttcaccccaggggcgccccaggctagcagcaccgaattccgagttatt

SEQ ID NO: 933 - DNA, 664 bp, Zea mays
  Clone ID: TF_ZmC290186_1
cagaggtacaagagggcactatcacgtgaagaggttgaggtacatgacgtgggcaaggagatggagctggatcttattaaacaatatagtcaggttgaacggatatttgctgatagggtcagcaaagctgatggagatgatctggttcccgaatatttagtaaaatggcaaggacttccttatgcagaatctacctgaaatttaagagacagatattgattttgctcaagatgcgattgatgaatataaggctcgtgaagctgcctcagatatacttgggaaaacagtagatttccaacgaaagaaaagcaaagctagtttgaggaggcttgatggtcagccagaatggctaaaagctggcaagcttcgtgattatcagctggaaggactaaactttctcgtcaatgggtggagaaacgatactaatgttatacttgctgatgaaatgggtctgggaaaaactatccaatctgtatccatgcttggcttccttcataatgctcaagaaatcaatggcccatttcttgtagtcgtgccactgtcaacattgtcgaactgggcaaaggaatttcggaagtggctgcccaacatgaatgttgttgtttatgttggcaaccgtgccagcagaaagatgtgccagcagcatgaatttttttcagacaaa

SEQ ID NO: 934 - DNA, 4155 bp, Zea mays
  Clone ID: TF_ZM3648.C14.o2.fg
atggggcgcctcctccttcctcagaggaggcggcgagggtgggaggtgggggacgaatggggctccacctggtccaccggcctcaccaaggaccactttgacggatcctctgtcagcaaaccagtatcagcagagcgacgtcaaggagtgatggatcctaatacgaagatgatccttgatgaaatggagaagaagttttcggctatggatctcaagtgggagaaacgtttctcggcgttcgctgatgccaaggaagaacgcctcagtgctgtggaggtggccgctgaggatttggcggtgtggcgtgtcaagatggacaccaccatggaggacgtcaagttggatttgaggaagctcaacaagcactgggatcgggcatccctcgaggccgcgacagaaccaggattgttgcagaagcctgttgcagctatcggtcgagcactcggtggtcctgagggagaaggttttggaggcatccgtgaggaacccatcctgccggagcagggttttggctccgtcacgacctacgttccaaccagcaacaagggtatgcatcacttcgtacctcctcctgtccagtccagtgcctgttgtcctggtcttgcgtttgatgtcggtggatctcgtcacaggaattttgagtctggttttcattcgttgggtaaattaccacaactaccatttccaacgtttgagggtgataatccccgtctctggatttcacggtgtgaaaattattttgatatgtactttgttgatcctgattcctggattcggtcactgcttgatcgctatggcaagaaccagcatcaggcgttgctacgccaactgttcaggattcgacaaacgaattctgtgtccgactatattgctcgattctccactctcatggatcaattgtctgcctatggtgctgtgtctgatccgttatattttactacccgattcttggatggtttacgggacgaggtccgtgctgttgtgattatgcagcgaccgggagatttggacgcagcatgctctttggctctgttacaggaagaggttgcggactcggggcgacgtcgtgcgttccctcggtttgaatcgggttcgtggtcgaaatcagagggcaaggggccttttcccttaccttctcctccttctggggatcggaatgtgtcatccaactctgataaacgtccagtgtcaccgtctaagtcagtggatgagcgactgggtgcactgcgggctttccgtagggccaaaggcttgcgtgacagatgtgcagaaaagtggcataagggccatacttgtgcagcaacggtgcagcttcaggccatgcaggagggttacatttttcaccaggatttgaaggtccttcccctgcagcattatgacatgattttgggaatggattggttggaggttcacagacctatgcatgtgcattggcgtcacaaatggctttctattacatatcatggatcttttgttacattgtatggctcagactatggggctagtgagagcttgctaattcagatatcatcagtgtatgtacccgagcctgcaagtgagagctccaagttttaccctgagattgagtccttactgtcccagttttcttctgtgacttcagctccaacttcgttgcctccagtaagaagttgtgatcatgctataccattattggtgggagccaaaccagtaaacatccgcccttacaggtacccacctgcacttaaggatgaaatcgaagcacaagtcactgttatgttacaacaaggccttattaggcccagttcctctcccttcagctcccctgttttattggtcaggaagaaagatggctcttatcgtttttgtgtggattatcgatatttgaatgcactaactgtgaagggcaaatttcctatacctgtttttgatcaattgatggatgagctagcagggtctagttggttttccaccttggatttggtctcgggatatcatcaggttcgtctaaagtcaggtgaagaatttaagactgcttttcagactcatggtggacattatgaatttgtggtcatgccatttgagctggctggcgctccagggacgttccaaggagctatgaacaccacactggctacattattgaggaaatatgtgttggtattttttgatgacatattggtttacagtagaacatttgaggagcatcttaatcatttgagagatgtgttgttgctattgcagcaggatcattggcacattaaattatctaaatgccagtttgcccaacgaactatctcatatttggggcatatcattagtgagcaaggtgttgcaactgattcagccaaagtggctgctgttcgggattggccatctcctctcaatgtgaaagagttaaggagctttttggggcttgcagggtattataggaagttcattcgtcactttgctatcttgaccaagcctttaaccgagttacttcgcaagggtgtcttgtatgtttggacttctgatcatgaaatttccttcactgctgtcaaacaggccctatgtactgcacctgtgttggcccttccggatttcaacaaaaccttctgtattgaaactgatgcttgcaagtctggtgtgggagcagttttattacaagaggggcatcctttgacatttattagcaaggcactcggaattaaaactcaagggctttcaacttatgaaaaagaatatttggctattttaatagttgtggagcagtggcgaccttacttgcttcacgcagagtttattatctttactgatcaaaatagtttggtccatcttaatgatcagagattacatacaccctggcaacaacgagtttttactaaactactaggcttacagtacaaagtagtttacaaacaaggcatccagaatagagtgactgatgctctttctcggaggacacatgaagagaagagtatccaggagtttgtggcctcatgtgatatctgccagcaagctaaaccggatagaagcaagtatccggggtcacttcaaccattggctgttccagctggtgcctggcagacaatcactcttgattttgtggaaggtcttcctctatctcgtggtaaaaactgtgttttggtggtggtggacaagttctccaagtacggacacttcatacctttgaagcatccttttactgctgcttcggtggctcatgtgttcatgcaacaagtataccgtttgcatggcttaccatttgctattgtgtcggatcgagaccgaatttttacaagtcaattgtggaagagtttgttctccttggcaggcgttgcattgaatatgagcagtgcttatcacccacaatcggatggacaaacggagcgggtcaatcaatgtctggaaacgtttctgcgctgttttgtgaatgcctgtcctcataaatgggtgcagtggatttatttggccgagttctggtacaatgctgcttgtccagctcctcagttagctgattggctccaggagaaatctgtcatgtccgcattggtacatcagcacttggcgcgggctcaacagcgcatgaaaattcaagctgacaagcaccgatcagagcgacattttgcagtgggtgacagcgtctacctcaagttacaaccttatgtgcagtcctcgttggcacctcgctccaatcagaaacttgctttccgtttctttggacctttttcggtcatcgccaaagttgggtcagtggcctacaaattgacgttgccagcttcatcacatattcatccagtttttcttgtgtcgcagttaaagaaagcagttccttcttctgtgaccgtggatcagctgccggtgtcgttggcaggtttccagatccctgaactggtgttgcaaaggcgtcttgattccaaaggcaatactcaggctttgatcaagtggtcgggcttaccgccttcgttggcaacttgggagaacttggaggttgtgcagcaggcttttcctctgtcccctgcttggggtcaagcaggacttcgtcgaccggggaatgtcagcaaaccagtatcagcagaggtaactgaagtgttgggccaggaagataagactgaaagtgtccataggctgaaaaggagcgacagaattaggaggaagaacgtgcggctgtctgggccagagtggatggcgtga

SEQ ID NO: 935 - DNA, 2086 bp, Zea mays
  unsure (1)..(2086): unsure at all n locations
  Clone ID: TF_ZmC5789_3
cccagatcatgcctggcaagtcgtgacgatggactttatttctgggctgcctgtgtcccacaagtacaattcggacgcgtgggcggacgcgtggttggacgcgtgggcacatttcctagcactagctcatccgttcacagctttaaccgtagctaagctttatctgtcagacatatataagttgcatggactgccatcgtcgattgtgtctgatcgggatcccatattcactagcaagttatggcaagaactgttcagattggctgggacaaagctgtgcatgagtagtgcctatcatccacagtctgatggtcagacagaaagggttaatcagtgtttggaagcttatctgagatgcttcgttcattcttgccccaaacagtggtattcttggctctcgctggctgaattttggtataacacttgctatcataccgctctgggtaaatctcctttcgaagtgttatacggtcatgctccttctcagcttggattagacaccgttgatcagtgttcggttcctgatttacaaacttggttgcttggtcaccaacagatgctacagcaagtaaagttccatcttcagcgtgctcaggacagaatgaagaaacaggctgataagggtcgagtggaacgtacttatactgtgggcgatcaagtttttctgaaacttcagcccttctgtcaacgatcagtggctgacagaccagtttctaaactggcatttcggttttttggtccctttgaggtgattgagcagatcaatcctgtggcctatgaactagcgttaccatctgggagtgctatccacccggtctttcatgtatcgcagttaaaatcggccaacggcgtgcgggttcctagcactgactctcttccagatatctttactgggttgcaggtgccggaggaagttctggagtccaggcttcttcgtaaagggggtaaggtgatttcgcagttgctcattaagtggtccaattggccggtgtcactgtcaacctgggaggatgaagaggccattaagcagaaatttccacaagcaccagcttggggtcaagctgtcgttaaagaagggggaaatgtcagcagagcagatcacatggaccatgcagaggagcggactcaagcagtgcaacagaaggcacagacagagggagtcaaggaagacaatcagagcccgcgcagccgtcgtgtaccaaagccaaataccaagtacatcggtgcagagtggcgcgtataggtatacggagttatacgtattgatgagggcaggtgtgccggtataaataatattgtaatcgtttctaaactcagtctggaacatgttattgccgagtcggcaagaaaggaatagataccagagaaattcctggcgtgaaccacgggtgttgttcacactcgctgtccctgcctgactcttaaaaagggcggcgtgtcaccgcctggttactcacagtcatagattcacgccgcggaacgcggattccaagaacccaagtgaatcgcggctcctcgagtccggcggtgccgtccggagaggtagagctagactgctagagcacagccccgccatggtcgcaacatttttagagcacagccccgccatggcggccgcggcgcgcgcgatcatctgcgagctggcgccgcagaagctgtcgtcgacggcgtcggggcccgcggcgccgaagaagcgtgacgccgggacgaaggtggtgctgcagccccgcctctgcacgctccggtcgtacggcgccggcagcggcgtggtgacgcggaggattctggccggggaggaggacggcagcggggccgccgactcgggcggctccgcggcgttgccgttcttcgcctcgctcgctgactacatcgagagctcccgcaagagccaggacttcgagaccatctccggccgcctcgccatggtggcgttcgcggcggcgatgaccgtgcagacgacgacgggcagctccctgctcaagaagctggacaccatgaagatcgaggacgcggcggntatgtgcgtggcggtggtcgacagcgccgcggcgttcgcatgggcctccagcgcgcgcaataggatcgg

SEQ ID NO: 936 - DNA, 217 bp, Zea mays
  Clone ID: TF_LIB3245-566-P1-K1-F10
accgggcatgcggtgagagactggctggggagaggaaaaaaaaatctaaccgtagcatacgcagcgctagggtttggaggttgcgatggcggctgcggcgagacacctacggacggtgaagtggttcaacgacaccaagggcttcaggttcatctaccccgaggacggaagcgaagatctcttcctgcaccagtcctggatcaagtaggagggcttc

SEQ ID NO: 937 - DNA, 271 bp, Zea mays
  Clone ID: TF_LIB3070-015-Q1-N1-A3
cactatagaagagctatgatgcacgctgaccttagacgtgaactcggaatgaggctcgtgactgtgaatcggttcaacggaaccaaaggctgtcatattcatcactcgcgacaacgggagcgatgacctattcatccatgaagcctacatcaaggacgacggcttccgtagtcttaacgacggtgatgacgttgaatacaccgtcaggagcggctgctactgtctgagctcgggctcctcgatgtcacttgttcccggctagtggtgaagc

SEQ ID NO: 938 - DNA, 318 bp, Zea mays
  Clone ID: TF_LIB3354-053-P1-K1-D1
ctgagagccggtcaggggaggaaaaaaaattctaaccttagcatccgcagggctagggttagggggttgcgaagtcgggggtggggatgcaccgcgaggcggtgaagaggttcaacgacaccaagggcttagggttcatctaccccgaggacggcagcgaggatgtcttggtgcaccaggcgttgatcaagtcggagggcttccgctcgctcgctgagggcgaggaggtggagcttctcctattgaacggcgaccccggtcttattcaggccgttgacttcaccacaccccactagacatacggggggggccatatga

SEQ ID NO: 939 - DNA, 262 bp, Zea mays
  Clone ID: TF_LIB3332-019-P1-K1-B4
gaacggtcagggatatgtataaatttctctaactttagcatccgcagtgctagggttcgtgtgtggggaatgcgtttgcggcgagacatctatgtactgttaagtgttttaacgacaccaagggctttggtgttatctcctccgaggacggaagcgaagatctctttgtgcaccactcgtgtatcaagtcggagggctttcgttcattcgcggagggctaagacgtgtagttccttgtttcagagggtgacgactgttgcac

SEQ ID NO: 940 - DNA, 343 bp, Zea mays
  Clone ID: TF_LIB3180-013-P2-M1-D2
gaaaaaaaaatctaaccctagcatccgcagcgctagggttcgggggttgcgatggcggcggctgcgagacatcgggggacggtgaagtggctcaacgacaccaagggctttgggttcatatacccctaggacggcagcgaagatctatttgtgcaccagtcgttgatcaagtcggagggcttacgctcgctcgcggagggcgaggaggtgcagttttccaactttgatggagactacggcccgtctaaaggcggtcctaccaatcaccgctctggctgcattcaataaggtcggcgcttagcttatatttggcgctgacagccctgctattcaggagaatagg

SEQ ID NO: 941 - DNA, 344 bp, Zea mays
  Clone ID: TF_LIB3137-035-Q1-K1-C7
ggaaaaccgcggccgacgcacgcgtccggcgagagactggcagggtagtttaaaagtttatctaaccctagcatccgcggcgctaggggtcgggggttgcgagggccgcggctgttacacaacggaggacggtgaagtggttcaacgacaccaaggtcttcggcttcatctgccccgaggacggcagcaaacatctcttcgtgcaccagtcgtacatcaagtcggacggcttccactcgctcgcggacggcgatgatgtcgagttttccatctaccacggtgactacggccgcactaaggccgtcgacctgaccatccccgacggatcctttctcaggggctgc

SEQ ID NO: 942 - DNA, 566 bp, Zea mays
  Clone ID: TF_ZmC519941_1
cctaccgatctagggtttcctgctagggttttggtcctttgttttcggcggcgcaagatgggggagagggtcaagggaaccgtgaagtggttcaacgtcaccaaggggttcggcttcatctccccggacgacggcggcgaggaccttttcgtccaccagtcctccatcaagtccgacggctaccgcagcctcaacgagaacgacgccgttgagttcgagatcatcaccggcgacgacggacgcaccaaggccaacgacgtcaccgcaccgggaggaggggcgctctccggcggctcccgccctgtcgaaggcggtggtgaccgcgggggccgtggcggctacggaggcggcggcggtggctacggcggcggcggtggcggctacggaggcggtggtggcggctacggcggtggcggtggcggctacggtggcggtggctatggaggcggcggtggcggcggccgtgggtgctacaagtgtggcgaggagggccacatctccagggactgcccccagggcggcggtggcggctacggcggtggtgaatacggaggacgcgatcgtgc

SEQ ID NO: 943 - DNA, 306 bp, Zea mays
  unsure (1)..(306): unsure at all n locations
  Clone ID: TF_LIB3587-283-Q1-K6-B1
actcccccgggacggcagcgaggaggggttcgtgcaccagtcgtcgatcaagtcggagggcttccgctcgctcgcggagggcgaggaggtggagttttccgtctcggagggtgacgacggccgcactaaggccgtcgacgtgaccggccccgacggatccttcgtcaggggcggcggaggcggangaggccngcngcngcngctactgcggtggcggcggcggtggtggtggcggctgctacaactgcggccaggccggccacatggccagggactgcccaagccgtggcggccgtggcggaagga

SEQ ID NO: 944 - DNA, 306 bp, Zea mays
  unsure (1)..(306): unsure at all n locations
  Clone ID: TF_LIB3245-117-P1-K1-D5
acggcagcnagagactggcagtggattaaaaaaatctaaccctancatccgcggcgctggtggatctttaggggtgttggcgacnnncaacnaggcancnnnngacggtgaagtggttcaacgacaccaaaggcttcgggttcatctcccccgaggacttcagcgaggatctcttcatacaccagtcgtctatcaagtcggagggcttccgctcgctcgcggagggcgaggaggtggagttttccgtctcggatggtgacgacgtcctcactaaggcccactacatgaccagcccctacaaatcct

SEQ ID NO: 945 - DNA, 1409 bp, Zea mays
  Clone ID: TF_ZmC218_40
cgcagcgctagggttcgggggttgcgatggcggcggcggcgaggcagcgggggacggtgaagtggttcaacgacaccaagggcttcgggttcatctcccccgaggacggcagcgaggatctcttcgtgcaccagtcgtcgatcaagtcggagggcttccgctcgctcgcggagggcgaggaggtggagttttccgtctcggagggtgacgacggccgcactaaggccgtcgacgtgaccggccccgacggatccttcgtcaggggcggcggaggcggaggaggcggcggcggcggcggctacggctcccgcggcggtggcggatctggcggcggcggtcgcagctacggtggtagctggggcggcggccggagatccgcgcccgacgccgctttcggctccgtcctctccggcaccgccggcgacgccgcccccagcgaccagtggttcgtcgacgcgctcaacgcccccgcgccgcaccccatcgagcgcgtccgatccgagtcctcctcgatcgtctccgacgtccccgactacctcttcagcctcgacagcccgtccgacgaccccagccccggcccctcggcggctcgcgccaagtccgacgccacggagactccgcaccaccacggcgacgacgtgccgccttccgctcgacagataccgcacgtcgcaggaggagcgtcatcgtggcccgccccgccgccgccgtacatggcgcagcctatgtactacttccccgtgccgccaccggtccactatctcgaccagtctgcgcagagtggctacatgcctcgcccgatctaccacattgtcggtggcggaggaagcgaggcgcctggcggagatcttcacgcggccggcggagtctacggcgtctcgcaccacatgcaggggttcccgccgatgatgtacgcgccgccgcgcgcggtcatctacaactacaagtcggaggggatgccatcgctgcctccggaaggtggggcacactcttcctaggtgcatcggctacttcacatctctgaatcctgattattgttgcagatgcctaagctaaggagttttgcgtggtaatttttttatcgattcgtctagagtcttgttcgttgttttgtatagatggaggggttgatggtgatggatagatattaatgcagttttcgtctagtggaaatatattcgtgaaatgtatatcatactaaatagtatagtatttggtgtgattaattaatattctagttaatgtaatgtgggattcatataatctaggtggttctggtcttatagaaaccatttttgggcattttatatttacataaactggatgttgggtgaatgttctaagcagtatgtgctgtgttgaacctcaatcacttatgagtggttactaaatttgaatttgatgtcttc

SEQ ID NO: 946 - DNA, 1327 bp, Zea mays
  Clone ID: TF_ZmC218_88
cccacgcgtccgcccacgcgtccggcgagagacgggcaggggagagggaaaaaaaaatctaaccctagcatccgcagcgctagggttcgggggttgcgatggcggcggcggcgagacagcgggggacggtgaagtggttcaacgacaccaagggcttcgggttcatctcccccgaggacggcagcgaagatctcttcgtgcaccagtcgtcgatcaagtcggagggcttccgctcgctcgcggagggcgaggaggtggagttttccgtctcggagggtgacgacggccgcactaaggccgtcgacgtgaccggccccgacggatccttcgtcaggggcggcggaggcggaggaggaggcggcggcggctacggctcccgcggcggtggcggatctggcggcggcggtcgcagctacggtggtagctggggcggcggccggagatccggcggcgggggcggtcccggcgcgtgctacaagtgcggcgagcccggccacatggcaagggactgccctagcgccgacggcggaggcggctacggcggaggcggctacggcggcggcggctacggaggaggaggcggcggcggcggtggctgcttcaagtgtggcgagcctggccacatggccagggactgctccagcggcggcggcggctacggcggtgggcggcggcggcggtggaggcggctgctacaactgcggccaggccggccacatggccagggactgccccagcggtggcggcggtggcggagggaggttcggcggcggcggcgggggtggcggcgaccgctcctgctacaactgcggcgaggccggccacatcgcccgcgactgccccacgtgaggtgtgtccgcgtccgtccgtccagccagatcagatcggatcgctccaccacctgctggtctgatggcgccgcccccttctagatctcgcttaaaaaacacccccctctcgctgtgtgtcggagtaccgctttagttttgccgatccgggcacgagtgcccgctgcctctttcctctcatgcgtaagaggatcccgtccgccgttttcagatttcgttcggttcgtagaagaactctcaagttaagttaagttatcatggtgtgtgcttggtcgttgttcgtcgtcgtcgttaaggttttaagagatgatttggtcctgtgttgccgaggggaagtcgaatctgcttttttctttttttgtggtttgttccaccagactgaggaaggagatgagatgattattctcccagattataatcctgcctgcttgtgcttgatttggttaaaaaaaaaaaaaaaaaaactcgagacctcgtgc

SEQ ID NO: 947 - DNA, 1274 bp, Zea mays
  Clone ID: TF_ZmC218_73
aattcggcacgagggagacgggcaggggaggaaaaaaatctaaccctagcatccgcagcgctagggttcgggggttgcgatggcggcggcggcgaggcagcgggggacggtgaagtggttcaacgacaccaagggcttcgggttcatctcccccgaggacggcagcgaggatctcttcgtgcaccagtcgtcgatcaagtcggagggcttccgctcgctcgcggagggcgaggaggtggagttttccgtctcggagggtgacgacggccgcactaaggccgtcgacgtgaccggccccgacggatccttcgtcaggggcggcggaggcggaggaggcggcggcggcggcggctacggctcccgcggcggtggcggatctggcggcggcggtcgcagctacggtggtagctggggcggcggccggagatccggcggcgggggcggtcctggcgcgtgctacaagtgcggcgagcccggccacatggccagggactgccctagcgccgacggcggaggctacggcggaggcggctacgggggaggcggctacggaggaggaggaggcggcggcggcggtggctgcttcaagtgcggcgagcctggccacatggccagggactgctccagcggcggcggcggctacggcggtggcggcggcggtggtggtggcggctgctacaactgcggccaggccggccacatggccagggactgcccaagcggtggcggcggtggcggagggaggttcggcggcggcgggggtggaggcgaccgctcctgctacaactgcggcgaggccggccacatcgcccgcgactgtcccacgtgaggtgtgtccgcgtccgtccagccagccagatcggatcggatcgctccaccacctgctggtctgatggcgccgcccccttctagatctcgcttaaaaaaacatccccctctcgctgtgtgtcggagtaccgctttagttttgccgatccgggcacgagtgcccgctgcctctttcctctcatgcgtaagaggatcccgtccgccgttttcagatttcgttcggttcgtagaagaactctcaagttaagttaagttatcatggtgtgtgcttggtcgtcgtccgtcgtcgtcgtcgttaaggttttaagagatgatttggtcctgtgttgccgaggggaagtccaatctgcttttcttttctttttttgtggtttgttccatcagacttgaggaaggagatgagatgattattctcccagattaaaaaaaaaaaaaaaaaagcggcc

SEQ ID NO: 948 - DNA, 1300 bp, Zea mays
  Clone ID: TF_ZmC218_80
ccattagctttatctactccagagcgcagaagaacccgatcgacaccatgagggtgttgctcgttgccctcgctctcctggctctcgctgcgagcgccacctccacgcatacaagcggcgagacagcgggggacggtgaagtggttcaacgacaccaagggcttcgggttcatctcccccgaggacggcagcgaagatctcttcgtgcaccagtcgtcgatcaagtcggagggcttccgctcgctcgcggagggcgaggaggtggagttttccgtctcggagggtgacgacggccgcactaaggccgtcgacgtgaccggccccgacggatccttcgtcaggggcggcggaggcggaggaggaggcggcggcggctacggctcccgcggcggtggcggatctggcggcggcggtcgcagctacggtggtagctggggcggcggccggagatccggcggcgggggcggtcccggcgcgtgctacaagtgcggcgagcccggccacatggcaagggactgccctagcgccgacggcggaggcggctatggcggaggcggctacgggggcggcggctacggaggaggaggaggaggcggtggctgcttcaagtgcggcgagcctggccacatggccagggactgctccagcggcggcggcggctacggcggtggcggcggcggcggcggtggtggtggcggctgctacaactgcggccaggccggccacatggccagggactgcccaagcggtggcggcggtggcggagggaggttcggcggcggcgggggtggaggcgaccgctcctgctacaactgcggcgaggccggccacatcgcccgcgactgtcccacgtgaggtgtgtccgcgtccgtccagccagccagatcggatcggatcgctccaccacctgctggtctgatggcgccgcccccttctagatctcgcttaaaaaaacatccccctctcgctgtgtgtcggagtaccgctttagttttgccgatccgggcacgagtgcccgctgcctctttcgtaagaggatcccgtccgccgttttcagatttcgttcggttcgtagaagaactctcaagttaagttaagttatcatggtgtgtgcttggtcgtcgtccgtcgttcgtcgtcgtcgttaaggttttaagagatgatttggtcctgtgttgccgaggggaagtccaatctgcttttcttttcttttttgtggtttgttccatcagactgaggaaggagatgagatgattattctcccagattataatcctgcctgcttgtgcttgatttgggg

SEQ ID NO: 949 - DNA, 1284 bp, Zea mays
  Clone ID: TF_ZmC218_90
cccacgcgtccggcgagagacgggcaggggagagggaaaaaaaaatctaaccctagcatccgcagcgctagggttcgggggttgcgatggcggcggcggcgagacagcgggggacggtgaagtggttcaacgacaccaagggcttcgggttcatctcccccgaggacggcagcgaagatctcttcgtgcaccagtcgtcgatcaagtcggagggcttccgctcgctcgcggagggcgaggaggtggagttttccgtctcggagggtgacgacggccgcactaaggccgtcgacgtgaccggccccgacggatccttcgtcaggggcggcggaggcggaggaggaggcggcggcggctacggctcccgcggcggtggcggatctggcggcggcggtcgcagctacggtggtagctggggcggcggccggagatccggcggcgggggcggtcccggcgcgtgctacaagtgcggcgagcccggccacatggcaagggactgccctagcgccgacggcggaggcggctacggcggaggcggctacggaggaggaggcggcggcggcggtggctgcttcaagtgtggcgagcctggccacatggccagggactgctccagcggcggcggcggctacggcggtggcggcggcggcggtggaggcggctgctacaactgcggccaggccggccacatggccagggactgccccagcggtggcggcggtggcggagggaggttcggcggcggcggcggcgggggtggcggcgaccgctcctgctacaactgcggcgaggccggccacatcgcccgcgactgccccacgtgaggtgtgtccgcgtccgtccgtccagccagatcagatcggatcgctccaccacctgctggtctgatggcgccgcccccttctagatctcgcttaaaaaaacacccccctctcgctgtgtgtcggagtaccgctttagttttgccgatccgggcacgagtgccccgctgcctctttcctctcatgcgtaagaggaacccgtccgccgttttcagatttcgttcggtccgtagaagaactctcaagttaagttaagttatcatggtgtgtgcttggtcgttgttcgtcgtcgtcgttaaggttttaagagatgatttggtcctgtgttgccgaggggaagtcgaatctgcttttttctttttttgtggtttgttccaccagactgaggaaggagatgagatgattattctcccagattataatcctgcctgcttgtgcttgatttggttaccacatatgcctt

SEQ ID NO: 950 - DNA, 940 bp, Zea mays
  Clone ID: TF_ZmC218_74
cccacgcgtccgcacacgcgtccgcgcagcctacgggttcggaggttgcgatggcggcggcggcgaggcagcgggggacggtgaagtggttcaacgacaccaagggcttcgggttcatctcccccgaggacggcagcgaggatctcttcgtgcaccagtcgtcgatcaagtcggagggcttccgctcgctcgcggagggcgaggaggtggagttttccgtctcggagggtgacgaccctggccacatggccagggactgctccagcggcggcggcggctacggcggtggcggcggcggtggtggtggcggctgctacaactgcggccaggccggccacatggccagggactgcccaagcggtggcggcggtggcggagggaggttcggcggcggcgggggtggaggcgaccgctcctgctacaactgcggcgaggccggccacatcgcccgcgactgtcccacgtgaggtgtgtccgcgtccgtccagccagccagatcggatcggatcgctccaccacctgctggtctgatggcgccgcccccttctagatctcgcttaaaaaaacatccccctctcgctgtgtgtcggagtaccgctttagttttgccgatccgggcacgagtgcccgctgcctctttcctctcatgcgtaagaggatcccgtccgccgttttcagatttcgttcggttcgtagaagaactctcaagttaagttaagttatcatggtgtgtgcttggtcgtcgtccgtcgtcgtcgtcgttaaggttttaagagatgatttggtcctgtgttgccgaggggaagtccaatctgcttttcttttctttttttgtggtttgttccatcagacttgaggaaggagatgagatgattattctcccagattataatcctgcctgcttgtgcttgatttggttaccacaaatgccttcaccact

SEQ ID NO: 951 - DNA, 1189 bp, Zea mays
  unsure (1)..(1189): unsure at all n locations
  Clone ID: TF_ZmC353770_1
tggacgcctgcggtaccggtccggaattcccgggtcgaccacgtgtccggtatttgtacaccagactgccataaagaagaataaccccaggaagtaccttcgcagtgtaggcgatggagagactgtggagtttgatgttgttgaaggagaaaagggtgcggaggcagcaaatgttacaggccctggtggagttccagttcaaggcagtaaatacgcagcagaccgtaaccattatagacgctatccacgtcgtaggggtcctccacgcaattaccagcaaaattaccagaatagtgagagtggggaaaagaacgagggatcggaaagcgctcctgaaggccaggcccaacaacgccggccctatcgcaggcgaaggttcccaccttactacatgcggagaccctatgcgcgtcgaccacagtattccaacccccctgtgcaaggagaagtgatggagggtgctgacaaccagggtgcaggagagcaaggtagaccagtgagacagaatatgtatcggggttacagaccacgattccgaaggggccctcctcgccaaagacagcctagagaggatggcaatgaagaggacaaagaaaatcaaggagatgagacccaaggtcagcagccacctcaacgtcggtaccgccgcaacttcaattaccgacgcagacgcccagaaaaccctaaaccacaagatggcaaagagacaaaagcagccgatccaccagctgagaattcgtccgctcccgaggctgagcagggcggggctgagtaaatgccggcttaccatctctaccatcatccggtttagtcatccaacaagaagaaatatgaaattccagcaataagaaatgaacaaaagattggagctgaagacctaaagtgcttgctttttgcccgttgaccagataaatagaactatctgcattatctatgcagcatggggttctttattatttttacctaaagacgtctctttttggtaataacaaacgtgttttttaaaaaagcctggattttctcaatacgcctttaaaggcttttaaattggttcatatctggtcaagttgagatttttaagaacttcattattaatttgtaataaaagtttacaacttgattttctcaaaaaagtcaacaaactgcaagcacctgttaataaaggtcttaaataatgncttaannatat

SEQ ID NO: 952 - DNA, 606 bp, Zea mays
  unsure (1)..(606): unsure at all n locations
  Clone ID: TF_LIB4762-117-Q1-K1-E3
cattgggtacctcgaggccggccgggggacctagctatttctagctcgacgttcccacacccctcaccgcgtccgcctcccctaccatctagggtttctagggttttcgaggaggaggaaatggcgtctgatagggtgctcgggactgtgaagtggttcaacggaaccaagggcttcggtttcatcacccccgacgacggtagcgaggacctattcgtccaccagtcctccatcaagtccgacggctaccgcagtcttaacgacggcgatgccgtcgaatacaccgtcggcagcggcaacgacggccgcgccaaggccctcgatgtcaccgcgcccggcggcggcccgcttgccggcggggaacgtcccgacggcggcaacggcggtgggcgaggcggatacggcggcggcgaccgcggttaacggcggcggcggtgaccgcggcttacgggggaggaggcgaccgtggctacggcggcggcgaccgtggttaccgggtgggaggtggggcgaccgcggctaacggcggcgaccgtggctttacgggggaggcggcggcttatggcgggtgggntacggtggaaggcgggcggntgggaggcggcc

SEQ ID NO: 953 - DNA, 1312 bp, Zea mays
  Clone ID: TF_ZmC3007_1
agcaggggtaacaacgcagagtacttttttttttttttttttttttttttttgatcattttttctttttttggcgtatcccctcgaaaaaaaaaaaaaaatacctcgaggccggccggggttcccacacccctcaccgcgtccgcctcccctaccatctagggtttctagggttttcgaggaggaggaaatggcgtctgatagggtgctcgggactgtgaagtggttcaacggaaccaagggcttcggtttcatcacccccgacgacggtagcgaggacctattcgtccaccagtcctccatcaagtccgacggctaccgcagtcttaacgacggcgatgccgtcgaatacaccgtcggcagcggcaacgacggccgcgccaaggccctcgatgtcaccgcgcccggcggcggcccgcttgccggcggggaacgtcccgacggcggcaacggcggtgggcgaggcggatacggcggcggcgaccgcggttacggcggcggcggtgaccgcggctacgggggaggaggcgaccgtggctacggcggcggcgaccgtggttacggtggaggtggcgaccgcggctacggcggcgaccgtggctacgggggaggcggcggctatggcggtgggtacggtggaggcggcggtggaggcggccgcggctgcttcaagtgcggcgaggagggccacatggcaagggactgctcccagggcggcggctacggagggggaggcggcggcggccgcggcagcgagtgctacaactgcggccaggagggccacatctcccgcgactgccccaacaaaaggcgttaggcgcggcgccaccgtcgcgtcggatccggcggagtcccatgtcgcctctcgccgcttccctacccctccaaaggtatcgctcggctgactcttgcgtgaagtcgtcggagcaaactatctatcagtagtactagcagtgtcgtttcgttttggtctgtcgtggcgtggtagtaagaaatgcaagtgagcagcaccagtatctttccgtttgaatcagttgtaaggcagtcatggtcatggttggctctgccggatctatctgtcatgaactatctatattatatcattatcaatgttatgcaatgagtctttggcattgagttaaggtaaaaaaaaaaaaaaaaaaaaaaaaaggcaaaaaaaaaaaaaaaaaaaaagcggaggaccatgtgctggaagatggtcaacaagactaaggataagttaaccaaggggtgcctctgggggttcctccttacggcgccggccccccccatttttggagggggggccaaag

SEQ ID NO: 954 - DNA, 435 bp, Zea mays
  Clone ID: TF_LIB5116-059-A1-PF1-B9
atatagatcgatcgcggccgcgccagagagagagagaaaaaaaatcttctcgtcggtagggtttcgggggctgcgatggcgatggaggcgcggatgaaggggacggtcaagtggttcaacgacaccaaggggttcggcttcatctcccccgacgacggcagcgaggacctcttcgtccaccagtcctccatcaaggccgacggcttccgctcgctggccgagggcgaggtcgtcgagttcgccgtctcggagggcgacgacggccgcaccaaggccgtcgacgtcaccggccccgacggatccttcgtgcagggcggcgcgggcggtggcggtggcgggggcggcttcggatcccgtggcggtggcggatctcgcggcggcgggggcttcggcggccgcggcggggacggatctggcggctacggaggtgggtac

SEQ ID NO: 955 - DNA, 548 bp, Zea mays
  unsure (1)..(548): unsure at all n locations
  Clone ID: TF_LIB4764-069-R1-K1-C6
acctcgaggccggccgggtccccatccccttcattgcgtgctggagccctcctccgcgcgctttctctggtgacgccgtccatgtctcctcctctcttcctgacactgattgagggtcactgaaaggagcggaagagcccaagtagttcttcgccaccggtaccgccgcatcgatcatcatggtgttctcctcgctcccgatcttcctagaccctcccaattggggccagatgcagatgcagatgcagccaccgctccagtgtctcctcggcagcggcggtggcagcgaccaccaccacctcatgcctcctccgtccggnctggcgccgctgccgggaggtcctgctgacacagcggcgagcgctccggcgggaggagtctcgtccacctcggtctcggtgcaagccgcggcgggagcgggggcaggggcgcagcctcgcccggtggtgtcgatggcggagcgcgcccggctcgcgcgcgtgccgctgccggagcccggcacgctccgatgcccgcgctgtgactcgaccaacaccaagatctgctac

SEQ ID NO: 956 - DNA, 287 bp, Zea mays
  Clone ID: TF_LIB3159-016-Q1-K1-C5
cactttttcaagaaccgcctaatgtaccggactgccggcggttccatgcgcaaccttcccaagggggcagggccgcacaaaaacaacaacgcgtccgccactttccactttcttcagaaggtcaaggccggtctgcccgtcgacccgctcgtctgcgcggcagccaatactaacggcaccgtgctcaacttctgctctgccatgttcagcttaaacctcacggagcataataaacacctcaaggaaaagctcgttcccatagcgggggaccagccctcaaatgggtc

SEQ ID NO: 957 - DNA, 586 bp, Zea mays
  Clone ID: TF_LIB3689-248-Q1-K6-G7
cccactcgattcgaccacccatccgccagctaatggaataaccagaatgagggaactatgcaacggcgaatggccggagctgctgcaccgatgctgtccgtgggtccggcggaaggtacatcggctgctaccgaacaagggggttaggctagcaagctcatcactggctaatgccaacgtagttgcgcaccccacgcccatctcactggcgcagcgcgcgcagctggcgctgatgccgcatccggagccatccatcaacagcccgcgttgctgaataccaccaacaccaatttctgctactacaacaactactgtatgacccacccccgccacttgtacaagcacgtgccgccgttactggacgcgcggcggatccctttgcaacgtccacaagcgtggaggctggcgctgaaacaagcgtgctggcaattcctcatcctacattgctgggtcttgatgcttaaagatgggtccatcaggaaggctactgagcagcccatgaactacaccggccaccatcacaggcactactcagtgctatcattactcagtggctgatctctttctctaagcacttgccggtgtt

SEQ ID NO: 958 - DNA, 461 bp, Zea mays
  unsure (1)..(461): unsure at all n locations
  Clone ID: TF_LIB4739-052-Q1-K1-F6
cgggaatctgtcactccccgacacgcgcacgagctccactccccactccgcacccaacccaaaggcgccactgccatggacgcgggcggtccgccgccgctgttcctcctgggcgccgtgctggccgcggcgctggggtggctgctcgtggtctggcgggcggcggcggggcggcggcggtccgcgtcggcgcggctgccgccggggagcacggggggtggggtcatcggngagacgctgcggcacatcacggtgtacaagtcgacgaaccccaagccgagcaaggaccagcacttgtggcaggactgacgccgctactgaaccaagggtgggtccctcagcaacgtgcccgtcggaggcggctgccggaagaaccgcagcaggggcaagccggttcgagccgtgcccgtcgattccgtggcgcccagcagcggtggcgcggcggcgttcacgcaccgggc

SEQ ID NO: 959 - DNA, 509 bp, Zea mays
  unsure (1)..(509): unsure at all n locations
  Clone ID: TF_8368141
ttgttgaatgcggacgcagctcgcattctctcctcccagtcccctagtccttactccttaccatcccatatnatccgctagctagcgctcntcggccgcatncgccggacgtctattaaacccgccgctcgctcctccnntcggcatgcgcgggtgtgttttttttgttgacatgagcgcctgcagncttccatgcctctcgcgccacccgccctgccgcctccgctcaagtctgcccggccccacttccgacgtctgnnatgagnnctcccgcaccgacgaccctcctccgnncgccccacccagcagangtgcaggggcgacgaggccgcgctgcaagtgtgccagcaacccgcggcatgcagctagctgngagtgcgccgcgncctgccgctccannccaacaccaagttctgctactacaacaactacagcacggcgcagccgcgccacttctgccgcgcgtgccgccgctactggacgcacgggggcacgctgcgcgacgtccc

SEQ ID NO: 960 - DNA, 639 bp, Zea mays
  Clone ID: TF_ZmC511329_1
cggtcggatgggcttcctctcctagtccttcccatgatcccatcccatatatcccagccaggtcacccagagagcgagaagctgattgcgccgcgccctagctagcgctctcggccgcatcgccggacgtctattaacccgccgccgctcgtcctcggcatgcgcggttctgctcgcctgcgagatggcgcctgcagtttccatcctctcggccaccgcctccgccaagcgaaagcgccccgccacttccgacgctgatgagctcccgcacgacgactcctccgcgccccaccagcaggtgcagggccagggccagcaaccgcggcagcagcagcagcttgagtgcccgcgctgccgctccaccaacaccaagttctgctactacaacaactacagcacggcgcagccgcgccacttctgccgcgcgtgccgccgctactggacgcacgggggcacgctgcgcgacgtccccgtcggcggcgcctcgcgccgcgccgccactggcggcggcggcggcaagcggcgcagggtctccgccgagccctcatccccgccgccgtcggtcgcggacgcgtgcctgccgtccgccttcccgttcctcagcgacggcagcttcttcccgcagctcgacctcgtcgg

SEQ ID NO: 961 - DNA, 684 bp, Zea mays
  Clone ID: TF_ZmC564558_1
ggccgggtcaccaacgtcccgatctcgaatccgcagcgtgcttactataccatggcggcaccaagcgatggaagctcagacgtgccggctgcagcctcccaccatggcgccgttcgcgccactacctcatcagtacaacaacacctgcaagcacctaaacacgacgacgatggccgccacttccggcaacaacaacagcaacggcagcaccgctaccgcggctggcggtgcggcggccgacggcatggccgcctacctccagcacctgcagcaggcgggcgccgaggcggcggccaagagcggcggcggcggcggcgcggcgcgcggggagcagtgcccgcggtgcgcgtcgcgcgacaccaagttctgctactacaacaactacaacacgtcccagccgcgccacttctgccgcgcctgccgacgctactggacgctgggcgggtcccttccgcaacgtccccgtcggcgggtccacgcgcaagcgcccgcgcctggcgcaccaccaccagcacgccaggctcgctcctccggcgccgcacgtcttcggcctcacgccgatgatgcctcctcccttgcaaccgtcgtcgtcgacatcgtcgtcgcagggacagggacagggacagggacagagcggcggcctcctcggctcactgttcgcgctcggcgccgcgcgccgggggg

SEQ ID NO: 962 - DNA, 762 bp, Zea mays
  Clone ID: TF_ZmC241107_1
gggggtccgcttttttttttttttttttgacacaaacttaattttattgtcacgataaatcactgcacagatcttacattctggctctagctacagatcaagatgcactgatctaactagcagccccaccatttcattcgcagtaaggacgagaagaaacagtggaggcgacataggagaattgtgagagctctgcatgctaggaactgaactgaactgaacctgacgaggccgcactgctaaaaccggagcccctcaagacgcgcgacggcggctggcactcagttccccggcagtgtccagctgaggtcgaggccaccgatgtcgccccacgtgcccgccgttgctccgtcgtcccacggcgcgagcccgtcgtacaagtccgggaccagcaccgactgccacgaggaggagaaggccgggggtgcaagcgcaacgccgccgacgaggtcgagctgcgggaagaagctgccgtcgctgaggaacgggaaggcggacggcaggcacgcgtccgcgaccgacggcggcggggatgagggctcggcggagaccctgcgccgcttgccgccgctgccagtggcggcgcggccggacgcgccgcggacggggacgtcgcgcagcgtgcccccgtgcgttcagtagcggcggcacgcgcggcagaagtggcgcggctgcgccgtgctgtagttgttgtagtagcagaacttggtgttggtggagcggcagcgcgggcactcaagctgctgctgctgccgcggttgc

SEQ ID NO: 963 - DNA, 1037 bp, Zea mays
  Clone ID: TF_1061305
ccaagggctaccccgtgccggttgccaaggaggagaggccggcgccgggcggcgacccgtgcccgcggtgcgggtcgcgggacaccaagttctgctactacaacaactacaacacgtcgcagccgcgccacttgtgcaagtcgtgccgccgctactggaccaagggcgggtccctccgcaacgtccccgtcgggggcggcacccgcaagagcagcagcagctcctcatcatcctcggcggcgacgacgacgacgacgacgacgtcaacctcgcccggcgccgcgcccaaggccacgaaacggtcgaagaactctaagcgccgccgcgtcgcgcctgccccggaccccgccgcgcccggcacggacgcctccaccgccgacgtcgcgagcacggcaccgtccgcagcgacggtggctgcctcggagaagccgagcgcgacggagcacgcagcggcggctgtcgccactgagaagccgccggccgcgcctccggtgtccgtcggcgctttcgcggacacgtccccggcgccagatgctgggagcggcggcgttagggagctgctgccgcacccgagccgcttcgagtggccgtcgggctgcgacctggggccgccctactggggctggggcaccagcgtgctcgccgacaccgacccggcgctgttcctcaatctgccgtgagtgacccgtgacaacgccatggcgcccatggttaactagtcaaccatcatcacacggtcgacgagatgagaggaacagagcacgcagtgcgtcgggctcttgaagctaggtgctgtagtagtctcctaagcttactgttgtctagaccgacagtctcgcgtacttgtgtagttgtgttgatggtttttaatcgccgctttgtactgcaattctagtaaaaaggctagcatgggatagccgggctctgcacggatctgtgcttgctttgacagtttgatctgattggggtgctttcttattttaaggccatgagaatcgcaagaacagggagcggcgaacttcgaagaaaaaaaaaaa

SEQ ID NO: 964 - DNA, 1194 bp, Zea mays
  Clone ID: TF_ZmC13570_1
aagctcgaggtcgcggctgggctgaaactgaaacagcccgtcatctaccattcgcccgccgcaacgctccctgctcggaacagcctgcgttgctcgcccacacgacgccacgcatgcaggaggagccagggcgtcgtcccgtgccgccgttcgcgggcgtggacctccgccgccccaagggctaccccgtggcggttgccaaggaggaggagaggccggcgccgggcggcgacccgtgcccgcggtgcgggtcgcgggacaccaagttctgctactacaacaactacaacacgtcgcagccgcgccacttgtgcaagtcgtgccgccgctactggaccaagggcgggtccctccgcaacgtccccgtcgggggcggcacgcgcaagagcagcagcagcagcagctcctcatcatcctcggcgacgacgacgtcaacctcgcccggcgccgcgcccaaggccacgaagcggtcgaagaactccaagcgccgccgcgtcgcgcctgccccggaccccgccgcgcccggcacggacgcctccaccgccgacgtcgcgagcacggcaccgtccgcagcgacggtgactgcctcggagaagccgagcgcgacggagcacgcagcggcggctgtcgccacggagaagccgccggccgcgcttccggtgtccgtcggcgctttcgcggacacgtccccggcgccagatgctgggagcggcggcgttagggagctgctgccgcacccgagccgcttcgagtggccgtcgggctgcgacctggggccgccctactggggctggggcaccagcgtgttcgccgacaccgacccggcgctgttcctcaatctgccgtgagtgacccgtgacaacgccatggcgcccatggttaactaatcaaccatgatcacacggtcgacgagatgagaggaacagagcacgcagtgcgtcgggctcttgaagctaggcgctgtagtagtctcctaagcttactgttgtctagaccgatagtctcgcgtacttgtgtagttgtgttgatggtttttaatcgccgctttgtactgcaattctagtaaaaaggctaacatatgggatagccgggctctgcatgaatctgtgcttgctttgacagtttgacctgattgtggtgctttcttagtttaaggccatgagaatcgcaagaacagggaacggcgaacttcga

SEQ ID NO: 965 - DNA, 1330 bp, Zea mays
  Clone ID: TF_ZmC1074_1
aaccgcccccctcctttcaactcgctcgctcgctcgccttccatctttctccctctgtcggcagtctgcagcagcccagcgccgtcgcgcatgcaggaggcgtcatcggcggcggcggcgggggccgagcccggccgtcgggcggcgcagcatcagttcgccggcgtggacctccggcggcccaaggggtacgcggcgccggcgccggcgccggcggtgggcgagggggacccgtgcccgcggtgtgcgtcgcgggacaccaagttctgctactacaacaactacaacacctcccagccgcgccacttctgcaagggctgccgccgctactggaccaagggtggcacgctgcgcaacgtccccgtcggcggcggcacccgcaagaagccctcctcctcctcctcgtcgtcgtcctacgtggccgccgcggacgccgacaggcagcccaagaagaagcccgccagcaagaagcgccgcgtcgtggcgccggccccggagctcgccaccgcggccgacccaggcaagacggcgaccaccaccacgacgacgagcgagatcaccacggagactggcgcgctggaggactccgactccctggcgcacctgctgctgcagcccgggacagaggacgcggaggccgtcgcgctcggcctcggcctctccgacttcccctccgccgggaaggcggtgctggacgacgaggactcgttcgtgtggcccgccgcgtcgttcgacatgggcgcgtgctgggccggcgcagggttcgccgacccggaccccgcctgcatcttcctcaacctcccgtgacagccacacacggtcacggcgccgaggcgtacgtcctcctgctctgctctgctctgcgcctgatgatgagtgcaaggaaatggagcgctttgattcttcagctatttgatgcatctgctaattgatttggcagtggtggtaaggtacacgcacgatgagctgactgcgtggttcttggtttgggccttagtatatgatgacgatgacgatgatactagttgtatgtgtgacgtgagagacgatcgcgacgacgaccttgaattttagtttctgagatgaaaaaggtcaactagtggcctctgtatgactttagttttactcatgaactcatcagatggctggctatggctgtggctgtggctgtggctaactcatcgtcaagtgtttctaccggctgcctataaactagactgagctttggtctggtattcttccttgttcttatgataagttctgttgtgctgtcatgcttgttttcttcttttctgtaaagattatgggggatttcctcggctctcaatct

SEQ ID NO: 966 - DNA, 581 bp, Zea mays
  unsure (1)..(581): unsure at all n locations
  Clone ID: TF_LIB4744-032-R1-K1-G1
gtaccctccggnctggccggggatctccactgacaaacgaagctctcctcgccgcactcgcgcctgctcgatcgctccaacaagaccctctcgcgccaccgcagcagcgtcgtcgtcgctacgcggatgctgtcttctcaccgcgagagcctgctgccctacgcgccggggcggcgggcggcggtgctgctcgaccaccggcggtaccgcccgaacgtcgaggtggcgcccagctgcccgcgctgcgactcgcccaacaccaagttctgctactacaacaactacagcctcagccagccccgctacttctgcaagggctgccgccgctactggaccaagggcggctccctccgcaacgtgcccgtcggcggcgggtgccggaagaaccgcagcaggggcaagccggtccgagccgtggccgtcgattccgtggcgcccagcagcggtggcgcggcggcgttcacgcaccgggcgtcggcgtcgtcgtcgtcggcgtcccccgccacgctgcggccggacatgctactgggaggcatgctcggcagcccaagcgagctgtgccagctgacggtgacggacga

SEQ ID NO: 967 - DNA, 852 bp, Zea mays
  Clone ID: TF_ZmC25364_3
cattgggtccctcgaggccggccggggatcaccctatattccactgacaaacgaagctctcctcgtcgcactcgcgcctgctcgagagctccgatccaacaagaccctctcgcaagtcgcaccaccgcagctagcaccgtcgtcgctacgcggatgctgtcttctcaccgcgagagcctgctgccctacgcgccggggcggcgggccgcggtgctgctcgaccaccggcggtaccgcccgaacgtcgaggtggcgcccagctgcccgcgctgcgactcgcccaacaccaagttctgctactacaacaactacagcctcagccagccccgctacttctgcaagggctgccgccgctactggaccaagggtgggtccctccgcaacgtgcccgtcggcggcgggtgccggaagaaccgcagcaggggcaagccggtccgagccgtggccgtcgattccgtggcgcccagcagcggtggcgcggcggcgttcacgcaccgggcgtcgtcgtcgtcgtcgtcgtcgtcgccccgccacgctgcggccggacatgctactggaaggcatgctcggcagcccaggcgggctgtgccagctgacggtgacggacgacgacgcagcggaaaacccggctgtggcgcccgatggacccaggatcgacctggcgttgctgtacgccaagttcttgaaccaacagccgccggcgcccgagcggcgcgccgtcctgccggaatcgctcgtcgtcgacaccttgagcgggtcgtcgtcgagcgacgtgggtcccgtcgtcccatcgcgggatcatcagccgttcacgacgcaagacgacgggctgggcgagctgtccgcggcgcg

SEQ ID NO: 968 - DNA, 1526 bp, Zea mays
  Clone ID: TF_ZmC14032_1
ggcggcctccgcgcccccccctccccggcgttcccgggcctccggtgctgcttcgtcctgtgcgttgttaaactgacttggtcctgataatcctccgcgttctaatgatgtgctgtcgctgcaccatgcgcgtgttgtcgtcagagcctagggctggtgaagcccctggaggagatgctgatggcggccagcgcgggggctgcaaatccgagccaaggctcgaatccgaacccgccgccgctggcggcgcccctgacggacgcgggtagcaccgagcggcgcgcgcggccgcagaaggagaaggcgctcaactgcccgcggtgcaactccaccaacaccaaattctgctactacaacaactacagcctccagcagccacgctacttctgcaagacgtgccgccgctactggacggagggcggatccctccgcagcgtccccgtgggcggtggctcccgcaagaacaagcgctcctcgtcctcgtcctcgtcctcgtcctcgtcggcggcggcggcgtccgcctccacctcctcctcggccacgagctcgtccatggccagcacaccgggggcggcgtccaagagtccggagctggcgcacgagggcgcgcacgacgacctcaacctagcgttcccgcaccacggtggcctgcacgccgccgagttcgcggcgttcccgagcctggagagcagcaacgacatgtgcgaccagggtggcgggatgacgagcaatggccggggcggcggcgcggggcccgcggtcggcgcgctctcggcaacggagctgttgcggagctccggctgctacatgccgctgcagatgccaggaggagattacacggcggcagggttcgcgctcggggagttccgcacgccgctgctgccgccaccatcgtcacagagcccgctcgggttctctctggacgcgcacgggccggggtcgtccggtgctgccgcagcggcggggtacggttccagcgcggggctgccgcagggcgtgccgggcaacgcgggcaggttgttgttccctttcgaggacttgaagccgccggttagccctggaggtggtggtgtgggcggaggtggtgcaagtgcaaccggtggcgccggcgacggaaatagcagccacgatcagtttgaccacaacaaggagcgaggcggaggcggcggccgcggtgccggtgccgggcacgacacgccggggttctggagcagcatgatcggcggcagtggcgcttcttggtaatggagaatgacgcacacgggggcggcgccatgcatggtttcatgcatgcaaagtgttggtgacttgttctcaaatgctatgagttaagaacaaggcaacatagaaaagtgttaatcgttaaggtccttcgtcctccaaagcattatttcccttaggatataatggtttacggacgaaggttatgaaggacgtaccttcataaatttattaaacaatgacgaaggatggaatataaaggatataaaagacaacattaacaattatatattattattaagtat

SEQ ID NO: 969 - DNA, 1414 bp, Zea mays
  unsure (1)..(1414): unsure at all n locations
  Clone ID: TF_21216063
gcacgaggcagcatcggctcccatcaacaaccagcaggaggctgtggtgtcatccccaaccagaaaggagcaagccaggaaccccaagnnnnnnnnnnnnnnnnnnnnnnnnnnnnnnnnnnnnnnnnnnnnnaggccgcggcctccgccggacgcggcgcacagctgcccgcgctgctcctccaccaacacaaagttctgctactacaacaactacaacctgacgcagccgcgctacttctgcaagacgtgccgccgctactggacacacggcggcaccctccgcaacgnnnnnnnnnnnnnnnnnnnnnnnaggaacaagcgcgcctccagctcctcgtccccgtttccgggcccctccnnnnnnnnnnnnnnnnnnnnnnnnnnggagaagaccgtcagcacgcggctgatgctgatggcgaccagcaccatggcgatgccctccccgacggcaggcctgtttgttcccgatgacatgtccccggcattnnnnnnnnnnnnnnnnnnnnnnnnnnnnnnngacctcgccggcatggacgagcagcaccagcagggcttcctgcccttctcgccgctgtccctgtccgaccaggcgccggagctggctcctggaggannnnntgacacgacgccgtctttcctggacatgctgacaggagggtatctcgatggcggcggctacggcggcatgagcggtggcagcgatgcgatggacatgccgttctcgctgcctgagatggggnccccgacaactgatccaatgccgtttcagctccagtggacgtcatcagagcttnnnnnnnnnnnnnnnnnnnnnngtggttatgcagcaggaccagccgccggagtgcagcagcagcagattaatggtggtgatcaccagaagcagnnnnnnnnnnnnnnnnnngacgagaacaaagaggcggggaacggcaaaggcaacgacgannnngnnnnnnnnnnnnnnnnnntgtacagcttctggatgaacaccagcagcagcgacggggcacaggggtagtgcgccactgccagtgccagccacaggaggaggcgaaagtgctgctgcaaactccctcgcatcatctggtcggtgcaagtgcagcagacatccttcgtcgacgcaatcaaatcatcaaaaggtggcaannnnnnnnnnnnnnnnnnnnnnnnncaccatccagcgtagaggatagggtgcatgttcatgtttgatttatctgcattgtggtcggtcgtggttgcaagtcatcttgcaccaccctttgttttggttcagtttgcatgcgttcgttcgtcagagttttacttgcagcagtctttggatcgccggcagagattagttaggtatctatgctttgttttcgtcagttcgttctggataatgtcttaataattcctcagtttattt

SEQ ID NO: 970 - DNA, 311 bp, Zea mays
  Clone ID: TF_14645985
cagtgtctcctcgacggcggtgctggcagcgaccaccaccacctgatgcctccgccgtcctgcctggcgccgctgcgcggaggtcctgctgacacggcggcgagcgctccagcgggaggcggctcgtccacctcggtgccgacgacggcgggagcaggggcaggggcgggggcgacgtcagcctcgccccgtcgtgtcgatggcggagcgcgccaggctcgtgcgcgtgccgctcccggagcccggcacgctccgctgcccgcgctgcgactccgccaacaccaagttctgctactttaacaactactcgc

SEQ ID NO: 971 - DNA, 1562 bp, Zea mays
  Clone ID: TF_ZmC2150_2
cctcgagccggcggggccagtctactagatcccatccacctgattggaataaccagcagcagcaaggtcagcagccgagggcgagtgggggagccgatgcaccgctgttgcccatgggtccgatggctgccacagcggcggcttcggagcccggcggcttgccgagaagctcgtcaacgtccagtgccgccttggccatgcacgcaaggcccaactcgatggcggagcgcgcgcggctggcacgaataccgaatccagagccggcgctcaagtgccctcgttgtgactccaccaacaccaagttctgctactacaacaactactccctctcccagccccgccacttctgcaatatgtgccgtcgctactggacgcgtggtggatctctccgcaacgtccccgtaggcggaggctgccgtcgcaacaagcgttcgtccaagtcctcatcctcctctgctgggtcttcctcctcaaagatgtctccctcaggaaggctactgggtggtccatcagctacaccgtccaccaccccaggcactaccggtgcgatcattactccgggtctcagctctttctctcaccacttgccgttcttgggctccatgcacccgtcagggcccaacctaggtctagctttctccgccggactgccgctagtcggcatgcagcacctggacacggtggatcagtttccggtggcaagcggcggcggcaccaccataggtgcatctctagagcagtggagagtgcgacagcagcagcagcagttcccattcatgactgggggaatactggatctgtcgcagccgccgacgtaccaattcggtttggaagctaaccgaggaggcagcggctcagctgcggtggcgttcaattcaggacagaccacgacgaccagtgctaccacgggaaggcaggaagggtcatcaaagaagatccgggattgtaaaggagaagaggtgagcttacagaagcagtacatggtacctctacgccacggatcaggatcacacggtgtctgggatgggagtgctggtggaactggcagcaacggtggtggtactggcaatggcggttcaagttggccaatgaacatgattcctggattccattcttcgtccactagcggttgcaatgacagtggcttgtcgtagtactctctagctaggggctggggcaatgtcctatcaagaaaaatattttggagatgcatggttgagtctgagcaaatgctagctatagctaggacgatggaggaacaggcgatgaccaatccacaggcatgttcatcatctgctattcttcatcggaattgtagaagcacactgctacctcatgatggtcacaggtaggagtttaaagtaaagctgctctttgtttaaacctttttctgtcatttggttttgaacttaaaggtgttctctgcattgtgtccatagcggtcgccacttttctacttttcacactattgttcacagggattaattaatcaaatttggtgcctggtatactatgtgataaggtatatttgacatggacgaaactgattaagttgtttcatc

SEQ ID NO: 972 - DNA, 2118 bp, Zea mays
  Clone ID: TF_ZmC24704_1
ggccggccgggcccttctcctgcagccatcagaaaagggggcaaaaaggcccccgaattctcctcgcccgggcacaacctcgctccagagtccaggccagaccagcaggccgcctttccgctcgagcacccacgcaatcatcaccgccgtcttcctctcgctcttctcttccccttccattcctcggcaccacgtcctcgggaacgccgcatgccctccgcacaaggcgccgcctgttcccggtgaccgcggggccgagatcggcgcgccatggccgcgcccggaggcctggaccaggactgtgcacaggacgccgccattaagctcttcggccgcagcatcccggttctccactcctccgtcttcgccgccaccgccgcggccgaatccgaggttagcaccaaattagcaaatgatgttagaagcaaagatggcatgccatgccttccaaacatgtctttgattgtcaaaacaaatcccttcccttccaagagcaatatgaagaatggtttacaggcaatcagcagtcagcatgggaaaatggaagctgattccaactctgaggaagctaagaatagtttacaagctatcatcagtcagcctgggaaaagatacgattccaagtctgaggaagctaagactgaatctggtggatctggccaagagaaggtactcaagaagccagataagattctgccttgccctcgctgcaatagtatggaaacaaagttctgctacttcaacaattacaacgtgaaccagcccaggcatttctgccgaaactgcaagaggtactggactgccggggggactatgagaaatgtccctgtaggttctggtagacgcagaaataaggatccatctcatcaccatcatttcaccaaggtgtgtgattataccatagctactaatggagatgtttctgatgcaactcagcgccagtccgttgcagccaagctatgtctccttcaaggttcagggaaacaaaatgaaacagcgtgcaagtctgtatctccagtcagtaatattaaagagcagaacaatgctgaccttatttccttggtctctggtgataataaggaagagaaatcatgtgcatcctctgcagtggtatctggttcctccgaaaattggatgccagaaaatacagttaaaaaggaggaggataatacttcagcgtatggtaatggtgtgaaattacctgatcacaaaatgcagtctcaccatgctggacccgtttcggtgttctccagaaatcctgctgcagtcatggcgactaatcagtgctcagaagatggtattcatacgccgggaaatggtacggtcagtcctctttcactgccaccactacccatggtaccaaccccaggaatttgtgcacctgctgttccattccctttccctctcgtgccagccttcgtgagctgcattcctggctggccaagtggactatggggtgcaccatggcctggaagtagtgcccctacattactatctcttcctccaaacggtttagctggaagcaactctggggtgttaggaaagcatacaagggtagctaatttgcaggaagaacagaaggcagaaaagaagttttgggtccctaaagctctccgaattgacaacccagaagaggcagcaaagagttcgatctgggcctctcttggtatcaagcctgatgacagaatcatattcaagtctttccagtccaaggatctgaaaaatagtgcgactaagatgccagaatccctgcaggccaatccagcagcgttttcccgctctcagacatttcaggagagggcctgatacaaaaataaagtgtcctcaaaacaaaggataccagaggatggtcaatgttcctatttaagctttttcttgagttgatctgtcgctaagcgcagcagtttggcaatcaactcaggcctggccaagatttacattttttttctttctagcgatagctaggttggtgtgaagattctgactgctcaaggagcgcttatgtaaatacagtaggcctgtgaattgatgttgaatgttgatagtcttttaccctggcaccggttaatgttttaaaaaaaaaaaaaaaaaaaaaaaaaaaaaaaaaaaaaaaaacaa

SEQ ID NO: 973 - DNA, 1032 bp, Zea mays
  Clone ID: TF_ZM4161.C1.o10.fg
atggtcttttcttctgttcctgtctaccttgatccatccaattggagccagcaccaccaggcacaggagcagcaacaacacgctcaacatggtcagcttccaagcgacggcggcatggacgcgcatgcacatcatcatcatgatcagccgccgccggtgcgaccacctcatggcggggctctcatggcacctcgccctgacatggcagttgtggtctcggcgagcggcaatgggccaactggcggtggctctgctatccgggcaggctccatgtctgagcgggccaggctcgccaagatcccgcagtcggagccggggctcaagtgcccgcgatgcgagtccaccaacaccaagttctgctacttcaacaactactcgctctcccagccaccaagtcgtctaagtccaactcccttgatgcagcaccccctcgtcggcggggatcactacaacatcagcgcgtcaaggttagggttcctaggactaagctcactagaccccatggattaccaccagttcggcacgggcgccggcgccagcagcgctacaattgggctagagcagtggcgcttgccacagatacaacggttccccttcctaagcggccaacctgacgtcgtgcaaccgacaatgtctggtatttacccattcgacatggaaggacagagtggggacactcccgtcttacctggcgggcacatgctgggtggctcgaagatgcccggctcagccggcctgatcacgcagctcgcatcggttaagatggaggacaacccagcgtccgtggcgatggcgagcagctcatctagggatttccttagtgtcactgggaacctccaattctgggtcgacgacagcgacaacgacggtgcaagtggcaacaatgaaggaggcgttggcaacgccggaggtggcagtggcggtggcgcggtcgctccaggcaccagctgggtggacctgtcaggatcaactcgtcttcatccgggaaattgctgtgacgaacccttcggtctgcatgctagctgcagttga

SEQ ID NO: 974 - DNA, 669 bp, Zea mays
  Clone ID: TF_LIB4744-008-R1-K1-G4
cggggttctgctactacacaactactcgctgtcgcagccgcgccacttctgcaaggcgtgcaagcgctactggacgcgcgggggcacgctccgcaacgtccccgtcggcgggggctgccgcaagaacaagcgctcctccaggagcggcggcggcgggaggaatgggtcctcctcctccttctcctcctcctcggcggactcgacggcgctgcccctcccgccgcctccgacgacgatggggtccctgccgtcgtcgctggggctgcccgggggcgcgtcgctcctcctcgggtccgcgctccctggcggtgccggtgaccaccaccacctcggccttttccaggcggccatgcagtcggtggtctcctccgacgcgaccgcctacgacgagatgcagcagcaacagcagacgcagctggaccacctgctgggcctcggatacggaggaggcgccggcgcgcagatccagctcaagccgtggatgcaggaggccgccggggcaagcggcgcgcccgggatcatggacagcttctacgcgccgctgctgtccagctccctcgtgccggggctggaggagctgcacgtcaaggcggaggccgccggagccggggatcaccagcagaagccgtcatcaagggaacagcagagcgccagctgggactgggagct

SEQ ID NO: 975 - DNA, 654 bp, Zea mays
  Clone ID: TF_ZM4642.C3.o6.fg
atgggcctcgctgccggcgggttcaagctcttcggcaaggtcatcacgcagtgcgccgagagcgctccgccggcctccttggtcgcgcgggagagggacgatccggacgagcgcgaccagccggtggtgaagcgggaggcagcggcggcgtcggacagcgactcggccgtcgtactcgtagacaagcagcggcgctccggcgggccggccgagagcgaggacagcaaggggcagcatcacccgcgcccgcggcagccgcagcagcaggacaccgcggaggcccgcgccgcggcgtcggcgccgccgctgccgtgcccgcggtgccggagccgcaacaccaagttctgctacttcaacaactacaacgtcaaccagccgcgccacttctgcaaggactgccaccgctactggaccgcgggcggcgcgctccgcaacgtccccgtcggcgccggccgccgcaagaaccggcccctcggcgccgcacccatccccttggccgtgtccgtgccggcccagcacctgcagcacccgcagcaccccgctgcggcggcgggccacggcctcggcctccccggccagcacccttcctgcccgacgtcgccgtccccggcctacgccgggcggtggccggtctgcccggaccgccggttctga

SEQ ID NO: 976 - DNA, 533 bp, Zea mays
  Clone ID: TF_LIB4730-013-R1-K1-B6
accccgtcatctcctactgtctatgccatacgccggccgccgcgacgctccctaggctccgagtcactccgagctgggaaggaagagcccgcgttgctcactcgctcgctcgcatgcagctttcccacacggcgccacgcatgcaggagcccgggcgccggcccgtaccgccgttcgcgggcgtcgacctccgccgccccaggggctaccccgctccggcggcgaaggaggcggaggaggagccggccccagctccggcgccgggcggcgacccgtgcccgcggtgcgggtcgcgggacaccaagttctgctactacaacaactacaacacgtcgcagccgcgccacttctgcaagtcgtgccgccgctactggaccaagggcgggtccctccgtaacgtccccgtcgggggcggcacccgcaagagcggctcctcgtcctcggcaacggcaacgccaacctcgaccggcgccgcacccaagagcccgaggtcgtccaagaactccaagcgtcgccgcgtcggccccgccccg

SEQ ID NO: 977 - DNA, 981 bp, Zea mays
  Clone ID: TF_ZM4824.C3.o2.fg
atggcccccggcgggttcaagctgttcggcaaggtcatcacgcagtgcgccgagagcgccccgccggcgccgccggaggctgctgccgcggcgtcgagggccacggccttcgcgcgggagagggacgacccggacgagcgcgaccagccgatggtgaagcgggaggcggcggcgtccgaccacgacttcgccgccgtggacaagcaccaccagcactccggcggcagcggcgggccgggaccgggaccggacgagagcgacgacagcaaagggcagcagcagcagcagcaccacccgcgcccgcggcatcatcagcatcaccatcagcagcagcaggacaccgtggaggcgcgcgccgcggcggccgcgtcctcggcgccgccgctgccgtgcccgcggtgccggagccggaacaccaagttctgctacttcaacaactacaacgtcaaccagccgcgccacttctgcaaggactgccaccgctactggacggcgggcggcgcgctgcgcaacgtccccgtgggcgccggccgacgcaagaaccggccgctcggccccgtcgtcgccggagccgtgcccgtgcccgtgcccgtgccggcgcaccaccaccaccaccacctgcaccccgctgctgctgctgctgcggcggcggcgggcttcgtcctcgggttccccggccagcagcacccttcgtcgccgacgtcgccgtcgccgtcgccggtctacgccgaccggtggcctaccagggacaggtcaaaaactcgaggtcagcgtgcgtgctcaactagtgccgacgaaggtgatgcgatcccatgctgtccagtccagtccttagctcgcatcccgggagtcgttggtgatcatcgcacgaccaaccccgcgttgtacattccttcctgggaaaaggtgacgacggacggagtgctgatgctctgcctctgcgcgcagatggagctcacggcattggcttcgcagcgctag

SEQ ID NO: 978 - DNA, 1936 bp, Zea mays
  Clone ID: TF_ZmC3845_1
tgcggcttcgctagctgattcccgtcaccatcaagcctcatctccccggcctcccactatctccgcgtcggggtcccatccacagtccggcgcgcccagcaccatccatccgtccgcaagggggaaagcacgctagctgagctgagctgctgagagagagagagaggcaaaccctatcacgcacaagcacagcaacgtatacgcttccccccgccgattcatccatccatcgcagcgcgcaccgggcgggcggtccgggacgacgacagctaagctagcacatcgcaatagcatagcatctatctccgtcgcagtacccaccaccaccaccaccatgatcttcccccctgccttcctgcaggatactctctacctagggcttgcttgctatcctgatccaacgtcacactgatactatatactcatcgactgctgctagtatatactagctgcgcagtttgaacgacgaattgaaatcttcagctttttatttattattgattgactcgatccaccagcagcagcagcaccaccaccagcagcaaggccacggccacctgcagattgccgtcagcggcagcggcgacgccaatcatgagctcctccagcaaccaatcatggggggagcgcttcccgatggaggaggaggaggtggtggcggggggcaggttgggggccccgccaagcccatgtccatggcggagcgcgcgcgcctcgcgaggatcccgctgccggagccggggctcaagtgcccgcgctgcgactcaaccaacaccaagttctgctacttcaacaactactccctcacccagccgcgccacttctgccgggcctgccgccgctactggacgcgcggcggcgcgctccgcaacgtgccggtcggtggcggataccgccgccacgccaagcgcgccaagcccaagcagcagcagcagcacgcggccgccgggaccggagctgccaacggcgcgatgcagcagcctcccgctgggtctatggcgtcgtcggccgccgcctgcaccgcgaccacgacgatgacgaccaacgcgctggatgccgggcccggcggcggcatgctgcccatgctgccgccgctgctgcgcctagccgacttcgacgcaatgagcctcggctccagcttctccgggatatcgtccatggggaagcccggctccatcggcgcggcctgctacccgcactcggtcggcgggctggagcagtggagggtgcagcaaatgcagagcttcccgttcttgcatgcgatggaccagggcccgctggggccacctctggccatggcgatggcggcgccaggagggatgttccagctaggtctagacaccaccagtgataacagccgtggcggtggcggcggcggcggagaagacgggtcgtctgccggagaggcgctccatatgatgcaagcagccaccaagagggagagctacccggcaccaccaagagccatgtacggcgaccaacaccacaatcacctcgctgctgctggtggctacacttcctattccaccaatgctgctgcaggtaaccatctcttgtaatggccggccgatcgatcgatcgagagctcaacaattcaagtgtcctgctatagctagctactacgacgtcgtgctacgatcgtatcggtttgcgttcctacaaatatagcctagagatagagtgtctctgtctgtgtgatcgatggtattgttatgatcatatagaaaagaccagtagcatgcatgcacttgttgcaatgtttgctttcaagaagaaactctggagggaggagaggctcggtttggatgctgatcatgcgcaaatattactagtgtctacagctgctacttcattataaaaaaaaaaaaaaaaaaagctgctagcatggtcacttgttttaaaaaaaaaaaaaaagggcggccgccaccgcggtgga

SEQ ID NO: 979 - DNA, 1135 bp, Zea mays
  unsure (1)..(1135): unsure at all n locations
  Clone ID: TF_ZmC8312_1
cgagtatcgtcacctcctctctgtgtgcgtgccgtctcttctccattggctttgagctggggggactccggggcctttaattcccccttgtctcctccttttaatccttgaaaggagcacacggccgcctttatcttcctttgtgttcctgcctttctttctatcttatcccccctttccaagctctcatctcctttatccctccttttctttctcgtatggagaggagctttaccctccctctcccacaccttgcatcaaaagagcagccatgtcttgggtgatggagtgagtagaagtgctacgccacagatgcaaccctacaagagcacaagcaaagttgagtttatgtggtgcgctgcgatgtttctctctcatcttttccttgttttttttcacctttttatttgccttttcccattctctttaatctcgcctttgtatccatgtgcttggttctttgttgcactgcactgcagttgttgcaccataagaatccaaagtcctccacgctcataccccctctgatatgtgcttgctatatccatctcttcaatctcccatacatactacatgttcttgcttcgtagtagttgtcagttaccttaacaatcatcattcaggtttgcagtggtatcatctaacgatgagcaatatgtgtccatcaccaggggctagggctagggaagcccatggaggagatgctcatggctggaaacgcaaatctaaaccagaatccaaacccaccgccggctgcgccctcggctcccggcgcccagagggcaggcgctcccgccgcggttgcggcagcgccgcctagcgctggcgcgaccggaggagcggggccggagcggcgggcgcggccgcagaaggagaaggcgctcaactgcccgcggtgcaactccaccaataccaagttctgctattacaacaactatagcctccagcagccgcgctacttctgcaagacgtgccgtcgctactggaccgagggcggctcgctccgcaacgttccggtgggcggcggctccaggaagaacaagcgctcgtcctcggccgtgtnncgtcggcggttgcggncgccgccgcctccacctccgcggctatgtctggcacggtccccgtggggctcgcg

SEQ ID NO: 980 - DNA, 1638 bp, Zea mays
  Clone ID: TF_ZmC22467_1
taccctcgaggcctgccgggctctttctcttcctccttccccaagtcggcgcggtagcttcccgtgtaccgtacacagcaggatcctccgccttccttgtgttccgcgcttccacaacagtttaccgcaaggaaggaaccatggacatgaactccaacgccaacaacagcactgccgcagcagcatcggctcccatcaacaaccagcaggaggctgtggtgtcatccccaaccagaaaggagcaagccaggaaccccaagaaggcgcgggcggcgccgcagcaggcgggcggcagcggggagcctaggccgcggcctccgccggacgcggcgcacagctgcccgcgctgctcctccaccaacacaaagttctgctactacaacaactacaacctgacgcagccgcgctacttctgcaagacgtgccgccgctactggacacacggcggcaccctccgcaacgtccccgtctgcggcggctgccgcaggaacaagcgcgcctccagctcctcctccccgtttccgggcccctccagcaccgccgccaccagcgccgcgatggagaagaccgtcagcacgcggctgatgctgatggcgaccagcaccatggcgatgccctccccgacggcaggcctgtttgttcccgatgacatgtccccggcattcacgccgacgacgggcggtagcggcttcgacgacctcgccggcatggacgagcagcaccagcagggcttcctgcccttctcgccgctgtccctgtccgaccaggcgccggagctggctcctggaggaggaggtgacacgacgccgtctttcctggacatgctgacaggagggtatctcgatggcggcggctacggcggcatgagcggtggcagcgatgcgatggacatgccgttctcgctgcctgagatggggcccccgacaactgatccaatgccgtttcagctccagtggacgtcatcagagcttgacaactacatcaacgacgacggtggttatgcagcaggaccagccgccggagtgcagcagcagcagcagcagcagcagcagcagattaatggtggtgatcaccagaagcaggacgagaacaaagaggcggggaacggcaaaggcaacgacgacggcggcggcgggtcgtcgtcggtgtacagcttctggatgaacaccagcggcagcgacggggcagaggggtagtgcgccactgccagtgccagccacaggaggaggcgaaagtgctgctgcaaactccctcgcatcatctggtcggtgcaagtgcagcagacatccttcgtcgacgcaatcaaatcatcaaaaggtggcaacagggagtgaaagggggaagaagttcaccatccagcgtagaggatagggtgcatgttcatgtttgatttatctgcattgtggtcggtcgtggttgcaagtcatcttgcaccaccctttgttttggttcagtttgcatgcgttcgttcgtcagagtttacttgcagcagtctttggatcgccggcagagattagttaggtatctatgctttgttttcgtcagttcgtcgttctagataatgtcttaataattcctcagtttctttctttgttaactagtcgtcgtctaaaccttttcgtgtgtagtatttagttt

SEQ ID NO: 981 - DNA, 1822 bp, Zea mays
  Clone ID: TF_ZmC2150_1
gtgggatcctcgaggccggccggggccttcgacttggtgggatgtgattctccaccacctccgagcttgcaagaggactccacctctttcttctcgcatgcctccttctctttccaaacacaaagccgcagcaaagaaagtgcaaattataaaggaagatcagaattcaaagcagccgaaaagctgactagctagaagagtaaagagagagaagtatatctcagcaagacctccatggtcttcccttcaccttcagtgcaggtctacctagatccacatccacctaattggaataaccagcagcagcaaggtcagcagccgagggcgaatgggggagctgatgcaccgttgctgcccctgggtccggcggcagctacatcggcggctccggagcaaggtgggttgcctagaagctcatcaatggctaatgccgccgtggctgcgcacgcgaggcccaactcaatggcggagcgcgcgcggctggcgcggatgccgcatccggagccagcgctcaagtgcccgcgttgcgaatccaccaacaccaagttctgctactacaacaactactccctctcccagccccgccacttctgcaagacgtgccgccgctactggacgcgcggcggatcccttcgcaacgtccccgtaggtggaggctgccgtcgcaacaagcgttcgtccaagtcctcctccgccgggtcttcctcctccaaagatgtctccctcaggaaggctactgggtggtccatcagctacaccgtccaccaccccaggcactaccggtgcgatcattactccgggtctcagctctttctctcaccacttgccgttcttgggctccatgcacccgtcagggcccaacctaggtctagctttctccgccggactgccgctagtcggcatgcagcacctggacacggtggatcagtttccggtggcaagcggcggcggcaccaccatcggtgcatctctagagcagtggagagtgcgacagcagcagcagcagttcccattcatgactaggggaatactggatctgtcgcaaccatcgacgtaccaactgggcttggaagctagccgaggaggcagcggctcagatgcagtggcgttcactttagggcagtccacgaccagtgctgctaccataacggcaaggcaggaagggtcagcaatgaagatgggggacgatagcaaaggacaagacgcgagcttacagaagcagtacacggcacctctacgccacggatcaggatcacacggtgtctgggatgggagtgctggtggcactggcagcaacggtggtggtactggcaatggcggttcaagttggccaatgaacatgattcctggattccattcttcgtccactagcggttgcaatgacagtggcttgtcgtagtactccagctgggggttaggccagtgtcctatcaagaatatgaagatattggagatgcatggttgagtttgagcaaatgctagctatagctaggacgatggaggaacaagagatggtcaatcagccggcctattcatcaactgctgttcctcatcagaactgtaaaaaacactgctctagctcatgatggtcacaggtaggagtttaaagtagaccctttaaagtaaggttgctctttggttaaccctttttctgccatttggttttgaacttaaaggtgttctctgcattgtgtccatagcggtcgccacttttctacttttcacactattgttcacagggattaattaatcaaatttggtgcctggtatactatgtgataaggtatatttgacatggacgaaactgattagttgtttcatc

SEQ ID NO: 982 - DNA, 1231 bp, Zea mays
  unsure (1)..(1231): unsure at all n locations
  Clone ID: TF_ZmC25364_2
atgctgccgtacgcgccggggccgccgccatcgctgctgctagaccggcggtacaagcagggcggcgaggcggcgcccagctgcccgcgctgcgactcgcccaacaccaagttctgctactacaacaactacagcctcagccagccgcgctacttctgcaagggctgccgccgctactggaccaagggcggctccctgcgtaacgtgcccgtcggcggcgggtgccgcaagaaccgccggggcaagtcgtccttgcggtcggcggcggactccatcgcgagctgcggcggcggcggccgcgacgcggcgttcggccaccggttcccgggccctgtccgccccgacctggtcctggaaggcatggtgggtaatcacccgtcgaacccagctggccaggcggcgatgcccggcggcgtgcccgctgcggctgatggctccaccattgatctcgcaatgctgtacgccaagttcctcaaccacccgccggcggtggaaggcgtcggggccgtggcgccggagtcggcagggcaggtcgacgaggcgttcgacgcgtccagtgacctgatgagccctggtgctctggcgccggtgcagttcgatccgtgccagccccaggacgggttcggtgagtggtctggcgtgccagtcagcagcgctggcccctcgagtacggctagtactaccgccgcaaccaccatgctgtgcactgacgtgagcgtgcaagctgcattcggcgagctcaacttcgccatggaccagaactgcttcgactcgctagggttacccacggacgacgtcggcaacctctcgtcgtcgtggtgttcgatcgtgccaggcttgtcgacgttagaggacgccaagtatgacttggattcgttcccagatgacgccctcagccttcacgacgagggcatgattagcgggactgatcatgattggagcgtggattgccaaggattggagactctctacatgccgtaactatacacacgaccaaaattcttcttcttctcttcttgctaatttgttcttgttcttgtgatgattggtttcctacatatttttctctttcttttctttcgntaaattcggtttggaagaaatatatatagagatatatatatatctatggatctatgttttgaagagaggtacgtgagggacaagtcgcgcgctcatgtaattgaattaatgattcggtatacttgtgagatagatcgatgcaatacat

SEQ ID NO: 983 - DNA, 1897 bp, Zea mays
  Clone ID: TF_ZmC914_1
gggtacctcgaggccggccggggccggccgatcccgatcgatccatccatcgatcgcccacgcttccgtccatccagactccagagagataaaatctaattcctggacctggagtgcagaccgatcgccgccgccgccgcgttgtttcttgtgtgcgcagctgtggtgatggtgcggtaaaagaaggctgctccatcgctccaacaaaaaaaaaggtcgagatcgcacgcggcaggcgacaagcagtttccaaagagaagggaagcctagaggaagggagctagagatgggggagggcagagcaggagacggcctcatcaagctgttcgggaagaccatccccgtgccggagacggccgccgtcggcgaggctgccaaggacatccaacaaagcggcggcagcggcagcggcacgactgatccgaaagggcaagagaacaacgttcaggactccacaggctcgcctccgcagcaggaggtcgcggacaccgaagactcgtcggcagacaaacagcagggcgaggcgggcaacccaaaggagaagctcaagaagcccgacaagatcctgccgtgcccgcggtgcaacagcatggacaccaagttctgctactacaacaactacaacatcaaccagccgcgccacttctgcaagaactgccagaggtactggactgccggcggtgccatgcgcaacgtgcccgtgggcgcaggccggcgcaagagcaagagcgcgtcggccacttcccacttcctccagagggtcagggccggtctgcccgtcgacccgctcgtctgcgcggcagccaagactaacggcacggtgctcagcttcggctctgccatgtccagcttagacctcacggagcagatgaaacagctcaaggagaagctcgtcccgatagcgggggacgagcgctcagttgggtctcgcactcaaggaccttctgccaaggcagaagacccggaccggaaggagaatgttacagcagataaatccgcgagagttgttcagcatccatgcatgacgaacggggtggccatgtggccatttagctgcgcgccaccagtaccggcctctgcctgttacggcccaggcagcatcgcaatcccgttctacccggcagctgctgctgctgctgcctactggggttgcatggttccaggagcttggagtggcgcatggccgcctcactccggccagtccgagacgggctcatccattacctccgcctctccagcagcatccaccaagtccaacatctgcttcacgccaggaaagcaccctagagaccgcgacgaggaaggaggcgccaaaggaaatggcaaggtgtgggtgcccaagacgatccggatcgacgacgtggacgaggtggccaggagctctatcctgtcgctaatcgggatcggcggcgacaaggcaggcaaagatggcggcagaggctgcaagctcgcaagggtttttgagcagaacgaagaggcggcaaggacggcaactcctcactcggcagccatcagcggcttgccgttcttgcaggggaacccagctgcgctctcgcggtcactgaccttccaggaggggtcttgagcctctcgctcgattcacagctgagaattttgtacattagagggttgtatgtaatctaatctaggtggggggtggggctcatagctgccagcggacattgaaactatacaatagatagatatttgtagatagccaatatatatgggtcgggggaggaaaaaaaggataatgagagcaagtccccttatttgtatatattataatggattggaatatttggttgccaagtggtcttccagcaatagcgccagatgttctgatccaaaaaaaaaaaaccatcgatttcaatggacaagaggggggggccccggg

SEQ ID NO: 984 - DNA, 359 bp, Zea mays
  Clone ID: TF_LIB3245-209-P1-N1-A3
ccgcccccctactttcaactcgctcgctcgcgcggcttacatcagtcttcggcgggcggcagactgcagcaacccagcgccgaagagcatgcaggaggcgtcatcgacgacggcggcgggggccgagcccggccgtcgggcggcacatcatcagttcgccagcgtggacctacggaggcccaaggggtacccggcgccggcaccggcgccgacgacgggcgagggggacccgtgcccacagagtgcatcacgagacaccaagttctgctactacaacaactacaacacctcccagccgcgccacttctgcaagggctgacgccgctactggaccaagggtggcacgctgagcaacgtcc

SEQ ID NO: 985 - DNA, 638 bp, Zea mays
  Clone ID: TF_ZmC3039_27
ccgggcgaggcgatgaccatctccactccctctcctccctagtagtgtataaaaagccggcgccggccgtcgtcccctacccacccacccaccccgggcccctcctcccgctccatccatggccgccaacctcccggacgccgacgccgcggggttcaagctgttcggcaaggtcatccagccccccgacgcgcaaaaacgcggggcggacgagggcgacgacccgacgccacagacggcccttcctcctcctcctccccctcccccgcccccgcccccgcagcaggcgcccgcggctgggggtcccggcgccgagccgctgccgtgcccgcggtgcggcagccgggagaccaagttctgctacttcaacaactacaacgtgcggcagccgcgccacctctgccgcgcctgccgccgctactggacggccggcggcgcgctccgccgcgtggcctccgcgtccccgggccgccgcaggccgcgccccaccgcccgatcggcgcccgtcgctgccgccgcgtcgtccgcccccgcagccgccgaggaggtgggcgggccgcgttgactcggcggtcgtaggggggcgcggggtagggctccgccttccttcccgcgtgatgccggacggccggaagctt

SEQ ID NO: 986 - DNA, 2125 bp, Zea mays
  Clone ID: TF_ZmC3039_2
aaccaaaatactataattatatcaagagcaaggatattcacgcctcgaccaagatttgtagtaataatgaaacaattagcaatgagactgtttctggatcaaacaccccaatccaaacaaggaatatccatgtctttttgtcttgctgttccacggctacataacagaccgcagtgccatgcaatcccagcttccttcgtttatcttgcaccggcagtgtactgaggtagcgctaatctcggttctagagggaatgtaaataaattacaataactcaaaaaaaaatctgaatacgtggctgcaaagttcaaagacacaaggctttacagttccaccttggttcttgttggacacgtgcatgtaaaagaggaacacgattcagcagttgggagctcacaccttcatgccagcgttcgacaaccaccgcctatcaccgctgaggtttcacaaatggagggtttcggcatgctgctgactaagaaagcaggtatccagtggacgcaacgcgaagatgtgtcttagggcaggccagcagtgttggtgtgttgccaccgtatgcaggagacagcctgtgggcctggtcaggcagggtagcttcattggagagattaacaatgggtacacatcaccagagagggtcagaggtgatcactgatcagccagcggagacggcattggagttggaagttgggaacgcatgagagatggagagacgagagattcaaaacccggtctctgtcatcgtggacactcggatctccatccgacgtcccccgcgctgcctgaagctaaaccatatttcaggcacctgacatagagtgcctctcgaaaggaatagagtgcacgggaaacacaaaacacacacacagatagagactatgcattggctgtagaccaccccagaaataattgattgaatcatcaaatctaaatgaactataatctggaacatagggagtacccgcttcctaagcatccttccgactcaggtttgttgatgaatttcctttccaaatcacgattttcctttctagggacctacagatcacatggccatcagggtaatgttatgctttaaaggtgatggacagatgatattccaggaagaatcacaatagccacagatgtcaaactagtacagatgcacattgagaatgcaattgagaagccagtgtttaggaaaacagagaaaccaaacaaactttgccttgaaacgacattggggactataaatgtaacaaaaattactctactgatgttctgtcgattcagactacacgttgagaggtttgctaagattgtaaaaatgtttataatttcggtcattaaatttatattataacatggtaatagcttttggtgccatatatatttattttccttttctctttcttttctgtttattgtgctcatgtagaagttgcaactctaagctatgctaacttgcttaggactaaaaggctttgtttttttctcaaatggctgttcctaaggtattttttgttggtccaaatattagcatgtaaataaaacaggtatgttatccccaaatccaaagcatgaggaacttattgagtattgatttatctttaacaatgtattactagactttgttgtacatttctaaattatttttctaaacttatagcttgtttgtagctcggaaactgacagtacttcctgttttaccgatagctctggcaaagggaggcagcaagcttgaggcaacaactgcacaacttgcaagaaagccacaagtatgatcttgcaatggattctaagataatgtgagaaactcttttccaatgttgtaggcaactaatgggagaggagctttcaggcctaggtgtaagagacctccaaagtttagagaatcagattggaatgagcttgtgactttcttgcaagtaatgcagttcctgcctcatgcttggtgccaccatatgcaatacaccaatggcttcgcatcctcccgcaatttccttccccgccctagccaatgagcaaggggctgtgtggtcatggcccggatgcgccggcctttataacgggcgcgtcgaagtgtctagaaggatcgtatccgcgagtctactaccaagtcgccaacaagtgcccgggccggctc

SEQ ID NO: 987 - DNA, 1537 bp, Zea mays
  Clone ID: TF_ZmC3039_11
aagaagtcaggcgcacgaagcaaaaagcgacaagagctgggaggcgatgaccatctccacttcctcgacctcgagtccttgacccgtgtataaaagccggagccggccggcgtcccccctacccacccggagccccgcctccgcctcccgctcctccactccacccccacccatggccaacctcccagacgccgacgccgcggggttcaagctcttcggcaaggtcatccagccccccgacgcgcagcgcgccgcgggcgatggcgatggcgctggcgcccctccgccgtcgccgccggtccttcctcctcctcctcctcctcccccgcccccgccgcagcctctgcccctgcagcaggcggccggggccgggggcaccggcggcgagccgctgccgtgcccgcggtgcggcagccgggagactagggatgaaaacggtcggaaacggtatttattcggtaatcagttttttagtcgtttgcgaataaatagaatatataatatacaatacaaatttgtattcttgtttttaacatccagcttgttaagattcataaaaggtaaacctcaaattcattctatattttctcaaataatagatataaacttcggtatggattcggaaacaaattcggtaaatttttcaactttttgtgttgtagggagcaaataatacataaaacaatttatgtaatattttattcatatttttactaatgtgcttgataacataagaaaagatcaacatcaaattttatacatatctattttaaaatattaaatttgttctaacagtttggattaccactttcatccctacgggagaccaagttctgctacttcaacaactacaacgtgcggcagccgcgccacctctgccgcgcctgccgccgctactggacggccggcggcgcgctccgccgcgtggcctccgcgtccccgggccgccgcaggccgcgcccgaacgcccgatcggccgccgccgccgcggcgccgtccgcctccgcagccgccagggaggtgggcggggagcgttgactcgtcggcggtcgtaggggcggcgggtggccaggtgtgctccgcacgcttcgcttcgcttcgcacggggccgggggcttccttcccgcgtgacgccgtgacgtgatgccgcgcgcccgggccccaagcctcagtgacgggccggccggttcgcggtggggaccccgcgcctcgtcgcccttttcacacctactggtcctctccttttggtttgttagattctgttttctatataccattttaggattcttttggtggccaaaaaagatgctgccggcctgctgcgcttgcgagcgagagttcagttcggtaggccagtcaaaaagtggtagtcgtactagagcagtagtagtagactggtagtgctgctgctgaatgctgatgcaaaattcggcagcggtgaattggtgcctggggtcggtcaggtcaggtggcagatttcagccatggtttgttggaaaggaaggaaatcaatcatcctcttggttcacgtgatctc

SEQ ID NO: 988 - DNA, 1498 bp, Zea mays
  Clone ID: TF_ZmC12646_1
cattgggtacctcgaggccggccgggagggcaaggaaagtgtggtttccaagtcctcacctcacacactctcttcttctctccttcgttctccctcgcaaagtcagggtcactgaaaggagcggaagagcccaagtagttcttcgccaccggtaccgccgcatcgatcatcatggtgttctcctcgctcccgatcttcctagaccctcccaattggggccagatgcagatgcagatgcagccaccgctccagtgtctcctcggcagcggcggtggcagcgaccaccaccacctcatgcctcctccgtccggcctggcgccgctgccgggaggtcctgctgacacagcggcgagcgctccggcgggaggcgtctcgtccacctcggtctcggtgcaagccgcggcgggagcgggggcaggggcgcagcctcgcccggtggtgtcgatggcggagcgcgcccggctcgcgcgcgtgccgctgccggagcccggcacgctccgatgcccgcgctgtgactcgaccaacaccaagttctgctacttcaataactactcgctgtcgcagccgcgccacttctgcaaggcgtgccgccgctactggacccgtggcggcgcgctccgcaacgtgcccgtcggcggcgggtgcaggcgcaacaccaagcgctccagcaagaagtcgtcccgcggcggcggcgcgggcgccacggcggccacctcctcgtcctcgaccacctccacctccaccacggccaccaccaccaccaccacgagcgcggccatggcggcggccgaggccatcgccggcatgcaggcgcagctgccccacctcggcctcccgcccgcagcagccgccgcggcgcttgaggcctcgctggagggctaccaccactacctcccgctccagatgcagccgcagttcctgcagcaggctggcctgcacggctaccatttcgccgacgacggcaccggcgtcctcgcagctgacgggttcccgaggggcgtcgtcgcctcggggctgctcgcgcagctcgcggcggtgaagatggaggagcacggcagcaacggcggaggtgccatcgcggcgcatcatgagcagcagtcctactggcccggcagcaccggcggtggcggtgggtggccggtggagttcttgtcggggttcagctcatcctcgtcggggaatgtgttgtgagttgcatgtggccgcgaccaggtccacctgggcatgcatgatggggggcatgcatgcatggatgctgatgaagctgaactagctcaccatcctcaattagttctagggtttatgtggtgtttggaacttaattggcgtcgtcttcttcaattaggctggtgatgatcttgtgttggggtaaggtttttacatgtttttttttcttatgagttttaagctggttaatgtcgtgcagttggtagttttgcatgtagtgggaagtgcatgtgttgactcatggaggttatatgtgtcaggttacttaact

SEQ ID NO: 989 - DNA, 669 bp, Zea mays
  Clone ID: TF_LIB3116-015-H12_FLI
gctctagccacgcccacgctcccgcctccccggcaaacacactcacgcccgccgaggccacatcctagcacgttgtagacgccgccaccgccaccgcctgacgccatgcaggagttccagtccatccctggcctggccgggcggctgttcggcggggccgcggcacccggcgacctccggcgcgcgcaggcggcgcagcatggccccggcggggcgcgatgcggcggtgcctcgcccgcggcgcccgaggcggtgaagtgcccgcggtgcgagtctaccaacaccaagttctgctactacaacaactacaacctgtcgcagccgcgccacttctgcaagagctgccgccggtactggaccaagggcggcgtcctgcgcaacgtccccgtgggcggcggctgccgcaaggcgaagcgcgcctcgccgtcggcgtcggcgtcggcgtcctcgcccgcctcgtcgtcggcgccgtccacgcccgcgtcggccgacgcggccaagaacccgcgccgcgcctcggcctcgccccgctccaacagcggcagcgcgagccccacggccgccgccgcgacgaccccgaccccgaccgatccgagcacctccgccacgccgtcgtcgaacggcgtcgccttcacgggcagccaccactcgtcgaaccccttctccacg

SEQ ID NO: 990 - DNA, 1605 bp, Zea mays
  Clone ID: TF_ZmC1430_11
ccggccgggaggcgtcgccaactccagttgtcagatcttgcccgtatggtatggagctcgccggagcagcctcccctcacccgccgccggaatcccacgtggcgccgccccgcccacctccgcagccgccggaagaggatgtatgtgaagatagagggaacatgagtgtcaccggcgaaaagccatgcacacatcgggaatcagatgttggtcagacaaatagttgtagccttaacaattccagtgagtgtgagaatcatacacccagcaacgacgaaatatcggaaccagagtccaatttggagatggccaagactgagggcggcgatgtgccgagcggagagaaggtcctgaagaagccagacaagatcctgccgtgccctcgctgcaacagcatggacacgaagttctgctactacaacaactacaacatcaagcagccaaggcatttctgcaagagctgtcagaggtactggaccgcaggcggaagcatgagaaacatccccgttggtgctgggaggcgcaagagcaagagctccagcgcgagttgccgcagcgtgttgattcccgttccaggcagcagcagtgtagctaatcctggcggagaggcttccctgtttccgttgtccgtaaaagcaaaccaagcagcagttagcttcgggcctgattcccccctctgcacctccatggcctccgtgctgaagatcggaggaggaggagagcaggttaagagctgcagccctgcctcagcagcagcacagcccaggaacggagaaacccagacccagacgtgcgcaccttcttctgctgctacaacaccatcagatggtccagggaatggatcgcagaaaggagcagagagcgcacaccaaaaccaaaaccaaaaccaaaacggaatcattgggcacagcaacggagtcactccagtgcatcctataccgttcttccccggaccgcctttcgtgtacccctggagtccagcatggaacggcattcccgccatgggcagcggcggggtgcgcagccccagcgacaaacggcgcagcgatttcatcagacgggaggacctcgagcagcggaggacaacggatgcacaaactggcgacggaccatctgaaagttccgcagaagttggtttgttttgtgcacatccttatcaacgattggcagaaacatgtcgcaggatactgctgaacatcacgttggctcaaagcaataatgatgtaacgaacacacttccttctttgaaaaatgcacaggaaattgcacagaagacgatatgatgcagcggtccatttgacaactgacatattcttcatcagtgtgaagggaacttatcaggtatcatgtacctttttttgctacggaggatccctaatggtggtaagcattttgctggagccgtttgtgtaacccatactctgccaggatagcgtggttaagcattttggtcacaactcaaagcagtgccagtgtgtagttggagtgaactccgtgatatatactggagtacttagtatgtaactctatattccgttcattaatttatctagaactcgtttcgttgatgtaaatgcagagaagggatgcgtttattttttttat

SEQ ID NO: 991 - DNA, 892 bp, Zea mays
  Clone ID: TF_ZmC1430_18
cattgggtacctcgaggccggccggggtcgccaactccacttgtcagatcttgcccgtatggtatggagctcgccggagcagcctcccctcacccgccgccggaatcccacgtggcgccgccccgcccacctccgcagccgccggaagaggatgtatgtgaagatagaggggacatgagtgtcaccggcgaaaaggcatgcacacatcgggaatcagatgttggtcagacaaatagttgtagccttaacaattccagtgagtgtgagaatcatacagccagcaacgacgaaatatcggaaccagagtccaatttggagatggccaagactgagggcggcgatgcgccgagcggagagaatgtcctgaagaagccagacaagatcctgccgtgccctcgctgcaacagcatggacaccaagttctgctactacaacaactacaacatcaagcagccaaggcatttctgcaagagctgtcagaggtactggaccgcaggcggaagcatgagaaacatccccgttggtgctgggaggcgcaagagcaagagctccagcgcgagttgccgcagcgtgttgattcccgttccaggcagcagtagtgtagctaatcctggcggagaggcttccctgtttccgttgtccgtaaaagcaaaccaaacatgccatatatgttctgtacaatatgattggcaacataggtgctgctgctgtacaaggcagcgggcaccgttactgtaactgtaaccattggaagagtgcatcctcaaacagtgtgttgtttccatgtagagcgtgcccccaacatgttgggttggaggtgatcaggttttccagcgcgtgcgtgcttggttgtacaagaataactgtcaatagcttcccttcgcttccctcg

SEQ ID NO: 992 - DNA, 2103 bp, Zea mays
  Clone ID: TF_ZmC1430_2
cattgggtacctcgaggccggccgcattgggggcctcgaggccggccgggaggcgtcgccaactccacttgtcagatcttgcccgtatggtatggagctcgccggagcagcctcccctcacccgccgccggaatcccacgtggcgccgccccgcccacctccgcagccgccggaagaggatttatgtgaagatagaggggacatgagtgtcaccggcgaaaagccatgcacacatcgggaatcagatgttggtcagacaaatagttgtagccttaacaattccagtgagtgtgagaatcatacacccagcaacgacgaaatatcggaaccagagtccaatttggagatggccaagactgatcagggcggcgatgtgccgagcggagagaaggtcctgaagaagccagacaagatcctgccgtgccctcgctgcaacagcatggacacgaagttctgctactacaacaactacaacatcaagcagccaaggcatttctgcaagagctgtcagaggtactggaccgcaggcggaagcatgagaaacatccccgttggtgctgggaggcgcaagagcaagagctccagcgcgagttgccgcagcgtgttgattcccgttccaggcagcagcagtgtagctaatcctggcggagaggcttccctgtttccgttgtccgtaaaagcaaaccaagcagcagttagcttcgggcctgattccccgctctgcacctccatggcctccgtgctgaagatcggaggaggaggagagcaggttaagagctgcagccctgcctcagcagcagcacagcccaggaacggagaaacccagacccagacgtgcgcaccttcttctgctgctacaacaccatcagatggtccagggaatggattgcagaaaggagcagagagcgcacaccaaaaccaaaaccaaaaccaaaacggaatcattgggcacagcaacggagtcactccagtgcatcctataccgttcttccccggaccgcctttcgtgtacccctggagtccagcatggaacggcattcccgccatggcagcggcggtgtgcgcagccccagcgacagccgaagcagcgatttcatcagaacacggcaccgcgagcagcaccgtccagtggaacgtgccaccagcgatcgtgcccgtgctgccaccgggattctgcggcccgatcccagtcccggtaatcccgccgccttccgtctggccactgatcactccctggcccaacgcagcatggagcgcgccgtggctcgggcctagcgctagcgtgccgccggggtcatctcggagcagcggcagcagcacgtgctccgacagcggctgcggctccggctcccccgtcctgggaaagcactcgagggagtcgaggccgcagggcgacgagaaggcggaacgacggtgcctgtggatccccaagacgctccggatcgacgaccctgtcgaggccgccaagagctcgatctggacgacgctcgggatcgagcctggcgaccggggcatgttcaggccgttccagtcgaagcatggacggcagcaggagctgcaagcgtccggcgccgctcgcgccctgcaggccaacccggcggctctgtcgcgctcgcagtcttttcaggagacgacgtgattactacactacagagcagagcgttgctgaaacctgtgtggcattactattcagagacgattgtatttcaacttcaaggggggaaatgagagagagagcgcgagagagagattggcctgtttggttcactacctcagttgccacactttgcctaacttttctgactaaggttagttattcaattcgaacgactaacattaggcaaagtgtggcatatttagtcataaaccaaacatgccatatatgttctgtacaatatgattggcaacataggtgctgctgctgtacaaggcagcggacaccgttactgtaactgtaaccattggaagagtgcatcctcaaacagtgtgttgtttccatgtagagcgtgcccccaacatgttgggttggaggtgatcaggtttccagcgcgtgcgtgcttggttgtacaagaataactgtcaatagcttcccttcgcttccct

SEQ ID NO: 993 - DNA, 1776 bp, Zea mays
  Clone ID: TF_ZmC8284_3
ttgcttcattccattccattccaatacccatctccccgccggcctttcccctcccgcgtgccgatctgcctccggaggctagctcgaccggccgatctagctcgcgtgccgccgctttcagctcgatcagctgccgcacgtcgtccaccgacccgccgtcctgtgagcgcgatcgacagattactaagatggctggcgcggggtgtgcgacagctgtgcagcggccggcggcggcgggggcgccggctgctgtggcaaggaccggggtcggggcaggcggcgcggtcgccgacccgcgcgcggaggcgctgcggtgcccgcgctgcgactcggccaacaccaagttctgctactacaacaactactcgctgtcgcagccgcgccacttctgcaaggcgtgcaagcgctactggacgcgcgggggcacgctccgcaacgtccccgtcggcgggggctgccgcaagaacaagcgctcctccaggggcagcggcggcgggaggaacgggtccttctcctcctcggcggattcgacggcgctgcccctcccgccgcctccgacgacgacggggtccctgccgtcgtcgctggggctgcctgggggcgcctcgctcctcctcggctccgctctccctggcggtgccggtgaccaccaccacctcggcctcttccaggcggccatgcagtcggtggtttcctccgacgcgaccgcctacgacgagatgcagcagacgcagctggaccacctgctgggcctcggctacggaggcgccggcgcgcagatccagctcaagccgtggatgcaggaggccgccggggctggcggcgcggccgggatcatggacagcttctacgcgccgctgctgtccagctccctcgtgccggggctggaggagctgcacgtcaaggcggaggccgccggcgccggggatcaccagcagaagccgtcatccagggaccagcagagcgccagctgggactgggagctgccgacgccgtcgtcgtccaacgtcgacgccaacgtcacggcgtctgacgcgctcatggccgccgccgccgccgctgccgccgcgtccatgaaccccgctgttagtgttagctccacgccctccgcggcaccaaccgccccctcctcgttcttatactggggcaacggcggcattggcggcgctgccgcggcctggccagacctcgccaactgcggatcctccattgccacgctcttctagcccaagccgccctggctgtcctgctggcctcgttaacttcgtttttttaccttaatttctggttaattttttcttgactgaaataacatgtaatttgcggggaaaagaaaactgagatgagagagggagaacgcgctgtgaaagaagagagctagaccatctcaccacctcatagggcagaaacttagacaaatcaaacaaatgatccaatccaatatttcaagagaattccttcgccgcgactatgatcttcatgggatctacggtcttggccgtcaagcgatgatcaaggccggccgtccacaactggcatgcatggatttaggaggaggaggaggagatcctgagaccatggcgagctagagatcgatcgagactcgagagcaaagaaggcaagaagttgtaagtgccgtgctgccctgacactactccttgatttgctactttcttggctagcttctccgatccttgggtgttttgtacatagggcatatggtgtggggggtaatacaatatatataaggcggtggcccatgtgagatcatggtgc

SEQ ID NO: 994 - DNA, 963 bp, Zea mays
  Clone ID: TF_ZmC8284_4
ccccgcgtccgcggccgctgggcggctataaactaggttagacgtcgagcgaccggccccttgcttctctcccccggcccgcccgcccgcccgctcgctcgccgctggatcagtttcgtggcgctttggagcagcgaagtggttgctgtgcttggtatttctagtgcgtagtatcgccatcagcgctcaataatactactcctcttcctctatgctgcacgccccggcccctttgttttgtagctcttgtcagcgaaccttccccctgaaaaccccacccacccttcctctccgatcctcctagtagcgcctcacttgcttcattccgatccattccaccacccatctccctcctcagctcccctctccgctctccctccctcgctcgcgctctccacgcggatcaccggaggctagctagcaagctcgaccggcgcggccgatctagctcgcgcttgttggccgcttcagcttagcagcggcggcacgtcgtcaacctgtgctgtgagaaagactagtagagagagatacgtgtaaggatggctggcgcggggggtgcgacggctgtgaagcagccggcggcgggggcgcccgacgctggggccagcaggagcggggtcggggctggcgccgccggggcgccggtcgccgacccgcgcgccgaggcgctgcggtgcccgcgctgcgactcggccaacaccaagttctgctactacaacaactactcgctgtcgcagccgcggcacttctgcaaggcgtgcaagcgctactggacgcgcgggggcacgctccgcaacgtccccgtcggcgggggctgccgcaagaacaagcgctccaggagcagcggcgggcccggcgccggcgggaggaacgggtcctccgctgctgctgctgctgccgccgccgccgtcgtcgtgacgttctcctcggtgcctgtgacgctggccctgccgctgtatacgg

SEQ ID NO: 995 - DNA, 1268 bp, Zea mays
  Clone ID: TF_ZmC752_1
atctatctctttaccccttcttcccagcgacaagagaaaggattagaaaaaggaaagatccatggacatgatctccggcagcactgcagcaacatcaacaccccacaacaaccaacaggcggtgatgttgtcatcccccattataaaggaggaagctagggacccaaagcagacacgagccatgccccaaataggtggcagtggggagcgtaagccgaggccgcaactacctgaggcgctcaagtgcccacgctgcgactccaacaacaccaagttttgctactacaacaattatagcatgtcacaaccacgctacttttgcaaggcttgccgccgctattggacacatggtggtaccctccgcaatgtccccattggtggtgggtgtcgcaagaacaaacatgcctctagatttgtcttgggctctcacacctcatcgtcctcatctgctacctatgcaccattatcccctagcaccaacgctagctctagcaatatgagcatcaacaaacatatgatgatggtgcctaacatgacgatgcctaccccaacgacaatgggcttattccctaatgtgctcccaacacttatgccgacaggtggaggcgggggctttgacttcactatggacaaccaacatagatcattgtccttcacaccaatgtctctacctagccaggggccagtgcctatgctggctgcaggagggagtgaggcaacaccgtctttcctagagatgctgagaggagggatttttcatggtagtagtagctataacacaagtctcacgatgagtggtggcaacaatggaatggacaagccattttcgctgccatcatatggtgcaatgtgcacaaatgggttgagtggctcaaccactaatgatgccagacaactggtggggcctcagcaggataacaaggccatcatgaagagcagtaataacaacaatggtgtatcattgttgaacctctactggaacaagcacaacaacaacaacaacaacaacaacaacaacaacaacaacaacaacaacaagggacaataaggttagtgtgccagaccgtggaagcgttgctgctataaataatgcaattgggtagtagtacccagtgaaatcaggagagactagtagcctagggtgcattttgatttatttagttttggtcaagatgacaagtcatcatgaatcaccctttttattcatttgcatgttttgatgagagttcatttgcagtaagctatatatcattggataattaaaccaa

SEQ ID NO: 996 - DNA, 1288 bp, Zea mays
  Clone ID: TF_ZmC604766_1
ataccatggtcttttcttcggttcctgtctaccttgatccacccaattggagccagcaccaccaccagccgcagcagcagcagcagcaacagcacgctcaacatggccagacttccaagtggcggcaacggcggcggcggcggcggcatggacacgcatgcgcatcatcatcatcatcagctgccgccagtgccacctcctcctagcggggctctcatggctcctcgccctgacatgtcggctatggtcgcctgctgcgagcggtggtggcgggccgactagcggcggcaccgctatccgtccgggctccatgaccgagcgggccaagctcgccaagatcccgcagccggagccggggctcaagtgcccgcgctgcgagtccaccaacaccaagttctgctacttcaacaactactcgctctcccagccgcgccacttctgcaagacgtgccgccggtactggacgcgcggcggcgcgctccggaacgtccccgtgggcggcgggtgccgccgtaacaagcgcaccaagtcgtccaagtccaactcgtcatcggccgccgcctctgcttcaggcggcgcgggcgggacgtcgtcgtccacctcgtccaccgctaccggcggcagcagcagcgcgggcgccatcatgccgtctcatcaggggcagctgcagccgttcctggcctcgttgcaccaccctcttgccggcggcggcggcggcggggatcactacagcaccggcgcgtcaaggttagggttcccaggactgagctcgctggaccccatggactaccaccagttcggcgcgggcgcgggcgccggcgccagcagcgctgccatcgggctagagcagtggcgtctgccgcatatacagcagttccccttcctaagcggccgccccgaccccgtgcaaccaacaatgtctagcatttacccgttcgacttggaagggcacggcggggacgctcccggcttccccggcgggcacatgctaggtgcctccaaggtgcccggctcagccggactaatcacgcagctggcatcggttaagatggaggacaacccagcgtctgcggcgatggcgagcagctcgccgagggagttccttagcctccctgggaacctccaattctggggcggcggcggcaacaacaacggcggtgcaagtggcaacaatggaggaggcgctggcaacggcggtggtggtggcggcggtggcgctgtcgctccgggcagcagctgggtggacctgtcaggattcaactcgtcttcgtctgggaacgtcctgtga

SEQ ID NO: 997 - DNA, 1369 bp, Zea mays
  Clone ID: TF_ZmC25364_1
caacattctcggcgaatcctccgtcccagctcgctccagcctccatccaagctcccgcgcgcgcgcgtggtggtctcgatcgctaccatgctgtcttcgcaccacgaggccatgctgccgtacgcgccgccgccgccgccgccgtcgctgctggtggaccgtcggtacaggcagctgcaacaagccggagaggcggcgcccagctgcccgcgctgcgactcgcccaacaccaagttctgctactacaacaactacagcctcacccagccgcgctacttctgcaagggctgccgccggtactggaccaggggcggctccctccgcaacgtgcccgtcggcggcgggtgccggaggaaccgccgggccaagtcgtccttgcggtcggcggtcggcggcggcggcggcggccaccggttcccgggccccgtcgtccggcccgacctggtcctggaaggcatggtgtcgaacccagcccaggagatgcccggcgtgcccgccgctgccgacggctccaccattgatctcgcgatgctgtacgccaagtttctcgatcaccaccctccggcggaggaaggcctcggtagtgccgtgacgccggagctggcggtggcactggctgggccagggcgggtcgacgaggcattattcgacacgttcagcgacctgagcccaccagctggcgttctggcggcgccgccggtgcagttcgatccgccgtgcggccacgacgacgggttcgacgactggtcatccggcgcgccagtgcgcagcgccgggccctcgagtacggccagtactgccaccgcaaccaccaccatgccgccgtgcgccgacgtgagcgtgcacgctgcgttcggcgaggagttcaacttcgccaaggaccagagctgcctattattcgactcgctagggctgcccacggacgacgtcggcgacctctcttcgtcgtcgtggcgttcgatcgtgccgggcttgtcgacgctggaggacaccgagtatgacctgctggactcgtcgttccctgacgacgccctcagccttcacgagggcatggttagcgggactgatcatgactgctggagcgtggtggattgccaaggattggaggctctctaatccgccggtggtgttcttgtgatgattggtttcctacatttatttttctccttttcttttctttcattcaattcggtttggaagaaatatatatagagatacgtatgttttggaagagaggtactacgtgagggacaagtcgctcatgtaattaaattaaggaattcggtatacctgtgagatagatcgaggcaatacaataatgaaagcttgggaatactagtcgctataagtatctcatgcatgagacatg

SEQ ID NO: 998 - DNA, 567 bp, Zea mays
  Clone ID: TF_LIB4738-118-A1-K1-G10
tgggacctcgagccggccgggagactaccagacctagctacgattctctcctcccagtgatctagtccttactccataacatgacctatatcactagatagtactctcgggcgaatcgccggactcttatgaaagcggcgtcgatcctcctcggcaagcgcggctctgctcgcgtgctagatgctgcctggactttccatcctgtcggccagctccttcgcctccgccaagtggccacacacatttcgacattgatgagctccagcacgacgactcactccgcttgcaccaccaggcaggctgcatgacgcatgagctcgagcgcaagggccagctaacgcgcggcagcagcagctggagtgcccgcgctgccacaccaacatgaccaagttctggtactacaacaactacagcacggcgcagccgcgccacttctgccgcgcgtgccgccgctactggacgcacgggggcacgctgcgcgacgtccccgtcggcggcgcctcgcaccgcgccgccactggcagggtaggcaagcggcgcaggaagctccgccgagacctcataccc

SEQ ID NO: 999 - DNA, 1537 bp, Zea mays
  Clone ID: TF_ZmC604766_2
ttcttgtggtccatccggcggttcgggaataccttgatttgctttcgcgcgtcctcctcgcgatcccatcttttttcttcccttacctttagtttctcctcctcctctctccgggtggcagacccggccttctctccgccctcttcgtcttccagttcgaagctgtagcggcagctagagctagccacgtgtagagcggcacgactgcagcgtgcgaagaacaaacaaaaccaggaaaagaagctctcactcactcacaagtagcaaaagatcaaagggaaatcaatcatataccatggtattttcttcggttcctgtgtaccttgatccacccaattggaaccagcatcagcaccagccacagcatgagcaacagcaagctcaccatggccagcttccaagtgacgccagaggaggtggaggcggtggcgtcgacgcgcatgcacaccatcatcagctaccgccgatgccaccttctgctcctggtggggctctcatggctcctcgccctgacatggcggctgtggtcgccgcgagcggtggcagcacgagcggcggcggtgggccgactggcggtggttcccctatccgtccgggctccatgaccgagcgggctaggctcgccaagatcccgcagccagagccggggctcaagtgcccgcgttgcgagtccaccaacaccaagttttgctacttcaacaactactcgctctcccagccgcgccacttctgcaagacgtgtcgccggtactggacgcgcggcggcacgctccggaacgtccccgttggcggcgggtgccgccgcaacaagcgcaccaagtcgtccaagtccaactcgtcgtcagccgcctccgcttccagcgcgggtgggacgtcgtcgtccacctcgtccaccgcgaccggtggcagcggcagcgccgccagcatcatgccgcctcaccaggggcacgggggacagccgcagttcctagcctcgttgcaccaccctctcgtcggcggggaccactacagcaccggcgcgtcaagattagggttccccgggctgagctcgctggaccccatggactaccaccagttcggcgccggtgccggaggtgccatcgggctggagcagtggcgcctaccgcagatacaacagttcccattcctaagcagccgccccgacgccgtgcaaccgccaatgtctggcatttacccgttcgaagtggaaggccacggcggggaaggttccggcttcgctggtcacatgcttggtgaccccaaggtgtccggctcagccggactgatcacgcagctggcgtcagtgaagatggaggacaacccaacgtccgcagcgatggcaagcagctcaccgagggagttccttggtctccctaggaacctccaattatggggcgctagcggcaacggcggtgcaagtggcaacaatggaggaggcaccggcaacgctgccggtggcggcgacactattcctccgggtagcagctgggtagacctgtcaggattcaactcgtcttcgtccgggaacgtgctgtga

SEQ ID NO: 1000 - DNA, 720 bp, Zea mays
  Clone ID: TF_LIB3078-017-G3_FLI
ctccttcgccttcgctagctgattcccgtcaccatcaagcctcagctccccggcctcccactatctccgcgtcgccgtcccagccacagtcccacgcgcccagcaccatccatccgtccgcaagggggaaagcacgctagctgagctgagctgctgagagagagagagaggcaaaccctagcacgcacaagcacagcaacgtatacgcttccccccgccgattcatccatccatcgcagcgcgcaccgggcgggcgggccgggacgacgacagctaagctagcacatcgcaatagcatagcatctatctccgccgcagtacccaccaccaccaccaccatgatcttcccccctgccttcctgcaggattcctcgagctggaacgataaccagcagcagcagcaccaccagcagcagcaaggccacggccacctgctggttgccgtcagcggcagcggcgacgccaatcatgagctcctccagcaaccaatcatggggggagcgcttcccgatggaggaggaggaggtggtggcggggggcaggttgggggccccgccaagcccatgtccatggcggagcgcgcgcgcctcgcgaggatcccgctgccggagccggggctcaagtgcccgcgctgcgactcaaccaacaccaagttctgctacttcaacaactactccctcacccagccgcgccacttctgccgggcctgccgccgctact

SEQ ID NO: 1001 - DNA, 1046 bp, Zea mays
  Clone ID: TF_ZmC3039_32
cctgcaggctccggtgcggaactcccgggccgcctccgcctcccgctcctccactccacccccacccatggccaacctcccagacgccgacgccgcggggttcaagctcttcggcaaggtcatccagccccccgacgcgcagcgcgccgcgggcgatggcgatggcgctggcgcccctccgccgtcgccgccggtccttcctcctcctcctcctcctcccccgcccccgccgcagcctctgcccctgcagcaggcggccggggccgggggcaccggcggcgagccgctgccgtgcccgcggtgcggcagccgggagactagggatgaaaacggtcggaaacggtatttattcgtttggattaccactttcatccctacgggagaccaagttctgctacttcaacaactacaacgtgcggcagccgcgccacctctgccgcgcctgccgccgctactggacctctcgcggcgcgctccgccgcgctgtcgatgcgtctcctgtccgtagtcttaatggttgcagcgccgcataccgaatcattagacttgttccaaatattgagaattttcgcacggcattaggatgtctgcagtgctgggcaaacagtcgtagggtttactctaatgttactggctttcttggtggtgtcaactgggctttactggttgcacgtgtctgccagctttatcccaatgctgtgccaagtatgcttgtctcacggttttttagagtttttacacaatggcagtggccaaacccggttatgctttgttccatagaagaggatgaacttggcttccccgtttgggatccacgtaaaaatcctcgagataaatgtcatcacatgcctattataacccctgcatacccgtgcatgaactcgagctataatgtttccacaagcacgctgagggtcatggtggaacagttccaatttggtaataaaatttgccaggtaatctttgcaccattgaagttactatttcaaaaatacttaccctgacaatgcattgtatgccttctgggtcaggaaattgaaatgaat

SEQ ID NO: 1002 - DNA, 1772 bp, Zea mays
  unsure (1)..(1772): unsure at all n locations
  Clone ID: TF_ZmC1430_6
aggcgtcgccaactccacttgtcagatcttgcccctatggtatggagctcgccggagcagcctcccctcacccgccgccggaatcccacgtggcgccgccccgcccacctccgcagccgccggaagaggatgtatgtgaagatagagggaacatgagtgtcaccggcgaaaagccatgcacacatcgggaatcagatgttggtcagacaaatagttgtagccttaacaattccagcgagtgtgagaatcatacacccagcaacgacgaaatatcggaaccagagtccaatttggagatggccaagactgatcagggcggcgatgtgccgagcggagagaaggtcctgaagaggccagacaagatcctgccgtgccctcgctgcaacagcatggacacgaagttctgctactacaacaactacaacatcaagcagccaaggcatttctgcaagagctgtcagaggtactggaccgcaggcggaagcatgagaaacatccccgttggtgctgggaggcgcaagagcaagagctccagcgcgagttgccgcagcgtgttgattcccgttccaggcagcagcagtgtagctaatcctgggggagaggcttccctgtttccgttgtccgtaaaagcaaaccaagcagcagttagcttcgggcctgattcccccctctgcacctccatggcttccgtgctgaagatcggaggaggaggagagcaggttaagagctgcagccctgcctcagcagcagcagcagcacagcccaggaacggagaaacccagacccagacgtgcgcaccttcttcctttcagacaccaccatcagatgggacacaagtaggatcggaactgcggcctgtatgcgtgccactcatacagaaagtaaaggcagtatagcccagccaatctttggtgcagtgaactttgagaagtcaaataaccaatacaatgcagaaagagggactgcatgaataaacccgagtttgtcttaggcctgccttcatagatataagaaaatttcttgcccatccatactcgtttgaattcaaagagtgacgtacagttctccttggaataatcagctatcagctcatcaatatccagcttgaacagatcaatatctatatttaaaggcatggccaagcctcaaactgatcttattgatgaggaacttgtggagcttcttgcacgatccgcacaaggccctccaccgttgacatgaggatggcagcctggagcagcaacatcgcgaggagctctaggacgacgacgcgagttccatggtcacgatcttcagcaacagagggcagaaccagcaacgaccggtgatgagggcctgtccatgcttcagatcaagccggcggattggcgcttctctgtgcctctgtcgccggccacagaacgggtggaatcagtgacggagccacacaaaaattataggtggagcgagttctaacgccgctcgcaagtcgcaactccaggctccagctagccaccgactgaccgccagccacgggttgctcctgctcactccgcgccgaccgcgcactcgcgtggccgcttgctgactacacggccccaggggcggggccgctgagggatgaggcgccgggccgctggttcggctgctcctcgcgtaactcgggcctcaggcctccgggctttggcagtccggcgggtggcgggtggcgggcgaaggacggcggagcgagcaggacggggtcgggactcgggagggtagggtcccggcccgacctactncgaggtacccaa

SEQ ID NO: 1003 - DNA, 545 bp, Zea mays
  Clone ID: TF_LIB4315-019-R1-K1-G5
ccgcccccggccgcagacgcttcccacggcttcgggaacccctccctggccgttctggcttcggcccccaccaacgaaacgccccacggccaatggccaggggaatggactcctctggggccgttcgttccccgttggccgccctttccccgggccgttggaacctcccgcccccccccagaggccacccccgtggcggtttcccaagaagaggagatgcccgcgccgggccgcgacccgtgccccgcggtgcgggtcgcgggacccccaagtttcttgcttcttccaccacttcaacacgtcgcagccccgccacttgtgcaagtcgtgccgccccttctggacccaaggcgggtccctccgcaacgtccccgtcgggggcggcacgcgcaagaacagcagcagcagcagctcctcatcatcctcggcgacgacgacgtcaacctcgcccggcgccgcgcccaaggccacgaagcggtcgaagaactccaagcgccgccgcgtcgcgcctgccccggaccccgccgcgcccggcaacggacgcc

SEQ ID NO: 1004 - DNA, 734 bp, Zea mays
  unsure (1)..(734): unsure at all n locations
  Clone ID: TF_21216762
ggctgcgcattctttctccagctctctgataagctagccagcgtcgcgcggtcttgttgttagttattagctctatctcgccgccctgcagctgctgatcgagtgagggaattnnnnnnnnnnnnnnnnnnnnnnnnnnnnntagatatgacggcggcggaggtggaggccgccaaggacatcgccgaggagaaggccgtcgtgccgttgccaccgtcgcccgccaagccggccgacgacgactccaaggccatcgtcgctcttgtcgtcaaggatgcttacctcgccaagatcgtgtccgagaagaggctgagtctgatcaccgcctgggaggagagccagaaggcgagagccgacaacaggagcaactgcagaagaagaaggcggcgtacgaggagaagctcaagaacaagctggcgatgctgcnnnnnnnnnnnnnnnnnnnnnnnnnnnnnncggaggccaggcccggcgaggagaccatcctggcggaggagatggccgccaagtaccgagccaagggcgagggccccaccaagctctttggcctcttgaaagcgtgacctctgctatggagaatgccctgtttcgtgcgtgtattaatttcgtattctcaacaagtgcactnnnnnnnnnnnnnnnnnnnnnnnnnnnnnnnnntattccaaggctgcttgacaatatctgttgtattgtattagtataggagaacagtgcagtgcagtgcgacgcgg

SEQ ID NO: 1005 - DNA, 706 bp, Zea mays
  Clone ID: TF_ZmC1128497_1
aataaatccatcataagagaaaaatagagaccacatatttgtcatcgttcaggtagaagaatgagaagcaccatgttgaagaggaagaatttgaagttgagttggactatcttcattgtattatttggactaataattgttattctgttactcaaagctcgagccgcacaggccagaaatcctgaaggaggacggcaggtgcccagtcctcctgatgtagttggccttctccgatgtcctgttcgcacgctcattgagcttcgcctcagcgctcgcccgcttctcctcagccatccgacgcgtggtggccagccggttggacagctcctcttggccccgtgctttcatctgatcagccttcatctgcattttcttcatctttgtctcggcttttctcttctcatggttctcccaggcctgtatctttacctcttcacgtttatacctcgccatgaacttggcccgttcagcctcatcccaggctgccgcgcgagactccagagagttcacgctgggcacatgaccagccacggggcgctcgtccccgacgcaagcgacctcgtctgctgccgctacctgctcggtcagcgtccctgctacaatggccgtggtcacgcccacgggcccttcctggcgtcttctcaccggggtggacgaccttgaggccatcgggctcagcgcaacgggcgtgcaggcgcgccggggc

SEQ ID NO: 1006 - DNA, 503 bp, Zea mays
  Clone ID: TF_5791336
taagtactacattcacatttatatgcttttcattttggtcaatgatggtctaattatacaccaatagtatcatttgtgcaccataaatagtagtctatacagacaattaaaaagggtaacaattacataagttgataaagttgcaccatggcattttaatgcacaaataagaaagcataaaaatcaaaccttccttatgctctaaagcacctaagaaatttctttggagctaccctaaaggcaccgggacttagctgccatctcctcagtcttgagaatttcttcaccatgctgggccataaccatcgctctcttttccttggccttcttatggatgattgccttcttgtttttcatcttctcagcatattcagccattttcttctctagttcttcctgatcagtagctcaaagagattaatatttttttattttcattaaaaagcacacaatttcccacaccatattttatgatatacctattacattaacatcaatataat

SEQ ID NO: 1007 - DNA, 653 bp, Zea mays
  Clone ID: TF_LIB3587-206-Q1-K6-C5
gtccaaaatcgccgcgtggcagatcgccgaggtggccaaggtcaacaaccgcttcaagcgcgaggaggtcgtcatcaacgggtgggagggcgaccaggtggagaagtccggcgcctggctcaacaagtacgagaggaagctcgaggagaagcgcgccaaggcgatggagaaggcgcagaacgaggtggccagggcgcggcacaaggcggaggcgaagcgcgcgtcggcggaggccaagcggggcaccaaggtcgcgcgggtgctggagctcgccaacttcatgagggccgtggggagggcgccctccgccaagcgctccttcttctgaaccctcccccaccgcccaccgggcctctcctccttcaccaattcctctgccctgcctgctctgctcgtcgccgcccgccgcctgtgcagttcagttgcatcgttcaccgcttcactccacgggatcagacagagtgatcagtgccgtgcttagctgtgtggaacgcttgttttagtgctgtgtccacatgtatgatttgtaaccttttcttcttcctcctgtttatgtcattgtcagtacgaaggatgtgctctgcccgagtcttgagggcaagagctgcctgtattttgttgatatttcgtcataacagctgtgtatgtcagta

SEQ ID NO: 1008 - DNA, 498 bp, Zea mays
  Clone ID: TF_LIB4766-035-R1-K1-A8
ttgggaccctcgaggccggccggcgacgtgacgaccaccaccaccacatgttgcatgagcagcaggcaccgccaccggcgcaaggcggaggagaagcgggcgtcggcggaggccaagcggggcctcaagctggccaaggtgctggagctagccaacttcatgaaggccgtcggcagggtgcccaccaagcgctccttcttctagccagccgactacccctgccacctccgtctctccctgcctgcgtgtgatcgatgtacgctcgctgctgcatccgagaacctaactgtaaagaaaaaaaactgtaagctgtatacgtactgcgcctgctggttcccctgtgatgtctgtcagtgtcatccatcacagggtgccagttgttctcttctctttcttttcttttctcttctcttggcttgtatatcggatccatatgctactggtggtgcttgaacgagctgttgttgtttgctgaaaaaaaaaaaaaaaaaagcggcc

SEQ ID NO: 1009 - DNA, 2459 bp, Zea mays
  Clone ID: TF_ZmC145_1
caacgtagaggggaccgagcaccgaggcgctcggggaaatccgtaggttaggggacggctgccgcaaaccactccccgttttttctccgcaccgccctgctccccgaccccaactgctgtctccttcctcgggtaatgcgaccgcgcgccagagcatgctccgcccggagcccgcgctagggttcctcgccgccggccccgtgcgcgcgtgcaagccgccgcccgagcgccgccgcaagaagcagccaccgacgcggcggaggcgaccggccagtgccgcaacggtggtgggactgggaccacgcggcgcggccgatccagatcccgcgcactcgtccgcgctgctgcctctcaccagcggcggcagcggcagcggctttgcctcgcggggcacggttgcgccagacgaggaagaggggagagacggggcgagctcggctgaatcgcaggaagtggcagaagcagcaaacgattcgttctcctactcactaagagagtgccagaagcagcggcgtctcaagtcagagaggtctgcactggtgcggccaccggcctcgcataagctcaataatgccggaggtattgagcttctagtgctctcgccgaggtgcttgattggtggtaacccgggaggaatgagcaagagctcaacgacatcatcccggagcagatcaggcacaggcacgttcccaagccctgggactccgagctgcaaccggcattgtgcaggcagcatgcagtactccaagggttggagttcagagcgcgtgccactgggcactggtaggaatagaaggtatgggggcagtggggttgtgcttccatttaacaatgggaggaagctgccatcgaaatgggaggatgcagagaagtggatcctaagtccggtttcctgtgatgggatggggaggatgtctgcaccagctccacatcatagacggcccaagtcgaagagtgggccacttggccatccagctggcattccaggggcttatgcggctgtttcaccgcttgttccttgctttgatggtgtgctggcagcagctaatttcgcagcacattcacctttctctgctggggttctcataccagagcacgggcgcattggcgacttcagcagtggaagagacagatgtggtgatgacggtagcagcagatcctactccgctgagaaagagtcctatatattaagatctgcaagcatacatgcatggacagaaacacttatggaggcatctgcttttgctaatatctcagaagaaaccgtacaagatgataaactgcaacgccagacagaagcaacttccatgatttccagtccaatcataaagaaagacatcggcacacagatgagtcctgaggatagtatatcttctccaaaagcgaggcattcctgctccagtctgccttcaaggcatctgataaaagaaacaaatagtcatatacctaaacctgaaattagggacgtgcaggttgatgaccaagtaactgtgacccggtggtccaagcgacatgtaacacgaggctctgataagaggtcaacaaatattattgaatggaggaagaagactgttgaaacccgagctccatcttttgatgaaaaagaaagagaaggatgcatgtcaaagtgcaaaagggaggaagcaaagatcacagcttgggaaaatctacagaaagcaaaagcagaggcagctattcgaaagctggagatgaaacttgaaaagaaacgatcatcatcaatggacaaaattttaggcaaactccgctctgctcagaagaaagcacaagacatgcgaagtgtagtttcttctagtgaaggtcagtgtagtgtgagggcaaccaagaagacatcttcctctgtcaaaactggcaggcctttcagctgctgctttacctaccgtgcttgctagttgtgatacacagttggtgcctgtggctacagcaatggatatagttctactcgttatggacgcgaagggaagtcagttgggttttgactgcaaggcctaattgttaatgagatttgcactgatgaatgagatatcgttatggagcagcagacgaagacagccacgcgaaatccactcatgtaactgatggagtggactaatgcagtctagtatgcgacgatcaatctctgtacacccggtagaaaaagttcatgagcttcatggcagttagaatcaggattgagctgatattcatcccgcttgatgtgtagctagcattcttgtaactggaattgtgtgtgtaatgcaaatcatgggcgcattagactttaatgaagaaaaagtcagggctgcgcctttagaatgcagcttgctcactttttgggtttagtactgagacttggcttgcttgttaaaaaaaaccaataatataaataaaaactttaaaaaaaaaaaagggcggccctttttgcctggcagcaattggaactgtgacgaagtataatttcc

SEQ ID NO: 1010 - DNA, 1495 bp, Zea mays
  unsure (1)..(1495): unsure at all n locations
  Clone ID: TF_ZmC1445_2
tgcacgcgggggtaaggctcgaggttgggcgggagcagctgacccgagccgcagatggtctctcccggccgctactagaggcttagcgttgagagccacatgttgagtgaacagacggcggctagcactagcagcggcgagcatcaggagaggagcgtcgtcgaggacaggcggctacagccggtgggggagaacgaggaggcggagttcagggacatccacgcgctgagcccgccgccgagccagccttcgtcgtaccgccggagcaggcacgcgtccgtcgggagcgacaccgcgcccagcgagcccttcccgaccatgagcagggagttctcggccatggtcgccgccgcagcagccatcgccaacggtgccgccgccgacaggctcggggaggccgaggacgaggagaccaacccgctggccatcgtgccggacagcaaccccatcccgtcgccgcgccgggcccggggcccgcccaccccaggcgccggcgccgcccacgccaacggcgacggtggggtgtccgtggggcaggtcaggaaggaggaggtggagtccaagatcgccgcgtggcagatcgccgaggtggccaaggtcaacaaccggttcaagcgcgaggaggtcgtcatcaacggctgggagggcgaccaggtggagaaggccggcgcctggctcaacaagtacgaggtagtcagtccatcgcatcgatctacacctccacactcactgactagcgtcgtccgaactgtccagtgcttgctgactgataccaacgcatgtaatgtgcagaggaagctcgaggagaagcgcgccaaggcgatggagaaggcgcagaacgaggtggccagggcgcggcacaaggcggaggcgaagcgcgcgtcggcggaggccaagcggggcaccaaggtcgcgcgggtgctggagctcgccaacttcatgagggccgtggggagggcgccctccgccaagcgctccttcttctgaaccctcccccaccgcccaccgggcctctcctccttcaccaattcctctgccctgcctgctctggtcgtcgccgcccgccgcctgtgcagttcagttgcatcgttcaccgcttcactccacgggatcagacagagtgatcagtgccgtgcttagctgtgtggaacgcttgttttagtgctgtgtccacatgtatgatttgtaaccttttcttctccctcctgtttatgtcattgttacgaaggatgtgctctgcccgagtcttgagggcaagagctgcctgtattttgttgatatttcgtcatcaacagctgtgtatgtcagtacgaacaagataatggaagtccattaccactgtgtaaaaaaaaaaaaaaaaaaggcccctagggatgcaccgacgagcttcactacttggaacttcagttttgctgttgagctagaaaaaaaaaaaaaaaaaaaaaaaaaaagtgttttctgctntagaggtccaccgacttacgtacgcgtgcat

SEQ ID NO: 1011 - DNA, 636 bp, Zea mays
  Clone ID: TF_ZmC1586_1
gcgacggtggatcgccaccaggcctagcggcagcggaccgcgacgagacggcgcccggtgcgccgacgacgacggccgtgtcgcccgcggcgacgtgggacgccgccgagcgcgccaagcacatggccaggtatcggcgcgaggagatgaaaatacaggcctgggaaaaccggcgacggcaaaaggcggagctgcaaatgaaggtggccgaggccaaggcggagaggatgaagctacgggcgcaggagaagacggcgagcaagctggcctcggcgcaggcggctgcgagggagaagcgcgcgcaggcggaggccaagctgaaccggcgcgccgcgcgggtcgacagggcggacgcgctcaggcggaccggccacctgccgtcctcctcctccgtgttctcgctcaagctgccgctgatgtgcagatgagagccgaccgaggggggtgtggcacagcagttcacacggatgctgttcagagtttcagtcaactgtcctgttagaattggtcgggacgctgctcgcgtccttgtgtttcagccgagcggtttgcgatgcacacaggcacatggcacttagaattgtagacatttgtttttttatctgcacaaatcagtgaagaacaaaaatattttat

SEQ ID NO: 1012 - DNA, 674 bp, Zea mays
  Clone ID: TF_ZmC1445_3
ccgggaaaaatcgccgggtggccaggtcaacaaccgcttcaagcgcgaggaggtcgtcatcaacggctgggagggcgaccaggtcgagaaggccagcgcgtggctcaagaagtacgagaggaagcttgaggagaagcgtgccaaggcgatggagaaggcgcagaacgaggtggccaaggcgcggcggaaggcggaggagaggcgcgcgtccgcggaggccaagcggggcaccaaggtggcgcgagtgctggagctcgccaacttcatgagggccgtggggagggcgccctccaccaagcgctccttcttctgaacccacggatcagttcagttcagttgtcctgtgggtcggaccgttcaccgcttcactccacgggatcaggcacagtgatcagtgccgtgctagctgtgtggaacgcttgttttagtgttgtatccacatgtacgatttgtaacgtttccttgcttctcccgtttcgtgttttcgtatggtatctatggtattgcaaagtccatggccacgatagacagggaaagcatatgtatacaccattagaaggatgtgctctgcgcctctgcccgagtcttgaggacaggagctgcatgtatttttcaccaatataatggttgtgtatgtcaattacgaaaagatatgaacaccattaccaccgcgt

SEQ ID NO: 1013 - DNA, 1307 bp, Zea mays
  Clone ID: TF_ZmC145_4
aggcatctgataaaagaacaaatagtcatatacctaaacctgaaatagggacgtgcaggttgatgaccaagtaactgtgacccggtggtccaggcgacatgtaacacgaggctctgataagaggtcaacaaatattgttgaatggaggaagaagactgttgaaacccgagctccatcttttgatgaaaaagaaagagaaggatgcatgtcaaagtttaaggtgcaaaagggaggaagcaaagatcacagcttgggaaaatctacagaaagcaaaagcagaggcagctatccgtaagctggagatgaaacttgaaaagaaacggtcatcatcaatggacaaaattttaggcaaactccgctctgctcagaagaaagcacaagacatgcgaagtgtagtttcttctagtgaaggtcagtgtagtgtgagggcaaccaagaagacatcttcctctgtcaaaactggcaggcctttcagctgctgctttacctaccgtgcttgctagttgtgatacacagttggtgcctgtggatacagcaatggatataggtctattcggtgagtcccactggcatttgtattatgtgtaatttaacatctaaaactcacactagttcagcattaatgctttactgcttgtaattttgtatttgtgtaattttatcgaatttattaacttttaacctattatctcaatagtttctaatgctagaagtggctatctttctcaagacctcttctcaggcaacagttatggacgcgaagggaagtcagttgggttttgactacaaggcctaattgttaatgagatttgcactgatgaatgatatatcgttatggagcagcagacgaagaaagccacgcgaaatccactcatgtaactgatggagtggactaatgcagtctagtatgcgacgatcaatctctgtacacccggtagaaaaagttcatgagcttcatggcagttagaatcaggattgagctgatattcatcccgcttgatgtgtagctagcattcttgtaactggaattgtgtgtgtaatgcaaatcatgggcgcattagactgtaatgaagaaaaagtcagggctgcgcctttagaatgcagcttgctcactttttgagttttaactgggcccagtattttgaaacttgtttggtacagttctgaaggctttcggtccagcacttagacttggcgtgtttgtttattggttcgcagcgagtggaaatttgtaactgagactacagaacccctatttcccctcctttttggtgaacattataaacgtctccaacaaccgttagggc

SEQ ID NO: 1014 - DNA, 2245 bp, Zea mays
  Clone ID: TF_ZmC145_2
aagacatcggcacacagatgagtcctgaggatagtatatcttctccaaaagcaagacattcctgctccagtctgccttcaggacatctgataaaggaaccaaatagtcatatacctaaacctgaaattcgggacgtgcaggttgatgaccaagtaactgtgacccggtggtccaagcgacatgtaacacgaggctctgataagaggtcaacaaatattattgaatggaggaagaagaccactgaaacccgaactccatcttttgatgaaaaagaaagagaaagatgcatgtcacagtaagatattgcctatttctgcccatcagctaacaatcccattttgcaccactgcccagttttgaattggatttacacaaaaagaatatattgctccaattgtcatcttgtaactttcaatactccaagctgtcgttgtcgtttatcatgtttattaagaaaggtcagctcaatgttgaagtgaagctactatggctgtaatacctgttcaaattcacagaaaggagtaagtataaaaggtgctgaatgttgattagactattatatgacttgctaatatgctcttagtgttattgagaaatctacataacttgaagtcagggtcagatggtataagttgcagatattgagcttatgtgatgatacactagaaatattttacccattttcatcctacagctagtggtacatgctgacatgcagaatatcgcttaacatggggtcattatgttgaattgagaaccgaacagatgtttgtatattagagcgcctacctgagctttgaaccatggcattcaaagactggtcattgagaactcattgagaactctgattttagcaaaattttcctggccagcgagggtctggtaatcccctcttttaagaatgtcttcggtggactgtgtaaaatagtggacgtggtactgtagatgacaatgtttgcagaatgaattttgtttgcagcgtgaagtttgaaatagaggatgccataggagatgtcataggggagctggcgagctgctgaggacaacctaagaggaacccaagtggatatttttctcgcatggtctagtttttttcccccacaatccattagaagctcagtctataaagtgttgttcattttctagttttcttactgatgaggtggtaaaataaaaaaagcatgggtcaattagaaagtctagtaattcatagaattgatgcgctagtcttacacaatatttttctttgccatttcgaaaaaagagaactcttatactgaggatataaatctgctacattttgtatttagagacctgtttatttgtgttttaaggtgcaaaagggaggaagcaaagatcacagcttgggaaaatctacagaaagcaaaagcagaggcagctattcggaagctggagatgaaacttgaaaagaaacggtcatcatcaatggacaaaattttaggcaaactccgctctgctcagaacaaagcacaagacatgcgaagtgtagtttcttctagtgaaggtcagtgtagtgtgagggcaaccaagaagacatcttcctctgtcaaaactggcaggcctttcagctgctgctttacctaccgtgcttgctagttgtgatacacagttggtgcctgtggctacagcaatggatatagttctactcgttatggacgcgaagggaagtcagttggggtttgactgcaaggcctaattgttaatgagatttgcactgatgaatgagatatcgttatggagcagcagacgaagccatcgagcaccgcgaaatccactcatgtaactgatggagtggactactgcagtctagtatgcgacgatcaatctctgtacacccggtagaaaaagttcatgagcttcatggcagttagaatcaggattgagctgatattcatcccgcttgatgtgtagctagctttcttgtaactggaattgtgtatgtaatgcaaatcatgggcgcattagactttaatgaagaaaaagtcagggctgcgcctttagaatgcagcttgctctacgttttgggtttagttctggaggcttgcggtccagcactgagacttggcttgtttgtttattggttcgcagcgagtggaaatttgtaactgaggcgacaaaacccctatttcccctcctttttggtgaacatgataaacgtcgccagcttccgttagggcaaaaaaatgcacaaataacaataaagggcggccgccgactaatagcc

SEQ ID NO: 1015 - DNA, 539 bp, Zea mays
  Clone ID: TF_ZmC1445_6
ccggccggaaaaaaaaaaaaaatgtatctggattgcccagttctgatatcgtcagtgttgtatggcacagaggaagcttgaggagaagcgtaccaaggcgatggagaaggcgcagaacgaggtggccaaggcgcggcggaaggcggaggagaagcgcgcgtccgcggaggccaagcggggcaccaaggtggcgcgagtgctggagctcgccaacttcatgagggccgtggggagggcgccctccaccaagcgctccttcttctgaacccaccgcccaccggcctcttcttcaccaccagttcctctgtcttgccgccgccgccgcctgtgcagttcagttcagttcagttgtcctgtgggtcggaccgttcaccgcttcactccacgggatcaggcacagtgatcagtgccgtgctagctgtgtggaacgcttgttttagtgttgtatccacatgtacgatctgtaacgttttcttgcttctcgcgtttcgtgttttcgtatggtatctatggtattgcaaagtccatggccacgatag

SEQ ID NO: 1016 - DNA, 1881 bp, Zea mays
  Clone ID: TF_ZmC509_1
ctcgagccgcacaactacaagacccacacacccgtcggtaaatgcaaagatcgcaagtccacggcccaccccccaaatcggccaatctccacttcttaagctccctgtcgcctccgcctcctcgtcgtccggcctcccgcgccaccaccggggcctcgccgccacgaatggagtacgagcgcatccacgagccactcccgcgccgtcagtccggcggattctccccagctaagctgcgagcgatgcttcgcgggctagagaaacaccagcgcaacagcggcgaggacacgtcgccggaggccaacgactccggcgagctcgacgaccggaggagcttggaatgctccacctccaccgagatgtcgagcaacagcggccacaggtcaaggaaccgggccccggacgacgacagcttcgactcggagagcagctcgtcggggccgcccacggtgaagaggtcggccgcggtggccgctttgctgccgcccttctctcggccaacgccgtccaagtgggacgacgccgagaagtggatttccagccccacgtccaaccgtactggccgtgccgggcctaccgctggaactatgccaaagaagtccgcattggcatttcctgaacatggagcccgccagccagccgttgctaaggtggtcacggatgtgcctactatcgctggaccattggttaagaattcagatggtctcgcccatcctgatttgcttaaacctgcacacgatgcttcaatagttgatggaccagctcctgcagttaggtctgtctctatgagagacatggggaccgagatgactccaattgccagccaggagccttctcggaccgcgactcctatgattgcatccagtccaacctcctctcggacaccaactcctcaacgcaccacagaattcagtgtgagcaatatagattctaacaagatggcgatgtctgaagaggaggtccatataagtacaagacaggaaattatggatcttggcgaaaggttaggcaagactactatagctgcatgggcaagcaaggaggagaaagctgctgcacgttccacggatactgcagccgataatgctgttgatgtcaacagggagaatcgagcggcagattggcaggaggcagagaaggcaaagtatcttgcaaggtttcatagggaggaggcaaagatccaagcttgggaaaatctccagaaagcgaaaattgaagctgaaatgaaaaggatagaggccaagatcgagcggaaacgggcgcgcgagcaagacaggctcgccagcaaactggcagcggtgagccaccgagcggaggcgaagagggaggccgcggaggcgaggcgggaccaggaagccgcgagaacggaggagcaggcggctcagatccgagaaaccgggcacacgccttcctccttctcatgctggtgctggtgcctgtgactctggttccttcactgcatgaccagcacagcacgtcacccaactgtaacatagcatgacccgtgagactgatctccggccatggtagaaaaatttgctcactgtacgacttgtgtagttccttggtctaatggtgtccagttttttggtgcctcgcggttggcggcccggatccgatacaccgggcatacgccttcgtccttctcctgctggtgctggtgcccgtgacacccagcatggacagtggtagaaaaattccaacggttctatctttccccatgcatgaacatggagaaggaaaccttcccgttatcgcgtcgtcgtcactcacgcggttgcatggagtggactggggtagtagggtggcgccacctgtcctcgtccaccttccacccctctcgcccggggctataaatggttacgagatccggatagcgcg

SEQ ID NO: 1017 - DNA, 1506 bp, Zea mays
  unsure (1)..(1506): unsure at all n locations
  Clone ID: TF_ZmC2853_1
ctcgaggccgcccgggtcgcccatcccatccgcctctccttcggcgataaactccgtggtccgcagccaccgagccgagcccggcacagacgctactggcacgcacgcaccagcaccagcaccacaccacatgaatggtggagcctagcacgggcagctagctcccggccggcgacgtgacgaccaccaccaccacatgttgcatgagcagcaggcaccgccaccggcagtagcagcgccaccgccatccatcaaccccgacgacgacggcgcccgcgatgtcgaggtcaccacgttccgcgacatccaccctctgacgcccgacgcgccgccgcccgcctccgcgtcctgggacaccgccagccaccgctccttgtcgtcgtccgacgaccagcagtacatgacgatgagccgcgagttcacggccatggtcgccgccggggcgaccatgcagcccggcggctacgacggcgccgccgaccagctcaccagcatcggcgaggacgagctggaggagaccaacccgctggccatcgtccccgacagccaccccatcgccacgcccgccaggtccagggcgtccgggctggaggtcgtgcccgcgggcccggcgccgcagccgcagccgcagccgcccgcgcacctggaggccagccaggtcaagaaggaggaggtggagaccaaggtcacggcctggcagacggccgaggtcgccaagatcaacaaccgcttcaagagggaggatgtggtcatcaacggctgggagaccgagcaggtggagaaggcctccgcgtggctcaagaagatcgagaggaagctggacgagcaacgcgccaaggcgctggagaagacgcagaacgacatcgccaaggcgcggcgcaaggcggaggagaagcgggcgtcggcggaggccaagcggggcctcaagctggccaaggtgctggagctcgccaacttcatgaaggccgtcggcagggtgcccaccaagcgctccttcttctagccagccgactaccgctaccacctccgtctctccctgcctgcgtgtgatcgatgtacgctcgctgctgcatccgagaacctaactgtaaagaaaaaaattgtaagctgtatacgtactactgcctgctatggtcccctgtgatgtctgtcatccatcacagggtgccagttgttctcttctctttctcttctcttctcttctcttggcttgtatatcggatccatatgctggtggtgcttgaacgaactgtcgttgtttgcttaaccgtgcaaacatatacagtggtatatagtatatacactacattcaacaccccgtggaaaaaaaaaaaaaaaaaaaaaaaaaaaaaaaaaaaaaaaaaaaaagggcgggccggtcttaaagagatccaagacttaccgtaccccgtgccatgcgcacgncatagatttcttctatagtggtcaccctaaatttaattnacctggcgcgccgcgtttacaacgtccgcgactggggaaaac

SEQ ID NO: 1018 - DNA, 558 bp, Zea mays
  Clone ID: TF_LIB3689-224-Q6-N6-G2
ttttttttttttttttttttttttttttttttttttttttttttttttttttttttttttttttttttttttaaacaacaccaacaacggggggccctttaaactacacaaaaaaaggtttttggccaagctttcaaaatgtcccccaccaaaccccggcctgggaagcgatttcagtttttacaggagcagcggtgggctttacaaactttgaaagaccccctccccacttgatggaggggggggcccaagcaatcccggggggacgtttttaacttttggctcggcctgactgggaaggttttttaggctccaaagcaaccgatgagctttttaggagcggggccgggggcccggtacttggaaaccatttcctgggccttaaggacctcctaaccgggtttggcctccaccatcgttcgctttttttgggcttccttgggtataatggaaaccttgttcttaatcttctctgaaaattaagccttttttttttccagtggtccctaaatctttttaagttaagcttttatgttggctttcttggggtttccccat

SEQ ID NO: 1019 - DNA, 583 bp, Zea mays
  Clone ID: TF_LIB3632-055-Q6-K6-C12
gacacacacacacactcatcaacagcagttaagcctctcccaccaagacaggaacattggtgaagaggaggtcaaaaacgtggaggtggatggtcaccaatgagccccaggcgggggagaaagaggacgtaggcgatgacaaagccgtaatcctcgagagcgacccggcgtctcccgcgtcaccggactactactgcaaaggcctgggcattccatataaaattacgaatgagacctggtcgcgagaacactgcctgtgcgaaatatggtggctgcaatgacaagcatctaactattgcaaaggtgtaaacagagaagaggaactctttcatcaaaccttgggaagagaatgaaaagacaaaagctctgaacaaggctgctaataaagaattcgctattctttcttgggaaaacacaacgaaagcaaacatagaacttttactgaacaagattgaagaacaactgtaaaagatcaatgctgtatatgcatgacaacatgaagaacaaggctgccctgatacacaggggagcccaagagaagcgagctatggtggaggcaaaacgcggtgaggaggcttctgaa

SEQ ID NO: 1020 - DNA, 576 bp, Zea mays
  unsure (1)..(576): unsure at all n locations
  Clone ID: TF_21214887
gtgactccttaactatacatnnnnnngtttcacatcaagcatccaacatgtacacgtcttggaagcgatatctatatatacaggagcagtaggacttacacactttcgaacacacactacacacttgatagagcgaggtgaccaagcaatcactggttgaggtttctcactttctgctcggtgggacttggaacatttcttaggctccgaagcacccaatgggcttcttaggggcgtggccggtggcccgatacttggcagccatctcctcggccttcaggacctcctcgccgcgctttgcctccaccatcgctcgcttctcttcggcttccctgtggatcattgcaaccttgnnnnncatcttctcagcatattcagctttcttcttttccagttgttcctcaatcttcttcatttcagcttctnnnnnnnnnnnnnnnnnnnnnnnnnntgaaagaataacagatactttcttagtagccttgttatcagcttttgccttctcattatcttcccatgctttaatcagagagtcctcttctccgtttccacccttcaagagcagatctctgatac

SEQ ID NO: 1021 - DNA, 410 bp, Zea mays
  Clone ID: TF_LIB4764-010-R1-M1-F7
ggccgcttttttttttttttttttcttttttttttttttttttttttttttttttttttttttttttttttttttttttttttgtttttcatgtcttgtaatacaagagagactataacaaccttggattacaaaaagagcactagatgagaatacgaaactaatacacacacgaaacagagcataatccatagcaacggccacgctaggaagaggccaaagagattggagaggccctcgaccttggcgcggttcttggcggccatttcctccgccaggaagatgtgcttgccttgcctggcctccgtctgctccctggtctcctccggcgtcctgtgcaccatcgccagcttgggcttgatctgcacatcatacaccggcttctttttctgcagccgctccacgagctt

SEQ ID NO: 1022 - DNA, 1611 bp, Zea mays
  Clone ID: TF_ZmC509_2
cattgggtacctcgaggccggccggggaagatctcaagtccacggcccaccccccaaatcggccaatctccacttcttaagcctccctgttgcctcgcacggcctccgcctcctcgtcgtccggcctcccgcgccaccaccggggcctcgccgccacgaatggagtacgagcgcatccacgagccgctcccgcgccgtcagtccggcggattctccccagctaagctgcgagcgatgcttcgcgggctagagaaacgccagcgcaacagcggcgaggacacgtcgccggaggccaacgactccggcgagctcgacgaccggaggagcttggaatgctccacctccaccgagatgtcgagcaacagcggccacaggtcaaggaaccgggccccggacgacgacagcttcgactcggagagcagctcgtcggggccgccgacggtgaagaggtcggccgcggtggccgctttgctgccgcccttctctcgcccaacgccgtccaagtgggacgacgccgagaagtggatctccagccccacgtcaaaccgtactggccgtgcggggcctaccgctggagctgtgccaaagaagtctgcattggccttccctgactatggaggccgcccgccagccgttgctaaagtggtagcgggatgtgcctaccaacgctggaccagatgtgggtttatattttcaggtctcgcccatcctgatttacttaaggctggacacaatgcttcagtagttgttgacggagcagcacctgcagttaggtctgtctgtatgagagacatgggaacagaaatgactccaattgcgagccaagagccttctcggaccgcgactcctataatcgcatctagtccaacctcctctcggacaccaaccccgcaacgcaccgcagaattcagtgtgagtaatatagatcctaacaagatcgagatgcctgaagaggaggtacagatgagtacgagacaggaaattatggatcttggtgaaaggttagggaagaccactatagccgcatgggcaagcaaggaagagaaatccgctgcacgtttcacggataccacagcctacaaggctgtcgatatcggcagggagactcgagctgcagattggcaggaggcggagaaggccaggtatcttgcaaggtttcagagggaggaagcaaagatccaagcttgggaaaatctgcagaaagcgaaaattgaagctgagatgaaagggatagaggccaagatagagcggaaacgggcgcgcgagcaggacaggctcgccagcaagctggcagccgtaagccaccgagcggaggcgaagagggaggccgcggaggcgaggcggaaccaggaagccgcgaggacggaggagcaggcggcccggatccgatacaccgggcatacgccttcgtccttctcctgctggtgctggtgcccgtgattttgacggatattttccgccaagtcacccagcatggacagtggtagaaaaattccaacggttctttctttccccatgcatgaacatggagaaggaaaccttcccgttaaaaaaaaaaaaaaaaaaaaaaaaaaaaaaaaaaaaaacaaaaaaaaaaaaaaaaaagcggcc

SEQ ID NO: 1023 - DNA, 1056 bp, Zea mays
  unsure (1)..(1056): unsure at all n locations
  Clone ID: TF_ZmC1422_1
ctccccctcctgccaggctgcgcagtctttctcctactagcttgtttgttaagccattcacttcccttgtttgttaagagctgagctacatttattctcttcttcttgagcccctggcctccccctcctgccaggctgcgcattctttctccagctctctgataagctagccagcgtcgtcgtcgtgtcttgttagttattagctctatctcgccgccctgcagctgctgatcgagtgagggaattcagcagcagcagcagcaggtagcatagcatagatatgacggcggcggaggtggaggccgccaaggacatcgccgaggagaaggccgtcgtgccgttgccaccgtcgcccgccaagccggccgacgacgactccaaggccatcgtcgctcttgtcgtcaaggacgctgctgctgggaaaccttctacagctattattggaggctcaactgaaagagatgcttacctcgccaagatcgtgtccgagaagaggctgagtctgatcaccgcctgggaggagagccagaaggcgagagccgacaacagggctgccaagaagcttgccttcatcacgtcctgggagaacgccaagaaagcggagatggaggcggagctcagaaagatcgaggagcaactgcagaagaagaaggcggcgtacgaggagaagctcaagaacaagctggcgatgctgcacaggacggcggaggagaggagggcgcagacggaggccaggcgcggcgaggagaccatcctggcggaggagatggccgccaagtaccgcgccaagggcgagggccccaccaagctctttggcctcttgaaagcgtgacctctgctatggagaatgccctgtttcgtgcgtgtattaatttcgtattctcaacaagtgcacttggtgtgtgtgctgtttgttattttctctcttgtattccaaggcttgcttgacaatatctgttgtattgtatttgtataggagtgcagtgcagtgcagtgctattctttctcaaaaaaaaaaaaaaaaatcttcataanacaacacananagggcgacgg

SEQ ID NO: 1024 - DNA, 642 bp, Zea mays
  Clone ID: TF_ZmC1422_4
gacgacgactccaaggccatcgtcgctcttgtcgtcaaggacgctgctgctgggaaaccttctacagctattattggaggctcaactgaaagagatgcttacctcgccaagatcgtgtccgagaagaggctgagtctgatcaccgcctgggaggagagccagaaggcgagagccgacaacagggctgccaagaagcttgccttcatcacgtcctgggagaacgccaagaaagcggagatggaggcggagctcagaaagatcgaggagcaactgcagaagaagaaggcggcgtacgaggagaagctcaagaacaagctggcgatgctgcacaggacggcggaggagaggagggcgcagacggaggccaggcgcggcgaggagaccatcctggcggaggagatggccgccaagtaccgcgccaagggcgagggccccaccaagctctttggcctcttgaaagcgtgacctcttgctatggagaatgccctgtttcgtgcgtgtatttcgtattcccaattgcacttggtgtgtgtgtgtacgtgttgtttgttgttttctcttgtattcgatggcttgcttgacatctgttgtattgtatttgtatagaagtgcagtgcagtgcagtgctattctttcttcccc

SEQ ID NO: 1025 - DNA, 400 bp, Zea mays
  Clone ID: TF_LIB3159-017-Q1-K1-G7
gacccacgcgttcgctatggttgaagcaaaacacggttaggaagtccttattgcccttgagatggctgcctatttctgggggggctaccactctcctaagaagctcatcggttgctttttagcctaaaaaaccttccaagtcagaccgaacaaaaagtgaaaaacttcatccagtgattgcttggtcctttcgctctatcaagtgtgtaatgtgtcttcgaaagttttgaaagcctactgctgcttgtgcatatacttatatcactttcaatgcaagcctatcgttgtgttcatttttaatgcttgacgagaaacattcttgttttttatttaatatgtcaccctttttgttgttgttgttgacatttaatacagacattttctttttcttttttgtgtt

SEQ ID NO: 1026 - DNA, 2086 bp, Zea mays
  Clone ID: TF_ZmC4686_1
gatatctcagctgtaccagtgcctcttcctgcgatctggtcactggtattttgaccactggtgcccactgcccagacccggtgctcgccttctcccctcccctcaatctccagcctctctttctcgctcgctggccacccgccgcaccctccccatcaggccagcagcgaggaagaatggagtacgagaggattcatcagaaagcccagcctggtgctctttctccaacaaagctgaggatgaagatcctgggagcccacaatcgagttagagtcatcaccagcaactcgtcatcgcggacgtcgcctgcgaaaaccatcgaggcttcacaggcgcagaacaggctactagtttgtgatgttcttgaagaagacagcgcagatagcacaaaacacccgtcggcaactaacaaaaccgaagccgtagaaaaggttcaaaaggatccagcagtggacatcagtcaagtgcagaacgcttccaccagttcggctgctaagccagcgacaggcagctcgagtatgatacagatacacccactgagacccgcggaagaagacagcactaccgaatgcgacagtggtctcgacaacgccagcactagcagcttcgagttccacggagtggagaaggcggcggcgacgcagaatccagcagccgggtacttgtccaggcagacttccatttcctccaagtggaatgacgcagagaaatggatcgtgagccgccagaatgtcagtcagaagaacaacgtcgccaagggcgcgttgcagaaccagacagtaaaccagatgagctccgccgcagccaggggcgccgttgtgcccaaaatctctgctcgtcccgtgcagaaaatgaagagagtgaatccagctttgtctgctccgcgcagcatactggagaggttgtccttcgcttcgtatcagcctaagttggttaggcatgcagatgtctgtccagttagtaacgctggtgctaactcagagcatcacaaggcaactgatactggttcatcgattgaagtgaagccctgcaacgatacgaatgatattccaacagtccagtcgtcggtgtccgtgagagatgtgggcacagagatgactccaatacctagccaggaaccttcaagaactggaactccactagggtcaaggacaccaactcgaagccctaactgttcagtaccgtcaacacctgtaggggggaggtcaatagcatctcctcctggagaagactgcacagacgatggcccatttttccacaggaaatgcggcgtacatgcaaatgaattgtcagatactgagacgaggcttaaaacaaggcaagaaatcgctgcgcttggcatacagctaggaaagatgaacattgctacgtgggccagcaaagaggagctagagctagtctctgcggcaccgagcatcgctgatttggagcgcatcaggaaggaatatgctgctcgtgctgcatcgtatgaggaggcagaaaatactaaacatacagcaagattcaaaaaagaagaggtgaagattgaagcttgggagggtcgtcaaagagcaaaaattgaatatgaaatgagaagaatagaggaatttgctgagagaatgagaagtgaggccatggaaaagatggccgaaaagctagagatgacgcgccgcatagccgaagagaaacgagcttcggccaacgccaaaatgaaccagcaagcagctatagcggttcagaaggccgagaagattcgccaaacgggacgagtcccaggatcgagtatcctacgctgcggtggctgcttctgtggaccgtagtagatcatacataggattcgacagctagtatgttggtctgggatatatagtggtgggaaacctgaactccaccctctacaagtcagcattccttgattttagcatgaaaaaaggaatgtctctaaggtattcagatgcaaacgtgttcttgtttgtcatgtatgtaaattattccaatgattttaacttgggtcggtgtacaaggtaaccagctgttcgttggttaacgaagaagtcacgaatcgttcaaacattatgtttattattatgcctaaaattctaaccgt

SEQ ID NO: 1027 - DNA, 1766 bp, Zea mays
  Clone ID: TF_ZmC4686_2
gtgatcttcttgaagaagtttcagacagcgcagatagcgcaaaacacccgtcggcaagtaacattaacaaaaccgaagccgtagaaaagtactcagcagtggacaacagtcaagtgcagaacgcttccaccagttcggctgctaagccagcgacaggcagctcgagcatgatacagatacacccagtgagacccgcggaagaagacagcactaccgaatgcgacagtggtctcgacaacgccagcactagcagcttcgagttccacggagtggagaaggcgacggcggcgacgcagaatccagcagccgggtacttgtccagacagacttccatttcctccaagtggaatgacgcagagaaatggatcgtgagccgccagaatgtcagtcagaacaacgtcgccaagggcgcgttgcagaaccagacagtaaaccagatgagctccgccgcagccaggggcgccgttgtgcccaaaatctctgctcgtcccgtgcagaaaatgaagagagtgaatccagctttgtctgctccgcgcagcatactggagaggttgtccttcgcttcgtatcagcctaagttggttaggcatgcagatgtctgtccagttagtaacgctggtgctaactcagagcatcacaaggcaactgatactggttcatcgattgaagtgaagccctgcaacgatacgaatgatattccaacagtccagtcgtcggtgtccgtgagagatgtgggcacagagatgactccaatacctagccaggaaccttcaagaactggaactccactagggtcaaggacaccaactcgaagccctaactgttcagtaccgtcaacacctgtaggggggaggtcaatagcatctcctcctggagaagactgcacagacgatggcccatttttccacaggaaatgcggcgtacatgcaaatgaattgtcagatactgagacgaggcttaaaacaaggcaagaaatcgctgcgcttggcatacagctaggaaagatgaacattgctacgtgggccagcaaagaggagctagagctagtctctgcggcaccgagcatcgctgatttggagcgcatcaggaaggaatatgctgctcgtgctgcatcgtatgaggaggcagaaaatactaaacatacagcaagattcaaaaaagaagaggtgaagattgaagcttgggagggtcgtcaaagagcaaaaattgaatatgaaatgagaagaatagaggaatttgctgagagaatgagaagtgaggccatggaaaagatggccgaaaagctagagatgacgcgccgcatagccgaagagaaacgagcttcggccaacgccaaaatgaaccagcaagcagctatagcggttcagaaggccgagaagattcgccaaacgggacgagtcccaggatcgagtatcctacgctgcggtggctgcttctgtggaccgtagtagatcatacataggattcgacagctagtatgttggtctgggatatatagtggtgggaaacctgaactccaccctctacaagtcagcattccttgattttagcatgaaaaaaggaatgtctctaaggtattcagatgcaaacgtgttcttgtttgtcatgtatgtaaattattccaatgattttaacttgggtcggtgtacaaggtaaccagctgttcgttggttaacgaagaagtcacgaatcgttcaaaaaaaaaaaaaaaaaaaaaaaaaaaaaaaaaaaaaagaaaaaaaaaaaaaaaaaaggcccctagggcc

SEQ ID NO: 1028 - DNA, 630 bp, Zea mays
  Clone ID: TF_ZmC262_9
cccacgcgtccgcggacgagtgggaacacaccaaagctagcctccgctccctccccttccagcttcgtctagacagagtccagcagacacggccaacagttaaaaccggttgctattagtacgcgcccgccaccacgctcgcacagacacacacacacacacacacacacacactcaacagcaacagctaagcctctcccacaagacagcaacatggctgaggaggaggccaagaaggtggaggtggaggtcaccaaggagcccgaggcggcggcgaaggaggacgtagccgatgacaaggccgtcatccccgcgaccgacccgccgccgccgccgccgccggccgacgactccaaggccctggccatcgtcgagaaagttgcagatgaacctgctcccgagaagcctgcccctgcgaagcaagggggctccaatgacagggatctcgctcttgcaagggtggaaacagagaagaggaactctttgatcaaagcttgggaagagaatgagaagacaaaagctgagaacaaggctgctaagaaagtatccgctattctttcatgggaaaacacaaagaaagcaaacatagaagctgaactgaagaaaattgaggaacaactggaaaagaag

SEQ ID NO: 1029 - DNA, 443 bp, Zea mays
  Clone ID: TF_LIB3137-040-Q1-K1-F12
attcggctcgagtcggaacgttgttataaacgttgctgttttcagataagcacgtaactcactatctatctatcaatcgatatctccgagttcagccgaaccaaactccgaagctatggcagagctccaaaccaaggttgaacctgttacggtcccggctccggtggatcccgagccaccgctagctgaggctccgccgctcgagaagaaagcggtggcggtgccaccacctgttccggctgcggcagaggaaaccaaagctcttgttattgtggagaaggagaaggagaatgagaagataccagaacctgtaaaaaagaacgcctcacgtggatcccttgatagagacattgctcttgcagaaatagagaaagagaaacgattgtctaatgtgaaggcttgggaagaaagtgaaaaatccaaagcagagaataaagcccaaa

SEQ ID NO: 1030 - DNA, 3389 bp, Zea mays
  Clone ID: TF_ZmC262_7
gcaaagtgtttaaataatgcactaagattcgttagtaagtgtttaaaaatgcattccttactgtttagctcaattgttggtaaccagtttgtactatttgtgatttggttatatttattggtccagcttgacgaagttgatgaggcggcaattgaaaaggaagataatggaaagatggaggacatcgattgcaatcatgacatccggattcatgaagatttgggtcatgtatgccgtgtgtgtggtatgattgtgagaagagctgattcaataattgattatcagtggaaaaaggcttcaaggagaagaacgaatggctatggaggacattcaaaagatgctgatgagatagattgtggtactgttaaactgtctgaagatttcatagtcgcagatattgctattcatcctagacatgctcggataatgaaaccacatcagttgggaagggtttcaactttttggttaagaatttgattggagacaagggccggccggcgcttctagctccgcccacaggtacagggaactcccacccccttacagcaaccattcagcttctcctagcagacagcaacatgacttcggcacgaggccaaaaaggtggaggtggaagtggaggtcaccaaggcggcgccggcgaaggagaacgccgccgaagagaaggccgtcatccccgcgaccgagccgccggccgcccaggagaagccgccagcgccggccgacgactccaaggccctggccatcgtcgagattgcagataaatctactcctgagaagcctatcgctgagaagcaagggggctccagtatcagagatctcgctcttgcaagggtggaaacggagaagaggaactctctgattaaagcatgggaagataatgagaaggcaaaagctgataacaaggctactaagaaagtatctgttattctttcatgggagaacacaaagaaagcaaacatagaagctgaaatgaagaagattgaggaacaactggaaaagaagaaagctgaatatgctgagaagatgaaaaacaaggttgcaatgatccacagggaagccgaagagaagcgagcgatggtggaggcaaagcgcggcgaggaggtcctgaaggccgaggagatggctgccaagtatcgggccaccggccacgcccctaagaagcccattgggtgcttcggagcctaagaaatgttccaagtcacaccgagcagaaagtgaaaacctcaaccagtgattgcttggtcacctcacacccaaacagaaagacattatttataagttggaagcacatgatcggttcaaaagaaatgcagtagggagtgcactgtacattcatccatgtctttcagaactttcagaggttaatgctgagcatagggctaacacctttagagatgatttagttgatagtctggtagattctatcactgtgagagatggcgtgaaggccaattttttcatgaatatcctgtcacttgctaattctgcaggagagaaagtgctagctttcagtcaatatatatctcccatgattttctttgaaaggctgctggtgaagaagaaaggctggcatgtggggaaagagatctttatgatctctggtgatactagccaagaagacagagaattggcaacggaccattttaacaactctgctgacgcaaaaattatgtttggttctatcaaggcatgtggggagggtatctccctcgttggtgcgtcgagagttgtcattctggacgtacacctgaacccatctgtcacccgtcaagcgattgggcgtgcattcaggcccggacagcagaagaaggtgtttgtgtacaggcttgtagctgccgattctgacgaggtaaaggtccatgagacagcattcaagaaagaagtcataccgaagctgtggttcgaatggagcgagcactgtactacggaagacttcaaacttggtcaaattgatattgatgactctggtgacgaactgttggatactaaagcaatccgcaaggatatcaaagcgctgtatagaaggtaggtaacaagctttgtggccactggacaccatgtacatattgcagtgctgaccgtcgagctgatccttaaactgaagaaagaggtgacgggtgttgcggtggctacattgcgcggtcattcccagctatatccgtggaatggcggcttcttttgttcgtagtatgtgccaacttggggcagcagtcagctgatccccagacacatttctagactcttttttaggctcaagtttctgagaattaacctgctatggcgtttagccttaagtaaatatttcgttcgcaacaataataacccagtaaacctaatttgttcttgtgcgtttgtggtggtggttcttgaaatttacctggcgccttcttcctgggctagatgctatgcaggtgtcacaggttggtttgttggcatgtagaatcgggaaatgctaatctcgaaagctcgtagtttccttttcccccccgggtgacatgtttattcacctcttactagttaccacgtccatttccaactataagatatgatactttggcttttgaagatacattacttttattacgtatagtgtatatcgccgccgccgccggccgacgactccaaggccctggccatcgtcggagaaagttgcagatgaacctgctcccgagaagcctgcccctgcgaagcaagggggctccaatgacagggatctcgctcttgcaagggtggaaacagagaagaggaactctttgatcaaagcttgggaagagaatgagaagacaaaagctgagaacaaggctgctaagaaagtatccgctattctttcatgggaaaacacaaagaaagcaaacatagaagctgaactgaagaagattgaggaacaactggaaaagaagaaggctgaatatgcagagaagatgaagaacaaggttgcaatgatacacaaggaagccgaagagaagcgagcgatggtggaggcaaaacgcggtgaggaggtcctgaaggccgaggagatggctgccaagtaccgggccaccggccacgctcctaagaagctcatcggttgcttcggagcttaagaagccttccaagtcagaccgagcagaaagtgaaaaacgtcagccagtgattgcttggtcctctcgctctatcaagtgtgtagtgtgtcttcgaaagtttgtaaagcctactgctgctgctgtatatactgatatcgcatccaaggcaggcgtttggtggtgtacatgttgaatgcttgacgagaaacattcttgtgtgtagttaagaggtcacgctgttgttgttgttgttgttgacattcaagcagacattttgttctaaaaaaaaaaaaaaaggccggccgctcgcgatctagaactagt

SEQ ID NO: 1031 - DNA, 832 bp, Zea mays
  Clone ID: TF_ZmC1422_2
tctctctctctctctctctctctgataagctagctcgcctgctgccgagtgataggaggagcgagatatatacatcgatctgaatccagcagcagcaggtagcatagcatagcatagcatagatggcggcggaggtggaggccgccaaggacatcgccgaggagaaggccgtcgtgccgttgccaccgtcgcccgccaagccggccgacgacgactccaaggccatcgtcgctcttgtcgtcaaggacgctgctgctgggaaaccttctacagctattattggaggttcaactgaaagagatgcttacctcgccaagatcgtgtccgagaagaggctgagtctgatcaccgcctgggaggagagccagaaggcgagagccgacaacagggctgccaagaagcttgccttcatcacgtcctgggagaacgccaagaaagcggagatggaggcggagctcagaaagatcgaggagcaactggagaagaagaaggcggcgtacgaggagaagctcaagaacaagcttgcgatgctgcacaggacggcggaggagaggagggcgcagacggaggccaggcgcggcgaggagaccatcctggcggaggagatggccgccaagtaccgcgccaagggcgagggccccaccaagctctttggcctcttgaaagcgtgatgacctctgtttcgtgtgtgtatttcgtattctcaacaagtgcacttggtgtgtgtgctgtttgttgttttctctcttgtattccaaggcttgcttgacaatatctgttgtattgtatttgtataggagtgcagtgcagtgcagtgctattctttcttccc

SEQ ID NO: 1032 - DNA, 1560 bp, Zea mays
  Clone ID: TF_ZmC1445_1
ttcaccgcacacccggcggcgccaagcccttcgaccaggtagctgaccagcgcgccccaaggcggtggagaaggcccagccgcagatggtctcacccggccgccactagaggctcatgttgagtgagcagacggcggagagcactagcagcagcggcggcggcgtcgagcgtcaataaagacaggagcagccggtggcggagaacgaggaggaggaggaggaacaggaggagttcagggacatccacgcgctgagcccgccgccgagccagccgtcgtcgtacggccgggcgcgcggcggcgagccgtgggggtccgccgcgggcgggagcaggcacacgtccgtccgctccgtcgggagcgacaccgcgcccagcgagcccttcccgactatgaccagggagttctcggccatggtcgccgcagcagccagcgccgcagcagccagccgtgacgcggacagcgacgtcgtgggcagggccgaggaggaggaggaggaggagctggaggagaccaacccgctggccatcgtgccggacagcaaccccatcccgtcgccgcgccggggcccgccgcccgccgccccgggcgccgacgcggcggcgctggtggccgccgacgggcacggaagccgcgaaggcgggggggtgtccgtggggcaggtcaggaaggaggaggtggagtccaagatcgccgcgtggcaggtcgccgaggtggccaaggtcaacaaccgcttcaagcgcgaggaggtcgtcatcaacggctgggagggcgaccaggtcgagaaggccagcgcgtggctcaagaagtacgagaggaagcttgaggagaagcgtgccaaggcgatggagaaggcgcagaacgaggtggccaaggcgcggcggaaggcggaggagaagcgcgcgtccgcggaggccaagcggggcaccaaggtggcgcgagtgctggagctcgccaacttcatgagggccgtggggagggcgccctccaccaagcgctccttcttctgaacccaccggcctcttcttcaccagttcctctgtcttgccgccgccgcctgtgcagttcagttcagttcagttgtcctgtgggtcggaccgttcaccgcttcactccacgggatcaggcacagtgatcagtgccgtgctagctgtgtggaacgcttgttttagtgttgtatccacatgtacgatttgtaacgtttccttgcttctcccgtttcgtgttttcgtatggtatctatggtattgcaaagtccatggccacgatagacagggaaagcatatgtatacaccattagaaggatgtgctctgcgcctctgcccgagtcttgaggacaggagctgcatgtatttttcaccaatataatggttgtgtatgtcaattacgaaaagatatgaacaccattaccaccgcgtaaaaaaacaacaaaaaaaactcactaacactaggtggacaaacgccccgcacgacctcataacttgacctctgtgccattagtcgtgtaaactttgtgcttgtctgctgcatgcaccgacgagcttcactacttggaacttca

SEQ ID NO: 1033 - DNA, 3606 bp, Zea mays
  Clone ID: TF_ZmC119_1926
atatacacatatattgaacaacattataattaatataatataaataagtaccattcaatatatcataaataagcattgtcaaacaacgcatacataagtgtactctaaatctaaactaaaatacaactgtttgcactaatgttaagcctaactttatatatgaattaaagtctccacacttttgtgaccaccaaatttgaattctattctaagttttcctgtacaacaaataggagaaaactagacatagcaaaaagctccaagcagcaaaagctgcccttgtgcttctccctgttcttgatgactcctacacgctcggtgttcctcccgccagtcaccatgaccatgttgtcgacgtcaaacttgatgaagtccatgatcttgttggtctccagatcgattttgatggtgtcgttggccttgatgagcgggtcgaggtagcggatggcgcgaccatcgtaggtgttcaggtaggggatgcctttttggccaaactgaacaaacctcaccttgcagagcttgaacatattggtctcgaccgaagctgagtccattgtaatctgctcgattgtcttcagtccctcatattgatccttcaacatcttcttatgataatcgttaaggtacactgtttgatcataaataggatatttaacagaagacactgcttgacatctagctgcacattcttcccgatgaacagctagatattcattaagctttggaagatcctgcctgcgaaatacatcccagacagcagcaccagccagggatccttctgaattattagtgtttggctcctcgatgtgtgaaatcgagtgtttgtgtgattgctcttcaatatccagattcaaattttgaacatgagtatttacatgaacactagttccattagcaatcctttcagatacatcagactgtacccttaccctcttgggacattggtaatgcacttcagttgcatgcattaacatgtgaaccacatcgcacatgttaatcattagatttgtcattgaatcacctttaccaagttcttggtgacttccatgtgcaattagcagtttcatccctaattcaggttgtaaggcatctggtattgttttctctttccttttccaaaattatccttattcccaatcactgctccgtctgggatttctagcttgacgccaggttttgcagtgatggtcactttccccttcagtacaattccagaaccgaaccaaacatcaccggaaaccttcaagctgtcaagctcaacaatgctaggtatggacttgaagcgaccaaggaagctcccaaccttcttgaactcaggaccaagttcaattgagggatttgatggatttgttctggctgaattacgtgtaacgaagccatcaaccaaggtatatagatcagactgtactagctgcaaatctgatgtcgccttaactggtaggaagcgggaccttggaacgttgataccaatggcatggtcaaagaactggtccaataaaactttatttgttatatttatatatatagtcacataaaagcatggtgatgtacatagtactttggctcaaatgcttccctgataataataggctccgtgtttttccaatgcaagattgataagaatcactctggagagggtcgcccatgctggggcctttagggctcatttggcagcctggtgaattgcacaccggccagccacagccagcgggggcaatacctgcattacctatcccacgtgttgtgcaatcctgtgggggcataggttccctgtgtccgtttggcaaagattgctgcaggtaacagacaagcagtgcaagagggacaagcatgcacatctacgaacaagcagtgcaggtggacaaaaggcaggtcacatgataatacttcttaaccttaacaaataagcatagtaattgaaatatgtaagaatcacagataattataaacatgaacatggaggtaccattgctggtgcttttatttgacaatataaatatttaattatttttagaaaaattctattttgcaccaaccaaagaattttacgaatcacaaagtctgcaaaatggaaacaatagccctagcagctagcaagagatagattggttgagctcttcctgattgtgttctttgtgtatggtgattcattgatcatcagaattgattctctgtaattctctaaagtaaactcagtgacacatataggattccatgcatcaactaaatgagaagaagctgcttttttaactctcagttccatggtttattttagagaactgctagaaaaagtgtggaaaaaatatttctcaataaaaaattgtttgatgatagagcttcttctaaattcagcgtgaaagattctaatgcttttcttcctttttctttaaagaaaaaatatagagctaggcacaaataattactagaacctacactcttcgggtctagaaacaacaagtaatctaaaaatggaggtcatcaacattgcgcagcgcttgctaaatcgcagttcctctgttggtgatggaaaaatgtttttttgattgacacaaccaccacatcaaacaacagatgagattattgttgtcagtaactcagcatctagcactaatcgtatgaccatagtcctagtgctgctcatcaaaatatgcatcagtttgatagcaccagagaatgaatgcatgtgtttgtgagaaatgcaaactgacatataattgaaaaccaagaaatgctaatatactctggcacaagaagaagaaatttactctcacagctacatgagggttcctttttaacataccagtatttagtaaactgtaacttgatctcagcttagctagttgctcagttcttaataggaacaagaatataaagcaagcctaaagtgcaatgtttaaaaaaactaagcctgaagtgcactgtttaaaaaaaactaagctatgtttaaactgcatgcacggatgcaccgaccaatttatcagaaaagacctaatcaaaagagaaagatttctaggtggagttctagattgcaagtttagattgcacgcatggatgcaccgatcaagctatcaagctaatctatcctaccagcagatcctcagcgatgatgcaagcaagcactagcagcttcttccataacgagaatcaaatatagacaacagatctaaacggaataagctaaaaaggtggaagctcaccagatcctcagtgtcttcttctacaatgagagaggtggcgatatagaagcggtgggtgaaggcgacgatggagggggactaggggaggtgccatagaagctgcgggtgatggagttgaccaccagatccagaggaggagcaccggctgctgaatccaaaggaagagacgagacgttccatatccgaccattggagggcaacgactggatctggaggaggtttgacggtgagcttcttcctatgtgtattcttcttcgccaaggactccagccccaacgctagcgggcccgggggacggcggttcactgaagatggagacgaggacatggtggcagcggtgctagggttatggggtttgtggaagacgaatgagagggaagttggctcgccgctcgcctcgtgccgaatt

SEQ ID NO: 1034 - DNA, 3409 bp, Zea mays
  Clone ID: TF_ZmC220_3
gccaccgaggaaagtggcgaggaaaacctccgggagaaggtgcaggttggtggcaaggtaaacctcacggaggtggggcaggaaggtggcgaggaaaacctcacggagaaggtgcaggaaggtggcgaggaaaacctcacggcaaaggagaatgaagggctagtggaggtctcaaaacccccccaaaggcgccggaaggatcctgttgcagacccctcttctcttgagtctagtggtttcatgcgatttcgggagaggaggaatgcttcagcgggtcaggagcaggggcctaagaagagaaggattactgaggattcaaacatgtgccatcagtgccagaggaatgatagcggaagagttgtacggtgccaaggctgtgccgtccgaaaaagaaaatacagatattgtgtgaagtgcattaaacgctggtatccacatttatcagaggatgattttgcgaacaattgcccagtttgtcaaaataattgcaattgtaaggcttgtctgcggggagacataacccgagccaactcgaggaaaaaaaagaagttactgcaaataaattctggaggatatagtgtatctgaacaagataaaattaaattctcaatgcgtatcgtgcactttttgcttccttggctgaaacaattccatcaagagcagatgcaagagaaaagtgccgaggctgcaactaaaggtattgatgcagacaaactggaggtccctctaaccatttgtggaaaaaaggaacggatatactgcaacaactgcaggacatctattgttgacttccacagaacctgcaataaatgtaactatgatctctgtctccagtgctgccaggagcttcgtcgaggccttgtttctggtaatgatggcaaggttgatggtggaggcaagcaagattttctatcgggagttagtcatgataaaatcataagcaaagggccatccgatggacagaatgacatgttgatagatagtgtagttcctggtgaaaacaacacttctagcttgagacagtggagtgtgaataaagatggaaccataccttgcccaccaaatgcatttggtggttgtgggagctctcttcttgaactgaagtgcttgtttaaagagaagtttattgctgaattactggagaaagctaattcagcgctcaataatgaaatggaggtgaagatagaaggatcaaaatgtccctgcttcactgaatccggtgacatggatgatggtatatcacggaaatcatcttgcagggagaattcctgtgataactacatatattgcccaaccgctacagatgtccaaaatggaagtttagaccatttccaggagcattggttgaagggtgaacctgtaattgtccgtgatacacttgcgttgacttctggattaagctgggaaccgatggttatgtggcgtgccttacgagaaaagaaagagaaagttgagaggctctcagttcttgctcttgaatgcttgggttggtgtgaggtttgtaatattctcatgactgttaatagctcgaaataataagacattctgggtccagacgatttgcccctgttgcttaagcttaaagattggccaccacatagttcttttgaggagcggctcccaaggcatggtgcagagtttatgtctgcattgccatttcgtgaatacactgatcctaaatggggacctcttaatctggcagtaaagcttcccgataatgttaataagccagaccttggtccaaagacttatattgcatacggtgtttccaaagagttgggaattggtgattctgtcaccaagcttcactgtgatatgtctgatgcggtcaatatcctcacacatactgatgaaataaaactcaaagcaaaaaggattgccgcggtggaaaagaagaagcggtgtttaggaatgaagattctaatctaccaaggaagcaagtggaggccttcaacggtgtgcagattatgttggtatgccaacagctcccagtgaatctaacaaggagccaaggcctgaagagtgtgtaaatgaactgggcattaaacaaccagtacagcatgttgcttccgaggagcaggaaggagttcaagatgatgccaaggcagatgcaaatgttatgaatgtttcttttggtaagggaaaatcagaagattcttttggcacaattaatggtaccaacagtggagataaaatagaatctcctagtggtttagcagaaagaacattgactcagcctaccactaagggttgcagtaagcagcgtggccgtagttctaatggtagaggaaacaggactaaaaaaatagaagaggggaatgcgtctggactaattgctgtggctcccgagtcagaagatgatgatgatgccccatttatagatggaaaccaagcagagggtggtgcactgtgggatatttttcgacgggaagatgtgagcaaactgcatgattatctaatgaagcatgctgatgagtttagacattgcaactttgagccagtgaagcaggttactcatcctatacatgatcagtgtttttatctaacaattgagcacaagagaaagcttaaggaagaatatggagtcgagccttggacatttgaacagaagctaggtgaggcagtatttatcccggcaggatgtccccaccaggttagaaatttgaagtcttgcataaaggttgcactagattttgtttctccggaaaatgtccgagagtgcatcaggttaacagaaggtttccgtctgctgccgaagtggcataaggtgaatgaagataaactcgaggttaagaagatagctcttcatgcattcaatcaagctattaaagatatcactgatgaatcatctaatagcaatgaaagaatgaagccaaatggttacacttggagcagggctcacaaaatattgatgtgctggtgaacaaaggtgtagggttttctccaagatgtcggatttgacactgaagaagattgagtattggaagaggtccgattgaacatttggcactgacattcaccaacttgttcaaatagaggaaaaggatatggaaatggagaaagagcgcatgtatgcatgtgtaggtcagggagtggctcggatcagccttgagtcaatttccactgcgttttcttcggttatggatgagcacgaggagtaaaagaaacagaagaaggctgagtgtgattctcatatgcttattttcttgtcctgtgtaatggatgtgtgtatgtgaaccatatgcgaacttaaacgtctttgtttgtaccggtcaggccattctgagtgagggttccgtctcttctttttaggactccactgcgaggtgtcggtgtgtgagaaatggtgcaaacaagtttctgagaaatggtgcaaacgtgtgtatgaaactctacgaggcatactctt

SEQ ID NO: 1035 - DNA, 956 bp, Zea mays
  Clone ID: TF_ZmC119_1493
ggtgaaaatgtagtatttgaatcttgaaccctgtgttcacaatgtaacaatttcggtctaattattcttcagatgctaccaacagagattattgtgctaacaattctacatgagctttccagcgcctttttatcttgttctcaggagcttaactgttactcttcctaacccacaatatacaggtaaagtcaatgtctaacccaataagaattagaatgtgttcctttcatatgacacaatataatacatgtacaagcactatatctacttcaatcttctgaatggcatgtcataatttcaccaggcccccacaatctcaactgcaagataccttccgtttgtttactcttgccaagttctctgaaaccgccctagtcaaattttgatcctcaaaactagcatcaagattgaacttgggatcaagggttattctctgaatttctctaacagcagaacttgctgcatataaggagatcttttttacctcaagcatcttcagttttgcaagatgaccatttggcaggcaacggatctcttgggacagccggactgactctggcaaactctcaggtgacaaaaaattgagagccaattgaaccgtggactggaggtttttcaattggaaaggacacccagctggaatgaaaacagcctcaccaatatgttggtggaatgtgaagggttcaattccatattgatccttcaacaccttcttatgataatcgttaaggtacacagtttgatcataaataggatacttaacagaagacactgcttgacatctagctgcacaatcttcccgatgaacagctagatattcattaagctttggaagatcctgcctgcggaatacatcccagacagcaccagccagggatccttctgaattattagtgtttggctcctcgatgtgtgaaatcgtgtgtttgcccgctactctgcgttgttaccactgt

SEQ ID NO: 1036 - DNA, 308 bp, Zea mays
  Clone ID: TF_LIB3115-030-P1-K1-C5
cgggtctggaattccgggtcggaccacagccgtccgccaacgcttccggggccccttggccacagattaaagtttagggaggagtttggaatcaagccatggacttttgtccaaagactgggaaatccggttttaatacctgttgggggtcctaataaagaccggaatctaagagtttgcaccaagatagttttggattttgtttaaccagaaaacattcataaatgttttactttaaccgaggttttccggagacttcaagggggccccagggcaaaaaaggaaaaactagaggtgataaaaataat

SEQ ID NO: 1037 - DNA, 1179 bp, Zea mays
  Clone ID: TF_ZmC1114_1
ccggattgggcgatagccgtactggtcgcgtccgtctttcacgcccgcgcgatattaaaaggtgagagggtgtcagcttgggaaccatcatgcccggtataccccaccacaatataaacctattcgatctagctttgctcacatttgtctgatgcagttaatgttttaatgcataccatccgtgttgtgccttctgaagaacaaaaagaggggataagagatttgaaaataaggcatgcagaacaagataaaaaggaatgcttggggaattcatcaatagatggaaataaaacaagcatggagcatgctcatatatcatcagtttcctgcgaggatggtggaggtgcactatgggatatttttaggagggaggatgttggaaagctgaaagagtacctcacaaaacattccaaagaatttcgccatatgtactgttgtccagttgaaaagatatttaaccctgtacatgatgaaacattttatctgacgagtgggcacaagagaaagctcaaggaggagtatggaatcgagccatggacctttgtgcaaagacttggagatgcggttttcatacctgctgggtgtcctcatcaagtacggaatctaaagtcttgcaccaagatagctctggattttgtatcaccagagaacattcagcaatgtctcagcttaaccgaggatttccggagacttccagtgggccacagggcaaaagaagataaactagaggtgaagaagatgatcgtctatgccgttgagcatgctttggcgattctgaaagagccttgcacaccccgcgagtccgcctgaacaagctggcatcatatctgggtttctgctagtcaacgagggaaactagagaacatgatgcgatgttgtgcgacagtagacgtggggtagcgctagttgctttgcttgtcggcacaaataataatcttggaaatattactaataagggctcggttaggaagggattggaggagattaatttttttttattttaactgaatagaaagagatttgatgagatccctatacaatcgaaaaaggcctaaaatggtagattttgctgatggtgtgcatcactgaaaagctgggcatgctgaaaaaaatagatgtcatactgtaaatctacaaaatgtggcttcgtttccaaaaggccttgcccctgttatctat

SEQ ID NO: 1038 - DNA, 1345 bp, Zea mays
  Clone ID: TF_ZmC119_1806
gaacaacattataattaatataatataaataagtaccattcaatatatcataaataagcattgtcaaacaacgcatacataagtgtactctaaatctaaactaaaatacaattgtttgcactaatgttaagcctaactttatatgaattaaagtctccacacttttgcgaccaccaaatttgaattctattctaagttttcctgtacaacaaataggagaaaactagacatagcaaaaagctccaagcagcacgtggatggtctcaaagctgcccttgtgcttctccctgttcttgatgactcctacacgcctggtgttcctcccgccagtcaccatgaccatgttgtcgacgtcaaacttgatgaagtccatgatcttgttggtctgcagatcgatcttgatggtgtcgttggccttgatgagcgggtcgaggtagcggatagcgcgaccgtcgtaggtgttcaggtaggggatgcctttttggccaaactgaacaaacctcaccttgcagagcttgaacatattggtctcgaccgaagctgagtccattgtaatctgctcgattgtcttcagtccctcatattgatccttcaacatcttcttatgataatcgttaaggtacactgtttgatcataaataggatatttaacagaagacactgcttgacatctagctgcacattcttcccgatgaacagctagatattcattaagctttggaagatcctgcctgcgaaatacatcccagacagcagcactagccagggatccttctgaattattagtgtttggctcctcgatgtgtgaaatcgagtgtttgtgtgattgctcttcaatatccagattcaaattttgaacatgagtatttacatgaacactagttccattagcaatcctttcagatacatcagactgtacccttaccctcttgggacattggtaatgcacttcagttgcatgcattaacatgtgaaccacatcgcacatgttaatcattagatttgtcattgaatcacctttaccaagttcttggtgacttccatgtgcaattagcagtttcatccctaattcaggttgtaaggcatctggtattgttttctctttccttttccaaaattatccttattcccaatcactgctccgtctgggatttctagcttgacgccaggttttgcagtgatggtcactttccccttcagtacaattccagaaccgaaccaaacatcaccggaaaccttcaagatgtcaagctcaacaatgctaggtatggacttgaagcgaccaaggaagctcccaaccttcttgaactcaggaccaagttcaattgagggatttgatggattt

SEQ ID NO: 1039 - DNA, 447 bp, Zea mays
  Clone ID: TF_LIB4172-054-R1-L1-D4
aattcggcacgaggcatatattgcccaaccgctacagatgtagttatcacaagtttagaccatttccaggagcattggttgaagggtgaacctgtaattgtccgtgatacacttgcgttgacttctggattaagctgggaaccgatggttatgtggcgtgccttacgagaaaagaaagagagagttgagaggctctcagttcttgctcttgaatgcttgggttggtgtgaggtcgatgtaaatattcatatgttttttgcggggtattcaagtgggcttgttggtccagacgatttgcccctgttgcttaagcttaaagattggccaccacatagttcttttgaggagcggctgccaaggcatggtgcagagtttatgtctgcattgccatttcgtgaatacactgatcctaaatgggggtctcttaatctggcagtaaagcttccc

SEQ ID NO: 1040 - DNA, 2279 bp, Zea mays
  unsure (1)..(2279): unsure at all n locations
  Clone ID: TF_ZmC3861_1
ctgaaagcaaatcagtaagggaggctgcaagcaggaagggctcaagcgataacttcctatactgtccagttgctactggtattcaagatgatgacatagtgcattttcagatgcattgggcaaagggtgagccagttgttgtttctgatgtccttcagttaacctctggtctgagttgggagccaatggtaatgtggcgggcattgcgggaaagatccaaaggcaaagcagaagatgagcaatttgctgtttgggcgatagactgccttgattggtgtgaggtggaaattaacatacataggttcttttcgggatatacaacaggcagaactcatgctaggactcactggcctcagatgcttaagctaaaagactggcctccttctagttcctttgacaagcgattgccgcggcatggtgccgaatttattagcgcattgccatttcgtgagtatactgatccacggtatggcccgctaaatcttgcagccaagcttcctgctggtgtcttgaagccagatcttggacccaaaagttacattgcttatgggttctacaaagaattgggcaggggcgattctgtgaccaagcttcactgtgacatgtctgatgcagtaaatatcttaacacacacagctgaagtcacttgtcagactgatattggcttaattgaaaaaatccaaaaagacatgagagagcaagatctgcaggaactatatgggggtctaaattcccgctctgagctcaagttgtcaccagctccaactgaatgcagggatgaatctgttgatgaaggattgaagacctcatatagtagagaaggcaattgtgtaaatagagacaattataatggtttggacatcaatgcattaccacctgatgacgatggagatattgcaaaggataaagaatcatctcctggatcagagtggcaaagtgaactaggtcagagttcagatcacaacaatggggtcaacacaactgatgagatgtacaatggagctcattacatttcacacaatcaaaaaagcactggcaggaaagttggcattaaacctcaagaagagaaatctgaaaaggctgattgcagtggcacatgtgcttatctaaaaggaagttctgaagataatccggaaatgcctattgtggagagctcagaggagcagagcaccggtggtgctctatgggatatcttccgcagacaggattctgataaattgcaagattatcttaggaagcattgctctgaattccggcatatttactgcaatccagtcaaaaaggtatttcacccaattcatgatcagtccttttacttaactgaggagcataagagaaagctcaaggaagaatatggtattgaaccctggacgtttgaacagaagcttggtgaagctgttttcattcctgctggatgtcctcaccaagtgagaaatttgaagtcctgcatcaaagttgcgcttgattttgtttccccagaaaatgttggtgagtgtgttaagctgacggaggagtttagacgacttccatctttccacaaggctaaagaagacaaactagagatcaagaagatggctgttcatgccctgaacgaagctgtaaacttcctggatcctcgttcctcagaagagttgaaaattggggttggtgagaacatctgtgaggatgaatctgtagatgagaaggagctgccgcctagaagaggagttgaagtgtcaggcgttgatgagaagcctaaatagaaggcgagggaggcatcaagtccaaaagtgaagctgctgatgaggtcgcccattttaggttctcggaatcgtggttaattgatttgtcaaagcccctgttcatgtatggtgatcgctggctgacaccgatggatgaagagaagcaggacacgtgtgtgctgctgatatgtcgtgtcggcgagtgacatgaatagcatccctatccctatggtattattggtcttttatgtttatgtttgatcatttgtcttattcagttttttttacaaataataaaacaagaggttaaaagtaaatgacgtcatttatttaattttaagacggggcaaatgcaaaacaaaaaatagccgagagggaagcgtggtcacagaatcgcgcctgccgcattctttgtggaacccataagcgntgcgtcttttgggtcgaggatctggcttcaagacaccagctggaagcttggctgcaggatttagcgggccatatcgtggatcagtatactcacgaaatggcantgcgctaataaattcggcaccatgc

SEQ ID NO: 1041 - DNA, 1942 bp, Zea mays
  Clone ID: TF_UC-ZMFLMO17207D05_FLI
gccaacttccctctcattcgtcttccacaaaccctataaccctagcaccgccgccaccatgtcctcgtctccatcttcaatgaaccgccgtcccccgggcccgctagcgttggggctggagtccttggcgaagaagaagacacatacagccggtgctcctcctctggatctggcggtcaactccatcacccgcagcttctatggcacctcccctagtccccctccatcgccgccttcacccaccgcttctatatcgccacctctctcattgtagaagaagacactgaggatctgggaacctatgccccacaggactgcacaacacgtgggataggtaatgcaggtattgcccccgctggctgtggctggccggtgtgcaattcaccaggctgccaaacgagccctaaaggccccagcatgggcgaccctctccagagtgattcttatcaatcttgcattggaaaaacacggagcctattattatcagggaagcatttgagccaaagtactatgtacatcaccatgcttttatgtgactatatatataaatataacaaataaagttttattggaccagttctttgaccatgccattggtatcaacgttccaaggtcccgcttcctaccagttaaggcgacatcagatttgcagctagtacagtctgatctatataccttggttgatggcttcgttacacgtaattcagccagaacaaatccatcaaatccctcaattgaacttggtcctgagttcaagaaggttgggagcttccttggtcgcttcaagtccatacctagcattgttgagcttgacatcttgaaggtttccggtgatgtttggttcggttctggaattgtactgaaggggaaagtgaccatcactgcaaaacctggcgtcaagctagaaatcccagacggagcagtgattgggaataaggataattttggaaaaggaaagagaaaacaataccagatgccttacaacctgaattagggatgaaactgctaattgcacatggaagtcaccaagaacttggtaaaggtgattcaatgacaaatctaatgattaacatgtgcgatgtggttcacatgttaatgcatgcaactgaagtgcattaccaatgtcccaagagggtaagggtacagtctgatgtatctgaaaggattgctaatggaactagtgttcatgtaaatactcatgttcaaaatttgaatctggatattgaagagcaatcacacaaacactcgatttcacacatcgaggagccaaacactaataattcagaaggatccctggctagtgctgctgtctgggatgtatttcgcaggcaggatcttccaaagcttaatgaatatctagctgttcatcgggaagaatgtgcagctagatgtcaagcagtgtcttctgttaaatattctatttatgatcaaacagtgtaccttaacgattatcataagaagatgttgaaggatcaatatgagggactgaagacaatcgagcagattacaatggactcagcttcggtcgagaccaatatgttcaagctctgcaaggtgaggtttgttcagtttggccaaaaaggcatcccctacctgaacacctacgacggtcgcgctatccgctacctcgacccgctcatcaaggccaacgacaccatcaagatcgatctgcagaccaacaagatcatggacttcatcaagtttgacgtcgacaacatggtcatggtgactggcgggaggaacaccaggcgtgtaggagtcatcaagaacagggagaagcacaagggcagctttgagaccatccacgtgctgcttggagctttttgctatgtctagttttctcctatttgttgtacaggaaaacttagaatagaattcaaatttggtggtcgcaaaagtgtggagactttaattcatataaagttaggcttaacattagtgc

SEQ ID NO: 1042 - DNA, 2584 bp, Zea mays
  Clone ID: TF_ZmC220_2
tgcatacggtgtttccaaagagttgggaattggtgattctgtcaccaagcttcactgtgatatgtctgatgcggtcaatatcctcacacatactgatgaaataaaactcaaagcaaaaaggattgccgcggtggaaaagaagaagcggcgtttaggaatgaagattctatggatttctgatatcagaggagctttgtcagtgggggttttgacatattaccttcagctttgggatttgatatctggcatcgagctgcagccggaggttgacgacaagcatatcttcagtattgccccgaatggtgtgtactcagccaaatcaacatatgaaggtctatttctgggatctgtgacatttggacactataaaagaatctggaaatcttgggcattgccaaaatgtcgtttcttcctttggttggttgcccataagagatgctggacaactgatagattggcaaagcgaggcctaaatcatccagagcaatgtcttctatgtgatcaagaggaagaaaatatggaccacctccttgtgcaatgttccttctcacgggaattctggtaccttttactcaggaaattcggtcttcactctcttgcaccacagccgactgcaaactccttcctgggatggtgggaagtggtgggaggagcagtccttggtctcacaaaaaagggccttaactcatcattttgggagcttggactttatggaatcatcgaaataaatgcatttttgatggctgcaatccaagtatgtccttatgtctcagagctgctgatgggaaataagaagatgaaagagctggggcaaaagcctcgcttagggttttctccaagatgtcggatttgacactgaagaagattgagtattggaagaggtccgattgaacatttggcactgacattcaccaacttgttcacacagacgtccgtatctaccaaggaagcaagtggaggccttcaacggtgtgcagattatgttggtatgccaacagctcccagtgaatctaacaaggagccaaggcctgaagagtgtgtaaatgaactgggcattaaacaaccagtacagcatgttgcttccgaggagcaggaaggagttcaagatgatgccaaggcagatgcaaatgttatgaatgtttcttttggtaagggaaaatcagaagattcttttggcacaattaatggtaccaacagtggagataaaatagaatctcctagtggtttagcagaaagaacattgactcagcctaccactaagggttgcagtaagcagcgtggccgtagttctaatggtagaggaaacaggactaaaaaaatagaagaggggaatgcgtctggactaattgctgtggctcccgagtcagaagatgatgatgatgccccatttatagatggaaaccaagcagagggtggtgcactgtgggatatttttcgacgggaagatgtgagcaaactgcatgattatctaatgaagcatgctgatgagtttagacattgcaactttgagccagtgaagcaggttactcatcctatacatgatcagtgtttttatctaacaattgagcacaagagaaagcttaaggaagaatatggagtcgagccttggacatttgaacagaagctaggtgaggcagtatttatcccggcaggatgtccccaccaggttagaaatttgaagtcttgcataaaggttgcactagattttgtttctccggaaaatgtccgagagtgcatcaggttaacagaaggtttccgtctgctgccgaagtggcataaggtgaatgaagataaactggaggttaagaagatagctcttcatgcattcaatcaagctattaaagatatcactgatgaatcatctaatagcaatgaaagcaaatggatccggagatagtgaggatcatgaaggccattgaatccatgcttgatgtcatggaagttagcaccacccgcattcgacatcttgctatcgagaacctgaatgaaaaccgtagtggcttatcggatgccgacaagataacaaaacctgattttagtgtattatgcatgatattagtaccttatataatacgtagcttggagaaaaggccattcaccgtttctcattgttgggaggttctaaagaatgaagccaaatggttacacttggagcagggctcacaaaatattgatgtgctggtgaacaaaggtgtagggttttctccaagatgtcggatttgacactgaagaagattgagtattggaagaggtccgattgaacatttggcactgacattcaccaacttgttcaaatagaggaaaaggatatggaaatggagaaagagcgcatgtatgcatgtgtaggtcagggagtggctcggatcagccttgagtcaatttccactgcgttttcttcggttatggatgagcacgaggagtaaaagaaacagaagaaggctgagtgtgattctcatatgcttattttcttgtcctgtgtaatggatgtgtgtatgtgaaccatatgcgaacttaaacgtctttgtttgtaccggtcagatcattctgagtgagggttccgtctcttcttttttagactccactg

SEQ ID NO: 1043 - DNA, 1155 bp, Zea mays
  Clone ID: TF_ZmC3861_2
cgggaaggactggccgccatctagttcttttgatcagagattgcctcgccatggtgctgagtttatcagtgcattgccatttcctgagtacactgatcctcgatatggtccgctgaatcttacagtcaagctacctgatggtgcattgaagccagatcttggaccaaaaacttacatcgcttatggattttaccaagagttaggcaggggtgattctgtgaccaagcttcactgtgacatgtctgatgcggtaaatatattgacacacacagcacaagtgccctatgcgcgttatcaacttgagaagatagaggaaaccagaaagaaaatgaaagaacaagatcttcaggaactttatggtgtttcagaactaaacctatcatcaccttttactgattccaggaatataagtgctgatgaaatgtcaaagacctcatgtttggacgtcaatgatgtaccacctgttaatactgaatctgaggtacaaagtggggcaggccagtgttcagattacattgacaaggatagaagttatgctgggatgcataacggggagagaaccggtggtgccttatgggatattttccgaagagaagattctgacaagatacaagattatcttaggaaacatgccacggaattccggcacatcttttgcaatcctgtgaagcaggttattcacccaattcacgatcagactttctacttaaccgaggagcataagagaaagctcaaggaagaatatggtgttgaaccctggacgtttgagcagaagcttggtgaagcggttttcattcctgctggatgtcctcaccaagtgaggaacttgaagtcttgcattaaggttgcgatggactttgtctccccagaaagcgtcaacgagtgcatgaaactgactggagagtttaggcggcttccacctgatcacagggctaaagaggataagctggagatcaagaagattgctcttcatgctctgaaccaagtagtaaatttcttggatccttcctcggagtggtcgaagagttggtttgcccaacccaagaacaaaaaaaaggctggagctgaagaacaggagaagcctaaaaggaagcgtggccgcccatgtcgcaagtccaacgatgaagctgctggcgataggcacagaaagaagaa

SEQ ID NO: 1044 - DNA, 1223 bp, Zea mays
  Clone ID: TF_ZmC220_4
gtgaggcagtatttatcccggcaggatgtccccacctagcttctgttcaaatgtccaaggctcgactccatattcttccttaagctaggtgaggcagtatttatcccggcaggatgtccccaccaggttagaaatttgaagtcttgcataaaggttgcactagattttgtttctccggaaaatgtccgagagtgcatcaggttaacagaaggtttccgtctgctgccgaagtggcataaggtgaatgaagataaactcgaggttaagaagatagctcttcatgcattcaatcaagctattaaagatatcactgatgaatcatctaatagcaatgaaagcaaatggatccggagatagtgaggatcatgaaggccattgaatccatgcttgatgtcatggaagttagaacaacctgcattcgacatcttgctatcgagaacctgaatgaaaaccgtagtggcttatcggatgccgacaagataacaaaacctgattttagtgtattatgcatgatattagtaccttatataatacgtagcttggagaaaaggccattcaccgtttctcattgttgggaggttctaaagaatgaagccaaatggttacacttggagcagggctcacaaaatattgatgtgctggtgaacaaaggtgtagggttttctccaagatgtcggatttgacactgaagaagattgagtattggaagaggtccgattgaacatttggcactgacattcaccaacttgttcaaatagaggaaaaggatatggaaatggagaaagagcgcatgtatgcatgtgtaggtcagggagtggctcggatcagccttgagtcaatttccactgcgttttcttcggttatggatgagcacgaggagtaaaagaaacagaagaaggctgagtgtgattctcatatgcttattttcttgtcctgtgtaatggatgtgtgtatgtgaaccatatgcgaacttaaacgtctttgtttgtaccggtcaggccattctgagtgagggttccgtctcttctttttaggactccactgcgaggtgtcggtgtgtgagaaatggtgcaaacaagtttctgagaaatggtgcaaacgtgtgtatgaaactctacgaggcatactcttacctagtattgtgtctagtgaaaaatgggacacatccgatgctactgtaaactcacttgttgcactcactttttgagttggatttttctttc

SEQ ID NO: 1045 - DNA, 455 bp, Zea mays
  Clone ID: TF_uC-zmroteosinte038a09b1
tcgtatattgtaatgctgcttatgatatacactagagatgcttaattcggtaggatatctctcatttttgtaataatggtagatttatttttgtaatatctgcgcccgtcccaccgcaagggggtaagccaacttccagctttttttagggtcatcatgttgatatcgcggctgttagtacttgttggattaggtgttagttttgaccatagccaagcttttgattcatcataatctgatcccattaccaatttctcttcctatgtgtacatgttcacccttcaaccaatgctcctggaaatggtctaaacttccattttggacatttgtagcggttgggcaatatatgtagttatcacaggaattctccctgcaagatgatttccatgatataccatcatccatgtcaccggattcagtgaagcagggacattttgatccttctatcttcacct

SEQ ID NO: 1046 - DNA, 2337 bp, Zea mays
  Clone ID: TF_ZmC119_1620
gcaaaaccgtggtgaaaatatagtatttaaatcttgaaccctgtgttcacaatgtaacaatttcggtctaattaattattcttcagatgctaccaacagagattattgtgctaacaattctacatgagctttccagcgcctttttatcttgttcctcagaagcttaactgttactcttcctaacccacaatatacaggtaaagtcaatgtgtaacccaataagaattagaatgtgttcctttcatatgacacaatataatacatgtacaagcactatatctacttcaatcctctgaatggcatgtcataatttcaccaggcccccacaatctcaactgcaagataccttccgtttgtttactcttgccaagttctctgaaaccgccctagtcaaattttgatcctcaaaactaggatcaagattgaacttgggatcaagggttattctctgaatttctctaacagcagaacttgctgcgtataaggagatcttttttacctcaagcatcttcagttttgcaagatggccatttggcaggcaacggatctcttgggacagccggactgactctggcaaactctcaggtgacaaaaaattgagagccaattgaaccgtggactggaggtttttcaattggaaaggacacccagctggaatgaaaacagcctcaccaatatgttggtggaatgtgaagggttcaattccatattgatccttcaacatcttcttatgataatcgttaaggtacacagtttgatcataaataggatacttaacagaagacactgcttgacatctagctgcacattcttcccgatgagcagctagatattcattaagctttggaagatcctgcctgcggaatacatcccagacagcaccagccagggatccttctgaattattagtgtttggctcctcgatgtgtgatttcgagtgtttgtgtgattgctcttcaatatccagattcaaattttgaacaggagtatgagcatttacatggacactagttccattagcaatcatttcagatacatcagactgtacccttaccctcttgggacattggtaatgcacttcagttgcatgcattaacatgtgaaccacatcgctcatgttaatcattagatttgtcattgaatcacctttaccaagttctcggtgacttccatgtgcaattagcagtttcatccctaattcaggttgtaaggcatctgggggtaacttggcagcaaggtttaggagaccccatctaggatgaataaaatcaacaagaggaaagttgacaataaattctggcctttggcacaacagaaacgcctccaagacactgggtcggggccactctttcaatttcagcatcaacaagtggccatctcctcctttgctgccatctgagtagcctttgataaactgtttgagctcgatatctctgattggttcgagcagtccacagccttgactatgacatcttcatccatttcttcatccatgatctcctggatacctctccaaatactcaagggatcccagcttgatgatagagaaggctcaaatgcttccctgataataataggctccgcgtttttccaatgcttacgaaaatgaatgatgccttcatattttaagtcctccaatacaggagagtacaaacaattcctaccaatcccatcactgtttgagcattttgagagaccgaggttttgctgaccagtaaactccgatcttctgccatcactgcaagacaagcatccatcctccaaatcatgtactttgcaaccattgaccatttcttcagaactttttacaagtttagcaatccaatttattttgaatatccgccttaataccaactttgaggagccacaaccaccagcctcgtgaggtccacaagtgatgctgccatcattgttgactctccatgtagggaataaagatttaatgtcaatattatttatatctattggccaagataatgacttgtcattgacactctcagcagatggttccaaccttgctcttctattaaaagaatctctacctttatcttcaacataaccttcagtatattctcctcgtgcaacattggcccgagaatgacgtatgtcatgacagcaatcaaggcataaatcatatgaacatcttgggcagtatcggtgataatcaaacactggcactttgcaaaagtcacagcacatctgctcatcagaagttatctttgctctgaggacatctgtctttggtccagaagatcttgtttcaacacctatttcaaagcattggtcagaataaattcccttcagtactggaagaacataaaccaaaaggcaatgaag

SEQ ID NO: 1047 - DNA, 823 bp, Zea mays
  Clone ID: TF_ZmC3788_1
gctgcaagtactgcttttatgatctgtgccttgactgctgtgtggagatccgcagaggtgagattcctggaggagaagagataatgagagtaaagcctgaagatagaggccgagcatatctttttggtactactaactcaaaggatgggagtaaaaggttctccatgaggaggcacagctcatccctggagaatgagccttccaatgtagtaggttctagtgagggggcaaataactctctggagctgtggaaagcagaaagtgatggtagcataccttgcccaccaaaggagctaggaggctgtggcggttcgattttggatctcaagtgtttttttccagaaaagatgctttcaaatttagaagaacgagctgacagaattatgaggagcgaagtatttgcaaaagcagtagccaaaagaagtgaccagtgcccttgttatgaccattcaggaaacataagaactcaggacgtgcgagagactgcaaatacgaaaggctcaagtgataaccatctctactgcccagttgccactgctatcaaggaggatgacttggcgcactttcagatgcactggacaaaaggcgaaccagttattgtttctgatgttctgcatttgacttctggtctaagttgggaaccattagttatgtggcgggcattgcgagagaaaaagactaatggtgacgtagaagatgagcactttgctgtcagggcattagattgccttgattggtgtgaggtcaggagttatatttcattgaatgtttgagtgcattctgtgaccttttatatttatgtatatatttaaatgtttccgtt

SEQ ID NO: 1048 - DNA, 662 bp, Zea mays
  Clone ID: TF_ZmC3523_1
gcagaagacgccgcagtggcgcgcgggccccgagggcgccaagacgctgtgcaacgcgtgcggggtccgttacaagtccgggcggctgctcccggagtaccgtccggcttgcagccccaccttcgtgagcagcatacactccaactcccaccgcaaggtgctggagatgcgccgcaagaaggatggcgaccttggtcagctcccgctcccagtcccggccgcgcttctgcttgggccggccgtcgagtcgttctagccggcgctgtacattttttcgtccgcgggtggagctgtttaacctgctgtaccgtacttggtttttttttctttctcttccacttctatatttagtagttgtgctgtactatttagctagagctctgaattgtagaagctttattaggtcgagttaggtagtagagattaagatttccatggttgattaggattgttagggtatgtatggccatagtacttgtggtagtagttaagaacttggtgaggtgtttggcctgacctacgaggaatgatgttgtcatgtcgaggcgctgctggcaccagtgacaagaaagttaggcgtgccttggcgcggaacatggaactgtctgccttgttgtaatcgagagtgtcaggcgagtaagaaagtgattgtttgcattgcc

SEQ ID NO: 1049 - DNA, 280 bp, Zea mays
  unsure (1)..(280): unsure at all n locations
  Clone ID: TF_LIB3245-468-P1-K1-F6
cggacccctgggccgacgcgtgggcttacgcttgggagagaacagaccanaccgtgcaggccgacatagtatgggtttagttctccaancaatcctatcnccaacccttccactgatcgttgctgccctctgtttcctccggcgcgggcgccgacgcctattttctccgccgatcgcagaaagatcgacgggatcgtggtgacggagaaaggcgccaggagctgcgtctaatgccgcgccaccaccacgcccatgtggcgcaatggccccaccgttccca

SEQ ID NO: 1050 - DNA, 495 bp, Zea mays
  Clone ID: TF_jC-zmXLIB3526P034dh01a1
aacaaaaaatctacgcgtaaaattaaattcaaggtattgggtgagaccatcaccaagtcatcattcaagtttcaggttatacatccagagatcaatggttaatgccatagatccaaccatataaacacaaagttcttgcattgatgggagtatcgctatgtctgtacattcctatcggtcaatctgaatggaagaactatagacctacttatgccagagtaaactacttcaacattttctgagactggaaaactttatgatcagctaccaaagctggattatcatgctctgagaaagcatgaagattgttatgtgcagggtctgcagtggcagtccgacagtccgagtcattaccttcatcaacctgctcaactggcggaagagagtgttcctgatgtctcttagaaaggtctcgcaaagcacccctatttgcccaaaaaagcccacaagcgttgcaaagtgaccttggaccagatggccctagccgatcattgg

SEQ ID NO: 1051 - DNA, 1163 bp, Zea mays
  unsure (1)..(1163): unsure at all n locations
  Clone ID: TF_ZmC151453_1
gggtaccctncnagtcctgccggggatgtagctagcgcatctattgtttgctctccacatctctctcgtgcgtgtgtccatgaaaaggatcacacacgaatgatctacacagcctaggcgagctctctcctttgtctctttataaaagggacatccctcgggccggccgggatgatcgctacctcgctttccctcttgatccctggctgcaaattgccattccgacataataaccactgcaccagccgcttcggttcgcctcttcctactctccatatatctcatcctgatcttcactcatcacctaaccatacgagatctgcatatatagctccatcagatcttgagcgcaaattcctctcagtgcatcccatgtctgcaatctacatgagccagctctccactgccctccctctcatggagggagatcaccaagatcatcatcaccaccaccaaggccacttccaggccttcaccctgccaaaggaaacaccgatccttttcccctttgtgatcagcaatagtagcgccagcgaaggcagtttgagctatggatcggctgcagaccatcacttgttgaggcagcgtcatcaagctatgctggagccccaacatatgattggaggatcatcaactgcgactgggaatagtgtcttctcgacgccgttcccgaccgtggagagcatccgcgacgacatgatcgagcctgcctcgtacgatccatacgacatggggaagctgcaggtcggcgggtcgatggatgcttgcagctggacgccggcggcagccaagatgaggatcacgaggaaggccactgccgatcccagtgcggggaagaagccaaggagaagggcgcaagcagggtacgacgacaccatgagcggccaaccgaatttgggtgttattagggtgtgctccgactgcaacaccaccaagacacccttgtggaggagtggtccttgcggccccaagtcgctctgcaacgcgtgcggtatcaggcagcggaaggcgaggcgggcgatgatggccgccgcctccggctcggtgtcagcagttcccactgacagcggcaaggcctcgcccagcaacgccgccgtggccgcagcagcagcacaccccaaggtgaagaaggagaagagagtggacgtggaccggtcgctgcc

SEQ ID NO: 1052 - DNA, 1075 bp, Zea mays
  unsure (1)..(1075): unsure at all n locations
  Clone ID: TF_ZmC175881_1
gtcgtatcgagctaaaacccttgctctccctgcccgcccattttcctttccccttggcattcggctccactgcttctccggcgaattggatcggcgatccatcgtcgtcggatcgcaactcctgactagcttgttgctgcaggatcgttatccgccgcgcctgctgcttgggtttgttttccctgcccacggaaatggggatggagatagacatggagacgtatcccaatcttaatacttccccctcggccgccactgcctcaggcgacgccaaggcctgcgccaactgccacaccaccaagacgtcgctctggcgcggaggaccggagggccccaagtccctctgcaacgcctgcggcatccgctaccgcaagaggaggcaggcgatcggtctcgacgcaggagcggctgccgccgccaactcacagcaagatctgcagcagccaaagaagaaggccgccgtcgatccgcagcagcaggaccagcatcagctgagaaagaagacaacagcggtcgctaatccacagcaggatcggcatcagccgagaaagagagcagctgccgctgccgctgccaccgatccacagcacaccagcatcaccaagaaagacacggacaagaaggatcagcaagtcaccgtggatctccacgtggtggggttcggcaaggaggcgacgttcaagcagcgccgccggatgcgccacaataagtgcatgagcgaggaggagagggccgctgttcttcttatggcgctctcatcgggcgtcatatatgcatcatgagaagtccgctctcctgattccaactgttccgttgcagatggagatatagatccgccttcccttccattcatcatccccctgcttcctatccctatcttcctcttcctcctaggtcatccatcagtagtactgtagtgataggtctagctagactctcatcaatcaatctatcgcttgacccttcactcgtcagtcaatctctctctctctctcttgaaaaattaatccatcctctatctctctctcttgaaaaattaatccatcctctatctctctctttttagnttttttgg

SEQ ID NO: 1053 - DNA, 1956 bp, Zea mays
  Clone ID: TF_ZmC2051_1
cattggcgtcctcgatgcgggccggggcctgctggccccgcgcaccgcgacgcttccgctagcgccttcttcgctgccgcggggaacgatgtgttcggcactaggggggttgtcggcgcacacatcggctcgtgcggcgagattgatagtaactttgcgcagccggagtggttttcaggcctcttcgacgacgcatccatcccgcacgagccggtgttcccgggcgcgacggcgggcggcgcgccgcccatcatgacgagctttgcgctggcggccggcgcgctggtgttgccggacgaaatggaggacccactgctgttccacagctccgcctccatctcggtgctgttgcacggcagttctcgcagcgccggcgccagcgccaccttaccttcgttctcttcctcctcttcgtcaatcgcttcctcggagtccttcttcgggagtgggagtgggagagaaagagggcggagtgggacggcacaggcaggagcaagcccggcgccggagtggttgctccatttccgggggcgcggcctgcacgatcgctcccgtgcgtcagcgagcactagcgccgcagcaggcgccggcggatctagagaggacatcctcgtgccaacgcccatgtactcctccgggtcggcccactcggaccccgagagcatcgccgagtccagcccgcacccggcgccgcccatgaagaagaagaagaaggccaagaagcctgcgccccccgcgccagctgcctcttctgacgacaacgatggcgacgccgactacgaggaaggtggcgagctagcggagccgcagggcggcgccgtcaggaggtgcacgcattgccagatcgagaagacgccgcagtggcgcgcggggccgctggggcccaagacgctctgcaacgcctgcggcgtgcgctacaagtccggtcgtctgttcccggagtaccgccccgcggcgagccccaccttcgtgccgtccatccactccaactcgcacaagagggtggtggagatgcgccagaaggctgtccggagcggcgacccgtcgtgcgaccttctccatttcatccgccgccgggattgacgtcccggcacggcgtcgccggactgtcggtcggtctcgtcccccatatagctatatatgtatgcatgcatggttgcttcatcagtcgtcgtcgcccatcatggtcatcatcaccgcttcaccggtcaccgccatggatcgtctcccgcccatcatcacatgcattggtttgtgtcagcatccatccaatcccaatccatcgccgggcgtcccggcgttgttagttcattaggtcttttttttcctcatcgggggctagtgttattttacctttgatccttttgtctattggttaattggttccccctggatgttttttgtttgtatagagagtgaaaaagagagaagaaatagatgagtcagagtggttgctgcattgcaattgcagttgcttgcaagctaggtaggtgagaaggagagctaaaccagcagcagagggagacagatttagagaggaaactttgcagctagtcagtcagtcacttagaaaaaaaaacaaggagagtgcttgaagcaggtgaaagggcaatttgttggtttgctaattagaagagaggttctgtcaggtcaggtcaggtagttgctatcattattcatgaggattttcaaacttaatagggggacagccatcatccatcatagtttgtatttggaacttggtatactgaactctgaaaattctttttgcagttcatctatgcttagggattgataagtgttgtctggtttcttctatattgatagtgctaccttttagccaataattagttatgtatgatttgctcttggtcttgctctgcctgctacaggcattcctacgaaaaaaaaaaaaaaaaaaaaaaaaaaaaagtactctgcgttgttaccactgct

SEQ ID NO: 1054 - DNA, 544 bp, Zea mays
  Clone ID: TF_LIB4172-036-R1-L1-E10
aattcggcacgaggcgcttctactatctaagaaacaacgcacacgggccgaaactaaatttctccaagcgcgcaatcctgtcgccaaccccggccacggatcggggatgtcgtctgctgcgggccgcgcgccggcgccgacgccgatgggctccgccgatcgctgtaaggtacatccatcggctctcgtctccgctctctcttcctctcctttgctccgagctctgtcatcccggtctgcttcctgcgacccgccgttgcagatcgacgggatcgtggcggcggagaaagccaccaggagctgcgtcgaatgccgcgccaccaccacgcccatgtggcgcagcggcccgaccgggcccagggtaagctagctcatgatcgccctccctcctctcctcttgttagccaggctagcagctccgtgcgtatagcgttcgtccgcaccagattggggattcctggtcgctggtttggttgctgatcttgatcaacttagctatgtatacacacgactccaatagtcgtcctgcgtatacttactactc

SEQ ID NO: 1055 - DNA, 879 bp, Zea mays
  Clone ID: TF_ZmC33566_2
cggaggaggcaccacctcggccggtcaagacagcggcgtcgccgcggcgcctggccgcggcgcgcgcagcaggcggtcccgcgcgaccgccgcggctgccgcggcgtggcactccctcgtgccgcgcccgccgtctcagtcgtccccgtcatcgtcgtcctgctcgtcctcggacttcccgtcgtcgaacaagccggcgcgcccgaacggcggcggcggcagccgcggcaagaaggtcccggggccacccggcggcgggcccgctggcggggaggcgggcctggagggcggcggcgtgcggcggtgcacgcactgcgcttcggagaagacgccgcagtggaggacggggccgctgggccccaagaccctctgcaacgcgtgcggcgtgcggttcaagtccgggcggctgatgcccgagtaccggccggcggccagccccacctttgtgctcacgcagcactccaactcgcaccgcaaggtcatggagctgcgccgccagaaggagctcatcctcatccgcggaagccaccgcgacgccgccgcaggatccccccccggcgggccgaggccggagctcatgttccgtgactacggcgtgtgttagcccgctgcccggcaaaccggcaccgaggaggctcgcgtcgtgcgttgcatgcatggagctttagatccttttgcgaaattctgccgtttctgccttttttttaatctttccctgcgcgttccagatatttccgtttctttctcttttgttaattcttaaattgttggtacctacctacctcatccctgcttgagagatcaatgaattctgttgtataaaaaaaaaaaaaaaaaaaaaaaaaaaaaaaaaaaactcgaggaagggccgcgtgtacc

SEQ ID NO: 1056 - DNA, 1064 bp, Zea mays
  Clone ID: TF_ZmC154_1
ctcgaggggccggccgggccgggagactctagtactctacccggacacatcccccttcccttcccttccccgcaactaccctctactctctactgcacgcttctactatctaagaaacaacgcacacgggccgaaactaaatttctccaagcgcgcaatcctgtcgccaaccccggccacggatcggggatgtcgtctgctgcgggccgcgcgccggcgccgacgccgatgggctccgccgatcgctgtaagatcgacgggatcgtggcggcggagaaagccaccaggagctgcgtcgaatgccgcgccaccaccacgcccatgtggcgcagcggcccgaccgggcccaggtcactttgcaacgcctgtgggatccggtaccgaaaaaagaggaggcaagagcttggcctagaccgcaagctgcagcaacaacaaaataatggcgaggcgaagacggatgaagcaaaagacagctctagcaacagcagcagcgggagcagcaacttgcaggtggtgcagaaacggaggctgctaatgggagtggaggaggctgctctgctgctgatgaccctatcttcttcgcccacatccacgttgcttcatggataaggaccctcctccaacgccagatcagcagtgtacatacaacgtaccccctgcacagtgactgccgaacgattgcaggcctatctcagggttgtgtgatcttgtgattggggcggattattagtgccaagctaatcactccgttgatcgtcttgtcttcctctgttttcgccgcacccgtagatcttgatgccagccagccatatatcttctacgtgatttgtggtaggctccataatcagaggtctgttgatcccattccccccgcacatcttttttctcttgtcttttctctttttggttttttgtatgtactttgatgttgccccatttgtgagggatgggtgatcaaagaggagacgccatcccttctcgttctggaataatggtccaaataataaaggatttgagctgttttgttttgaaaaaaaaaaaaaaaaagcggccaaaaaggtgac

SEQ ID NO: 1057 - DNA, 1043 bp, Zea mays
  Clone ID: TF_ZmC154_2
aattcggcacgaggcgcttctactatctaagaaacaacgcacacgggccgaaactaaatttctccaagcgcgcaatcctgtcgccaaccccggccacggatcggggatgtcgtctgctgcgggccgcgcgccggcgccgacgccgatgggctccgccgatcgctgtaaggtacatccatcggctctcgtcttcgctctctcttcctctcctttgctccgagctctgtcatcccggtctgcttcctgcgacccgccgttgcagatcgacgggatcgtggcggcggagaaagccaccaggagctgcgtcgaatgccgcgccaccaccacgcccatgtggcgcagcggcccgaccgggcccaggtcactttgcaacgcctgtgggatccggtaccgaaaaaagaggaggcaagagcttggcctagaccgcaagctgcagcaacaacaaaataatggcgaggcgaagacggaggaagcaaaagacagctctagcaacagtagcagcgggagcagcaacttgcaggtggtgcagaaacggaggctgctaatgggagtggaggaggctgctctgctgctgatgaccctatcttcttcgcccacatccacgttgcttcatggataaggaccctccaacgccagatcagcagtgtacatacaacgtaccccctgcacagtgactgccgaacgattgcaggcctatctcagggttgtgtgatcttgtgattggggcggattattagtgccaagctaatcactccgttgatcgtcttgtcctcctctgttttcgccgcacccgtagatcttgatgccagccagccatatatcttctacgtgatttgtggtaggctccattatcagagggctgttgatcccattcgccccgcacattttttttttctcttgtctttttttctctttttggttttttgtatgtactttgatgttaccccttttgtgagggatgggtgatcaaaaaggagacgccatcccttctcgttctggaataatggtccaaataataaaggatttgagttgttttgttttga

SEQ ID NO: 1058 - DNA, 487 bp, Zea mays
  Clone ID: TF_LIB3354-090-Q6-K6-E5
ctctgaacggggtgagtacccccgccgcctccgaggacggtacccgcggtggcgccgtcgttagcgccagcggtgtacctcgtcaagaagaagaaaaatcggtttcggcgaggaagccgtggcggcccccgaagtcggcgaagcagtgcttgcactgcgggtcgtcgtggacgccgcagtggcgggaagggccgttgggccgcagcacgctgtgcaacgcgtgcggtgtgcggtacaggcagggtcggttgctgccggagtaccggccgctggcgagccccaccttcgagccgtaggagcacgccaacaagcacagtcaggtgatgcagtttcaccggtagtggaagagccagggtcagtaccaccctgtgtccgtggagcatacgtgagccatggacgtgcttcagttttcccagcggtggcaggtgaaggaggagtaccttgtgagggcgattcaccagactttgccgtatccggtggtggacgg

SEQ ID NO: 1059 - DNA, 893 bp, Zea mays
  Clone ID: TF_ZmC33566_1
gcacgccgcattggcggttgtggcagcaggcaacggaggaggcggcacctcggccggccaagacagctgcgtcaccgcggcgccagctggccgcggcgcgcgtagcaagcggtcctcccgcgcgcccgcggcggcggcgtggcactccctcgtgtcgcgcccaccgtcgcagccgtcgccatcctcgtcgtcctgctcgtcttcggacttcccgtcgtcgtccaacaggccagcgcgcggcaggaagagcccggggcccggcggggacgcggtggcgggctcggacggcggcgtgcggcggtgcacgcactgcgcgtcggagaagacgccgcagtggaggacggggccgctgggccccaagaccctgtgcaacgcgtgcggcgtgcgcttcaagtccgggcggctcgtgcccgagtaccgccctgcggccagccccaccttcgtgctcacgcagcactccaactcgcaccgcaaggtcatggagctgcgccgccagaaggagctcatcctcatccgcggaagccaccgcgacgccgccgcggctgcaggagcaggatccgccgggccgaggccggagctcatgttccgcgactacggcgtgtgttagttagctgcggcactgaggaagctcgatcgcgtcgtgcttgtgcattgcatgcgtgggagcttctttagatccgcctcttgcgaaattctgccgcgtttcttttcctcctttctttcccttccgatccctgcgtattccagacattttcgttttttcttttgttaattattacattgttggtacgacctacctcctccctgcttcttctaagttctaatgagagagcaatgaattctgttggtacaaattgtggtcgttttgtgagtaatcatgctcctaaacccat

SEQ ID NO: 1060 - DNA, 2418 bp, Zea mays
  Clone ID: TF_ZmC3086_1
gagtagggagcaccagtggtccgggaggctttatcaaccggactttgtgaatcccctcaaggctgcttctgcattccttcgttcctctattatttctccacccctttccccccgtctctctctcctcacccctctctctctaaaagactgaaaacaatagaaaggaacaaggggggaagaacaccaaccaagcaggacttggtttttgggaactccatgggctgtggaattgtccccaggaatcccctctgggtttgacgagattcatacagatacatatatttaattttttcccctttcgtttgctcaaaaaatcaattgtacaggcgaaactgcttgtttgtgctttgtttcttccgtgtttgtttccttgggattttcctctggtccgttcttcttcacctgtggggtgggaggagcagagacaatcatgggaaagcaaggaccctgccgtcattgcggagtcacaagtactccgctgtggcggaatgggccaccagataagccggtgctctgcaatgcgtgtggctcgaggtggagaacgaagggttcattggcaaactacactccaatgcatcgcaatgacaatattgatgatgatgaacccagagttagcaagctgaagccaccgacgtcaaagttgaagtcacagaagaaaaaaacaaatcacattataatggagaatggaccattctctagtcagaatttccgaaagatgggggatgatgacccaagctatcggtctagttcaggatctgcagtatcatactctgggagttgtgccccatatggtgctgctgatgcaagtgaaatgactggttcagcacagtcacatgcttgggagtccctagtgccatcaagaaagaggagctgtgtcacccgtccgaagccttcacctgttgaaaagcttgcaaaagagctgaactctatcatgcatgaagagaagttatattacctttcagaatcatcagaggaagacctactataccatagtgaaactcctatcggttcctttgaaataggctctggaagtgtgcttctaagacatccaaactcgaaatcactggaggaagaatcaaaaacaagctcaattcctgcagataataaatcatatattacaagtgaatcctattcagactctgcctcatttgtcgttcacagtggaaacaaggcagcaattaacttaaatcttccaactgcaaggtcgaagaagtcgccgctgcatatggaagacaatgctagaagggataaacttcattatgagaatcagcatgtcctggagagtgttgattcgcctttagtttcagtagatttagaggatgttataaactatactaacttcatgaaatatctaactaaagaggatcgacgtcagttgctcaaatttcttcctcctgtggactccttaacacctcctgaaagccttagaagcatgttcagttgtatccaattctctgatgctattgacagctaccagatgctgcttcgagagggaattctcgacccatccttatgtggtgatgaggaatggaagaaagtgaagacgcttgccttaactaatttaacaaaatgcagttggctggagtgctataaacagaaaaagggagctaaagaaaccgggggagtggggggcatcagtggaccggaaggctttaccaagtctactatgaaaccactcaaaagaccccgtgacacccactttcagagtgacgcagaactagatggtaccatgaggagtcctctaagagttctaaaatccggggctttggctcttcagtttgaaagttcatctttgccaaaatctagctatgccaccgaagattcaacctgcactggaggagcacctaatctattcatgttacccctagaaaagctaccattactggtcccttctcagtatgccgtctctgatcaagacttgctgctggaaatacctctcaacgcacgacacccagaggcagaacttctctgtcaaccatctcagctgatgagctctataaccagcagctccacctctatgggcggggttgctgaaggagaagggtacctgaagcaaccatagtctcaggtcacatcagcaagcagcttaggaacagccagtagttgcagtttactttaacctcctggatcgtgtcgcctctctgtgccgatcaccaatgggcctaagtgtccttatttacataacaatgtgcttcgtatgccaacttggcgaattgtcggttcagctaatatttgtagcatgcttttggatcggctttctgctggttttctgtaacatatggctcatggagaaagcattaacttatctctgtatggaaaaaaaaatatcaccatattgtaggaaaatgaaaaaagaggataatggagagttgtttatgtaaaattgaattttgctatggatgttgatatattaactat

SEQ ID NO: 1061 - DNA, 820 bp, Zea mays
  Clone ID: TF_ZmC3086_2
agggggaaaattagaggaaattatttctcctaccctttcccctctctttctctctctgatctaccctctctctaaaagactggatacagaacgaggaaaacaaacacccgaaaagaaaggaagaagaggagaagaacaccaaacaagcagaacttttttttgagaactccataggctgtggaattgtctccaggaatcccctctgggtttgacgagattcatacagagaaatacttcttgattttccccctttcttttgctcaagaatttacctgtacaggcgaaaccgcttctttgttcccttttttttctgtgtttgttttattgggattttcctctggtccgttcttcttcacctgtgaggtggtgagaagcagagagaatcatggggaagcaaggaccctgccgtcattgtggagtcacaagtactcccctgtggcgaaatgggccaccagataagccggtgctctgcaatgcatgtggctcgagatggagaacaaagggttcattggcaaactacactccaatgcatcgcaaggacgatattgatgacgatgaacccagagttagcaagctgaagccaccgacatcaaagctgaagtcacagaagaaaaaaccaaatcacattataatggagaatgggccattttctggtcagaatttccgaaagatgggggatgtcgaccaaagctatcggtctagttcgggatctgcagtatcatactctgagagttgtgccccatatggtgctgctgatgcaagtgaaatgactggttcagcacagtcgcatgcttgggggagtccctagtgccatcaagaa

SEQ ID NO: 1062 - DNA, 492 bp, Zea mays
  Clone ID: TF_LIB3637-245-Q6-N6-D4
caggaacaacatcgagaaggtattgaatccgacgtctaaaaacaccgagcaaatcagtctgagctaaaacaccgctagagctaacgacgatggcctactactactataaccaaaggctcggttctcatcctctctgagcatcgactaagctacggtctaaaaaaccccctaacgcgcttccaacgatagatttcgggaaacgttctcggccggccggccggccatcggggcctcactgttgctgcgcgacggcctgccgaatctgcatgacctttttgggggagttggagggcaagcagctcacaaaggggggcgttgttggcgggccggtactcgggcagcagcctgccggacttgaacctgacgccgcaggcgttgcacagggtcttgggccccaaaggccccgccctccactggggggtcttggaggacaggcagggggcgcaccgcttctcttgctggcccaacaacgggggggcgtccctgctctcg

SEQ ID NO: 1063 - DNA, 846 bp, Zea mays
  Clone ID: TF_ZM4332.C3.o2.fg
atgcgtcagctctcgtacctctctggtctcgacggcctggacgacggcgtcgcggactgcgacggctcctgcggcctccgcgacgacggaccgccgtgcctcctccacagcggtctctgctgccccatcggtccgctggacgacgaaaccgacaccgtcgccatagcaatcgacaacgacaaggagttgttgcaggaccttgccgtggccgccgggcgcgttgccgcctccccgctgtcgtcgggcaatagcccatccagttcggcggtcgagaccacgacgacgctgccgccgacgccctggcgtttcgtcgtgcccaggaggaaacggaggaaacgacgggaccgcaggcccgtcgtcatgcgcggcagcattaggccaggcatccctacacttcacgcggcggctatgtcgtcgtcttcgtcgtcgtcgggcaataacaggccatgcagtttgacggccgagacgagttcgccgccgcagctctggcgtcttgttgtgcccacgaggaaacgggacagaaggcccgtcgtcatgcgcggcagcattaagcggccgtgctcgctgggcacgacgccaggcatccctacacctcacgcggcgggtaatagcaaccctagcagcagcagcggcggcggcagtacaggagcccgccggcagttggagagcctgcaggtgcggccgcggccgccgccaacgaacaggcagcgagttcagagagtgtgcagcaactgcggcagcacggagacgccgctgtggcgcacggggtccgacgggtctgccaccctgtgcaacaagtgcggcctacggctatcaagaaatcgacaagccgcccaagcttcctga

SEQ ID NO: 1064 - DNA, 1558 bp, Zea mays
  Clone ID: TF_ZmC30321_1
gccggccgccctaccagcttccaccctccaaatcgaaaccagattgaaatcctaggggctagggttaccctccatcccatcgtccgatccgatccgatcccgccgctcatccatgtcccaccacgacggaagcaagccataccagccgcgccgggggcccgagcggcacccgcagccagcggatgggatcgccgccccgcctcccgccgccgttgccccgtcggtggagcacctcgtggcggccgccgccgaggcggaggcattgaaccgcttcgccgcggaacaacagcagcagctgcaggggcacgagcaggaggttggggaggaagaggaggaggaggacgagcaggaagacgagatggaggaggaggacgaggatgagcacgaaggggcgcacggcggcatcggtggggagcacgttcccatggacgcggatgctgctgccgcggcggcggcggccgcagtctcgcagatggacccgcactcggcgttggtggctgggaccgtgccacccatggcgaccaaccagctcaccctctcgttccagggcgaggtctatgtgttcgactccgtctcccctgataaggtccaagccgtgcttttgctgcttggaggcagggagctgagcagcctgggcggagcgtcgtcctctgcaccttatagtaagaggttgaattatccacatcgggtggcatctctgatgagatttagggaaaagcggaaggagcggaactttgataagaagatccgatactctgtccggaaggaagttgcacttaggatgcagcgtaatcgaggtcaatttacatcttcaaaaccaaagcctgatgaaatagcagcatcagaaatggcatccgcagatggctccccgaattgggcattagttgaaggccgacctccatctgctgccgaatgtcatcactgtggtactaatgcaacagctacaccaatgatgcgtcgcggacctgatggaccaagaacattatgcaatgcatgtggcctcatgtgggcaaataagggtctcctgagggacgtaacaaaatctcctgtacctctccaagctacgcaatcagctccgcatctagatggtggtaatggaagcgccatgtctgcgcctggctctgagctagagaatgctgcagcagccatgaccaatggccacgagtcatcgagtagtggtgtttaatccagcgatggggtaaaagccacgaggagcatcatcccggagtgatctctgcagtaggcggtcagctgctgtactataattgagttggaggctgcttagatatggaatccttccatttaccttggtgccctgtagttaagagctatgacagtgctttatcccgtgtcatgtttgcagccgctgcgtctataacgaagctatttcttgtcttgaggcgtgactgttaagaaccgttgaagtccactcagttttaaccgtgcaaaaaacaaacgaaaaaaggaggaaaaaaaaaaaaaaaaaaaaaaaaaaaaagggcgcttatcttctgggcgccttgtgttttggttgcggtcgcgtgggcggtcgcgtggg

SEQ ID NO: 1065 - DNA, 737 bp, Zea mays
  unsure (1)..(737): unsure at all n locations
  Clone ID: TF_LIB4719-002-R1-K1-E6
gaccctcgggcttgccggggaatcaaaccagctgacgctggtcttcagggcgaggtttacgttttcgaatccgtcacccccgagaaggttcaagctgtgctgctacttttaggacgtggtgaactaccacctggtttagctggcatggttttacccaatcaaaatgacaacaagggctatgacgatatacttcagaggacagacattccagcaaaaagggttgcttcactaattaggttccgtgagaaaaggaaggaaagaaattttgataagaaaatacgttatgctgttcgcaaagaagtggcactcaggatgcagcgtcggaaggggcaatttgctggaagagccagtctggagggagaatctccagctcctggatgtgatcctggttctcagggctcaggcctagattttgcatctcgagaatcaatgtgccagaactgtggtactagtgaaaaaatgaccccagcaatgcgtcgtggtccagcgggtccaaggactttgtgcaatgcttgtggattgatgtgggcaaacaaggtacaattacatgcttaaacatgctggattctttctttttggtggttgacatgattataggttcataatttcatgtcatattcatttcgacttattaggcgatactttgnatgtcttctcttggacttctttcagtgtcgtgaatatgaaaagagcctctagaccacatctttgaccaataattttattttaaaactatg

SEQ ID NO: 1066 - DNA, 620 bp, Zea mays
  Clone ID: TF_LIB5116-045-A1-PF1-C5
acccctcccccattcgaacccaaaccaacccgagccgccgcccgcggaatcgaatcttcgccccctcccgccttcctccttcccttcccttcccttctcttcccttccccgcgcgatcaatcaagcgatcggagccctcctcctcatacaagatgtcgccggcggagatggagtcccacaagatggttgaggtggaggcggcggcggatcctgaggagcgcaccgcctccggtgaccccaaggcctgcgacgactgcaacaccaccaagacgccgctctggcgcggcggacccaacggaccaaagtcgctgtgcaacgcgtgcgggatccggtaccgcaagaggcggcgggtggccatggggctcgacccggaggccaagaggaagcccaagagggacgacgccatcctatccaaggcggaggcttctagtaccaaggaggaggaggaggaggacaacaaggccagcaccaacaagatcaagaccaagacgactactcacaccgtggagctccacatggtggggttcgccaaggacgcggtgcccaagcaacggcgcaggatgcggatgcggcggaggaagccgtcgtgcctgggcgaggaggagcgggccgccatcctc

SEQ ID NO: 1067 - DNA, 612 bp, Zea mays
  Clone ID: TF_LIB4727-001-R1-K1-C3
gacttgtactgtattatagctttgcctccgttttactgccttccgttttgtcgtcgactgcttcatttttaaatttaaacgcgacaaatagaaaaaaaaaaaaaaaaaaaaaaaaaaaaaaaaaaaaaaaaaaaaaaaatccttcagaggacagacattccagcaaaaagggttgcttcactaattaggttccgtgagaaaaggaaggaaagaaattttgataagaaaatacgttatgctgttcgcaaagaagtggcactcaggatgcagcgtcggaaggggcaatttgctggaagagccagtctggagggagaatctccagctcctggatgtgatcctggttctcagggctcaggcctagattttgcatctcgagaatcaatgtgccagaactgtggtactagtgaaaaaatgaccccagcaatgcgtcgtggtccagcgggtccaaggactttgtgcaatgcttgtggattgatgtgggcaaacaagggtaccctgagaagttgccccagggcaaaagttgaatctcctgcggttgcaactgagcagggaacaagtgacaacaaagccctggcaacactgaataataacaatgttgctgcaagcaatggc

SEQ ID NO: 1068 - DNA, 1482 bp, Zea mays
  unsure (1)..(1482): unsure at all n locations
  Clone ID: TF_ZmC42806_1
caccacggcaccccgacagctcccccccggcctcatggggcttcattccccatctagggttgctgagctccccaccaccgccggtcatgcccgacgcggatgttgacaccgtgattcgcgaagccgccgcggccgcggccccagccggcgacgacgacagcgagggtgacaccgaggaggaggaggaggagggggacgaggtcgacgaggacgaggacgacgacgaggaggagttacccgccgaggcgccggcgccggacgaggagcaacctgctccagcgcccatctcgaccttgccggggaatccaaaccagctgacgctggtcttccagggcgaggtttacgttttcgaatccgtcacccccgagaaggttcaagctgtgctgctacttttaggacgtggtgaactaccacctggtttagctggcatggttttacccaatcaaaatgaaaacaagggctatgacgatatacttcagaggacagacattccagcaaaaagggttgcttcactaattaggttccgtgagaaaaggaaggaaagaaattttgataagaaaatacgttatgctgttcgcaaagaagtggcactcaggatgcagcgtcggaaggggcaatttgctggaagagccagtctggagggagaatctccagctcctggatgtgatcctggttctcagggctcaggcctagattttgcatctcgagaatcaatgtgccagaactgtggtactagtgaaaaaatgaccccagcaatgcgtcgtggtccagcgggtccaaggactttgtgcaatgcttgtggattgatgtgggcaaacaagggtaccctgagaagttgccccagggcaaaagttgaatctcctgcggttgcaactgagcagggaacaagtgacaacaaagccctggcaacactgaataataacaatgttgctgcaagcaatggcgaagccacaagtgcagcagagaaaggagtgccaaaggcgccgtgacagtatatagacattattgtcagagacaaagatttcggattctttgcctatagctagacaagacaccccgttagaaatatttggtaatgataatgattgtcatcaagtgtacattcattcttgcttgacagtgttagacgtgtaattaatataagctgtccgattgtgtaaacagtaaacccatatggcatctgttgtgttacaacttacactttctaacttcattctcataacatcatgatcaaagattcgatgctacccattaaaaaaaactaaaaccctagccgcctgcctctcctcctccagagctcgtcgccaccggccaccgccaccctcgatcacgccgtccgtcgaggtaaggtcagcatggtgagggtcggtttagtcggggattcgctcaagtccatgtacaacgctgagaagatcggcaagaggcaggtcatgatcaggccgtcgtccanggtcttcatcntgttcctggcggccttgcctg

SEQ ID NO: 1069 - DNA, 725 bp, Zea mays
  Clone ID: TF_ZmC11827_1
cttcaaaaccaaagcctgatgaaatagcagcatcagaaatggcagctgcagatgggccgctgaattgggcactagttgaaggccgacctccatctgctgctgaatgtcatcactgtggtattaatgcaacagctacaccaatgatgcgtcggggacctgatggaccaagaacactatgcaacgcttgtggcctcatgtgggcaaataagggtctcctgagggacctatccaaatctcctgtacctcttcactctatacaacaatcagctccaattctaaatggtggtcagaacggaagtgccatgtctgcgcttggctctgagctagagaatgctgcagcagccatgggcaatggccacgagccataaggtagtggtgtttagccatgtgctaaagccacgagcatcatcgcgcaatgatctctgcagtaggcggtcagttggagcctgcttagatatatggaatcctgcgcctgtaggttttaagagctgcgacagtgttttgtcccgtgtagtcatgtttgcagccgtcgcagctatagcaagtttgtttcttgtcttgagtcgtgactgttaagaactgatgaagttcattacttacgtgcgtgtagttatacttagatatgagatgttctagccatgcagcaacgttttctatcaatgccagcaattagggagcgagcgtttggcacaaaaaaaaaaaaaaaaaaaaaaaaaactcgaggg

SEQ ID NO: 1070 - DNA, 1147 bp, Zea mays
  Clone ID: TF_ZmC3131_1
ctgtgcggcgctcgagccggccggtccgggacggacagcccttcctccccattccgagttctgacccacgctcagaatccatccatttctatccccccacacagatacacatcccccttcccttccccgcaactactctgtgctctctactacacgcttctatctaagagaacagaccagaccacgcacgccggcagagaaaaaccagaattctccaagcaatcctatcgccaacccggccacggatcggggctgccgtctgtttccgccggcgctggcgccgacgccgatgggctccgccgatcgcagtaagatcgacgggatcgtggtgacggagaaaggcgccaggagctgcgtcgaatgccgcgccaccaccacgcccatgtggcgcagtggcccgaccgggcccaggtcactttgcaacgcttgcgggattcggtaccgaaagaagaggaggcaagagcttggcctagagcacaacaagcagcagcaacaacaacaaaataatggcgaggcgaagactggagtaaaagacagctctagcaacagcagtagcagcgggagcagcaactttcacgtggtgcagaaacggaggctcctaatggaagtggaggaggctgctctgctgctgatgaccctatcttcttcgcccgcatccacattgctacatggctaggaaccctgcaacaccaaatcaacgatgtacatacacacacaggcttccccaccccacaccttgcacagtcaccatccaacgattccagtccaaatcgtacatgtttctcacaccagtctgagatagggaaggagggggcctatctcgggattgtgtgatcttctgataggggtggatgattagtgccaacctaatcactccattgatcgtcttgttctctgtttccgtcctacctgtagaccttgatgtatctgctatgtgagttgtggtaggctccataacaagaggtcctgttgatctcacttccccacacatctttttctctgtccttttctctctttttttttatgttctccctctttcggttttgtatgtactttgatgttgcccctttgtgagggatggatgatcaaaaggagacgccatcctttctcattctggaataatcaaggatgtgagctctttcatttc

SEQ ID NO: 1071 - DNA, 858 bp, Zea mays
  Clone ID: TF_LIB5116-002-A1-PF1-G8
atatttctccatccctttcccctctccaccccccctcccccctctctctcctcaccctctcgccaaaagactggatacagaacagaaggaaaaggaaataaagaacagagaagaagaaagaaagaaagaaagaacagcacctaccgagcaagccttctccgacttcacatgggctgcggaattgttcccacgagccccctccgggcctgaacagattcatacaccaccggagaaccgccccttgatttccccctcccccttttttctgctcgcgaattacttgctagtactaccacagaagaactgctctgtttttccgtgtttttctggttgggaattcctccggttcttcctggttttgcttgcggggggcgaggggaggaggaggcatgggaaaggaaggtccttgctgccattgcggcgtcacgagcactccactttggcgaaatgggccaccacataagccagtgctctgcaatgcatgtggctcgagatggagaacaaagggttcattggagaattacacaccaatgcattctcgtgatgatatcgatgctgatcaacctagagttagcaagctgaagccgccgacattgagactaaaggaacagcggcagctcaagaaaaagccaagccacagcataagggagaatggagcattttctgatcagaacttctggaagatgggggatgccgacccaagtcgatctagttctggatcagcactatcatattcagagagttgtgctccatatggttctgctgatgctagtgaaatggggtcagcgcaatcgcatgcttgggagtcatgggtaccatcaaaaagaagagctgtgtcactcggaccaagtcttcatc

SEQ ID NO: 1072 - DNA, 265 bp, Zea mays
  unsure (1)..(265): unsure at all n locations
  Clone ID: TF_LIB3594-007-P1-K6-G4
aagcatcctatcgccacccggcccggatcggggctgccgtctgtttccgccggcgctggcgccgacgccgatgggctccgccgatcgcagtttgtttttttttttctgnatcgtgnnnactgtgggggggggggggggctgcttctaatgccgcgccaccaccacgcccatgtggcgcagtggccccaccgggcccaggtcactttgcaacgcttgcgggtttcggtcccgtaagaagaggaggcaagagcttggccttgagcac

SEQ ID NO: 1073 - DNA, 571 bp, Zea mays
  unsure (1)..(571): unsure at all n locations
  Clone ID: TF_LIB4171-052-R1-K1-B5
ccctcggttttttcttttttttttttttttttttttttttttttttttttttttaggcaacaacaattttaatagtaataattaacaaaaaaagagaaataatggaaatatctggaatatttcgcaaaaggatctaacaagctccgatccatgcacgcaaatgcacgacgcgagagcttcctccgggccggttgccttgccgggcaggcagctaataatcaacacacgccgtagtcacggaacatgagctccggcccgggggatcccgccgctgccgccggggggtcacggggggttccgcggatgaggacgagctccttttgggggggcagctccatgaccttgcggtgcgagttggagtgctgcgtgagcacaaagggggggctggacccggggcggtactcgggcaccagccgcccggacttgaaccgcacgccgcacgcgttgcacagggtcttggggcccaacggccccgtccgccactggggngtcgtctccgacgcgcagtgcgtgcaccggngcacgccgccctccacgcccaccgncattacctccccggggggccccgggc

SEQ ID NO: 1074 - DNA, 645 bp, Zea mays
  Clone ID: TF_ZmC34296_1
aattcggcacgagtctccactccacccgcgcacaacagatcgcacgcctcggttccctccactcgacgcttctcccgctcctaacccctagtaccttcgctcgctctgccgcctccgccgacgacgcgccagatccgcgcagcagtggtgtcctccgccgcggatcgagctcccgatccgcgcagtgggagtggcggcgagcgcaggagcgctcggccgggggttccgcgaggctggagacggaggaggaagggagcggtagttccgcggtggtagatccgccggtcctgtcgccggagatggactcatctgtcgagaagcaggggagcgtggcgctggatccggacgagcgcgcgccggcgtccggcgaaaccaaggcctgcaccgagtgccacaccaccaagaccccgctctggcgcggggggccctgcggacccatgtcgctgtgcaacgcgtgcgggatccggtaccggaagaagagacgggaggccatgggcctcgagtccagcagcaaggccgccaccgccggcggcagcgagcaccagcagcagcagcggaagaagaaggccaccgcggcggcgcgcgggtaagcctcaaagggagagggagctagggagcggggaccgggaccggagcggaacaagg

SEQ ID NO: 1075 - DNA, 1355 bp, Zea mays
  Clone ID: TF_ZmC3304_1
ccggccgggaagaaaaaagctcccgaaatcccctcacctactcctctccctctccctctggcagcgccgcctcgccggcggttgcctgcctgcaccttcgccccccgtctcgacctcgacgcggcctccgttcctccgcgagacgcagcatggatgtgcgccctgcgaatgcggccgacgactcgtctctcggagacctgttcccgcaccagcccgccggtttggagagtgacgagagcaacacagaatggctctctggttacgtagaggactgcttttcgagctccacgtcgtacacaaatcccgtctctgcaatggcaagcgagggtgtcggaaaaccaaagctacctccaccaccatcctccaacggcaggagaaagaaacggagcttggcctccgtcatgaccaacggcgactaccaacaattcgtcctcccgctgtacgtcgagccaccgctgatcctgatcgaccagaaacactggatggcagagagcgagctgatccaccccaagaaggacgacgacgaccgagaggtttgccagcaacaagggcaggagcaagagaagggcgtgcggcggctggtgaagatgtgcagcaactgtctgtcaagccaaacgccacggtggagggacgggccgtcggggcgccagatgatgtgcagcgcatgcggcatgaggctcaagccagagaccaggttgtcagccgagcagcagtgcggccaggaagaacccaccaggaaggagcaagagccagacaggaagaggaagaaggcggccaagaagacgtgctacgagagcagcgacgccccgccgtcgtcggaccagcaagagaagcggtgcgcccactgcctgtcctccaagaccccgcagtggagggcggggcctctggggcccaagaccctgtgcaacgcctgcggcgtcaggttcaagtccggcaggctgctgcccgagtaccggcccgccaacagccccaccttcgtgagctgcttgcactccaactcccacaagaaggtcatgcagatgcggcaggccgtcgcgcagcagcagtgaggcccgacgtctcccggaatctatcgttggaagcgcgttaggggatctcttagatcgtagcttagtcgatgctcagagaggatgagaacagagactttggttatagtagtagtaggcaatcgtcgttagctctagcggtgttctagctcagactgatttgctcggtgtttttagacgtcggattcaatacaatctcgatgttgtcctgaattgtgctatgggttttcggtccattagatgttcaaggtttcaattgggaactcggtgtttaaagagaattgctatgaaaaggcatcagttcctggg

SEQ ID NO: 1076 - DNA, 933 bp, Zea mays
  Clone ID: TF_ZmC736_1
gtctgctttgcttaatcaaatgttaggctacggatctgtttctctttctcatagagtcatgtagtcttctcttgttgttgcgtgacgcttgcttgcagaggcgactcccaagggcattctgaagctgatgaacactgatggcctcacaatctaccacatcaagagccaccttcagaaataccgcatagccaagtacatgcccgtgtcatcgacgtccgaagggaaagaggagaaacgagctgctgccgccaatgacgtgcagaatctcgacctcggcaccgggatgaagatcacggaagcgctacgcgtccagctcgacgtgcagaggcgcctccacgagcagctcgagatccagaggaatctgcagctgaggatcgaggcgcaaggcaagaagctgcagaagatgttcgaggagcagatgaagacgagcaggaccgtgatggggccgccgcagggcgccgacgtcgccttcatcggcgccggcgagcaggaggaggaggtggaggtggaggacgcgttcgacgacgtgcagctactggcggccgtgtccagcgccagcgtcggctaccgcgacggcggattccagtcgaagataagctagcctgtcgcctccagcctccaggcttcagctggcttgtcggcattgtaattgtagggtttgactacaaatgccatcgtagctatccatggaagatgatgcctacaatgtttgggacgacgacgacgagtgttttggagggaaaaaaaggaaactaaattgttggggatgtaggcaagggacgatcctcgtcgtccacttatgtcgttgattggaaggtgtgatcgtgcacctagcctaaccacttagttttaaaagttctctctgaactttagaatgtgagtgtctatttttgcttatttatttttaataaaaaaccatcaggtctcttatag

SEQ ID NO: 1077 - DNA, 416 bp, Zea mays
  Clone ID: TF_ZmC80080_1
tcgagccggccgggccgggatctggcattcgatcgatcttgctgctgctgctgctgtcgtcgctggttggccaggagcacaccagcttcttgctgtgtcgccgtcatagaagtagccgcgcgctgtcgtcgtcgtctcgtccgcgacgcgaccactccggcggctgctgctgcctctcatgctggccacgccaccgacgcttttgtgataccatacgaagcgccgcggcgggcacgttggagatgtcgtcgctgggtgggcaacagcagcacgggcgcggcgacgaggccagggcgcggctcaggtggacgcgccagctgcacggccgcttcgtgctcgccgtggcccagctcggcggcgcggacaaggcgacgcccaagtccgcgatgaggtcgatggccgcgtcggggctcacg

SEQ ID NO: 1078 - DNA, 825 bp, Zea mays
  unsure (1)..(825): unsure at all n locations
  Clone ID: TF_ZmC2322_2
cagcagcancagcagcagcagggnaaggcaggncggtgctggtcaccggagcttcancgggcggttcgttgccgctttgcacganctgggtggccctcaaggtcagagtgtgagaccgatcgcctagctttaccgccataaattgtccaaataaaaaaaagtcccccactcgactgcaagagaaagtaagtatgaacctcgggtctctcatggaatttgcagtggctactccgaaacagatcagggaggtgatgcaagtggacgggcttacaaacgatgaagtgaaaagccatctccaggtgcgcgcgcgctttaatttgtctagggctctattttcttcgtccctgtatatcttagtagaactagtgcctgttcctttccgtcatccttcggggtgatatggtatcttttgtctggaaacttattgttggatcgttcgtgttcagaagtaccggttgcacaacagaagatcctcccccggcgcggcggcggctccggtgagccagtcgatcatgctggtggatggcgtctgggctgctcaggagcaaagcagcggctcgcagtccgggtctcggcagggcccgctccagttctccagggcaggtatggccgtcggtggcggcgacgacagcagcagcagcaacgacgacgaagacgacgacaagtcggaggatggctacagcctgaaatgcgtgtgaggctgaggcaggctgcgtttgcggaagatcggatgagagtgtagagagatagcgttgtcgcggcttgagcatgcatcggtggattcttgagtctgtcccccggccggcctcgagaaacccaatcgcc

SEQ ID NO: 1079 - DNA, 1790 bp, Zea mays
  Clone ID: TF_ZmC1401_1
ggatccatcaccctgctgctgctgctgctgtcgctggttggccaggagcaacccgctgagcttgcttgttttcctgccgcgggcgctgcttggccaggaccagctgcttgctgccgtcgtctcgtctgcggctactccggcctctcatgctggccacgccaccgacgctgcgatacgaagcgccgcggtgggcacgtcggaaatggcatcgtcgctgggagtgggtggtcagcagcaggggcacgggcacgggcacggcgaggccagggcgcggctcaagtggacgcgccagctgcacgaccgcttcgtgctcgccgtggcccagctcggcggcgcagacagtgagtcctctcttctgtccacccctccattcacagtcacagcctcacaggcagtcctttgtctgatgctaccgaccgacgacgtcggctttcccgttccttgccattggctgcagaggcgacacccaagtccgtgctgagggcgatggccgtgccggggctcacgctgtaccacctcaagaggcacctgcagaagtaccggctggtggcggtgagccgaggcgtcgcttccccgctgggcgacagcggagatggcaccgacgagcgttcgtcctcgtcctcggagaaccagccggcggacgagtgcgacgacggtaccgtcgccgagccgcatggcgattcttccaggagcgtggcgcggatgcagaggaagctgcaggagcagatcgaggtaaacgaaacgatagagtccggtcggtcgatcaccattgtcccgaccttgtggttgtggcagtgaaatccattaggtttcaggctttcagccgattgtgtgccgccggttcgtgcttggctgctgatcaagccgagctcggccattcatgaccacacacatccatacatggtggcaggtgcagcggcacctacagctgaggatcgaggcgcaggggaggtacctgcagtccgtgctgcgccgggcgcaggaggtcctcgccgaccacggcctgggctcggcagccggcgcggaggcggagctggcctccgcggtggacaccgggtccctgtcctcctcctgctgctgctccccgacgcgccgccgctccgccgacagctgcgtgacgtcctcctcttcggaggccgagagccaggcccccgtcggcggcgccacgtggctccacacgtgcgccggtacgcgcgactgctccgttgagcaacagccggtgcagggggagaagagtacattcctgcagaggcacggggcagcagaggacggcacttcgtctgagatcgatcccaacggcaacaggtaggggacggagtcggagatcgtgatcggaagcatctctctgctctgcatgtgcccagcgtcggagaacagggaatgaatgattggcggggtggccttcaaggttgggacttggggaggggggccaggcttttgagcaatgtctgctgctgaaacagctacctgctctgctcttcgttccagaatatgatgtgcatgtttattttcgtttatgcgaatggttcttgtgtttcatgtaaaaaaattatgactgcaactcgaggaagggccagctgcaaatgatgcatgcagtgtgcttgaggtagcagtacaatgcaaggatgattgcatggtacagaactgtagtagctactatattattagtaagattgtatgccatcagtgagattgatgccttaagagggtaatggcatgagaactggaaaaggtttagaatgtatattaaggcctcatttgaaatagaggattagtaaaaatgtgtgtgg

SEQ ID NO: 1080 - DNA, 1350 bp, Zea mays
  unsure (1)..(1350): unsure at all n locations
  Clone ID: TF_ZmC18574_4
attgggtacctcgaggccggccgggcaggggcaccacccaaaggcgggcgggctataaatcgtccctgtcactcctcgtcgcggtcctcgtccctgcgctcgacgacgacgacgacgtctcccgccgtggctccccccgcggagtcctcggacctctcgccgtccgcgtaccaccggatgctgtcgagcaccagcaggctccgcctccagggcgtgctcgccgacacgctccggggctacggggtacaccaccaccagcagcagcacttggacaggctcgccgcggtccgctatatgccgaggttcctggcctccatgcgcgtgatgcgcgcaccgcggatgctgtggaccagcagcctgcacgcgctgtttcgtccacaccggcgagctcctcggcagtccacgagtgggcgacgcccaagtcggagctcgagctgatggacgtcaaggatctgacgctagcgcatgtgaagagccacttgcagatgtacaggaccgtgaagagcactgacaagtctgcaacgacctcatcgggcgggccgcctgtggacggtggcggcgacgacgatgatctcccgagtgcccggcgggctcagtcgtcgtcgtcgtcgccagctggacgacgggacggcagcagcccgcaggcgttcaccagacaccggtcggctgcctcctcggagggcgcggcgagcctcgcgggcggcgacgacgtcgaatgctcctcctcggccgacgattccgactgcggcagggcgcgcagtgcttcgtcgtcaagagatcagttgctaccaccaagtgcaggcagtgcaggcacccttccttcagttggcgtatcatcatccactactgaggatatggagccagcttatcgatcagtaggcttgcaacaggcacccaaccatgaaatgagctgccctcctagcctggagttcaggctagggcgaccgatctggaacggagcagaacattagtagctaacactatctgcaacagcttattcaaactccactatgtaaacggtacagtctacaatgtagaacagtgcaaaacaatgttttaggtaaccatatgggtaaatgttggacacggtctaagcaacactagttacacacatgaatggcacattattagttcaacacttccactatacagtttactatatataccttgattggtccttgcatcatctagaatttaggaatgtggtgaaacgaaatgtggaattaatgatattagttttgtgttggccccaagatcgtcacaacatgaacttgctttgggttttgtttccttttttacattttggcttttgttgtggtcatataaaacaaaggntatatattgttgttt

SEQ ID NO: 1081 - DNA, 390 bp, Zea mays
  unsure (1)..(390): unsure at all n locations
  Clone ID: TF_LIB3150-031-Q1-N1-H9
cccctaataccaaggaggtcttttttcaactctgggcgcccctaattnntnctnnccnnntattttccatcactttcctgggaaaaaaaagcataaaatgaaaaagtttcaggacaaatgtactcagctattcgttcgttaccgttcaatggaagtgtaagatattatcaacggtcgtctgatggaaccaacttgcctaacgatgcttgtttggttttaacaacggatcccaagcctctactccttttgacagctgagctccatgaacgtttcgtcgatgctaatactcaactctgtggccctgacaaatcaaccccaaagactattttgataacaatacgatcaaaaagccttaccctttattacttaaaatcacacctttataaatac

SEQ ID NO: 1082 - DNA, 368 bp, Zea mays
  Clone ID: TF_ZmC2861_1
ggcatcagctgagctgagctgagctggtccatggagagggattactcgtccacggacggcgggggctgcgagatgcccgggaagaaggcgaggaagccctacaccatcaccaagccccgcgagcggtggagcaccgaggagcacgcccgcttcgtcgacgcgctgctcatgtttggacgcgactggaagaagatcgaggagcatgtcggcaccaagacgacagtccagatacggagccacgcgcagaaatacttcctcaaggtccagaagcttgggctggccgccgggctgccgccgatgtacccgaggcgccacttcgccatacagcagcagcagagctcggtggccgatggtagcagcgcggccgc

SEQ ID NO: 1083 - DNA, 425 bp, Zea mays
  unsure (1)..(425): unsure at all n locations
  Clone ID: TF_LIB4738-030-R1-K1-D12
ccggggcgctacacgcccgtgccgcctcctcctcggactcgtctgcggtggacggaggagggccgcaagcccgcctgcaccgagtgccgcacgcccgcctgtggtggacggaggagctgcatcggcagttcgtcaaggccgtcgagtgcctcggtggccaggacgatctccctggcctctccggaagcaagaacgcctacctgctttaagcaaggagggggggctttgtgaaaagctcaaccggtcggacagtatgcctcagggtaaacccagcagataccgtgcataccgtgaagacaaagattcaggaacagcaataccttgtgtatgatggagtgcagctngaggacgatcgtacgctggctgactacggtatggaacataaatntgtgcttgacctttaataaaagatgcaaatatttata

SEQ ID NO: 1084 - DNA, 659 bp, Zea mays
  Clone ID: TF_ZmC761_1
ctcgagccgcactgatggataggagcaacgccaaagctggtgcttcagacgatgaacgtgagggggctcagcattgctcatgtaaaaagtcacctgcagatgtacagaagcaagaagctggaccacgagtctgctggagctggacacgatagagcagccatctactccggttctcaattctcatctcaattctctctcccctccgcctccccccacccccgcctccaaattttagtttagttttatctactccacagaagcatactgcacacgtacatagaaaacgccatggactacgtactgcatcatttccttaaccatcgtcgctgctcaattttggcagttttcaagcccatggatttgcacatgatgatgaggagaggagaccatcgcttccatgacatgtttctccatcgagctgccgctgccggctcggtcatctcctccccgctgctccacaacggggatttgttcgggtcacgggacgccgtctcgccggaggccagcaggctctacgcgctcctccaacgccggcagcagccttcctccacgcaaacgttcgccctcatgaactacagtagtagcctgatagatatgatgtacttaatcaaccaccagatcgaaatgaagaacaccatgcatgcatgcgcactgcactc

SEQ ID NO: 1085 - DNA, 758 bp, Zea mays
  Clone ID: TF_LIB4738-122-A1-K1-D8
cgccgcgctcacgcccgtgccgcctcctcctcggactcgtctgcggtggacggaggagcgccgcaagcccgcctgcaccgagtgccgcacgcccgcctgtggtggacggaggagctgcatcggcagttcgtcaaggccgtcgagtgcctcggtggccaggacgatacttactacttgggacgagagatttgaacgtcgcgcgcggtggttataaaattgcattgttcccctgtccacctctttcacttcttcagatctccctggcctctccggaagcaagaacgcctacctgctttaagcaaggatgaagatctttgtgaaaagctcaaccggtcggacagtatgcctcagggtaaacccagcagataccgtgcataccgtgaagacaaagattcaggaacagcgataccttgtgtatgatggagtgcagctcgaggacgatcgtacgctggctgactacggtatcgaacataaatctgtgcttgacctcaaagaaaagatgcaaatctttatagtggaaacactagcagggacaaccatcactcttgagggtgaaaggtcagagactatcgacaacatcaaggaaaggattaaagaaagtgaggggctttcccaagggtcaggagggtctcatatttggacacaaggaggtagagacaacaggaccttgtgggacaacacatttccgaggggtctaccctcctccttggcctccggcacatgcttctcagaggcactatgcatatctccatatacat

SEQ ID NO: 1086 - DNA, 867 bp, Zea mays
  unsure (1)..(867): unsure at all n locations
  Clone ID: TF_LIB4767-071-Q1-K1-C2
gggtacctcgaggccggccggaagcatgaaagagaccaggccatgcagtgtagagcaggagctgtctagcaacgcatgaaggactaccaaggccacagcgctaccacaccgtgtggcagtggcactggcaccacgggagaggggcgaggcgactgactgataaggaagaagcaggtccgagctcgccagcagctagccgagcgcacgtggccgagatgggtggcgccggcggcggcgggaggaacggggcggcgacgaggcggtacaacaggtccaaggtgccccggctcaggtggaccagcgagctccatcgcaacttcgtccgagccgtcgactgccttggcggacaggacagtacgttctgttcctgtcttctcacctctcacgctaagcatgcatgcatacatacatacatgtctnttggtttggtgtcctctctatatctctctttcctcgtcggccaaaatggccctgggctcattcatgtgctctcttcgtggtcgatgtcgactgcatgcagaagctactcctaagctaattctccgnctcatggnatgtcggagggcttaccattgcccatgtcaagagccaccttcagatgtacagaagctcaggacaagacattagggaggagagaggtgcaaccgcggcggctaggacatctggtggagcactactcattcgccattgatggaggagggaggccccaaagaattcgtctgctgcccacacatgaanaggggcggaggcagggccagaagctgcggccacggncacggncacgcacgaanagcgtggcagggggacaggtgacatgggggctcctggcacccgggggctgcggcgatgattacacgcgagcgatcc

SEQ ID NO: 1087 - DNA, 1153 bp, Zea mays
  Clone ID: TF_ZmC4296_2
attgtatgaacgtcgacgaacagtctcggttgactgttcgcatgatatgctgaaaggacaattcaagcgcaaatcacgttgagaagcattgctagctggacgcacatgcatgacctgatcaagggcacactggaaaatcagaggaatttcgtctgacatgtgcacggtgcaatcgttcacccatcctacagctggtcgagtcagaccgggttaattactgccgtcgcccagctcggcgggcctgataatgtacaccgaaagctgtcatgaggacaatgggagtgaagggcctcaccctttttcacttgaaaagccatcttcagaaatacagattgggaagacagtctggaaaagagttaacggagcattcaaaagatgcttcttaccttatggaagctcaaagtggaacaactttgtctcctagaggttctactccagatgtgaaagagagtcaagaagttaaagaagcactcagagcacaaatggaagtgcaacgaagattgcacgaacaagtggaggtccagaagcatatgcagatccgaatggaggcgaaccagaagtacatcgacacgatactagataaggcgttcaagatagtatctgagcaactgagtggcttcagcatatctgaccaagacctaccgattctcacctctgctagggccatgcttagccctgcagatcacttgagttcgtctgtcttcccccagctctccgtcagctccgttagccttcacaatcctggtcctggaggagggaaaggccttccgcatgttgccgacagccacgtgttctcccagaggccacctgaacaattcaagcgcaaatcacgttgagaagcattgctagctcgacgcagatgcatgacctgatcaagggcacactggaaaatcagaggaatttcgtctgacatgtgcacggtgcaatcgttcacccatcctcccgtagcacatctgtgaaaatcaaggttatcttggtctatttcggtacatctagactgacctttattaatatctaatgtaatgcctaagtggactagataagtaattcgcttgatgtaaactgcccagctgtaggatccagttttaaagtcctgttccacgcactttgaatcaggttcccctcagtgccaacgtttgttggacgaaacgga

SEQ ID NO: 1088 - DNA, 1144 bp, Zea mays
  Clone ID: TF_UC-ZMFLB73117F06_FLI
gatcgatcccaacggcaacaggtaggggacggagtcggagaccgtaccgacgacgtcggctttcccgttccttgccattggctgcagaggcgacacccaagtccgtgctgagggcgatggccgtgccggggctcacgctgtaccacctcaagaggcacctgcaggtccgtccggccaccgccgaattatttctctcttggttggttgatgacgatcgcgcgctcaactctgccttgcctcctccttcctgatccatcgaccgtgtgcatgcggtgcacgcgcaccacactgccgctgcagaagtaccggctggtggcggtgagccgaggcgtcgcttccccgctgggcgacagcggagatggcaccgacgagcgttcgtcctcgtcctcggagaaccagccggcggacgagtgcgacgacggtaccgtcgccgagccgcatggcgattcttccaggagcgtggcgcggatgcagaggaagctgcaggagcagatcgaggtaaacgaaacgatagagtccggtcggtcgatcaccattgtcccgaccttgtggttgtggcagtgaaatccattaggtttcaggctttcagccgattgtgtgccgccggttcgtgcttggctgctgatcaagccgagctcggccattcatgaccacacacatccatacatggtggcaggtgcagcggcacctacagctgaggatcgaggcgcaggggaggtacctgcagtccgtgctgcgccgggcgcaggaggtcctcgccgaccacggcctgggctcggcagccggcgcggaggcggagctggcctccgcggtggacaccgggtccctgtcctcctcctgctgctgctccccgacgcgccgccgctccgccgacagctgcgtgacgtcctcctcttcggaggccgagagccaggcccccgtcggcggcgccacgtggctccacacgtgcgccggtacgcgcgactgctccgttgagcaacagccggtgcagggggagaagagtacattcctgcagaggcacggggtggccttcaaggttgggacttggggaggggggccaggcttttgagcaatgtctgctgctgaaacagctacctgctctgctcttcgttccagaatatgatgtgcatgtttattttcgttt

SEQ ID NO: 1089 - DNA, 421 bp, Zea mays
  Clone ID: TF_LIB3354-025-P1-K1-G1
cccacgcgtccggaagaacacagaataattaaagaatcgcacgggtagacagaattaaagaaccaagacctcatcggccggaactcaacctgcaaatgactcttcacatgcgctagcgtcagatccttcacgtccatcagctccagcaccgacttgggcgtcgcccctgttgtgcgcgcgcagagaggccggccgccggccgtggagagggagattaatcacatcccgcatgaaatgatccaagcagatctctgtgaactgcatggttttttttggggggagttgtggagctgaggatggaatggatgcaaagcggaggaattaacgactcacgctcgtggccgccgaggagctcgacggcgtggacgaaacgcgcctgcaggctgctcgtccaccggatccgcggcgcgcgcatgccgcg

SEQ ID NO: 1090 - DNA, 1248 bp, Zea mays
  Clone ID: TF_ZmC424_12
gtcccgctgctcggccgccgaccgagccgcgcgcttccgggactgcgtccgcagcctcgaggccgagaaggccaagatggaggtcttccgccgggagctccccatcagcgtccacctcgtcgccgacgtgatcgactggctcaaggaggagctcgggcaggaccgccgccgcccgtcggacctcttcgcgccaccagcgccgccgccgccggcaaaggacggagccgtcttggcggacgcggacgcggacgccaacgacaagcgcagctggatgagctccgtgcagctctggagctgcggtagccacgacgacagcaccgccaacaccaacggcgccgccgccgccgtgcagtcgccacgccgaagcagatcagggagctgatgaaggtggacgggctcaccaacgacgaggtcaagagccacctgcagaaatacaggctgcacacgcggcgcgcgtcgtcggacggcggcgaccagcacgcgggcgggctgtggtcgtcggcgccggatcagcagtacacgacgtcgcagcacagcacgtcgcagtcgcagtcgcagtccgggtcgccgcaggggccgctgcagctggcggtgtcgagcagggccatgtcggccaccgccggggacagctgcgacgccggcgacgaggcccagggcggccggtcggagagctacggctgggagatgccgcagcacgggacgaaggcgtcgtcgtcttgatgatccttgtccttggacgggatcacaattcacaacagtatagaagacggtgcggcgtggggcatggtactgaggacaactgcggaagaggcggcatttttttgtacaggcgttgagatgatttcatttttcccccttcctttttttctggtagagggaggaggatgtgatggtgaagatgaactgatctggtgttgttgatcgagagtgaggcatatgagatgagatgttattttttacatcccattgtacaatctggaggctggatcgcgttgttttaacggggatggatcggttttcgcatcaaaaaaacaaagaaaaggattgccgctgtcgatctagaacgtggtgatatgcgtctgcggtgtctgctgttcttgccagctcgtgtgctttgatccgtcgtggattcccgccacagttgtgtattgcccgtgtggttgtcgtgtggctcttaaacatagtcagacgtggcggccgatgtactagtgtgcttgtcgagtgcgggcgttgttccggctccggtac

SEQ ID NO: 1091 - DNA, 828 bp, Zea mays
  unsure (1)..(828): unsure at all n locations
  Clone ID: TF_ZmC34324_3
aaaaaaaatcttgaataaatccgtgtgatggtgattgctctacttactnggaagtactagtaaagggccttagactttcctgcccgcttgaagtgtcttttgggtcaattacatagctcacctgcagaatcttgagactcttcttcaaatcgagagtgatagtaggcatggggcatgtcgaacctgaagatggcttttcacttcgtcgtttatcaggccgttcaccttcatcagctccctaattttctttggcgtggcaacatgggggccaccgagctgattcatggtggctacgaactggctatatagatctgtaaccatatcaatatgaaaatatctcaatatgaaaatatcacaatacaacaaagtttataaatatcacaaaaacacaagtacacgaccaccctcactaaaagcatattctgaactgtggagaaggccttccacactgttgtagccgagatctactggataatcagcaagaagcccctgtcttcggaggagtctggtttggggtccagtaacctcagagagggacaatccattcaagtgtcagccacaaattctagctcccttacgtcgcggtgctgctcttcttagagccacgcccaccaggatcattggattggggccttgggggcagtgcatccgttcgtggtctgcacgtgcaacctagcagagaggagaggaggaagatgagtcacgccgtcacagaatttgggggcacgccagctgagcagtggcgactggcggtggcggctatgcttgctgtgcggctgtgcctgggcgaggggcgagggcgatgcctgccgacttcgagtggaagag

SEQ ID NO: 1092 - DNA, 557 bp, Zea mays
  Clone ID: TF_ZmC761_2
gcggtgaggcagtacaacagatccaagcttccccggctccggtggactccggacctgcatatggcatttgtccacgccgtggagaggctgggcgggcaagagagagcaacgccaaagctggtgcttcagacgatgaacgtgagggggatcaccattgctcatgtaaaaagtcacttgcagatgtacaggagcaagaagctggaccaagagtccgctggacacgagagagcagcaacctcctccgttttctcgcccatggacttccacatgatgaggacaggggaccatcatcgctaccatgacatgttcctccatcgacctgcagctggctcggccatctcttcgcggctgctccacggtggggagttcttcgggtcacgaaacgccgccgtctcgccggaggccagaaggctctacgagctcctcctacgccggcagcctaccatgcaaacgttcgacttcaagggctacagtagtggtagtggcctcagggatcaagagtggagattcagccagcatgcagcggcgacagcaagggctgtgtccatcaatgacca

SEQ ID NO: 1093 - DNA, 1063 bp, Zea mays
  unsure (1)..(1063): unsure at all n locations
  Clone ID: TF_ZmC12579_2
agagtttgctgcagtcccagactctcgttctcgttcctgctcttcttcttcctccaccatttgtgcttgtgctgtttcagtggtctgcttgggaaccgaaccaccatgaacctaaccttgcgtgggctctgcattcctttccttccgattcctgctgcctctgtgtctcctccaatccatgtgacgtgaagcagctatgatatatatatatatatatattccagagtcttgactcttcaggcccagaggctccgcaatgaactttttggaatctattgcggtgaatggacacagagaccgacagcatggaggcgtcatgagcagacagagcatggtcgccgtggagcagctcatcggccctgccagtgccagacccgctcacacgtgcgctgctcagcctcatgctcaccagctgctcagtgctcgatacgatcaccgtggcgggttgaattaccggaccggatctcgccatccaacgcttccacgttctgcacgagcatgtactcgtcgtcgtcgtcgtcgtcggcggcggcggattcctccaagtcgtgccggcgggcaggcgctctgccgttcctgccccatcctcctaaacgtgagcagcagcagcagcagcagtcatccagctctccatcactgctcgtctgtactgacctcggcaacggtggtcaagacgaggctgaagctgaacatccggctgagctcaaggacttcctgaacctctctggagaagcttcatggagaggcggtttccatggagagagcagcggcgtcgctttcagattcggagagcaggtggagtttcagttcttgtctgaacagctcgggatcgccatcaccgaccacgacgagagccctcgactagatgacatatacgacaggccgccgcaaacctcttcttgtccggtactgtcttgctccgaccaagaagaaggtctccagagggcagggtctcctgttaaagctcagccgagttcatctcgagctgcatcatgtaataacaagccaagactgaggtggactctggagctccatgagctnttcgtgaaggctgtcaacaagc

SEQ ID NO: 1094 - DNA, 722 bp, Zea mays
  Clone ID: TF_LIB4739-003-Q1-K1-F8
cgggaaacccaaacacccatacaagaatgatatgccactcatgacctgatcactccagtcgaccgcagccggccattgctacctctgtggcttagtcttctgcaagctttcctcttccttctcggctttgaacaaccaagaagctcagctagcacaccgtcgtcgacgttgcaacaaaccccaaccgctaccatgaccaccaccacgatgacgacgacgacgacagcagctcctgatctctccctccacatcagccctccgtcgccaccggagccgaggctgctgctggggttggagctcgacgacgacacggcggcggcggtggcggcgaaggccgcgacgaagaaggcggacgacgcggcgatgcgggagtacaacaacctccgccaggtgcagcggcgccagctgcaccagccgagccagacggcgggccacgggttcaagaggggcacgtcgggcagcgccgccgccggcgccggcgggaggagaagttccagggcgccgcggatgcggtggaccaccgcgctgcacgcgcacttcgtgcacgccgtcgagctccttggcggccacgagagagcaacaccaaagtcggtgctggagctgatgaacgtgaaggatcttacactggcacatgtgaagagccacctgcagatgtacagaacagcgaagcagcagggcgcagacagaccatgtgtagcagttgcaggccatgggcatgccag

SEQ ID NO: 1095 - DNA, 1694 bp, Zea mays
  Clone ID: TF_ZmC1401_4
ggcgcggctcaggtggacgcgccagttgcacgaccgcttcgtgctcgccgtggcccaggtcggcggcgcagacaaggcgacacccaagtccgtgctgagggcgatggccgtgccggggctcacgctgtaccacctcaagaggcacctgcaggtccgtccggccaccgccgaattatttctctcttggttggttgatgacgatcgcgcgctcaactctgccttgcctactccttcctgatccatcgaccgtgtgcatgcggtgcacgcgcaccacactgccgctgcagaagtaccggctggtggcggtgagccgaggcgtcgcttccgcggacaaggcgacgcccaagtccgtgatgagggcgatggccgtgtcggggctcacgctgtaccacctcaagagccacctccagaggtaccggctggcggtgagccaaggcaccgcgtccccggtgggcgagggcgacaacggaggtggcgccaacgagcggtcgtcctcctcggagagccagctggacgagtacgacgacggttccgtggccgacctgcatggtgattcttccgggagcatggcggcgcgggtgcagagagaggcgaaaaggaagcggcatgagcagatgcagatcgaggtgcagcggcacctccagctgaggatcgaggcgcaggggaggtacatgcagtccgtgctgcgccgggcgcaggaggccctcgccgaccacatactgggctcgccggccggcgcggaggcagagctctcggagctggcctccgcggtggagaccgggaccgggtgcctgtcctccacctcctgctgctccacctcgccttccccggtgcgccaccgctccgccgacagctgcgtgacgtcctcctcctcctcctcctcggaggccgagagccaggcccccgccggcgccaacacgtgcgctggtacgcgcgactgctccgtcgagcggccggtgcaggacgaggagagtacattcctgcagaggcacgaggacgaggacgaggcagaggaagccgacgttggagctgcagctgcagctgaggacgaggacggcacttcgtcagagattgatctcaacaggtaggcgacgaagatcctgatcagaagcatctgtgctgcatgtgcccagcatcggatgattggcggggtggccttcaaggttgggacttgcttgggagggggcaggcttttgagcaacgtctgctgctgaaacagctggctacatacactgcaagtctgcagcgaccacactgctcttcattccataatatatgatatacataatattccaatttatgcaaaaaaaaaaaaaaaaaaaaaaaaaaaaaaaaaaaaaaaaaaaaaaaaaaaaaaaaaaaaaaaaaaaaaaaaaaaaaaaaaaataaaaaaaaaaaaaaaaaaaaaaaaaaaaaggatctttgcctattcaccattgttaaagggcaaattttggaaaaattcaaaaaaatgagggcggatcaaacaaacatataatagggcccaatttccctaaaaggggattggaaaacaaaaaaatggcaactgattaaaaaaaatacaaaattggaaaaaactttaattacccaaaattaaaggaatggaaaaaaataccacctttaccagcagtaaaaaaagaaaaaagatctgcacaatgaggccctttcaaagatggactcaatcttaaggggaa

SEQ ID NO: 1096 - DNA, 956 bp, Zea mays
  Clone ID: TF_ZmC2088_2
gactcatgacctaatcaccaagatccaatccctcccccttcgagcaagaacaggcgacaaggctggacctgctgccaattcacaagtgcagcagcagaagcttgtcgttgcacaatggctactactgctgctgcagcccccgacctctcgctgcatatcagccctccctcgccgcccgatgatgctaggagcagtgacatgctcttctccaagcagacgctgtgcctcggactcgttcagacgacgacggcggcggcggcgcatgatcaggatggccaatgcgacgacgtccagcagcagcagcggctgcaccagcctagccagatccagaggttcaagaaaacctcgtcatcgtcggcgccgttgttatctgccggaggaggcacgacgagatctgggaacggcaacagcgggggcgggaagaggagctccagagcgccgaggatgaggtggaccacggctcttcatgcacacttcgtccatgccgtagagctccttggcggccatgagagagcaacgccaaagtcagtgctggagctgatgaacgttaaggatctcacattggctcatgttaagagccacttgcagatgtatcgaacagtgaagggaacgacggcagacagatcatgtgctgcaggccatgtccagatgagagacatgggctttctgcacaggggttgtgaactgaatggcttcgaagcgtttagcaacggtacttctaatgctaccgccaataatagggatggaggaccagcagaggcgcgcatcagcaagacgctgccgcccccccgccgctcgtcctaggccagcaggacagtgcgcggcgtctgcatccaggcttccccgacacggccatcagcagcagcagaccgtcatcctggagcgcaggcgtggcaagccgctggtcgtcgacgacggcggcggcgccttcgccgtcaagtggcaggagtagcata

SEQ ID NO: 1097 - DNA, 1327 bp, Zea mays
  unsure (1)..(1327): unsure at all n locations
  Clone ID: TF_ZmC637236_1
ccggccggatcggctttgctcagactctcttcacagatatttatatataacgagcgcagctagctatgatggctagagcctgacagaattgacaacctatagatagaggctaagctagggtgcgaaccaccggatctagatgagctaggcagtgagaatgacacgtttgagagaaaaggatccggctgtacaatcgctcataggtgtcgcggatgcggtggacggaggagctgtaccgcttgttcgtcgaggccgtctagtgcctcggtggccaggacgaatgaactccgaatagaattcttcagctgatgggcgcgaagggagctaccatatctcatatcaagagccatcttcagatgtacagaggctccatctcctgcagtagcagtacccatcatcagtccagcctccagaagtcttacatcaaccgctagcgagcaacaactagcgcgtgttcttcacgcgtgaagattgtgcgtcacaggaaggcaacgctccagcttcagacaagaacatctataccaccacgctccgtggttgcggccagtactcatcaccgtaccaaataccttcgctacagcaagtgttcacaagctgttaacaaaagagagggcgtgtttggagctccgacgtgctatcaacagagaaccggccgggtattaggccaagtcacactaggaagcacgagacgcagcagcacacgggatgcgacctcacgctgtcgatcgggctgtgggaggacgcgagcagcagcgacgacgccgacggctcgagctccatcagcgaggagctgctgcctgctccggtagcgggcggcgctcgccgcgtcgccgccgtagtgaaggaggaggaggagagcaagccggcggctctgaacctggacctgaccatctcgtcgtcctggctggcctgacgacgcacgccggcggccggctggcggtgttatgcgtacgtggccggcgtaggtacaaatacgtacatactatacgtggactcttgcagatcgagcagcagactgtgtgatcagggcatcggtactaggactgtatattttcgtgtcgtcctgcccactccgttctagtcactctttttttttcttattagatcatctgtacaacattttcgggtccgttcgattaggaacggccgcctgggcttcagacgacggtgggtgaggaatttctgcggccctttttccttgtccggngagaaggcgctgtatacctcagttcctcacatgtcatcgtctgatcgattgagcatatacagtatgttattagttctggcaaaaaaaaaaaaaaaaaaggggcggccctcgagctccagc

SEQ ID NO: 1098 - DNA, 1000 bp, Zea mays
  Clone ID: TF_ZmC1230639_1
gttttttttttttttttttgaagacatgcgtccatataaatactcagacttggagtacatgcataagctaacagctatatgtaagtacttgtttacttaattattggtggtacatactagaataataacttaatctgagaagacatttaaattaatgcagcaatgcgaacctatcagtagtgttgactgagtttttgttgcagatttaaattagtagccgccgtccccttcaccagcgcctcttcttctgagaatgaccatgtctcccgcatggccgccatggcctgctgctgctgctacacatgatctgtctgtactacccttcactgttctgtacatctgcaggtggctcttgacgtgcgctagtgtaagatccttcacgttcatcagttccagtactgacttcggtgttgctctctcgtggccgcccaggagctcgacggcgtgcacgaagtgcgcgtgcagcgcgggggtccacctcatccgcggcgccctggagcttctcctcccgccgccggcagcggtgcccgacgagctcttcttgaacccgtgggccgtctggctcggctggtgcaactgcagccggagccgctgcgcgtgaaggttgtgctcccgcgccgccgcggccgcgtcgtcgtcgtcgtccaccttcttcgtcgccacggcggcgtcgtcgtcgtcgagctccagccccggccccggccccagccccagccccagcagcagcctcggctccggcagcacctcgacgccgccggccggtggcgacggagggcttatgtggagtgagagatcaggaaccgccgccgccgtcgtctgcacacccacgccgccgccggtggaaacgccccagcagcagcctcggctcatggtagctcccaacgggtttgcagacggtgagctgagcttcttggtggttccaaagttagaggaaaggatggaaaggagaacctgcagcaggaagaggtagtagtgggctggggtagagttattaggtcat

SEQ ID NO: 1099 - DNA, 844 bp, Zea mays
  Clone ID: TF_ZmC519380_1
ctctctctccctgctccctgcctcccctctcccctgctttgaccctgctgcccggccggctgcctggctttatctgcccgccgcgcctttccccgccgcttggatttgtaggatccagcgacgcccgtccccgcgccgctcgccggggcattaggtggcccggccgtgccgtgtgggactcgcgggggaaggaagatgaccgtggaggggagggtcggcggcggcggcaaggacaagttcccggcgggcatgcgcgtgctcgccgtcgacgacgaccccacctgcctcaaggtcctcgagaacctcctgcgccgctgcgactaccatgtcacaaccactgggcaggcagccaccgccctcaggatgctcagggagaacaaggaccagtttgacctcgtcatcagcgatgtccacatgccggacatggatggtttcaagctcctcgagcttgtcggtctggagatggacctcccagtcattatgttgtctgcaaatggggagacgcagacagtcatgaagggcataactcatggagcatgtgactacctgctaaagccggtgcgtcttgagcagctgaagacaatatggcaacatgtgattaggcggaataccaagaaccgtggtagtgacaatgatgatgccggtcagaaggggccaaatgctgaaggtgagaatggtggtgctaaccgcaacaagaggcagtcacggagggatagagatgacaatggagatgatggtgacgattctgatgagaacagtaatgacaacggcgactcgtcatcccagaagaagccaaagggttgtgtggtctgtggagctgcaccggaagtttgttgctgctgtc

SEQ ID NO: 1100 - DNA, 442 bp, Zea mays
  Clone ID: TF_uC-zmflteosinte056b03b1
ttctatctctttacctgatgatgactggtggagctcaaggaaggaatcgcctatcctaagatgagcaagaaacgtactgacctggagttctgcaggctgacagcagcagatgtatcatcagcaacagctccacacccataaccagcacctgtcctcgtcaaggccgggcttacctcctgagaagcagttcctcctgcacggagcaggaggcggcggagatgcagggctcgtcctctccaccgatgctaagcctcgcctgaaatggacacccgagctgcacgagcgttttgttgaggcggtgcatcagctcggaggcccagacaaggccacgccgaaaactatcatgaggctcatggggatccctggactcaccctgtaccatcttaagagccatctccagaaatacagacttcagcagaatttccaggcccaagctcatact

SEQ ID NO: 1101 - DNA, 325 bp, Zea mays
  Clone ID: TF_LIB3597-003-P1-N6-G6
gcctctccgagcgccgccagcagcgccgtcacggacgcggccggggcgcaccgccggcaacatgcgcagcagaggaaggcgaggaggtgctggtcgcccgggctgcaccgccgcttcgtcgccgccctgcagcggctcggcggcgcgcaagtcgccacgccgaagcagatcagagagctgatgaaggtggacgggctcaccaacgacgaggtcaagagccacctgcagaaatacaggctgcacacgcggcgcgcgtcgtcggacggcggtgaccagcacgcgggcggtctgtggtcgtcggcccctgagcagcattacacgacgt

SEQ ID NO: 1102 - DNA, 798 bp, Zea mays
  Clone ID: TF_LIB5117-022-A1-PF1-A5
atcgtcccgagtcctgacctcgccacacttcgttttctgagccaaacttctttctgttccgttgttcagagtagattttgctctagtactctagatgaacaccaagaagttcaggccgcccggcgacgtcgtcggctcggcagcgctctgcgatccttcgtcgccgcagcagctatcgtcgtcgctccatcaggaggagctcgagaattctgctactagtagccagcagcactgcgcgggttgcaggctgcacgaggactacacgccgtggtcggctctcgcgcagagctgccttggcacagacaacgccgcgttcgactgcgccgagagcctgttcgactacccccccggaatgctcctgatgccgatagccaggacgcactatcagtatcagtcgtcggagaacgaccgctgccggccacggccgcagcgggatgcaatggagacaacacctgcacaactccacaagcagccactgccgccgccgccgcagcagcagcaagagagggatcatgggttgttcagcttcagcaacgcttccaccacttggtctcgtggtggcgagccaaagacatgctcgttctcacctcttgtggccgcgccggacacaattctcccggcgatggagaaccagaaggtgccgctgccaggaaactgcatggacgcgcctgtgaccccccgtcggcgacggcgccgccagggcgccagctgctgaatccagcaccgcgccgaggaagacgcggatccgatggacgcaggacctgcacgagcggttcgtggagtgcgtgaaccagctcg

SEQ ID NO: 1103 - DNA, 371 bp, Zea mays
  Clone ID: TF_LIB3355-001-P1-K1-E9
gcgccggcgttcgcgccgctctgcttgagaacggacgacaaggctgcggctgcgcgcgtcggggtgccggatctgtcgtccttgctgtcgtcgccggcgaccatgcctcctgcggacgccggcgccgaggagagccgtcgccaggttgtgggatttgcgcaagctgcggccagggcggctgccatggcgccgtctgcccctgcgcttgggctccagtcgcagcagcagcagcagcaggcaaggaaggctcggcgttgctggtcgacggagctgcatcgcaagttcgtcgccgccttggatcaactcggtggcccccaagttgccacgccgaagcaaatcagggagctgatgaaagtggatgggctgacaaa

SEQ ID NO: 1104 - DNA, 2656 bp, Zea mays
  Clone ID: TF_ZmC10296_1
ggtaccctcgggttcggccgcacctcggacccatcaggtgctgctgtgctgggcgagttctcccccccttccttgcttttgtctggcattcgctcgctctagtttcgcgcaacccggccgccgccgccgcctcgggtttctcgcctgtggctttgagccgagaggttggggactcggtttccttcctgctctgagttgggtttcgcgcggctcggactttggccggcgggcgaataaaccggccggatgcttctgggcgctgcggccgcgaggatggaggagaagcgtgtgatcacggggagggagcgggaccagttccccgtcgggatgcgggtcctcgcggtcgacgacgaccccgtctgcctcaaggttctcgagaccctgctgcggcgctgccagtatcatgtaataacgaccaaccaggccatcaccgcgctgaagctgctaagggagaacagggacatgttcgatctggtcatcagcgacgtgcacatgcccgacatggacggattcaagctccttgagcttgtagggcttgagatggacctacctgtcatcatgttgtcagtgaacggggagacgaaatccgtgatgaaggggataacccatggcgcctgcgactatctcctgaaacccgtccgcatcgaagagctaagggacatatggcagcacgtcgtcagggacgcgtggggcaagcgagagcgcagcaaccttgacgtctacaaagatttcaacaggctgccaggcgcggatccatgccacagccacggccacggccacggccagaccactgccggggcttccgaccagagcgggaggatcggcaggaagaggaaggaaatgcacagcgacgaggaggacgacggcgaggagaacgatttccaggagggcgacgagccctccgcggctaagaagccgagagtcgtctggtcgattgagctgcaccggaaattcgtcgcggccgtcaaccagcttgggattgataaagctgttccgaaaaggattcttgagcttatgaatgtggagaaactcaccagggaaaatgtcgcgagccatctacagaaatacaggctctatctgaaacggttaagtgctgtggcatcacagcaagctagcattgtcgccgcatttggaggtagagacccctttctccacatgggagcctttgaaggccttcagagctaccaacctttcgccccctgtgctgctctatcgtccttcatcccacaccacggctcgcttggtagaactaccgcggcagcattcggggtcccggagcttgctcctgccatcacagttcaagctgctgccagcaatggcatgataagccactgtgctggcgacgcaagcaagtttcagctctccggtatacaagaaaaccagcaaccaaatctgggacaaggctcggccacctctcttgggctgccccagctccaacagaagtggatccagcaagaaactggcgacttgtctgctgtcttctctgggagtgcactggctaacactctgtctggtgcactccagagagttgcgagcagtccattgccaccgcaagaacttttggagggcgtacaaaccaaagttagtgcccagccaccaataacaatggcatctgtgagttcagaacttgttgagaggactgttggagtttcggctaatttgcaggactccggtatatccccgcagggcactcttccaataaatgatggatttactgctgacaagttacagctgcaagatccattcgacagcaatggtggaacaaatttttcagtaaacatgcctgtttgtccctctggtagccttacagcatccagcaacgccaagggtggtgctagttcgtgcagtccagtgctgctcgctcctgatactgggagacattcaaactacttgcagtttggagttgcaggcaactctggacatgacatgaacgatattaaacaggaccatctgcatcaaggattgagcactggaggtttcaatcacgattttggcacctgtatgactgaacaaacagatccaaatgtgccgtatcttatgccacaaatgaagcctaacaccttgtcatcagaggataaactgaagcagaggaatatttatgatttggggattccaaagctccatggtggttttagctctagtagctgcaattttgatggtcttctcaattccatgatcaaagcggaaaaggatgatctctcattcacggatagcgacctggggtgcgacttctttccactcggtgcttgcatatgagacctcttaacaacccctcgtgcagattggccctcgacgggatgggatgggactacggcctacgggagaggttgtaaagtacactgcttaggagcattggccagtttatgctgcctaatgtgttactatgcttggtactgtgcacactagaaatgctagggatacaggtagctacggacatgccttgtaatctacatttcctcctcttcgaatgggaaatgaaagtgattatggttaggtaaaaaggagcaagtataatgctccaaattaacatcatcttcatcttaaaattttaccaaattttgtttccaagtgtcattagctcaaaactagaccattaggtgcattgatgacacgtataatcgaaaatattgtaatagtccttcctttggcagtgatt

SEQ ID NO: 1105 - DNA, 2289 bp, Zea mays
  Clone ID: TF_ZmC21783_1
cctgtcgtctcgagagagcggaggccctaatactattgtcaccctccacatgttagggggaccatcaggcgtcttgcattgtagctagtccattgctctcatcttctcttcttcttcccccagtcctccccccctttcccctcttcggcctctctcgctcagctcgctcttcattaagcgagctcacgtcgttcctcccttcttcttcttcttatccgttgttcaattcgttcagctagccggccagagatcgagcatcatctccatcatcgattcatccatctcatctttctcttcttctattctatgtcgtcgtcgtcccagattagatcgaagctgctagcagtctatccagtctctagctagctagctagatcaagcccgcagactatataatataatacaagctagctacgtgcttattattgctttattagtctagaataatcttgatatatacgatcgaacatatatctcgatctccaccgatacacacccggccctatccatgcttgaggtgtcgacgctgcgcggccctactagcagcggcagcaaggcggagcagcactgcggcggcggcggcggcttcgtcggcgaccaccatgtggtgttcccgacgtccggcgactgcttcgccatggtggacgacaacctcctggactacatcgacttcagctgcgacgtgcccttcttcgacgctgacggggacatcctccccgacctggaggtagacaccacggagctcctcgccgagttctcgtccacccctcctccggacgacctgctggcagtggcagtattcggcgccgacgaccagccggcggcggcagtagcacaagagaagccgtcgtcgtcgttggagcaaacatgtggtgacgacaaaggtgtagcagtagccgccgccagaagaaagctgcagacgacgacgacgacgacgacgacggaggaggaggattcttctcctgccgggtccggggccaacaagtcgtcggcgtcggcagagggccacagcagcaagaagaagtcggcgggcaagaactccaacggcggcaagcgcaaggtgaaggtggactggacgccggagctgcaccggcggttcgtgcaggcggtggagcagctgggcatcgacaaggccgtgccgtccaggatcctggagatcatgggcacggactgcctcacaaggcacaacattgccagccacctccagaagtaccggtcgcacagaaagcacctgatggcgcgggaggcggaggccgccacctgggcgcagaagcgccacatgtacgcgccgccagctccaaggacgacgacgacgacggacgccgccaggccgccgtgggtggtgccgacgaccatcgggttcccgccgccgcgcttctgccgcccgctgcacgtgtggggccacccgccgccgcacgccgccgcggctgaagcagcagcggcgactcccatgctgcccgtgtggccgcgtcacctggcgccgccccggcacctggcgccgtgggcgcacccgacgccggtggacccggcgttctggcaccagcagtacagcgctgccaggaaatggggcccacaggcagccgccgtgacgcaagggacgccatgcgtgccgctgccgaggtttccggtgcctcaccccatctacagcagaccggcgatggtacctccgccgccaagcaccaccaagctagctcaactgcatctggagctccaagcgcacccgtccaaggagagcatcgacgcagccatcggagatgttttagtgaagccatggctgccgcttccactggggctcaagccgccgtcgctcgacagcgtcatgtcggagctgcacaagcaaggcgtaccaaaaatcccaccggcggctgccaccaccaccggcgccaccggatgacatactatctcgtcgacaatacatgcatgtacaatagacggatgtctagtagtatagtagattgctgctagctagctagccgctagagtgtagtagcatatgcatgccttttttttcttcttctttttttgcccttattattaagctggctaatagcgattgagatggagcttgacacagatctgctagctagctatttgagggtttctcttgtatgctacctattgctgctgcttgctgctgagacaagtaatgtacgtacgcctgtgcaaacgacacatcggattgtattgtattactagttatatgaacaacaacaataataataggcacatgcatgcctgcctagtatgtgagctgctagctagctacatgcatgttgcgcattcctttcc

SEQ ID NO: 1106 - DNA, 564 bp, Zea mays
  unsure (1)..(564): unsure at all n locations
  Clone ID: TF_LIB4744-075-Q2-K1-H12
accacttgcctgtacactcctcgttccgcgtgcgagcgaaccctgttcctgttcttgaatcttctgagcccagtccttgtagctagcagatagatcgctcaggcggaaagatcgagagaaggtcgccccaggatcgagatctagagcgagaaaggtttaagagggaaaggcgcggcaaggagtcgagagaatagaatgttcccttccgccagagaagcaggccagcaccggtgccgcgaacccaaatgatcggcctatgtgcgggcaaggcggcgactccggcggtctcgtcctcaccaccgaccccaagccccgcctccggtggacacccgagctccatgaccgcttcgtcgatgccgtcgcccagctcggaggcccggacaaggcaacgcccaagaccatcatgagggttatgggagtcaagggcctnaccctctaccacctcaagagtcaccttcagaaattcaggctagggaagcagcacaaggagttgggtgaccatacagcaatggagatgcaacgtatcgtggcctctttttcaggcatgatagccagaagcatgaa

SEQ ID NO: 1107 - DNA, 567 bp, Zea mays
  Clone ID: TF_LIB3632-054-Q6-K6-E9
cccccccccccccctctccagcggcaaaagtgttgcactgcagcactgctagctaggagtatactatgagcttgctagctagcctggctgatggatggtcactactcatgtgcataaacgtgcatgtgaagtggctgggcatccaaccaaatatataagctactggcaaccggctgccggctgctggcaggtcgttcttcgtgttgtatgtagcttgaggctgaggccgggagatgaccactgcttcgtccacgccatccacaagctcggaggccaggacaaggctacgccgaagcgagtcctgcagctgatgggtgtgggaggactcaccatatctcatgtcaaaagccatctgcagatgtacaggaacatgagaaatgatattggaatgcaagggacgacgatgcagctggtgcaccgggcggaggagcacgtatacggccgaggcggcatgcatatggaactctgcgccgatacacagcgacgacgacagccgcagccgcagccgcagtgcggtcatgatgagtgcgatggcccggcctgctgctgcatcgtcgtctgccgctc

SEQ ID NO: 1108 - DNA, 1789 bp, Zea mays
  Clone ID: TF_ZmC2322_1
cattgggtccctcgaggccggccgggctcagtcacccacccccaccccaccccaccggcaccctcaccctcaggcctccgcctctttctcagcttctctccggttccttccttccggtcgccgattcttctacgcgaaagattcctggctgcctctcgtctctcgtctcgtttctcgcgtgcatggggctggacgtcggggagatcgggatgggcctggatctggggctggacctcaggctgttcgccgcgcggagcgccggagggatggccaagggcgctgcgccggcggggatccagtcctgcatcaggagcctcgaggtggagcgcaggaagatcgaggtgttcaggcgcgagctcccgctctgccttcgcctcctcgccgacgtgatcgacgagttgaaggaggaggctgccaagagaggagaggacgacgacggggcgacggtggtggacgacggcgacaaacggaaatggatgagcaccgctcagttgtgggtggacagcgacgccaaatcggacgagtctgacaaagagcaacagagtgaaatcacgtcgccgccggagcccaagttgttgggtggtggcgcacccacgccgataagggcggccgtttcggcggtggcggtgccaccacccctaccgccgccgttgttcagaagagaagacagctccgccagctctggcctgtcgttggtatcgttgtcgccggcaaccaaggcggcggtgccgatttctcctccggtggtggctgccagcggtactaccaccagcgccagattttgtggcaccaccatgccaccatctggctccgaggtcatcaacatgcactcgcaggctcagcagcaagccagcaggaaggcaaggcggtgctggtcaccggagcttcaccggcggttcgttgccgctttgcacgaactcggtggccctcaagtggctactccgaaacagatcagggaggtgatgcaagtggacgggcttacaaacgatgaagtgaaaagccatctccagaagtaccggttgcacaacagaagatcctcccccggcgcggcggcggctccggtgagccagtcgatcatgctggtggatggcgtctgggctgctcaggagcaaagcagcggctcgcagtccgggtctcggcagggcccgctccagttctccagggcaggtatggccgtcggtggcggcgacgacagcagcagcagcgacgacgacgaagacgacgacaagtcggaggatggctacagcctgaaatgcgtgtgaggctgaggcaggctgcgtttgcggaagatcggatgagagtgtagagagatagcgttgtcgcggcttgagcatgcatcggtggattcttgagtctgtccgagagagtggttgtagtgcaggcaggcatgtatacagggagattaggcgcgcgcggcccgtgtgcgcccaagagatgaactgatcatgcggcgtttggaaagctgataggcgttttgtttgagtctttgctgacttctgttaacttccgggcagatcacaaaattttcgccctgagaataacttattaataataatattactgcggcggctgctgttattttttaaaaaaaaaaaaaaaaaaaaaaaaaaaaaaaaaaaaacccacacaacattgtcactcagaactgctgatcgacgatttgcaggcagggtgcctgccttcgcccaacgtgcacaagactacgaggcgcttggagcccccctcttggcctgatgacttgcacgacatttattgagaaaaacctggacctgcacccgctgacgatgga

SEQ ID NO: 1109 - DNA, 754 bp, Zea mays
  Clone ID: TF_LIB4740-007-R1-K1-F4
attcctccaccggcctcatcccccaactccgtcgagcattaccgccctctgggctggcgcggcgtggaggggacagctggagatccgcccgtctctgcttggattgcttccttctcccgcagagggtatgagcaatgtactcaccaaaaccagagtctagttttggcccaaatcccaactcaggtacacaccagcagcaaatggaattaactggggccaacatgggtcctggtaatggagcaaataacaataccaacatggctgggaggcaacgcttacgctggacaaatgaactgcatgaaagatttgttgaggctgttactcaacttgggggtcctgatagggcaactccaaaaggagttctgagaattatgggtgtacaaggattaacaatataccatgtaaaaagtcacttgcagaaatacagactagcaaagtatattcctgatgcttcaactgatgggaacaagaccgataacaaagacccaggagatttgcttgccggacttgagggatcctctggattgcagatatctgaagccctcaaactgcagatggaggtccaaaagcggctgcacgaacagttagaagtacaaaggcagctgcagttacgaattgaggctcagggaaagtacctccagaagatcatcgaagagcagcagcgcttaacaggtgtgaaatctgaaactcctgctgggaggtgcttctgtcactgtatcaagtgatcaattcccagactcggagcggactgagc

SEQ ID NO: 1110 - DNA, 2088 bp, Zea mays
  unsure (1)..(2088): unsure at all n locations
  Clone ID: TF_ZmC785_1
nnnnnnnnnnnnnnnnnccggccgcacaaacaaactcatttcccgtctccacttgttcctcctctgtgctctcgcctttccattcctccaccggcctcatcccccaactccgtcgagcattaccgtcagagggcggcggcgcggcgcggcgccgccgccggcgacggggaccgcgtgaggcaggctcccctcaaggctcgtcctcctcgtcgggaggcgtcgccgttgccccgccctctgggctggcgcggcgtggaggggacagctggagatccgcccgtctctgcttggattgcttccttctcccgcagagggtatgagcaatgtactcaccaaaaccagagtctagttttggcccaaatcccaactcaggtacacaccagcagcaaatggaattaactggggccaacatgggtcctggtaatggagcaaataacaataccaacatggctgggaggcaacgcttacgctggacaaatgaactgcatgaaagatttgttgaggctgttactcaacttgggggtcctgatagggcaactccaaaaggagttctgagaattatgggtgtacaaggattaacaatataccatgtaaaaagtcacttgcagaaatacagactagcaaagtatattcctgatgcttcaactgatgggaacaagaccgataacaaagacccaggagatttgcttgccggacttgagggatcctctggattgcagatatctgaagccctcaaactgcagatggaggtccaaaagcggctgcacgaacagttagaagtacaaaggcagctgcagttacgaattgaggctcagggaaagtacctccagaagatcatcgaagagcagcagcgcttaacaggtgtgaaatctgaaactcctgctggaggtgcttctgtcactgtatcaagtgatcaattcccagactcggagcggactgagccctccacacctgcaccagcatccgagtctccaactcaagttggtgcttccaatagggacactggagaccgaactgaagcaaccaagagcacctgtcatggtgattctctttcccgcaacgagccactaacccctgattccaactgccagaacggttctcctgtcgctagtccaaaccatgaaagggcagccaagaggcagcgaggcagtggtactgaattcttagattctgaggctgagttttcccttccgcgccacatcttcgagtcgagttcaggctcagagttccaacaatactcaatgtcctactcaggacagtagcttctgatgttcacatcatctctgcaccgttgctagcttgttcagcacgatgcgcatggtccgtaggtctgggtaggttgatgtctcaaggagcgtgttgttggtaaacaaagctgtaggtgttcagtgattgtctacatggtatacgtgaccagctatttaagttcctaggtttgtaacatgtatgtccgcctgcagttcagttgagatgcttcaaggctaaggttctgttgtgtgacctgtagacacgaggctgtcagcttgtattctcttggtaatgtgtgtcagcagagcgttagcattaagtctaattgaacagtgctgttatctgtaacgtctgagtttgatcagaaactgaagttaattgaggaagacatcaacaatgtcaatactcaatgtcctactcaggacagtagcttctgatgttcacatcatctctgcaccgttgctagcttgttcagcacgatgcgcatggtccgtaggtctgggtaggttgatgtctcaaggagcgtgttgttggtaaacaaagctgtaggtgttcagtgattgtctacatggtatacgtgaccagctatttaagttcctaggtttgtaacatgtatgtccgcctgcagttcagttgagatgcttcaaggctaaggttctgttgtgtgacctgtagacacgaggctgtcagcttgtattctcttggtaatgtgtgtcagcagagcgttagcattaagtctaattgaacagtgctgttatctgtaacgtctgagtttgatcagaaactgaagttaattgaggaagacatcaacaatgttctgatactaaaaaaaaaaaaaaa

SEQ ID NO: 1111 - DNA, 529 bp, Zea mays
  unsure (1)..(529): unsure at all n locations
  Clone ID: TF_LIB4744-062-R1-K1-C9
ctcgcccctccccctcccctnctcccctcccctcgccgcccatctcctccgcccctttttgaccccggttacgaatccgcaccagggcctgcggcggtatactcggttccctgcccccccacgaccacgccgtcgactactccccacgcccgaccggcgctcccggaaccgccggaagtgggaaacaacggctacggaggacatcggatcttgataatcgctttaaggatgccatcgcccagattggtggaccagacagagctacacctaaaggggttctaactgagatggatgtaccaaggatcacaattaatcatgagaagagccatctgcagaagtatcgacttgcaaaatatatacccgacactagggatgaaggtcccaaggacgaaaagataaattatagtgattccctttcgaacacggattcggaacgagaatagcaaatcactgaggcactaaaaatgcaaaaggaggttaagaagctactacatgaacaaattgagggttaaagacaaatggaactaat

SEQ ID NO: 1112 - DNA, 1415 bp, Zea mays
  Clone ID: TF_ZmC34044_2
agagggaggctgcccattattaaccctccctccccacacgcagaagacgacgaccggaagcaaaacagccagccaaccaaccaaccagaccagggatggatggtgcgcaaccgagccaatgatctgtaccggtccggaattcccgggtcgacccacgcgtccgttagccagcttaccaaccaaccagaccagggatggatggtgcgcaccaagaaagggggcaccgcaccgagccaatgatctggaagaagagaggtaggatttaggcacggcacctatagcccctgacgagagagagagggagagagatttggtcttggataagagtggagagactggagacgggtgggtggagtgagagaagtcactcggggagcctccagattctgaatctcccgcaacccgtctcatcgccggagtggagttccaggcgagtgattatcgagccagtaagccatttgcaagcactgaactgaaccctcagagcgttgttgcgatggaccaaatcgctacccccgacgaaacagcacatgcctctgcaccttcagttcataagctgtttgatgctaaattaggccaccatagcgtgatggatggcaccttggcatccacgagtcagtcatcaaacatcaagacccagctgatccggtcatcaagcttgtcaaggagcatatcagttaaccttgagaagaggagccctgaatctgatcctgaaagcccacagtctcacgtctcgcatcctaaatttgcagaacccatgttctcgaattcttcgacgttctgcacaagcttgttttcgtcatcttcgacaacagagccatgccgtcaaatgggcactttacctttcctgcctcacccccctaagtgtgagcagcaggtttcagctggtcactcatcgagctcctctctgcttttaagtggtgataccggtttagatgtggctgaacagtcagatgatctgaacgacttgctcaatctttcgggagatgcttctgatggcagcttccatggagaaaacaatgccttagcttttgacgaacagatggaatttcagttcctgtctgagcagctagaaattgccatcactgacaatgagaagaatcctcatttagatgacatatacggcacaccaccacagctgtcatcacttccagtatcatcttgctccaatcagaatctagggtcaccagttaaagtccagcttagctcatctcagtcatcttctagctctgcaacagctaacaagtcaagattgaggtggacacttgagcttcatgagcgttttgtggaggccgtgaaaaagcttgaaggtcctgaaaaagcaactcccaaaggtgtgctgaaactaatgaaggtagaaggtctaacaatttatcatgtgaagagccatctgcagaagtatcggcttgcaaaat

SEQ ID NO: 1113 - DNA, 645 bp, Zea mays
  unsure (1)..(645): unsure at all n locations
  Clone ID: TF_LIB3603-002-P1-K6-E9
ccagggcctgcggcggtatactcggttccctgcccccccacgaccacgccgccgcctcctccccacgcccgcccggcgctcccggaaccgccggaagtgggaaacaacggctacggtggacatcggatcttcataatcgctttgtggatgccatcgcccagcttggtggaccagacagagctacacctaaaggggttctcactgtgatgggtgtaccagggatcacaatttatcatgtgaagagccatctgcagaagtatcgccttgcaaagtatatacccgactctcctgctgaaggttccaaggacgaaaagaaagattcgagtgattccctctcgaacacggattcggcaccaggattgcaaatcaatgaggcactaaagatgcaaatggaggttcagaagcgactacatgagcaactcgaggttcaaagacaactgcaactaagaattgaagcacaaggaagatacttgcagatgatcattgaggagcaacaaaagcttggtggatcaattaaggcttctgaggatcagaagctttctgattcacctncaagcttagatgactacccagagagcatgcaaccttctcccaagaaaccaaggatagacgcattatcaccagattcagagcgcgatacaacac

SEQ ID NO: 1114 - DNA, 1396 bp, Zea mays
  Clone ID: TF_ZmC11254_1
cgaaaaaaacaccaaatttctcaggcctccctccccgcgtcgctttcgccggccccaccacctgccgctttcccctcgcccctccccctcccctcctcccctcccctcgccgcccatctcctccgcccctttttgaccccggttacgaatccgcaccagggcctgcggcggtatactcggttccctgcccccccacgaccacgccgccgcctcctccccacgcccgcccggcgctcccggaaccgccgcattcacatgatgtatcatgcgaagaatttttctgtgccctttgctccgcagagggcacaggataatgagcatgcaagtaatattggaggtattggtggacccaacataagcaaccctgctaatcctgtaggaagtgggaaacaacggctacggtggacatcggatcttcataatcgctttgtggatgccatcgcccagcttggtggaccagacagagctacacctaaaggggttctcactgtgatgggtgtaccagggatcacaatttatcatgtgaagagccatctgcagaagtatcgccttgcaaagtatatacccgactctcctgctgaaggttccaaggacgaaaagaaagattcgagtgattccctctcgaacacggattctgcaccaggattgcaaatcaatgaggcactaaagatgcaaatggaggttcagaagcgactacatgagcaactcgaggttcaaagacaactgcaactaagaattgaagcacaaggaagatacttgcagatgatcattgaggagcaacaaaagcttggtggatcaattaaggcttctgaggatcagaagctttctgattcacctccaagcttagatgactacccagagagcatgcaaccttctcccaagaaaccaaggatagacgcattatcaccagattcagagcgcgatacaacacaacctgaattcgaatcccatttgatcggtccgtgggatcacggcattgcattcccagtggaggagttcaaagcaggccctgctatgagcaagtcataaggcaaacttcaccttgacagaaaattttcagagttgacctctccacgagatgagcattctcatgtgaatatatattatcttaacaacagaatgtacgggtttttgaccctgcacctgatcccttcagccacgtccagttattcttatcactgtagtatccatcaacaagtcctgtaattatgaggatggtgttacagagtttctagcaagcatttccatcgagggaatggccctgagttgatccatgtagcaagaaagagaacatgcttacaagcaatatatttgctgtgaaaagggcacgcccctggatcttcctgaaaaaaaaaaaaaaaaaaaaagattatggcaaaaaaaaaaaaaaaaaaaa

SEQ ID NO: 1115 - DNA, 1770 bp, Zea mays
  Clone ID: TF_ZmC2322_6
ctcgaggccggccgggccgggctctcagtcacccacccccaccccaccccaccggcaccctcaccctcaggcctccgcctctttctcagcttctctccggttccttccttccggtcgccgattcttctacgcgaaagattcctggctggctctcgtctctcgcgtctcgttctcgcgtgcatggggctggacgtcggggagatcgggatgggcctggatctggggctggacctcaggctgttcgccgcgcggagcgccggagggatggccaagggcgctgcgccggcggggatccagtcctgcatcaggagcctcgaggtggagcgcaggaagatcgaggtgttcaggcgcgagctcccgctctgccttcgcctcctcgccgacggtgaggactagaggcctctcgttctcctctcttgcggttgcggccttgcctttctctcctacagtatacgcgtcgcgctctgtcttgctccgtttctcgctgacgcgctggtctgtgcggccctggattgcgctggctgcagtgatcgacgagtttaagttggaggctgccaagagaggcgaggacgacgacggggcgacggtggtggacgacggcgataagcggaaatggatgagcaccgctcagttgtggctcgacagcgacgccaaatccgacgagtctgacaaagagcaactgagtgaaatcacgtcgccggagcccaagttgctcggtggcgcacccatgcccataagggccgttgcggcggtgccacccctgccgcctccattcttcaggagagaagacagctcttccggcagtggtctgtcgctggtaccacccgcagctaagccgccgattcctcccatgtctgccagcgacaacgcgagcggcagattctgtgccactatgccaccgtctggctctggggtcaacttgcactctcaggctcagcagcaagccaggaaggcgaggcggtgctggtcgccggagcttcaccggctgtttgttgccgccttgcatcaactcggcggccctcaagttgctactccgaagcagatcagggaggtgatgaaggtggacgggcttacaaacgatgaagtgaaaagccatctccagaagtaccggctgcacaacagaagatcccccggcgtcgtggctccggtgagccagtcggtcatgctggcgggcggcctctgggctcctcctcatcaggagcaaagcagctcgcagtccgggtctccccagggcccgcttcagttctctggatccggtgtagcggccaccgtcggcggcgatagcagcagcagcgacgaggacgacaagtccgaaggctacagccggaaatacgtgtaaaggccgcgttcgacggatgagagtgtagagatagcgtcgcggcttctgcttgcccgtctgtggcaataacagattcatcagtcttgagagaggttgtagtgcgtgcgcccaagagctcaactgatcatgggttggattgtttgtttgtcatgtacgtacatggaaagctgatggcttcctgacttttaatttctgggcaggtcccaaaattttcgccctgagaatgagatattatatagataacataaatacataccaaataacaaaactaaaaacaagggataaaatataaataacaatagaagacataaaaaacgtcacacgtgtggaacaatgcggtacaagttttggcccaacaacaagagcaaaaatgtatctactgggggggcgcccgggactttgttcgttccaaccagctacattatttggat

SEQ ID NO: 1116 - DNA, 1907 bp, Zea mays
  Clone ID: TF_ZmC1122_1
gattgggtacctcgaggccggccgggggctcgccatatggcaccaacagcaaaacagcgaaacagtgcagagacaagctacaacaacctaccctaacaggccattccttccactgcacttcattcgatcctgagctatagctggctgcctgagctcgctccaagaagtgtatctatagtatagacactaggcttcgtgtggcgtgctcgagatatgcttgcagtgtcgccgtcgccggtgcggtgtgccgatgcggaggagtgcggcggaggaggcgccagcaaggaaatggaggagaccgccgtcgggcctgtgtccgactcggacctggatttcgacttcacggtcgacgacatagacttcggggacttcttcctcaggctagacgacggggatgacgcgctgccgggcctcgaggtcgaccctgccgagatcgtcttcgctgacttcgaggcaatcgccaccgccggcggcgatggcggcgtcacggaccaggaggtgcccagtgtcctgccctttgcggacgcggcgcacataggcgccgtggatccgtgttgtggtgtccttggcgaggacaacgacgcagcgtgcgcagacgtggaagaagggaaaggggagtgcgaccatgccgacgaggtagcagccgccggtaataataatagcgactccggtgaggccggctgtggaggagcctttgccggcgaaaaatcaccgtcgtcgacggcatcgtcgtcgcaggaggctgagagccggcgcaaggtgtccaagaagcactcccaagggaagaagaaagcaaaggtggattggacgccggagcttcaccggagattcgttcaggcggtggaggagctgggcatcgacaaggcggtgccgtccaggatcctcgagatcatggggatcgactccctcacgcggcataacatagccagccatctgcagaagtaccgttcccacaggaagcacatgcttgcgagggaggtggaggcagcgacatggacgacgcaccggcggccgatgtacgctgcccccagcggcgccgtgaagaggcccgactctaacgcgtggaccgtgccgaccatcggtttccctccgccggcggggaccactcctcgtccggtgcagcacttcgggaggccgctgcacgtctggggccatccgagtccgacgccagcggtggagtcaccccgggtgccaatgtggcctcggcatctcgccccccgcgccccgccgccgccgccgtgggctccgccaccgccagctgacccggcgttctggcaccatgcttacatgagggggcctgctgcccatatgccagaccaggtggcggtgactccatgcgtggcagtgccaatggcagcagcgcgtttccctgctccacacgtgaggggttctttgccatggccacctccgatgtacagacctctcgttcctccagcactcgcaggcaagagccagcaagacgcgctgtttcagctacagatacagccatcaagcgagagcatagatgcagcaataggtgatgttttaacgaagccgtggctgccgctgcccctcggactgaagcccccttcggtagacagtgtcatgggcgagctgcagaggcaaggcgtagcgaatgtgccgcaagcttgtggatgatccccggggctgcatagctgctagctcgtccctgcacgcagtgcaacaaaagaaatttgtcgacatgccttttatgttttgaattcccgtgaaccgtttatggagcactcacagctcgttcagggtcagatgaacagaacattataggagtacattctttgaggtttcaggtttgagggaaatcaacctgagtgcatccaagtacagtgtactgccacagtgccacgtcggaaaatgaagtcttgacccgaataaaagggggggcccgg

SEQ ID NO: 1117 - DNA, 1590 bp, Zea mays
  Clone ID: TF_ZmC24081_2
ccggccgggaagagtagccatagtttgttagagcattcccccaaggaatataacaccattgtgtgacgagcaacccttcaccaaaaactaaggactgataaactgcaagagaccgttcctatcaggattgtggagtctgcaaccagatatcaatgcataacagaattgaagagatgtatcatcatcaacaacagcttcagagccacagtcatttcctgtcttctaggcagacattccctccagaaaggcacatgcttctgcaaggagggagcattccagcagagccagggcttgtgctttccactgatgctaaacctaggttaaaatggacacctgaactacatgagcgttttgtggaggcggtaaaccaacttggtgggcctgacaaagctacaccgaagacaatcatgagactcatgggtgtccccggactaacactataccaccttaagagtcatcttcagaaatacaggctaagcaaaaacatccatgcccaagctaatggtgtaaatgcaaaaaatgtgattggttgcaccatggcaatggacaaaccacttgaaggaaatgggtcaccagctagccacttaaaccttggaacccagacaaacaaatctgtgcacataggtgaagcccttcagatgcaaattgaagtacagcgccgactgcatgagcaactagaggtacaaagacatttacaactccgcattgaagcacaagggaagtacctacaatctgtgctagaaaaggcacaggagacactttcaaagcagaatgcagggtcagtcggtgtagaaaccgcgaagatgcaactgtcagaattagtctcaaaagtatcgacagaatgcctccagcatgcatttacaggctttgaggagattgatggttcccaaattctacaaggccataccatccaacttggcgatgggtcagttgacagctgcttaactgcctgtgacggctcacagaaagatcaagatatcctgtcaatcagtctttccgctcacagaggaaaggagataggaggcatgacctttgatatacaagagaaagaaagaggaagagaggatttgtttcttgacaagctaagcatgacgcctccaggccaactagacaggcgtgagagaggaagttttagtatgacacggaaggcagcaaaactggatctgaacatcaatgataccactgatgggccacagaactgcaagaaaattgacttgaatgggttcaactggacctaggaagagttagcaaaagaccttgcaaattaaatctgacttgattcatcaagagtgacaagcttataagcttgagattggctccttctgccaagatagcagcaaagagaggaagtgaaaccgaatgagttattccaaagaccagcagcatcgacatatcctccatggcaggacctgggtgatcctcggaacagctgcgctgtcggcccatcacgattcagcgaaataagtgatgaaattacaataagtagggcatgtagattggtagagtgtatttgagagagtctagtgttctcctccggctataccttattgtgattctgtacacaagcatataaatacaacgatttttgtt

SEQ ID NO: 1118 - DNA, 1133 bp, Zea mays
  unsure (1)..(1133): unsure at all n locations
  Clone ID: TF_ZmC1401_5
gtcgatcacccgctgagcttgcttgttttcctgccgcggtcgctgcttggccaggaccagctgcttgctgccgtcgtctcgtctgcggctactccggcctctcatgctggccacgccaccgacgctgcgatacgaagcgccgcggtgggcacgtcggaaatggcatcgtcgctgggagtgggtggtcagcagcaggggcacgggcacgggcacggcgaggccagggcgcggctcaggtggacgcgccagctgcacgaccgcttcgtgctcgccgtggcccagctcggcggcgcagacaaggcgacacccaagtccgtgctgagggcgatggccgtgccggggctcacgctgtaccacctcaagaggcacctgcagttggttggttgatgacgatcgcgcgcttcaactctgcctcctccttcctgatcgatcgaccgtgttgcatgcggatgcggtgcacgcgcaccacactgccgctgcagaagtaccggctggtggcggtgagccgaggcgtcgcctccccgctgggcgacagcggagatggcaccgacgagcggtcgtcctcgtcctcggagaaccagccggcggacgagtgcgacgacggtaccgtcgccgagccgcatggcgattcttccaggagcgtggcgcggatgcagaggaagctgcaggagcagatcgaggtaaacgaaacgatagagtccggtcggtcgatcaccattgtcccgaccttgtggttgtggcagtgaaaaccattaggtttcagccgattgccggccggttcgtgtttggctgctgatcaagctgagttcggcccatcatgaccacacacatacatacatggtggcaggtgcagcggcacctacagctgaggatcgaggcgcaggggaggtacctgcagtccgtgctgcgccgggcgcaggaggtcctcgccgaccacggcctgggctcggcagccggcgcggaggcggagctggcctccgcggtggacaccgggtgcctgtcctcctcctcctgctgctccccgacgcgccaccgctccgncgacagctgcgtgacgtcctcctcctcggaggccgagaaccaggcccccgtcggcggcgccacgtggcttcacacgtgcgccggtacgcgcg

SEQ ID NO: 1119 - DNA, 619 bp, Zea mays
  Clone ID: TF_LIB5117-031-A1-PF1-G6
aagcgctccgctctcgcggcgtcgctttcgccggacaccaccacctgccgctttcccctcccattcccaccaccaccgctcccatcctcgccccgcccggaccccgccccgattgggccatccatccgcctccgcctgattggccccggccaccagctcgcagcctcgcacgcttgcacgcacgcagcatttgattccctccctctctccccgacgagcgcggcgcacctgcgaggagacgacgccgggtcccgctcgcggcggcgctcttccgtgccgtactctcatgatgtaccatgctaagaagttttctgtgccctttgcaccacagagggctcagaatagtgagcatgtgagtaatattggagctttcggtggatccaacataagcaaccctgccaatcctgtagggagtgggaaacaacgtctaagatggacctctgatcttcatagtcgttttgtggatgcaatcgcccaacttggtggaccagatagagcaacacctaaaggactactgactgtaatgggtgtaccggggattacaatttatcacgagaagagccatttgcagaagtatcgccttgtcaagtacataacacaatcgcctgctgaaggttcc

SEQ ID NO: 1120 - DNA, 1607 bp, Zea mays
  Clone ID: TF_ZmC21090_1
ggagcgagagagagagagacagaaagagacacagtcacacagcgtagggcgctgcggcctgcggggaggaagggcaccagcttggtctttctcatccattcgcaaatcgcaacaaatcttgcatcttatcttaccctagaaaaacaaatcttgcatcttcagctgtctgtacgtgtgtgagagagagagagagactgcgtgccgcagcagcagctctggacaggcttacagtcagagagcgagggaggagccgggaagaggaggccggagggaacaaaaggggaagtttggttctttcctctaccacctggagcgtccccttgctagcgcccggtccggtgagctccataccatccagggagtgtgaggaaccgtcgtcgttgctggcgatccaagagaccaggagatgggcagcggcaggaacggcgctgtggtgaggcggtacgttcggtccaaggagcccaggatgaggtggagcgccgacctccaccgcagcttcgtgcaggctatcgactccctcggcggccaacacaaggctacgccgaagctcattctccagttcatgggcgccagggggcttaccatatctcatgtcaagagccacctccagatgtacagagctgcaagccttggcgcagaaagaggaggagggacgccagcccagctgctgcaaaggaggtactcatgcagcggtgatgagcgaggaggccccaaggaggagttcctgtgctgcccaccaccaccacctctgaaaagggcccggatgggatacgagagcatgcagggaagccatggagtcagtgatgcgaggactactgctgggggagggggactgtactgcatcgatgattacatgcaagccatggccgtgggctggagaataaaggaggagggcctcatcagatggcagaggagagatgcggctgctgctgctgctgcgccttccaacctccaagccatgggatgtttggtgcaagaatctgccccctttaaggtacgccgaccagaagcacaccgtcttggttctgcgctgaagcagcaggacgacgacgactccagcaaagaggacggaaacggacggccccagtccagcaatgcagcgaaggaggacgggccatctgagcagtgctcgctctcgctgtccctcggtaatctggacgcaaaatgcgggcgtggcacggcggcagcggcctcctcgcgaagcggcgagagcagttgcatcctcacggcctcgccggcgaggaggagctccagcgacgactgctccggccactcaggctgcttcgtcgtcggcccgggtggtgttgttagcctggagctttccctgtccatctgtggatcttagctagaccactccggccacttctggacgacgattctgtacatcagtgggcggcgttggtgatcgccgcgtttgtttttggtgttcgtgggcaggcacatcatgaccgtgttagaaagtttagtaaccttagaaccatagcgcatgttacttctagctaagctagtattatgttacctctctacctctagccctagctggtatgtgtaagtggcaaagtcaccaggcagcctccctttcagatccagagtagtaccattgtggc

SEQ ID NO: 1121 - DNA, 1591 bp, Zea mays
  Clone ID: TF_ZmC12579_1
ggattataggaataggagcgggggagtccgaggataggcaactcattgcttctgaatctctctctcctcgtcgcgacgagatcctctgcatctctacttccccggggaagtagctgctggcgtgtgtatctgactctcctcatcccgagttcttcactttcaggcatggtcgccgtgaagcagctcaccggccctgccagacccgctcacacgtgcgctgctcatgctcaccagctgctcagtgctcgatacgatcaccgtggcgcgtctcaagctgaattaccggaccggatttcgccatccaacgcttccacgttctgcacgagcatgtactcgtcgtcggcggcggattcctccaagtcgtgccggcaggcaggcgctctgccgttcctgccccatcctcctaaacgtgagcagcagcagcagcagtcatccagctctccatcactgctcgtctgtactgacctcggcaacggtggtcaagacgaggctgaagcggaacatccggctgagctcaaggacttcctgaacctctctggagaagcttcatggagaggcggtttccatggagagagcagcggcgtcgctttcagattcagagagaaggtggagtttcagttcttgtctgaacagctcgggatcgccatcaccgaccacgacgagagccctcgactagatgatcaggaggacatatacgacaggccgccgcaaacctcttcttgtccggtactgtcttgctccaaccaagaagagggtctccagagggcagggtctcctgttaaagctcagctgagttcatatcgagctgcatgtaataacaagccaagactgaggtggaatctggagctccatgagcttttcgtgaaggctgtcaacaagcttggagggccagaaaaggcaactcctaagggcgtgttgaagcttatgaaggtagaaggcttgaccatctatcatgtgaagagccatttgcagaagtatcgctttgccaagtatcttccggagacaaaagaagacatgaagtcctcttcagaagacaagatgccaggaagcaatcctggcagaaagaagattctcaaaagcttacaagtagcagaagctcttcggatgcaaatggaggttcagaaacaacttcatgaacaattagaggtgcaaaggcagctacaagtgcgcatagaagaacatgcaaagtatctgcagaagatattagaacagcagaaggcaaggaattccttatcagctacgacaagttcaatacaaacagagctttctgaatctacaaaggaagagaaacctgagacacaagcggatacttcttcagctcagttgccaaataaaaagaactcagatactgacatggaatgactcataaccaaagaactcattatgttcatagccgtgatgaacaactgaacatgttgactcgccagacactttccttctctaaccttgtagaatacaagcacttctgcctagatgcttctctcttgtatcatcatccctagtgcttgaaagagttctagctagccattgtatatgatttattttcagatgaaaatgctacaaaaaaaggaggaggaccagccattcatct

SEQ ID NO: 1122 - DNA, 654 bp, Zea mays
  Clone ID: TF_LIB4764-010-R1-K1-G5
ccctaccactcctcgtcgtcgtggccctcgtacctgcagtcgacgacgacgtcgccccttggcgccgtggcgccgccggcgtccgaccccacggcgtcgtcgtacctctcgccgtccgcgtaccaccggatgctgtcgagcaccggccggctccacctccagggcgtgctcgccgacacgctccgcggctacggcggcgcgcaccaccaccgccagcacttgggcagcctggccgcggcccgctacatgccgaaactcccggcttcccggcgcggcatgcgcgcgccgcggatgcggtggacgagcagcctgcacgcgcgtttcgtccacgccgtcgagctcctcggcggccacgagcgggcgacgcccaagtcggtgctggagctgatggacgtgaaggatctgacgctagcgcatgtgaagagccatttgcagatgtataggaccgtgaagagcactgataagccgcctgcagcaacctcatcagtaggagggggagggccgcctgtggacggtggtggcgggtccggcgacgacgaccacccgagcgattggcggcgggctccatcctcatcagctggtcgggacgtcagcccgcaggcgttcactggacaccggtcagccttctcggacggcgcggcaagccatgcgggc

SEQ ID NO: 1123 - DNA, 2157 bp, Zea mays
  Clone ID: TF_ZmC21783_2
ccacgcgtccggagagagagaggaggaggagaaggagaggtttttatgtatgtgtggtggacatgcgtcctcctgtcgtctcgagagagagagagagagagcggaggccctaatactccaatcaccacgcaccaaactagctagctagcagtcgtcttgcattgtagctagtccattgctctcatcttctcttcttcttcctccaatcctcccccctttcccctcttcggcctctctcgctcagctcgctcttcattaagctcacgtcgttcctcccttcttcctcttcttcttcttatccgttgttcaattcgttcagctagccggccagagatcgagcatcatctccatcatcgatcgatccatctcatctctttctcttcttctattctatgtcgtcgtcgtcccagattagatcgaagctgctagcagtctatccagtctctagctagctagatcaagcccgcagactatataatataatacaagctagctacgtgcttattgctttattagtctagaagaataatctagatatatacgatcgaacatatatctcgatctccaccgatacacacccggccctatccatgcttgaggtgtcgacgctgcgcggccctactagcagcggcagcaaggcggagcagcactgcggcggcttcgtcggcgaccaccatgtggtgttcccgacgtccggcgactgcttcgccatggtggacgacaacctcctggactacatcgacttcagctgcgacgtgcccttcttcgacgccgacggggacatcctccccgacctggaggtagacaccacggagctcctcgccgagttctcgtccacccctcctccggacgacctgctggcagtggcagtattcggcggcgacgagcagccggcggcggcagtagcacaagagaagccgtcgtcgtcgttggagcaaacatgtggtgacgacaaaggcggtggtgtagcagtagcctccagaagaaagctgcagacgacgacgacggaggaggattcttctcctgccgggtccggggccaagtcgtcggcgtcggcagagggccacagcagcaagaagaagtcggcgggcaagaactccaacggcggcaagcgcaaggtggactggacgccggagctgcaccggcggttcgtgcaggcggtggagcagctgggcatcgacaaggccgtgccgtccaggatcctggagatcatgggcacggactgcctcacaaggcacaacattgccagccacctccagaagtaccggtcgcacagaaagcacctgatggcgcgggaggcggaggccgccacctgggcgcagaagcgccacatgtacgcgccgccagctccaaggacgacgacgacgacggacgccgccaggccgccgtgggtggtgccgacgaccatcgggttcccgccgccgcgcttctgccgcccgctgcacgtgtggggccacccgccgccgcacgccgccgcggctgaagcagcagcggcgactcccatgctgcccgtgtggccgcgtcacctggcgccgccccggcacctggcgccgtgggcgcacccgacgccggtggacccggcgttctggcaccagcagtacagcgctgccaggaaatggggcccacaggcagccgccgtgacgcaagggacgccatgcgtgccgctgccgaggtttccggtgcctcaccccatctacagcagaccggcgatggtacctccgccgccaagcaccaccaagctagctcaactgcatctggagctccaagcgcacccgtccaaggagagcatcgacgcagccatcggagatgttttagtgaagccatggctgccgcttccactggggctcaagccgccgtcgctcgacagcgtcatgtcggagctgcacaagcaaggcgtaccaaaaatcccaccggcggctgccaccaccaccggcgccaccggatgacatactatctcgtcgacaatacatgcatgtacaatagacggatgtctagtagtatagtagattgctgctagctagctagccgctagagtgtagtagcatatgcatgccttttttttcttcttctttttttgcccttattattaagctggctaatagcgattgagatggagcttgacacagatctgctagctagctatttgagggtttctct

SEQ ID NO: 1124 - DNA, 1246 bp, Zea mays
  unsure (1)..(1246): unsure at all n locations
  Clone ID: TF_ZmC7194_1
cccgccgccgccggttgaatcgacggagggaggcgttgatggattgctcgattcctggtgggaattgattgatttcagctgcatgtgcttgtgcttgtgctgctcaatcgaattcgagtccgaattggattaggcaggtgggttgggtaggtgcgggatccagcgagcggaggatgggcgaggaggcggtggacgactacgagctccacatggtgtgctacggcagcgacgaggacgagcgcgtgatggagtgggagtcggggctccctggcgccgacgagctgaccccgctctcgcagccgctggtgccgccggggctggccgcggcgttccgcatcccgccggagcccgggcgcaccctgctggacctgcaccgagcgtccgaagccacggtggcgcggctgcggcgcgcgccgccgtcgtcgccgggcacctcctcctccccccacggccaccaggaggcgagggggggcgaaggggcggactcggcggcggcgactaccacgaacagcaacagacggccccggctggtttggacgccgcagctgcacaagcggttcgtggacgtggtggcgcacctggggatcaagaaggcggtgcccaagaccatcatggagctgatgaacgtggaaggtctgacgcgggagaacgtggccagccacctgcagaagtaccggttgtacgtgaagcggatgcgggggcagggtccgtccccgtccgaccacatcttcgcacccacaccggtgcacggcgtcgccgtcggcatggtgcccatggtcagcggccaggcgtaccactacctgtacaacggaggagggggaggagacagatgacacccgcttcggcgacgactccagaatctagtttcctcttggggaagaccggaagacaaatccaaaacggaacaagcgattgcctgcctcactctatactctactccctccaaattatccaaagcttctactgtactccgtccgtcccgttccaaggtattcggtatttttaaagccaaagcttttgttcaagtttattagagaataaatttcgaagcttttggtgaaggggaaagtaatgagtttttagtcccatacagaaaattgaagagaaataaaattaacttaaatagctaaaaaaaaaaaattgcttaacagttaaaagcgcgttttacagaacgtgtgattgctcgtgtgactttgggtgtggagacagacactaattccgtttctatctactacatnttgtctta

SEQ ID NO: 1125 - DNA, 448 bp, Zea mays
  unsure (1)..(448): unsure at all n locations
  Clone ID: TF_LIB5116-072-A1-PF1-H11
ctcgtggaattctctctccactgctcgccggaaaccaagaaatcgccaacccacgaatcttccctcacaaccagtncacaccgccgcgccaagtcccgatcttgccggncgagctgcactccggccgtccccagttccccgcctcgaccctcccgccaccaattcggacggctcgtccaccctggcagtatatccaccagcactagagtctaatcgtagcaactcagtcgctcacctgcagcaaatggaatcacgtgaaaacaacatgggctcgaatgatggaccaaacagtctttgctagcttgcctgcgaggcaacgcttacggtggacagatgagttcgcatgaacaatttgtcggaggctgttactcaacttggcggtcctgatagagcaactcctaaaggagttttgagaattatgggtacaccaggattaacaatataccat

SEQ ID NO: 1126 - DNA, 2027 bp, Zea mays
  Clone ID: TF_ZmC2593_1
attggggccctcggggccgggcgtaacataacatctcggcaagaggagacaggaggtcggtagtttagttttcagaagccaaattaaattaaaggctgtctgtctcactcactcactcactcccagaagagagaagaccacaccacacaaacaaacacctctttggtttctacaaatagaggacgcactgactgagctacaccggtaaaagctgccaaggatatatatcccaccagtcaggaatgcccgcaaccagacatttcagtacataacaggagctgaacaactaacgtacaggctgacagcagcagatgtatcatcagcaacagctccacacccataaccagcacctgtcctcgtcaaggccgggcttacctcctgagaagcagttcctcctgcacggagcaggaggcggcggcggcggagatgcagggctcgtcctctccaccgatgctaagcctcgcctgaaatggacacccgagctgcacgagcgttttgttgaggcggtgcatcagctcggaggcccagacaaggccacgccgaaaaccatcatgaggctcatggggatccctggactcaccctgtaccatctcaagagccatctccagaaatacagactcagcaagaatctccaggcccaagctcatactgccagcgcaaagaatgcgttggtaggctgccggacgggagcagacaacgccctatgccaagggagtgcttcaccgccgccaccaccgccgccgccgcacctgaacctagatccgccgcagataaacaggtcaatgcacataagtgaagccctccagatgcagatcgaagtccagagacggctgcatgagcagctagaggttcagagacacctgcagctgcggatcgaagcgcagggcaagtacctgcagtccgtgctggagaaggcgcaggaggcgctggccaagcagagcggcggcgctgacgagacaacgacgacgcagcagcagatgctgccggatctcatctcgagagccacggcgacgaggcgcggccatgtccagcaggagcacctccacctgcagcaccacctcggaggcgacgggtcggtggacagctgcctgaccgcgtgcgaggggtctcggtgccagagggagagggaccaggacctgctgtccatcggcctctcgtccgctccgcctcccactcccagcagaggctacaacgacagaggaggcggcggcagcgccagctgcgaggagttcctgcagtttcttgacgagcccagcagaagaggagcaggaggaggaggaggtcctcggatgagcagcaggagcttgacctcagcatcagcggcggcaggagcaatccaaggcctcgcggcagccaaagccaaaggatcgacctcaacggatccagctggaactgaatggtcgtccttttagcaatggtctccttcctcgtagctttagctgcagtagggaaaatggccagggtcacagcaggtgccctgtgtgtgggtgcacttccatgccctgcagccatttgcagcaaataactaagcagtgactgatgatgatggtgaattggcatgcgagaaagagaacccagatgcacgttctcctttgacgtctgattgattagttaactctatagatctgtattccagacatggaaaagtacacggctgagatcctctcatcagtttcaggaatgtacagaactcgcagcggatgcacacgaatccatgctgctgcttctgccttggcccaccagtcagtaagctattcctcgctcggccaagccaacacaagcgatggaaatatccagctcggagctcgctattccactgtagcatgcttcttgtttcgtttgtctgtgcgtggccatcttcgtcccactagtcgctttctgtattcttttcttcctcttttcaactgcccattgctggtttgacacacaacgttgctcatgtatttcatgaaataataaaatggaaaacaaaaaaaaaaaaaaaaaaaaaaaaaaaaaaaatataaaaaaaaaaaaaaaaagcggcc

SEQ ID NO: 1127 - DNA, 444 bp, Zea mays
  Clone ID: TF_uC-zmroteosinte018b06b1
ccaagtcagtgctgcggctgatgggaatgaaagggctcaccttgtaccacttgaagagtcacctccagaaatacaggcttggaaagcagaccaagaaagacacgggtttggacgccggcagagtggcattcgcggcgcagggcataaatttctccacaccagtacctcctcctagcattccatctacggccagtgataatacggggtgagtagagtaggtgtcaaaacccaaaatcatatcctgcatgtttttgcttcctttaacatcagtacaaaagaacatgcattcgcggtctccctgagacagcaatagttctttactaacaatctagaagctcgattctgttgcattagcaaaactaaaaagaaccatgggcatgatgtacaatagaacggaattagcagcagcatgcagtcggcatgctctgaaataagatttttttt

SEQ ID NO: 1128 - DNA, 604 bp, Zea mays
  Clone ID: TF_LIB5116-037-A1-PF1-G10
cgctctcgcggcgtcgctttcgccggacaccaccacctgccgctttcccctcccaccaccgctcccatcctcgccccgcccggaccccagcgccccgattggggcatccatccgcctccgcctgattggccccgggcaccagctcgctcgcacgcacgcagcatttgattccctcccgcactgtctccctccctctctcccggacgagcgcggcgcacctgcgaggagacgacgccgggtcccggtcacgcggcggccctcttccgtgccgtactctcatgatgtaccatgctaagaagttttctgtgccctttgcaccacagagggctcagaatagtgagcatgtaagtaatattggagctttcagtgggtccaacataagcaaccctactaatcctgtagggagtgggaaacaacggctgagatggacctctgatctccatagtcgttttgtggatgcaatcgcccaacttggtggaccagatagagcaacacctaaaggagtactcactgtaatgggtgtgccagggattacaatttatcacgtgaagagccatttgcagaagtatcgccttgcaaagtacataccagaatcgcctgctga

SEQ ID NO: 1129 - DNA, 723 bp, Zea mays
  Clone ID: TF_ZM4583.C7.o5.fg
atgcaggggagctacggctacgacggggcggcgtcacgggaccccaagccgcggctgcgctggacgccggacctccaccagcgcttcgtcgacgccgtcaccaagctgggcggaccggacagagcaacacccaagtcggtgctcagattgatgggcatgaaagacctcactctttaccagttaaaaagccacctccagtacttcgctcacagggcttcggttcaaccacagcgcatcctcctccaggtgttcctgatcaagggaagaacacaagaccatgtactattggactgcgagtatgggactgtagaggtgcaaaagaagctgcagatgcgaattgaggcccaagggaagtacttaaagacaatactagagaaagctcagacaaatatttcctttcacacaaatgcatccaatggcatagaatcaaccagatcacagctcatggacttcaacctagatggtttcatgaacaatgcaactcaagtatgcaaagaacatagggagcaattggtgaaagctatgtccgatgaaaacgataaagatagtctaggccttcagctctaccatctaggaagtcaggaggctaaggaagtcaaatgcacaccaaaaactgaagactcgctcctactagacttaaatattaaaggaggatatgacctctcttctagaggaatgcaagcatgtgaactagaattgaaaataaatcagcagatagtataa

SEQ ID NO: 1130 - DNA, 1112 bp, Zea mays
  Clone ID: TF_ZmC3576_1
ccggccgggaacgtacattcattctctcttggcaagagctcgtctcactcgagcctagattagccgtgtctttggccaccggatagctaggaagcggcgatcgccaggaaggaacgacgatgcaggggagctacggctacgacggggcggcgtcacgggaccccaagccgcggctgcgctggacgccggacctccaccagcgcttcgtcgacgccgtcaccaagctgggcggaccggacagagcaacacccaagtcggtgctcagattgatgggcatgaaagacctcactctttaccagttaaaaagccacctccagaagtatagactggggatacagggcaagaaaagcacaggcctggaacctgccagcggcggcgtacttcgctcacagggcttcggttcaaccacagcgcatcctcctccaggtgttcctgatcaagggaagaacacaagagaaatagcacttagcgatgcactaaggtatcaaattcaagtccaaaggaaactacaagaacaaactgaggtgcaaaagaagctgcagatgcgaattgaggcccaagggaagtacttaaagacaatactagagaaagctcagacaaatatttcctttcacacaaatgcatccaatggcatagaatcaaccagatcacagctcatggacttcaacctagatggtttcatgaacaatgcaactcaagtatgcaaagaacatagggagcaattggtgaaagctatgtccgatgaaaacgataaagatagtctaggccttcagctctaccatctaggaagtcaggaggctaaggaagtcaaatgcacaccaaaaactgaagactcgctcctactagacttaaatattaaaggaggatatgacctctcttctagaggaatgcaagcatgtgaactagaattgaaaataaatcagcagatagtataaatttgttcacaaagctgacagttttgggaagttcactctttgctattagattactatttttcccctgtggctcctgagcatgcttgtccaatgcccacaagctcacaagttttatttactatctgctcatgttatatttgctgaaagaagcttttgaataaatgtgggcattgtttt

SEQ ID NO: 1131 - DNA, 772 bp, Zea mays
  Clone ID: TF_ZmC359589_1
tgttactgagccatctgatcctgatactccattgttagcaacacattcatcattaatggctaattcaacgcccctagtcatggacttttcagaagtatctgaacagatatgtttgaaccaagaccaacttttaggtttatttgattatccagcaagtgttgatttttacaaatcaaaaaatatgaccatctttggccaacaagttcaagacaccattacagtcgatcctaacactcaccttacaccacaaaatgagttgttctcgtctgggagttcaatgcagcttcagaaaagtgtaggttatgctgaagctgtgctgaagttgatgcaagaagtgcaacacctcaaagttatttatgcttccatactgagagtgagaggagtgtaccagatcctttcaactgtgataaacttggcgccgacaacctcccttcttcaaacactgctccaaagccaaggatgcgctggacacctgagcttcatgagcgttttgttgatgctgttaacaagctcggtgggagcgaaaaagcaactccaaaagcagtccagaaggttatgaaggtcgatggattaactatataccatgtaaaaagccatctgcagaaacaccgtatagttcaacatcattctgaaacatcgtgtgcaggtgtgactggaaggaggggcagacatacccaagcagatgatgactccatcccgcaatcaaaaggcgaagggggcattgaaggaggactagtgtcccagattggcttgcagaaacaacttcatgaac

SEQ ID NO: 1132 - DNA, 835 bp, Zea mays
  Clone ID: TF_LIB5023-008-A1-XP2-F4
gccggccgggctgcgagctcccaacctttgttttgctacccccatttcttctttaatttgagcttgctagatagatctcggtgacgtccgtccgcgggagacggtggcatcagtaaagacttagacgatgagggctctgcagaccagctgatgatgccgtcgtccgacggcggggagggtgtcgccgatgtgccccgcgggcccgacggccggagctcaccaagcaatagcagcacggtggagctggatggggacggcggtggcgccaggaaggccggtgcctcgccgtcgtcgtcggtgcggccctacgtccggtccaagaacccccgcctccggtggacgccggagctccacctctgcttcctccgcgctgtcgacaggctcggcggccaagaccgtgcaactccaaagctcgttcttcagttgatgaacgttaaagggcttagcataggccatgtcaagagccatctccaaatgtataggagcaagaagatcgacggctcgggccaggtgataggtggtggtgggtcatggagaggtcgtcttcatcgtcagttgcaggacggggggcaagcggcgtacagcctcggccatctctccttgcatcacggcgccggccagacgactgctgctagcagtgccatattgtcagcaaggtctggcgcatggccccattggaacagtttccacgatgatccatcgtattcgatgcttcttcacggcggtcaccatcatcttcttggatcaaaccctactgctactactactactcatcaacaacagctgaagctgcagcagctgctgcatcccctgacaactgtgctgcgctcccgct

SEQ ID NO: 1133 - DNA, 587 bp, Zea mays
  unsure (1)..(587): unsure at all n locations
  Clone ID: TF_LIB3600-022-Q6-K6-H5
gttgtcccccaggccgcgctccggctcgcggcngaacggggcgcgcgcgcgccccggatgcggtggacgacgtcgctgcacgcgcggttcgtccacgccgtcgagctgctcgggggccacgagagagctacgcccaagtcagttcttgagctaatggacgtgaaggatctgaccttggcccatgtcaagtcgcacttgcagatgtatcgcaccatcaagaccaccgaccacaagccagctaattctgcttcatcctacgggcaagcagcagccgcgaaaccggtcatcgacatccccgaccccgacgacgacagcctgttcgacctcatcaccaccagcgccgggtctgatcagtcgtcgtcgtcggctcagcactctaaccctgacggcggcggcggcaacgagcatggctccagcatgtgcgctctgtggtgcagctcctcgacaagcatcagcagggggggctggttccatgacagaccaagagacgatgatgccgccactcccggtcccggcgacgacatcaaatccttcgaggacgtgcaatcacacagccttcttgacgatgtcgccgacctcaactcgtc

SEQ ID NO: 1134 - DNA, 662 bp, Zea mays
  Clone ID: TF_LIB4758-020-R1-K1-B5
ccggccggaaaaaaaaaatccatcctgctcagctctagaccccccaaaaaaaacagtgcatttcatgtagatctgccaggatcatttcatgcgggatatgattaatctccccttctctccccggccggactcctctctcggcacacaaacaggggcgacgcccaagtcggtgctcgagctcatggacgtgaaggatctgacgctagcgcatgtgaagagccacttgcagatgtacaggaccgtgaagagcactgacaagcctgcaacgacctcatcgggcgggccgcctgtagacggtggcggcgacgaggaccacgatgacctcctgagtgcccggcgggctcagtcgtcgtcgtcgtcgccagctggacgacggggcggcaggagcccgcaggcgttcaccagacaccggtcggccgcctcctcggagggcgcggcgagcctcgcgggcggcgacgacgtcgaatgttcctcctcggccgacgattccgactgcggcagggcgcgcagtgcttcgtcgtcaagctcatgtgtcgtctcatgcaacactaccaccccctccatgatatttctaccagggatgaaagctatctagctcatgtgtcgtctcatgcaacactaccactccgtccatgatatttctaccagggatgaaagctatc

SEQ ID NO: 1135 - DNA, 774 bp, Zea mays
  Clone ID: TF_LIB4570-003-R1-K1-G3
acaattcggagagcgaaaaggcggacgccaagggaggcagcaagtcagaggtgagcggtgagcagagggttccgtcggtgcggcagtacaaccggtcgaagctgccacggctccggtggactcctgacctccacatggccttcgtccatgccgttgagaggctcggtgggcaagagagagcgacccctaagctggtgcttcagatgatgaatgtccggggcctcagcattgctcatgtaaaaagccacctgcagatgtacagaagcaagaagctagaccaagatggccgcccgaggggagcagtttcctcagtgtattctccaatggatttccatttcatgagagctgatcatcggcgcttccacaacatgtccttcttccaaagagcagcagcctcggcctcctcctccggcgggcaggaacgcggcggcttcttcgcgtcgaggaacttcagcactccggagttgagccggctctatggactcctccaccatcgcccggctccgacccaaactttcgacttcagaaattccagtttcagaaatcatgagtggccgtgggccgcgtcgtcgaatcagcaggaggcgatgacaatctccaggaagcacgttgtcatgccaccctcgacatcgccgcagacacacgcatcgcttgcatcttccgcagcgctgaggagcgatcggcggtggtggcctttcactgaggccggcgctgctgtcgccgccggcgagcacagggcagggacaggagttaccagtgtaaaattcgacaact

SEQ ID NO: 1136 - DNA, 628 bp, Zea mays
  Clone ID: TF_ZmC306667_1
cgggtggtgctggaggtggtgcaccgcggcgggggacgggtagtactcctgcgccgccgccgtgtagtgcggctgcgtcgccgggtgcgcgccgtagatggcctgccccgccgcctgcgacgcgtactccggcgggacccagatgccgccgaggaccaccagctgcggcgcggcggtcgccggtgcgggcggcgccggcatcggccgccgcgtgtgcagcctgtacttctggagatggcttttcacctcatcattggtcaatccatccaccttcatcagctcgcggatctgcttcggggtcgccacttgagcaccgccgaggatctggagggcattgacgaagcggcggtgcagctccggcgaccagcaccgccgcgccttgcggtgcgtctgcggcggtgccgcctgctgcccttccggcgcgggcttgacgaccccgctctggacgacgtctctccgcgcgctcaggacgccaccgttgttgctgccggccgcggcggcgtcaaggtacggcttcctgtcagcgtcggccgcgtccttgtctgcgggcgcgagggcgagctccggcagcgccgccgcctcgccttccgacgcggtctattccttggcgaacgggagggacgcgccg

SEQ ID NO: 1137 - DNA, 1259 bp, Zea mays
  Clone ID: TF_ZmC13106_1
gatctctctccccccggccccgagcgcaccagattcacaccgcgcccgcataggtgcgtgtgcctgcggaagctggttgctgctcgcgctactagctgtttcgcgcggtgatcaacaatccggccgcgggagcggagctaggaggccgagagacacaatgaacatgttcgatgggatggagagtgctgggtacggtggcggcgctgggccgatgggcggggtggtgctgtcgcgggaccccaagccgcggctgcggtggacgcccgacctgcacgagcgcttcgtcgaggccgtcaccaagctcggcggggccgacaaggcgacgcccaagtcagtgctgcggctgatgggaatgaaagggctcaccttgtaccacttgaagagtcacctccagaaatacaggcttggaaagcagaccaagaaagacacgggtttggacgccggcagagtggcattcgcggcgcagggcatcaatttctccacaccagtacctcctcctagcattccatctacggccagtgataatacgggagaaacgccacttgcagatgcgctgaagtaccagattgaagtccaaaggaaattgcacgagcagctcgaggttcagaagaagctgcagatgcggatcgaggcgcaaggcaaatacttgcagacgatactcgagaaggcccagagcaacctctcgtaccacgcgactggagccgcaaacctagaagcaaccaggtcgcagctgacggacttcaacctcgcgctctcaggcttcatggacaacgtgacccaggcgtgcgagcagaacaacggcgagctggtgaaagccatgtccgaggacggtctcagagcgaacaatctagactttcagccgtaccatggagttcatgacggggacgatgtcaagtgcgctacggacgaagggttgctacttctggacctgaacatcagaggcgggtacggtcatcggatttcgacggatctgaagatgaatcaacacatgcggtgaaaagttcagtagaaagaaaggcgaggacagtagtttaatcttgggtaacccatcaatctaagagaagaggtgcccttgtgtttgtgagaaattctttcggccatcttgattcctaacgatgcttctttatggtgatggtcagcgtattgcttatgtaaaatttggtgagaggctccgaataagggtaactaatcttatacaagatctttatatatacttggatttgtatggatctagggtacgaagtgaaagcatttgtcat

SEQ ID NO: 1138 - DNA, 1296 bp, Zea mays
  Clone ID: TF_ZmC4296_1
caattcaagcgcaaatcacgttgagatttattgctttttcgacgttgatttttgaacgccgcgggtgcccgggctgcaagtttttaagtgcgttgaacaggacttaaaaactggatcctacagctgggcagtttatacatcaagcgaattacttatctagtccacttaggcattacattagatattaataaaggtcagtctagatgtaccgaaatagaccaagataaccttgattttcacagatgtgctacgggaggatgggtgaacgattgcaccgtgcacatgtcagacgaaattcctctgattttccagtgtgcccttgatcaggtcatgcatctgcgtcgagctagcaatgcttctcaacgtgatttgcgcttgaattgttcaggtggcctctgggagaacacgtggctgtcggcaacatgcggaaggcctttccctcctccaggaccaggattgtgaaggctaacggagctgacggagagctgggggaagacagacgaactcaagtgatctgcagggctaagcatggccctagcagaggtgagaatcggtaggtcttggtcagatatgctgaagccactcagttgctcagatactatcttgaacgccttatctagtatcgtgtcgatgtacttctggttcgcctccattcggatctgcatatgcttctggacctccacttgttcgtgcaatcttcgttgcacttccatttgtgctctgagtgcttctttaacttcttgactctctttcacatctggagtagaacctctaggagacaaagttgttccactttgagcttccataaggtaagaagcatcttttgattgctccgttaactcttttccagactgtcttcccaatctgtatttctgaagatggcttttcaagtgaaaaagggtgaggcccttcactcccattgtcctcatgatagctttcggtgttgctttatcaggcccgccgagctgggcgacggcatcgacgaagcggtcgtggaggtcggccgtccagcggagcctaggcttgggatcggccgtgagcaccacgctgggcccgccgccgtgcccgggcagccctaacccgcagccactgcgtggtgcgtcctcggcgacggcgacgtcgggtcggccgtggctagcgtggtggatcaggctggggaacatcttccccgcccggagctcacctgcgctttagagtctttgcgcccgggtccctcctccgaaccgcgagagggcgagaaagattggagctttcttctgatggctgctcgcgcccctccccgctttcgtgttccgc

SEQ ID NO: 1139 - DNA, 1471 bp, Zea mays
  Clone ID: TF_ZmC1401_2
cctataagagcccccgcgcggctcgcggtggcatcgaccgtcggtcgatcacccgctgagcttgcttgttttcctgccgcggtcgctgcttggccaggaccagctgcttgctgccgtcgtctcgtctgcggctactccggcctctcatgctggccacgccaccgacgctgcgatacgaagcgccgcggtgggcacgtcggaaatggcatcgtcgctgggagtgggtggtcagcagcaggggcacgggcacgggcacggcgaggccagggcgcggctcaggtggacgcgccagctgcacgaccgcttcgtgctcgccgtggcccagctcggcggcgcagacaaggcgacacccaagtccgtgctgagggcgatggccgtgccggggctcacgctgtaccacctcaagaggcacctgcagaagtaccggctggtggcggtgagccgaggcgtcgcttccccgctgggcgacagcggagatggcaccgacgagcgttcgtcctcgtcctcggagaaccagccggcggacgagtgcgacgacggtaccgtcgccgagccgcatggcgattcttccaggagcgtggcgcggatgcagaggaagctgcaggagcagatcgaggtgcagcggcacctacagctgaggatcgaggcgcaggggaggtacctgcagtccgtgctgcgccgggcgcaggaggtcctcgccgaccacggcctgggctcggcagccggcgcggaggcggagctggcctccgcggtggacaccgggtccctgtcctcctcctgctgctgctccccgacgcgccgccgctccgccgacagctgcgtgacgtcctcctcttcggaggccgagagccaggcccccgtcggcggcgccacgtggctccacacgtgcgccggtacgcgcgactgctccgttgagcaacagccggtgcagggggagaagagtacattcctgcagaggcacggggcagcagaggacggcacttcgtctgagatcgatcccaacggcaacaggtaggggacggagtcggagatcgtgatcggaagcatctctctgctctgcatgtgcccagcgtcggagaacagggaatgaatgattggcggggtggccttcaaggttgggacttggggaggggggccaggcttttgagcaatgtctgctgctgaaacagctacctgctctgctcttcgttccagaatatgatgtgcatgtttattttcgtttatgcgaatggttcttgtgtttcatgtaaaaaaattatgactgcaactcgaggaagggccagctgcaaatgatgcatgcagtgtgcttgaggtagcagtacaatgcaaggatgattgcatggtacagaactgtagtagctactatattattagtaagattgtatgccatcagtgagattgatgccttaagagggtaatggcatgagaactggaaaaggtttagaatgtatattaaggcctcatttgaaat

SEQ ID NO: 1140 - DNA, 1177 bp, Zea mays
  Clone ID: TF_ZmC2088_1
agctgatgaacgttaaggatctcacattggctcatgttaagagccacttgcagatgtatcgaacagtgaagggaacgacggcagacagatcatgtgctgcaggccatgtccagatgagagacatgggctttctgcacaggggttgtgaactgaatggcttcgaagcgtttagcaacggtacttctaatgctaccgccaataatagaatgcaggcagctgccgggtcgccggcagggaagcatgctgaggtagcctggttcttgcggccacccttggcacaccagagtagtggtggtggtggtggtggtggtggggcggtgccgcttccgctgccgctgccctgcccctacctcatgtctgcccaccacaaccgctacttgctctcacagaatcagggatggaggaccagaggcgcgcatcagcaagacgctgccgcccccccgccgctcgtcctaggccagcaggacagtgcgcggcgtctgcatccaggcttccccgacacggccatcagcagcagcagaccgtcatcctggagcgcaggtgtggcaagccgctggtcgtcgacggcggcggcggcgccttcgccgtcaagtggcaggagtagcatcagcagcggcacggaacagccagcagcatgcagctggacgatgatgacgacgaacaagcagaagcagcagcagcagccgccgtcgacgtcatcatcatcaagggtcgtcgcggtaccgaacctggagatgagcctggggaggcaggggtggcaacacgacctgcaggatcaccatccgcagcagcagcagcagcagcgcagcggggagtccacggcgccaaaagagctgaccctcctcaagtgcttgtgaaataataatgatagctaatacttgatcggctaataatcacttatataattccaccgtcgagatgagcttgcgagaggtgttcaaggcttggaagcaaattatcgaccgcgacgttagctagagacgacgttgtactcgtttggtgctaccggcttcacgtacgtagttgttttctactcctcccatctatatccattattagctatatatttagcttcattttctggtatatgcatgtaatttgagctgatgtggagacgacgactgttagaaataaacgagctacctttctcaatatatatacggtgactaattttttt

SEQ ID NO: 1141 - DNA, 284 bp, Zea mays
  Clone ID: TF_LIB3227-031-P1-K1-F10
cccacgcgtccgcagaatgttcccttccaagaaggccactagtagcgcagccgcagccgctgccgccgtgagctcaaatgatagcaggcagcaggcgatgtgcgtgcaggccgactcggggtcgggcctcgtcctcaccaccgaccccaagccccgccttcgctggaccgtcgagcttcacgagcgctttgtcgacgccgtcacgcagctcggtggccccgacaaggcgacttccaagaccattatgagggtcatgggagtcaaggggcttaccctctaccacc

SEQ ID NO: 1142 - DNA, 2264 bp, Zea mays
  Clone ID: TF_ZmC4646_1
gtgttcaaattcgaacgtcctccgccgccccaacgataccatcttccccagttccccacgccggcacacccaagctcggccactcgtcttgttgcgaccaaacccaaaatccgaacaccctctcgttccccatccccggcgtccggcgctgaccgcgtgatcctcgccccgatggcggccgcctccacacccgcccgttcttccgcgcacctttcgcagccggtgcgcgtcgtgctgcgtgtgcgcccgttcctgtcgtcggaggccgcctcagcgacagcgccttgcgtctccctcctcggctgccaccccggcggtggggtcaccgtccagctcaaggaccagcacacaagtcggagtgaacagtacaaactggatgcgttcttccgtcaagaggacagcgtcagccagatatttgaccaggaggttcgtgcagtgatcccaagcatcttcgaggggatcaacgcgacggtctttgcctatggggcaaccggcagcggcaagacctacacaatgcagggcacagaggattttccagggctaatccccttggcagcttcgaccatcctagcactctgcactggcacatggtgctctgttgagatctcgtactatgaggtgtacatggagcggtgctatgacctgctggagcctaaagcgaaggagatcatggccttggatgacaaagatggtaacatgcagctgaaaggcttaagctgggtccctgtgcgatccatggaggaattccaggagctctattccataggcgtgcagaggagaaaagttgcccacactggactgaacgatgtttctagtcggagccacgctgtgctctcactcagggtcagcagcactgatgtggtgaaagggaagcttaatctcattgatttagctggtagcgaggacaacaaaaggactttgaatgagggcatacgccttcaagaaagctccaagatcaaccagtcattgtttgcgttgtccaatgtcatttcagctctaaataagaatgagcatcggataccatatagacagagtaaactgactcggttacttagagattctctaggaggcggtagccgcactgtgatgatagcttgcctgaatcctgcagaataccaggagtcggccaacacagtaagtctggcggctcgttcatgccatattgagaatttcaccagttcaagcaaacaagaaactcccaaacttaagatcgacatggaagccaaattacgagcatggttggaatcaaaggggaaaacaaagagcatccaaagaatggatggtcttttctccccaattgccagcaagactccattgtctgtgagccatatgaagcaaccaacatcttcaagaattccttgtagagttaaggcaatggatcaggatggtggtaaaatcaagaagatactttttgatccagtagtccatgttcccactgaaaatataccacgagagcacaggcagacagaagtaaatacaccaaagaaagtggtgcttccttcagttactccatgcaatgaaaaacatgaagcttctctcaggaaagctctttctccaatttcttcaaacatggtgcctgtagagcagcaaatacctgataatggcaattgccccgttttattggagccccaaactccaatagaaaaacgtaatatagtcgaggagactcctggtgcaacaccactagagagatttaatgcactagggtctaacctaaaggaagctctagttcagcagtaccttgaccttttaaatgttgcaaacaaggaagagctacagcagctgaaaggaattggcgcgaggagagcagaatatattctggaattacgggaggactcaccaaaaccattcaaaactcttgaagatttgggaaacatcggcctctcgtcaaagcagatccgagacatccttaagaagacggccactgggatcttcaaatgatgacctcaatggatgatgatgtattggcgctagacattcataggtgtaacagctaaatgactggcttgtgttgctgacggagaagttagttcaatgtttgtgttggtgacttcaggcagtgccctgctgctactttcaactagattcccttgattgtgtgtagaattgcagttgaagtgttgaacaagtaaactatcggagttgtgatgctacttttacgtccaggggagtttttatggaacgagctattcgaacattttatatgatgaagtggagcatcagttttgctcatttgaataatgataacaagcagagtttttatc

SEQ ID NO: 1143 - DNA, 1568 bp, Zea mays
  Clone ID: TF_ZmC39584_1
ggcacgagattttttgccgcttcggaggcaccttcgaacaaagcccaaaagcagccagcgcaccgcatgtcctcgtcttcggcgcaccagaaggcgtcgccgccgatagaggaggaagcgacggagcacggacccttccccatcgaacagctacaggcatctggaatagctgcacttgatgtgaaaaaactcaaagatgctggtctctgcacagtggaatctgtagcatactctccaaggaaagaccttttgcaaattaaagggattagtgaagccaaagtcgacaagataattgaagcagcttccaagttggttccactcggatttactagtgctagccaacttcatgcacagagacttgagatcatccagcttacaactggatctagagagcttgatcaaattttggacggtggaatagaaacaggatctatcacagagatgtatggtgaatttcgctccgggaagactcagttgtgccacactctctgtgtcacatgtcagctcccattggaccaaggtggtggtgaaggaaaggctttgtatattgatgcagagggtacattcaggcctcaaagaattctccagatagcagacaggtttggcttgaatggcgctgatgtactagagaatgtggcttatgccagagcatataacactgatcatcaatcaagacttttgctagaagcagcctccatgatggtagagaccaggtttgctctcatggttgtggatagtgctacagccctttacagaactgatttctctggtagaggggagctatcagcaaggcagatgcatctggcgaagtttcttaggagccttcaaaagttagcagatgagtttggagtggcagtggtaatcacgaaccaagtagtggctcaagtggatggtgctgcaatgtttgctgggccacagatcaagcccattggagggaacatcatggctcatgcttccacaactaggctctttcttcgcaagggaagaggggaggagcggatctgcaaagtaatcagctctccctgcctggctgaagctgaagcaaggtttcagatatcatctgagggtgtcactgatgtcaaggactgaaagcatcctcatttgcagtccacagcataacttgccaattcagacgaatctctgatctgctgcactcgtgtcggtcccttgtacaatcaaaataccagtacaggcttccagaatgcgaatgcaaatccgttggagtgtggcactgtcatcctgttgtctttaggtaccatctaaagttggcattgttgtaaagtggtagagcgcaaggctctactttgtagccgtggattcgagccctatggtgggcgttatttaatttttttggcgaaaaagcctttaattgagttgtttaggtgatatgaataactctttaggtcatggagttcgactccatgggagtttaagctgggttaaaaaaaattatggtcacgatctttttcacatgggctactgtaacatctcgtctactcctgaaccgatgttaagctttttaggactatagatcatcttcatatatcaacaaaaaaaaaaaaaaaaaa

SEQ ID NO: 1144 - DNA, 1719 bp, Zea mays
  unsure (1)..(1719): unsure at all n locations
  Clone ID: TF_ZmC4042_1
ctcgagccgcaattcgcttcgaacagggcagaggtgagacttgagagaaggaagaaggccatgtcgtcggcggcgcagcagcagcagaaggcggcggcagcggagcaggaggaggtggagcacgggccattccccatcgagcagctccaggcttctggaatagctgcattggatgtgaagaagctgaaagattctggtctccacactgtggaggctgtggcttacactccaaggaaagatcttctgcagatcaaagggataagtgaagctaaagctgacaagataattgaagcagcatccaagatagttccactgggatttacaagtgccagtcaacttcatgcgcagcgactggagataattcaagttacaactggatcaagagagcttgataagatattggagggtgggatagaaacaggatctatcactgagatatatggtgagttccgctctggaaagactcagttgtgtcacaccctttgtgttacatgtcagcttccactggaccagggtggtggtgaaggaaaggctctatatattgacgcagagggtacattcagaccacaaaggctcttgcagattgctgacaggtttggactgaatggtgctgatgtgttagagaatgtggcttatgccagagcttataatacggatcatcaatctagacttctgctggaagcagcttccatgatgatagagaccaggtttgctcttatggttgtagacagtgccacagctctgtacagaactgatttctcaggaagaggggaactatcagcgaggcaaatgcacatggctaagttcctgaggagccttcagaagttagctgatgagtttggagtagctgtggttatcaccaatcaagtagtggcccaagtggatggatctgctatgtttgctggaccgcagttcaagcccattggtggaaacatcatggctcatgcttcaaccacaaggcttgctcttcgcaaggggcgaggggaggaacggatctgtaaagtaataagctctccctgccttgctgaagccgaagcaaggtttcagttagcttctgaaggtattgcagatgtcaaggattgagaccatacctgctttacaggcatcttcagatccattggtctgctatttgctttgtcattccttgggccaactttcgtgttgcctcaccttgatgtacaaaacggtttcgttcacatatgtgaatgcacgcctgtgactgatttaggcgtcctgttgtaaataaaacgatgcctgttgccctgttgtgtgttgcatgtaatcgacaactctacatatcacaattatgatgtattttaggttttattgttcgcttagcacagccattgctggatgtgcaatgtgggattatagacaagaatccacacaacaacaatggccaatcctgataaagtagttagtgacttgggcaaatagcattgtggtgatctttgagttcacttgtgataagaacagggctggtggctggtggtgaaaactaacttgtgatcggaacaggtttaatagggaaactaaggattctataaaaaaaaaaataaaaaaaaaaaaggggngnccgcnnttngggtnnngcttcgtcgcgtncttggcggnattncnttnttttgngnnccatactttntttccnggcggntggttttnncgctgnnccntgggacccctgggnttccnccttttttnnttagggnnntccttttt

SEQ ID NO: 1145 - DNA, 1565 bp, Zea mays
  Clone ID: TF_ZmC9705_1
tgtatttcctcgccggccggcgcatctctccgggcagaccggcccggcggcccccatgggttccgtgcaggtgagcgtgtcgccactgactccggagcgtccgtccgtcccccatacggccacgcctctgggtctcccgcgctgccatggacgggggaagagagcagcaggcgccgccggagtcgcagcccggtaagaacctcatcaagatcccgtcctatcaggaggtcttcggcaccggcgcctccacctcttcctcgaagccgccatcctacaaccctcctgtagccacctccgccgccgccgccgcttcatcctcctcgtcgtcctcgggatcattctcgcaggctttttctttcctcaagtcctccgagttctactcacctccgccgccgcctccccagcccaccaccaccccgaggccgactcaagctagcccctcagcgccgactccccaaagcaagaactccattctcgtcagtcataggcagagagggaaccctctgctgaagcacattaggaatgctagatggacgttcgccgatgtcgtgccggactatgtgcttgggcaatcgtcatgtgccttgtacttaagtatcaggtaccatcttctacatccagactacttgtactatcggataagagagctgcagaagaatttcaggctgcgtgtcatcttgtgccatgttgatgttgaagatgtaatcaagcctttgcatgaaattacaagaacagcgctgcttcatgactgcacccttttgtgtggttggagcctggaggaatgtggtcggtacttggagactattaaagtatatgaaaacaagccagctgacagtattcgtgagcacatggataacgactatctatcacggttgacgcacgggcttacatccattcggcatgttaataaaacggacgttgtcacactcggttcatgtatttgcagtcgctctcacagatcatgaatggttctatggacgagctggctcgatgcccaggaatcggtgagcggaaggtaaggcggctctatgataccttccatgagccgttcaaacgggttcctgcccgaccacgaccaaacctcgtagtacccgataccccggaccgggagaaagcaaaaggccaaccttcgtctacagatggcagcagtttgcaagatgcggtagagaagccagatgcgtcgaagaagacgaagaaaggctctgatgtaagatcagccctcaccgttgcctttgccaagtattcggagaagatccgcagtcagggccgcgatgcgccaaacgaggccggtgagagtactggcggctcgaccgtggaagctgagagggcgggagactagatttagctgtaggatggttaacggtgctggagtaatgctagtttgttccttcctgttgggtgcttgttgttgtgactgggccgccgatttgcgcgtgcggcaccagtatttcccgcggcgtcctaggcatgtgtgttttttttaggctaaagaggggccagagaatcttcaacgatatcgaaacatttaagtgagcttcctagacggtggcagccattccatcacc

SEQ ID NO: 1146 - DNA, 673 bp, Zea mays
  Clone ID: TF_ZmC490976_1
aatctcgagcctcggtcacagacgttgaagcatcacgaactaccgccgataactccggcggtcgccgccgatggactcctcttcgtcctcggtccctgctgctgcggctgcggagggggcgcctccggcgggggagaatctggccgtgttctggcacgagggcatgctggcccacgacgccggccgcggcgtgttcgactcgggccgcgacccgggcttcctcgacgtgctcgaccaccacccggagaacgccgaccgcgtccgcaacatggtctccatcctccgccgcgggcccatcgcgcccttcctctcttggcactccggcacccccgcccacgccagcgacctcctgtccttccactccccagaatacatcgaggagctcgcgcaggcgaatgccagtggacccaagaagttatgtgagggcactttcttgaaccctggttcatggggtgccgcgcttctggctgccggaacaaccttatcagctacgaggcacatactagatgggcatgggaagatagcctacgcattggtccgtccccctggccatcacgcgcaaccggaccatgccgacggttactgctttctgaacaatgccggacttgctgtgcagctggctctggattctggccgcgcaaaggttgccgttgttgacatagatgtgcactat

SEQ ID NO: 1147 - DNA, 569 bp, Zea mays
  unsure (1)..(569): unsure at all n locations
  Clone ID: TF_LIB3960-017-Q1-K6-C4
gggcgactttgattttcntgctcccgctgccaggccgtcaggagtgaagcgatgctggagaaagaccggatatcctacttctacgacggagatgttggcaatgtctactttgggccaaatcaccccatgaagccacatcgtctctgtatgacacatcaccttgttctttcatatggacttcatcaaaagatggagatatatagaccacacaaagcatatccaatagagcttgcccaattccattctgctgattatgtggaattcttgcaccggataactcctgattcccagcacctatatgcaagtgaactaactagatgtatggatgctggagttttctctttccaaactattcttcaggactgctaatttcacaatgaaatacatgccatacaatcttggagaagactgtccggtctttgataatttgtttgagttctgccaaatctatgcgggaggaactttagatgctgctcgcagattaaatcataaaatatgtgacattgccattaattgggctggtgggctacatcatgccaaaaagtgtgaggcttcaggcttctgttaca

SEQ ID NO: 1148 - DNA, 2964 bp, Zea mays
  Clone ID: TF_ZmC1898_1
gcctgctcactatcgcacttggttttttttttttttcatcaaataacagattcactttttctagagaatcactcgaaatcactctattagagaatcatgtagcggagctatatgccaaacgagccactctctgtacaatcaaagcatgcatttgaaacggatctcggtacacgtacgtacacgtcagcatgatctctccgtacaatcaaagcaacacaagtggccttaatttggcagtctttcaattcaccatgatctgaagaagagcacgtcttatataattaaccatgcacacgtttggtttcttaacgaacaagacagatcgatcggattgatggatcgtgcagtgagtcgttctcctcgtcatcgatcagaggtcacgatggccggcggcggcgggcgctggcagctggccgctgttggctatgacgaccttggccttgggcacgccggtgagctggccctcggcttcgatcttgcgcacgacgtccatccctttcaccaccttgccgaacaccacgtggcgcccgtccagcttcttgggcaaccggttttcgtctacggtggtgatgaagaactgggagccattggagtcgggcccgtagttagccatggacagcgtaccggctttagcgtgggtgtgcttgaagttctcgtcggagaagatggtgctgccgtagatggactcgccccccgtgccgttgccgttggtgaagtcgcctccctggatcatgaaccccgggatgatcctgtggaacgtcgaccccttgtaccacagaggcttgccggacttggcaattcctttctcccctgtgcaaagtgctcggaagttctctgctgttttaggaacggtgtccccaaacagtcccagcacgatccggcctgcaggcttgccgtcgatctcgatgtccaagaaggtctcggccgtgaccttgtccaggtccgccgccgatgccgatggtcctcctccttgcgccccgtgggccagcgccagcgtggccgcggcgagagcgaggcacaggcacgtcgccgccgatgagctgcgcggagccatcgatcgccgccgccgggtatctggttcctccctcctcgatcgtcgccggcggtcctgcgtctctctctctctcttcgctccttttcctgcaggctccccccgccgggtgggccacgggttcgccgcgttttttatatcgcttccgtctcgtttggacctccatccgcggccgccgccgccgcgctgagtttgggccgggctctgttaatctgggcgactttgattttctctgctcccgctgccccggccgtcaggagtgaagcgatgctggagaaagaccggatatcctacttctacgacggagatgttggcaatgtctactttgggccaaatcaccccatgaagccacatcgtctctgtatgacacatcaccttgttctttcatatggacttcatcaaaagatggagatatataggccacacaaagcatatccaatagagcttgcccaattccattctgctgattatgtggaattcttgcaccggataactcctgattcccagcacctatatgcaagtgaactaactagatacaatcttggagaagactgtccggtctttgataatttgtttgagttctgccaaatctatgctggaggaactttagatgctgctcgcagattaaatcataaaatatgtgacattgccattaattgggctggtgggctacatcatgccaaaaagtgtgaggcttcaggcttctgttacattaatgatctagtattaggaattctggagcttctcaagtaccatgccagggttctttatattgacattgatgtccatcatggagatggagttgaagaagccttttatttcactgacagggtaatgactgtgagtttccacaagtatggtgacctgttctttcctggaacaggtgatattaaggatataggagaaagggaaggaaaatattatgccatcaacattccacttaaagatgggatagatgacactagctttactcggctttttaaaacaattattgccaaagttgttgagacatatctgcctggtgctattgttcttcaatgtggggctgattcattggcgagggatcgtttaggctgcttcaatctctctattgaaggccatgctgaatgtgtaaagtttgtcaagaaattcaatattccccttctggtaactggaggtggtggatacaccaaggagaatgtagcacggtgttgggctgttgaaactggggtccttttagacacagaactcccaaatgagattccaaaaaatgaatatattgagtactttgctccagattatacattgaaagttccaaatttgaacatggacaatttgaacagtaagacctatctcagttcaatcaaagtgcaagtgatggagagtttgcggtacatacagcatgctcctggtgttcaaatgcaagaggttcctcccgatttttatatcccggactttgatgaagatgaattggatcctgatgaacgtgttgaccagcacactcaagacaagcagattcaccgtgatgatgagtactatgaaggtgacaatgacaacgatcacgacgacggcacacgctaatctgcttcttctgaggccctggtgtaaatggaaacctgagattcttcactgttgtgtgtagttcagcagccttgagatgtaatagtttgtcagttgacagcagggatctaatttagcaggtcaaagtggtttagacttttataagggattctgacccctcctgaattacacattgtagtacaagtctgcatatttttaagcatgcaaaaattcaaatttctcagtggtattagtatctcaagaaaatacaaaaaaaaacctcgctcagtaacattgctcataaaaaaaaaaaaaatgggaaaacgcgtgggcggacgcgtgggcggacgcgtgggcggacgcgtggttcgccc

SEQ ID NO: 1149 - DNA, 2044 bp, Zea mays
  Clone ID: TF_ZmC29703_3
ccgcccttcgattccctactcaaacgcagccgccgagcgcctctcgcctctcgccctacaggaggcaccctacagaacccaaccaaaaagcgccggcggcaaacagaacccaacccaaagcgccggcggcaagcgaagagaaagcgccggcactaatccgacgatggacgcgtcggccggcggcggcggcaactccctgccgaccactggcgcggacgggtcgaagcgccgcgtctgctacttctacgacgcggaggtgggcaactactactacgggcagggccacccgatgaagccgcaccgcatccgcatgacccacgcgctgctcggccgctacggcctcctcgaccagatgcaagtgttccgccctcaccctgcccgcgaccgcgacctctgccgcttccacgccgacgattacgtctccttcctccggtccgtcacccccgaaacgcagcaggaccagatccgcgcgctcaagcgcttcaacgtcggcgaggactgccccgtcttcgacggtctctacagtttctgtcagacgtacgcggggggctctgttggcggcgccgtcaagctcaaccatggccatgatatcgccatcaactgggccggcggactccaccacgccaagaagtgcgaggcctccgggttttgctatgttaatgacattgtcctcgccatcctcgagctcctcaagtaccaccagcgcgttctgtacgtggacattgatatccaccacggggacggcgtggaggaggctttttataccacagaccgggtgatgacagtctcattccacaagtttggagattatttccctgggacaggggacattcgtgatgttgggcactcaaagggtaaatattactccctgaatgttcccctggacgatggtattgatgatgagagctaccagtcgttgttcaagccaataatgggcaaggtgatggaggtcttcaaccctggtgcagtcgtgctccagtgtggtgcggattcattgtcgggtgacaggttgggctgtttcaacctctctattaagggtcacgcagaatgtgtaagatttatgaggtccttcaacgtcccgctgttgctgcttggtggtggtgggtataccataagaaacgttgcacggtgttggtgctacgagacaggagttgcccttggtcatgagctcactgacaagatgccacctaatgagtactatgagtattttggtccagattacactctacatgtcgctccaagtaacatggagaataaaaacacacggcatcaattggatgacataaaatcaaaacttctagataatctttcaaaactccgacatgctcctagtgttcagtttcaagagcgacctcctgaggctgagttacctgagcaagatgaagacaaagagaatcctgatgaaagacatgatgctgattctgatgtggagatgaatgatgccaaacctttgcaggactctggaaggatgtcaatagtgtagctgcagaacattctagaggcactggacctgtggctgatggagttggttcctcgaaacaaacctttccgaatgccactagtcgaatggccatagatgaaccaaacgctcttgagagttgagcaagagggttcaaacaaattgcaggaccaaccatcgatgcacctcaagtagctaatgtcatctgtagcctgtcgattcttttgcgcaaattcattaactgtaggcaagccatgcgtggactgaagcagggagcagaagcaagtgctcgaccaagaagttgtgcatctgaaatctatattttttgcgcgtcatatttgtattaccgacagttgcaaacgatggtttaatcatgaaaaatttgtctttccacccttggcttctgcagtggaaggggttgatatcgtagtatgcatcaattatgcattttgtccattccccatccccaaatgagaagtgggtagtccccgacgggttttgaatggccaacagttttaagggagggaagcagcccggaggccaaaaaaaaagcaacgagatgtacggcaaaaaaaaaaaaaaaaa

SEQ ID NO: 1150 - DNA, 363 bp, Zea mays
  Clone ID: TF_LIB3150-049-Q1-N1-F11
ggctgaatggcggcttctggtgagggcgcgtaactcccgactacgacgggcggcgaggatgcccaccgaccgagattgagctatttatacaagccaccgatcgtaaactactactacagccaaggatacccgatgaagcccgaactgatacaaatggatcactcaatagtcgtctaatacgaccttcagcgactacataagctctaacgatcgtacccgaactctgaggcctacattcgacgattacactccgacgactacgtctcctttgttgcgtacgccaccggaaacgcaggtgtgctcgacccacgcgccaataaccactttaacgtccgtgaggactgcaccatgttcgacggactc

SEQ ID NO: 1151 - DNA, 416 bp, Zea mays
  Clone ID: TF_ZmC1028609_1
cccacgcgtccgaaacttttaacttaccattactgatgcttggaggaggtggctacacaatccgtaatgttgctcgatgttggacatatgagactgcagttgcccttgattgtgagattcccaatgagttgccatataatgattacttcgagtattctggaccagacttcaaactgcatattagtccctcaaacatgacaaaccagaacactccagaatatatggaaaagataaaacagcgtttgtttgaaaatctgcgaatgttaccacatgcgcctggtgttcaaatgcaagctattccagaagatgctgttcatgaagacagtggtgatgaggatggagaagaccctgacaagagaatttctattcgagcatcagacaagcggatagcttgtgatgaagagttctcagattct

SEQ ID NO: 1152 - DNA, 350 bp, Zea mays
  unsure (1)..(350): unsure at all n locations
  Clone ID: TF_LIB3245-437-P1-N1-C7
catattcttaccaacgcacccaaaaaaaaacgaggcaaaaaacaaattgtccggggcatcccccaaaaannaaaaaaaaaggagagagaacacacacacacaaaccccaatcccctgcggcggcgatagacccgtcatcgccggcctccggcggcaactccctcccgtccgtccaccccgacgggcagaaacggcgcgtgaactacttctacaacccagatgtggacaactactactacggacagggccatccgatgaaaccgcaccgcgtgcggatgacacactacactctggcacgctacaacctcctcaaccagatgcaagtgtaccgacccaacccgccccgcaac

SEQ ID NO: 1153 - DNA, 250 bp, Zea mays
  Clone ID: TF_LIB3152-001-Q1-K1-B2
acgaaccatgctaagcggaatggcggcttctggtgagggcgcgtcgctgccgtctcctgcgggcggcgaggatgctcaccgccgtcgcatcagctatttttactagccgtctatcggaaactactactacgggcaaggctacccaatgaagccccaccgcatcctgatggcgcactcactggcggtccactacggccttcaccgacttctctagctctaacgcccctacccagtctctgaagccgacatt

SEQ ID NO: 1154 - DNA, 1871 bp, Zea mays
  Clone ID: TF_ZmC1898_5
tcgaggccggccgggccgggtctgcggccgccgccgccgcgctgagtttgggccgggctctgttaatctgggcgactttgattttctctgctcccgctgccacggccgtcaggagtgaagcgatgctggagaaagaccggatatcctacttctacgacggagatgttggcaatgtctactttgggccaaatcaccccatgaagcctcatcgtctctgtatgacacatcaccttgttctttcatatggacttcatcaaaagatggagatatataggccacacaaagcatatccaatagagcttgcccaattccattctgctgattatgtggaattcttgcgccggataactcctgattcccagcacctatatgcaagtgaactaactagatacaatcttggagaagactgtccggtctttgataatttgtttgagttctgccaaatctatgctggaggaactttaggccttttatttcactgacagggtaatgactgtgagtttccacaagtatggtgacctgttctttcctggaacaggtgatattaaagatataggagaaagggaaggaaaatattatgccatcaacattccacttaaagatgggatagatgacactagctttactcggctttttaaaacagtaagctcactgcactttatcccttgttattttgtcatttttttagtcctgccatgttatctgagtttgtcatgcagattattgccaaagttgttgagacatatctgcctggtgctattgttcttcaatgtggggctgattcattggcgagggatcgtttaggctgcttcaatctctctattgaaggttctccagtttttaacagatatatacacacatagaatctacaagactcatgtgtgtatataatatttatccatcggctgctagagtgtcttttgtgggaatgggaagccccatgtccttgattatccattttttctgtttttgctgagtttcctcgcattattggaggtttagagttccttcggacaagtcacctagtttcctgaagctaagcctactatatttgtccattagtgcttaactgcttacttgccctatctgttttcataaacaggtcatgctgaatgtgtaaagtttgtcaagaaattcaatattccccttctggtaactggaggtggtggatacaccaaggagaatgtagcacggtgttgggctgttgaaactggggtccttttagacacagaactcccaaatgagattccaaaaaatgaatatattgagtactttgctccagattatacattgaaagttccaaatttgaacatggacaatttgaacagtaagacctatctcagttcaatcaaagtgcaagtgatggagagtttgcggtacatacagcatgctcctggtgttcaaatgcaagaggttcctcccgatttttatatcccggactttgatgaagatgaattggatcctgatgaacgtgttgaccagcacactcaagacaagcagattcaccgtgatgatgagtactatgaaggtgacaatgacaacgatcacgacgacggcacacgctaatctgcttcttctgaggccctggtgtaaatggaaacctgagattcttcactgttgtgtgtagttcagcagccttgagatgtaatagtttgtcagttgacagcagggatctaatttagcaggtcaaagtggtttagacttttataagggattctgacccctcctgaattacacattgtagtacaagtctgcatatttttaagcatgcaaaaattcaaatttctcagtggtattagtatctcggctttttaaaacaattattgccaaagttgttgagacatatctgcctggtgctattgttcttcaat

SEQ ID NO: 1155 - DNA, 2735 bp, Zea mays
  unsure (1)..(2735): unsure at all n locations
  Clone ID: TF_ZmC19940_1
ctcgagccggccgggnnnntgccggccgggacggacgtcgagtcgtcgatacgcctgaaccccagctttccactcgcctcgctcgcccctttcgcgtccaccgaccccgaccccgatccccgccggtgcttcgccaccccgatccccaccgcgcgatggcggagccggctccggctcccccggtgaccgcgccgctggtggggctgctgtacgacgagcggatgtgcgcgcacgcgacgcccaacggggaggaacacccggagaaccccgagcggctgcgctccatctggcgcaagctcaacgccgcgggcgtcgcgtccaggtgtgtggcccttaaggcaaaggaagctgaggacaagtatatagcttctgttcacagcaagaggcatataaagctgatgaaggaaattagctcaacaatatatgatgccagcaggaacaagattgctaggaaattcaattccatttacttcaataagggttcctcggaatctgctgttcttgcagctggttctgtcatagaggtagctgagaaagttgctgcaggtgagttaagttctgctattgctctagtcagacctccaggccaccatgcagaacatgatgaggctatgggattttgcctcttcaacaatgtggcagttgcagctaattatctcttaaacgagaggcctgatttaggtatcaagaagatattgattgtcgattgggatgttcaccatggaaatggcacacagaaaatgttttacgatgatcctcgtgtattgttcttctcagttcacagatttgattatggaagcttctatcctgctgaaggggatgcttctcattgtttcatcggggaagaagctggtaaagggtataacatcaatgttccctgggagcatggcaagtgtggtgatgctgattatattgctgcatgggaccatgtactgcttcctgtcactaaagtttttgatcctgatataattctggtatcagcggggtttgatgcagcattgggtgatcctctcggtgggtgctgcattacaccaaatggatatgcactgctactaacaaagttgttaggatttgctcaaggaaggatagtgatggcccttgaaggaggttataaccttaggtccatagcgaactcagtttgtgcttgtgcaaaagttctcttgggagacaaattcacattcaacactccagagatgcaaccatttgaatctacatggagagtaatacaagcggtacgcaatgaattgaagacatgctggcctgttctgagtagcaagttgccagaaaatgtatcattgaggattaagcctgcaccaagcgagctctacgcttcttctgattccgaatctgatagtgaagatgttgatgagctccttggcactgttgcatctgtcaatgttattgaagctactggtgttgctataagtgaacacctctcaaagatgaaacttgatgatgacagccttgcagtgaagactaactcaagttgctcagcagcagaacagcatccagttgattcagtaaaagtacataacaatgcatctgttgtgctgaccaaaaaaatatctgatttatctcttgagtggcgatcagatttatcgaaaactgatgtctggtatgccagttttggatcaaacatgtggagaccaagatttctatgctatattcaaggagggaaggctgagggtatgaatataccatgctgcggatcacgtgacacaagctcaccaaagggaaccgtgtggaagactgtacctcacaggttgcttttcggtagatcgtctaccccttgttggggaactggtggtgtggcttttctcaaccctgagataaactacaatgagaagttgtatgtctgcatgtacaaaataacgttggagcagttcaatgacatcttgtttcaggagaatcgtttagtgctggaggatggcaaagacggaaacactgtgtatcctgactctcctttgattggttcatctgaaatcaagtttatatctacaaacagagctgttcatcttgaacctattaaggatagctggtactccaatgtactttatcttgggaatgaggatgaagttccaattctaactatgacgtgccccgcatcagatattgagaggtataaatctggtgagctgcgtttagcacctccatcagagacgtatgcggccactctgataaagggactagtggaaggcaagcaaatggatgcggacggagctgccagctacatcaacgctgctgctgcaagagccttgtgaaggctgcttcagcgtgtgcttttgtacagccagtaaggagtagtaaggatacactatctgttagcgtggcgacaccaggaaaccttcattgtccgcaaatggagaacttggatccaatttgaattgggcagcatgattcgagctcgccctagcttgattactggtgaacggtgatctcccctggctggttgattctgggagaaacactagctgtgtcggggtggagcaacactagttggcggttgcaacaggtgctctcactgcactggtatcgtgcttgtctgacataccgtagtatttgcatggcatgctggtgatgttatttgtgcaattactgcattatgttctgttgccaaaaaaaaaaaaaaaagcggccccatatcccatccatcacagctagctagcgttcctaatcaccgacgaataatctcttcttcacctcactaacaccgagctagcagctcgctctgtcct

SEQ ID NO: 1156 - DNA, 888 bp, Zea mays
  Clone ID: TF_ZmC2148_2
gcagtggcagctcggtacgctcagcatcaacatggactaaagcgtgtgatgataatagattttgatgttcaccatggcaatgggacgtcagattcattttatgatgatccagatatcttcttcttgtcaactcaccagcttggaagctaccctggtactggtaagatcaatgaagtcggacagggtgatggtgaaggcacgacactcaaccttcctctgcccggtggcgcaggtgactacgcaatgagatgtgcatttgatgaggtcattgctccatcggcccatcgattcaagcctgatataatccttgtatcagctggatacgacgcacacgcgctggaccctctggctggccttcagttcacaacaggcacgttctacatgctggcatccagcatcaagcaggtgaccaaggaactctgtggtggccgctgtgtcttcttcctggaaggcgggtacaacctgcagtcgctctccagctccgttgccgacacgttccgtgcattccttgatgagcccagcctcgcagcacagtttgatgatccagcgatacttttcgaagagccgactcggaagatcaaggaagcaatcgagaaggccaagagcatccactcactctaggctgtcagctaattttccccccaatccccagaaatcccggaggggtagccctaaattgggaaaaggtgctgtcagcagtgtgcactgcagaactgcaagatcttgtggcaattggcattttgcaggtaggtagtgcatagtttgaacttggaaggcatggtcattttaatttagccaattctcaccagaaaatggaattaccgttctctcaatactagctgtatatattgaccaaaagttatgtgctacattattaattttaaaact

SEQ ID NO: 1157 - DNA, 1317 bp, Zea mays
  Clone ID: TF_ZmC1898_2
ccgggatccgcggccgccgccgccgcgctgagtttgggccgggctctgttaatctgggcgactttgattttctctgctcccgctgccacggccgtcaggagtgaagcgatgctggagaaagaccggatatcctacttctacgacgagaccacacaaagcatatccaatagagcttgcccaattccattctgctgattatgtggaattcttgcaccggataactcctgattcccagcacctatatgcaagtgaactaactagatacaatcttggagaagactgtccggtctttgataatttgtttgagttctgccaaatctatgcgggaggaactttagggtaatgactgtgagtttccacaagtatggtgacctgttctttcctggaacaggtgatattaaggatataggagaaagggaaggaaaatattatgccatcaacattccacttaaagatgggatagatgacactagctttactcggctttttaaaacaattattgccaaagttgttgagacatatctgcctggtgctattgttcttcaatgtggggctgattcattggcgagggatcgtttaggctgcttcaatctctctattgaaggccatgctgaatgtgtaaagtttgtcaagaaattcaatattccccttctggtaactggaggtggtggatacaccaaggagaatgtagcacggtgttgggctgttgaaactggggtccttttagacacagaactcccaaatgagattccaaaaaaatgaatgtattgagtactttgctccagattatacattgaaagttccaaatttgaacatggacaatttgaacagtaagacctatctcagttcaatcaaagtgcaagtgatggagagtttgcggtacatacagcatgctcctggtgttcaaatgcaagaggttcctcccgatttttatatcccggactttgatgaagatgaattggatcctgatgaacgtgttgaccagcacactcaagacaagcagattcaccgtgatgatgagtactatgaaggtgacaatgacaacgatcacgacgacggcacacgctaatctgcttcttctgaggccctggtgtaaatggaaacctgagattcttcactgttgtgtgtagttcagcagccttgagatgtaatagtttgtcagttgacagcagggatctaatttagcaggtcaaagtggtttagacttttataagggattctgacccctcctgaattacacattgtagtacaagtctgcatatttttaagcatgcaaaaattcaaatttctcaaaaaaaaaaaaaaaaaaaaacaaaa

SEQ ID NO: 1158 - DNA, 672 bp, Zea mays
  Clone ID: TF_LIB4739-063-Q2-K1-C9
aaactatctcacctaaactgcatgtcctgggggggcaatggacattctatagcatgggatcctgggtgaactccctaccgtccttcagaccctacgggaagaagtgtggcgcgcgctacttctacaacccggaggagggaaactactactacggagaggggcataccatgaagacggaacgcatccggatgatccactcgttgctgaggcgctaccgccgcctcaaacagatgaaggtgaaccggcccaacccggacagctaccgcgagctctgccggaaccacgtggactactacctcgacttgctgttgtcctccaggccgggagcacgcagcatgaccatacccgcctgctcaagcgcttcaactgcctggaggactgccccgtgttccacagcccctacagtttctgccacagctatgggatggactacccaacacggagtcggcgagctcaactcacagttcaagacctctcaatgccactggttcctcgggcctgcacgacgacaagaagcgcgaagggacgggcttctgctaccccactgacgtcgtgctcgccatactcgaactgcgcgagcatcaccacagagctcggcatgctcatagctatatcctacatggggacgaagaggatgatgcttgctacactacagagacggcgatgactgcc

SEQ ID NO: 1159 - DNA, 1576 bp, Zea mays
  Clone ID: TF_21207384
agctcctgctgtctttcaaataataaagttcgaatttatgattgctagcttaccaatttattttatcacacccattgtaggagatgttggcaatgtctactttgggccaaatcaccccatgaagccacatcgtctctgtatgacacatcaccttgttctttcatatggacttcatcaaaagatggagatatataggccacacaaagcatatccaatagagcttgcccaattccattctgctgattatgtggaattcttgcaccggataactcctgattcccagcacctatatgcaagtgaactaactagatacaatcttggagaagactgtccggtctttgataatttgtttgagttctgccaaatctatgcgggaggaactttagatgctgctcgcagattaaatcataaaatatgtgacattgccattaattgggctggtgggctacatcatgccaaaaagtgtgaggcttcaggcttctgttacattaatgatctagtattaggaattctggagcttctcaagtaccatgccagggttctttatattgacattgatgtccatcatggagatggagttgaagaagccttttatttcactgacagggtaatgactgtgagtttccacaagtatggtgacctgttctttcctggaacaggtgatattaaggatataggagaaagggaaggaaaatattatgctatcaacattccacttaaagatgggatagatgacactagctttactcggccttttaaaacaattattgccaaagttgttgagacatatctgcctggtgctattgttcttcaatgtggggctgattcattggcgagggatcgtttaggctgcttcaatctctctattgaaggccatgctgaatgtgtaaagtttgtcaagaaattcaatattccccttctggtaactggaggtggtggatacaccaaggagaatgtagcacggtgttgggctgttgaaactggggtccttttagacacagaactcccaaatgagattccaaaaaatgaatatattgagtactttgctccagattatacattgaaagttccaaatttgaacatggacaatttgaacagtaagacctatctcagttcaatcaaagtgcaagtgatggagagtttgcggtacatacagcatgctcctggtgttcaaatgcaagaggttcctcccgatttttatatcccggactttgatgaagatgaattggatcctgatgaacgtgttgaccagcacactcaagacaagcagattcaccgtgatgatgagtactatgaaggtgacaatgacaacgatcacgacgacggcacacgctaatctgcttcttctgaggccctggtgtaaatggaaacctgagattcttcactgttgtgtgtagttcagcagccttgagatgtaatagtttgtcagttgacagcagggatctaatttagcaggtcaaagtggtttagacttttataagggattctgacccctcctgaattacacattgtagtacaagtctgcatatttttaagcatgcaaaaattcaaatttctcaaaaaaaaaaaaaaaaaa

SEQ ID NO: 1160 - DNA, 479 bp, Zea mays
  Clone ID: TF_uC-zmflteosinte76f08b1
cccacgcgtttttggacgctgagtcagacccccaccgatggcgtccgaatcctccccgcccccggcgggggcgccaccgcctggtctgggagacaagctagcggtgttctgggacgagggcatgctggcccacgacgccggccgcggcgtgttcgactcgggccgcgaccccggattcctggatgtgctcgaccaacacccggagaacgccgaccgcgtccgcaacatggtctccatcctccgccgcgggcccatcgcgcacttcctctcctggcactcgggccgccctgcccacgcctccgagctcctctccttccactcctcagaatacatagaggagctcgtccagacgaacgccaccggagccaagaagaagctctgtgagggcacgttcttgaacccgggctcctggggtgcggcgcttctagcggacgggaccacgctctccgccgcgaagcacatactagacgggcagggga

SEQ ID NO: 1161 - DNA, 2155 bp, Zea mays
  unsure (1)..(2155): unsure at all n locations
  Clone ID: TF_ZmC29703_2
ctcgagatccattgtgctggaaagccgacgcgcccgttttctcctgaaaacagaaggctccggcctccggcatccgnnnnnnnnnnnnnnnnnnnnnnnnnnnnnnnnnnnnnnnnnnnnnnnnnnnnnnnncggcggcgatggacccgtcatcggcgggctccggcggcnnnnnnnnnnnnnnnnnnnnnnnnnncgggcagaaacggcgcgtgtgctacttctacgacccggatgtgggcaactactactacgggcagggccatccgatgaagccgcaccgcatccggatgacgcactcgctgctggcgcgctacggcctcctcaaccaaatgcaggtgnnnnnnnnnnnnnnnnnnnnnnnacgcgaactctgccgcttccacgccgaggaatacatcaacttcctgcgctccgtcacgccggaaacgcagcaggaccagatccgcctgctcaagcgcttcaacgtcggcgaggagtgccccgtcttggacggcctttacagcttctgccagacctannnnnnnnnnnnnnnnnnnnnnnnnnncaagttcaaccacggccatgacatcgcaatcaactggtcnnnnnncctgcaccacgccaagaagtgcgaggcgtcgggcttctgttacgtcaatgacatcgtgctcgccatactcgagctgctcaagcatcacgagagagttctgtatgtcgatatcgatatccaccatggtgatggagtggaggaggctttctacacaacagatagggttatgactgtctcgttccacaagtttggtgattatttcccaggaacaggggatatccgtgacattgggcactcaaaagggaagtactactccctgaatgtccctctagatgatgggattgatgatgaaagctaccagtcccnnnnnaagccaatcatgggcaaagttatggaggttttccgccctggtgcagttgtgcttcagtgtggtgctgattccttgtctggggataggttgggctgcttcaacctctcaatcaaaggtcatgcggaatgtgttaggtatatgaggtctttcaacgttccattgttgctccttggtggtggtggatataccataagaaatgttgcacgctgttggtgttatgagactggagttgctcttggccaagagcctgaagacaagatgcctgttaatgagtactatgaatacttcggtccagattacactcttcatgttgcaccaagtaacatggannnnnnnnnnnnnnnnnnnnnnntggatgatatacgatctaaacttctggataatctttcaaaacttcgacatgctcctagtgtccactttcaagagagagttcctgacacagaaatacctgagcaagatgaagatcaagatgatccagatgaacgacatgatcctgactctgatatggaagtggatgaccacaaggctgtggaagagtcatcgaggaggagcattctaggtataaagatcaagagagaatttggtgaaaatgcgaccagagtacaggatggtggcagggttgcatctgaacatagaggactggaacccatggcagaagacattggttcctccaagcaagctcctcaggcagatgccagtgcaatggccatcgatgaaccaagcaatgtcaagaatgaacctgagagctcaactaaattgcaaggccaagcagctgcgtaccacaagccatagctgcgaccatcaagagttgctgggtttctgctaggcaacttcctgcttgatttggacagtccagaaaacagaagtgaatccgcaatacgtccctgccatttcaaatttgacttggttacacctatctgtgacaatgttaatgtaatgagatcccatggcactagtgaagttcccaggtgtccacctgggattgcttgcggttgagagagacgatagtctgatgacccatgtatacatgaagcccatgatctcagttgtacagtcattagccaatacaaatatgcagtggactaaagggtgattcattgcgtgttcttaatggttttgtgtcctgactcgtccttctttttgtgcggaagcaaggtaggcagttgctgtgccgcaaatttgccgagtttgtagaatgctgatgcaaatacatgcgctatctgcctgttaaaaaaaaaaaaaaaaaagcggcc

SEQ ID NO: 1162 - DNA, 705 bp, Zea mays
  Clone ID: TF_ZmC515833_1
aaaataccgataaccctcaaagagagaagaaattccccgaaatggcggcgtccggcgagggagcgtcgctgccgtctccggcaggtggcgaggacagccgccgccgtcgtgtgagctacttctacgagcccacgatcggcgactactactacgggcagggccacccgatgaagccccaccgcatccgcatggcgcactcgctagttatccactatggtctgcaccgcctgctcgagctctcacgccccttccctgcctcggaagccgacatcagccgcttccactccgacgaatatgtctccttccttgcctccgcgaccggcaacccgaccatcctcgacccccgcgccgtcaagcgcttcaacgtcggggaggactgccccgtctttgacggactcttccccttctgccaggcctccgccggtggcagcatcggcgccgccgtcaagctcaaccgtggcgacgccgacatcaccgtgaactgggctggcgggctccaccacgccaagaagggcgaggcctctgggttctgctatgtcaatgacatcgtcctcgccattcttgagcttctcaagttccacaggcgtgtgctatatgtagacattgatgttcaccacggagatggtgtggaggaggccttcttccctacaaccgagtcatgacggtttctttccacaagtatgaagacttcttttcctggaactg

SEQ ID NO: 1163 - DNA, 1771 bp, Zea mays
  Clone ID: TF_ZmC13115_2
attgggacctcgagccggcgggaagaagaaaaaaagggttgaattttgctgggagcctgggacgctgagtcagacccccaccgatggcgtccgaatcctccccgcccccggcgggggcgccaccgcctggtctgggagacaagctagcggtgttctgggacgagggcatgctggcccacgacgccggccgcggcgtgttcgactcgggccgcgaccccggattcctggatgtgctcgaccaacacccggagaacgccgaccgcgtccgcaacatggtctccatcctccgccgcgggcccatcgcgcacttcctctcctggcactcgggccgccctgcccacgcctccgagctcctctccttccactcctcaggtcaactcccaaagccgaaatcccctcactaacttcgttttctggaatcttgattgaccaaacgctcgcgttttcccgggggttccgttgtaaaatatattcgtaaacggacgccggccaaaatcttcttgtggtttgaagaatacatagaggagctcgtccagacgaacgccaccggagccaagaagaagctctgtgagggcacgttcttgaacccgggctcctggggtgcggcgcttctagcggccgggaccacgctctcctccgcgaagcacatactagacgggcaggggaacctggcctacgcgttggttcgcccccctggccaccacgcgcagcccgaccacgccgatggctactgctttctgaacaatgccggacttgctgtgcaactggctctggattccgggcgcgcaaaggtcgccgttgtggatattgatgtgcactacgggaatggcaccgcggagggcttctatcggacagacaccgtgttgacgatgtctcttcacatgatgcatggttcttgggggccatcgcatccgcagagtggctccgtcgatgagattggtgagggcaaggggcttgggtacaatctcaatatacctttgcctaatggaagtggagatgctgggtatgaatatgcgatgaacgagttggttgttccatcgattgataagtttcagcctcaactgttgtttcttgtggtcggccaagattccagtgcgtttgatcccaatggaagacagtgcttgaccatggaaggctacaggaaaattggacaaataatgaggcgcctggctgatcgccattgcaatgggcaaatactggttgtccaggaagggggttaccacatcacttattcggcatattgtctgcatgctacactggaaggagttttggatctggaagccccgctgcttgatgacccaatcgcttattatccggaggatgataaatacactatgaaagtcgttgacatgataaagagctactggaaggaatcggttcctttcctaaaggaaatttagaggaaataatgttcgcgccctcaatgttcaaattgcaggaaactccacattcctggacatcttcaattgaattgggaagaacattgcacgtctacgttttcaggccgtttaagattatctgattgacagtttcacgcctaacattgtacaggatagattaagaacattgtttgctgctgctcttgaatttctgcaatcaggatctcgtcagcctatttttgataaacagtcgatcttttttttttccctgagatgcttttggcggcagtagaaggtaggcggtgcttgagagtgacagagggccatgtaaccaggggataaatcttgattgactagtccaagcaaagggtgatgctcgctaccagaacttg

SEQ ID NO: 1164 - DNA, 2321 bp, Zea mays
  Clone ID: TF_ZmC29703_1
cccacgcgtccgactgtatgcattgctagtgtagtattctgtgacaaaaccaataatcaaaccagcccacatggcctactttgtatcttcgagtctcttcttccactttctcccgtcccgttcatttatttatatataaattctgctaagctgtgctctgcttctcgccctcccatcgcctgaccgacgcgcccgttttctcctgaaaacagaaggctccggcctccggcatccgccaaaaaggggaaaaaaggagagagaacacacacacacacaaaccccaatcccctgcggcggcgatggacccgtcatcggcgggctccggcggcaactccctcccgtccgtcggccccgacgggcagaagcggcgcgtgtgctacttctacgacccggatgtgggcaactactactacgggcagggccatccgatgaagccgcaccgcatccggatgacgcactcgctgctggcgcgctacggcctcctcaaccagatgcaggtgtaccgccccaacccggcccgcgaccgcgacctctgccgcttccacgccgacgactacatcaacttcctgcgctccgtcacgccggaaacgcagcaggaccagatccgcctgctcaagcgcttcaacgtcggcgaggactgccccgtcttcgacggcctctacagcttctgccagacctatgcgggcgcctccgtcggcggggccgtcaagctcaaccacggccatgacatcgcaatcaactggtcggggggcctgcaccacgccaagaagtgcgaggcgtcgggcttctgctacgtcaatgacatcgtgctcgccatactcgagctgctcaagcatcacgagagagttctgtatgtcgatatcgatatccaccatggtgatggagtggaggaggctttctacacaacagatagggttatgactgtctcgttccacaagtttggtgattatttcccaggaacaggggatatccgtgacattgggcactcaaaagggaagtactactccctgaatgtccctctagatgatgggattgatgatgaaagctaccagtccctttttaagccaatcatgggcaaagttatggaggttttccgccctggtgcagttgtgcttcagtgtggtgctgattccttgtctggggataggttgggctgcttcaacctctcaatcaaaggtcatgcggaatgtgttaggtatatgaggtctttcaacgttccattgttgctccttggtggtggtggatataccataagaaatgttgcacgctgttggtgttatgagactggagttgctcttggccaagagcctgaagacaagatgcctgttaatgagtactatgaatacttcggtccagattacactcttcatgttgcaccaagtaacatggagaacaaaaatacacgacaacaactggatgatatacgatctaaacttctggataatctttcaaaacttcgacatgctcctagtgtccactttcaagagagagttcctgacacagaaatacctgagcaagatgaagatcaagatgatccagatgaacgacatgatcctgactctgatatggaagtggatgaccacaaggctgtggaagagtcatcgaggaggagcattctaggtataaaaatcaagagagaatttggtgaaaatgcgaccagagtacaggatggtggcagggttgcatctgaacatagaggactggaacccatggcagaagacattggttcctccaagcaagctcctcaggcagatgccagtgcaatggccatcgatgaaccaagcaatgtcaagaatgaacctgagagctcaactaaattgcaaggccaagcagctgcgtaccacaagccatagctgcgaccatcaagagttgctgggtttctgctaggcaacttcctgcttgatttggacagtccagaaaacagaagtgaatccgcaatacgtccctgccatttcaaatttgacttggttacacctatctgtgacaatgttaatgtaatgagatcccatggcactagtgaagttcccaggtgtccacctgggattgcttgcggttgagagagacgatagtctgatgacccatgtatacatgaagcccatgatctcagttgtacagtcattagccaatacaaatatgcagtggactaaagggtgattcattgcgtgttcttaaaaaaaaaaaaaacgaaaaaaaaaaaaaaaaaaacaatggcggccgcatgggttcccagggcccgtgccgcgttcccgccgggcctcctgggtgcgcttgcggttgcgtgcgccgtctgcctgatgacccatgtatacaaaaaaaaaata

SEQ ID NO: 1165 - DNA, 804 bp, Zea mays
  Clone ID: TF_LIB4730-005-R1-K1-C11
ctcgaggtcccggcccgggaaaaaaaaaaaaaaaactgactccttgtctggggataggttgggctgcttcaacctctcaatcaaaggtcatgcggaatgtgttaggtatatgaggtctttcaacgttccattgttgctccttggtggtggtggatataccataagaaatgttgcacgctgttggtgttatgagactggagttgctcttggccaagagcctgaagacaagatgcctgttaatgagtactatgaatacttcggtccagattacactcttcatgttgcaccaagtaacatggagaacaaaaatacacgacaacaactggatgatatacgatctaaacttctggataatctttcaaaacttcgacatgctcctagtgtccactttcaagagagagttcctgacacagaaatacctgagcaagatgaagatcaagatgatccagatgaacgacatgatcctgactctgatatggaagtggatgaccacaaggctgtggaagagtcatcgaggaggagcattctaggtataaaaatcaagagagaatttggtgaaaatgcgaccagagtacaggatggtggcagggttgcttctgaacatagaggactggaacccatggcagaagacattggttcctccaagcaagctcctcaggcagatgccagtgcaatggccatcgatgaaccaagcaatgtcaagaatgaacctgagagctcaactaaattgcaaggccaagcagctgcgtaccacaagccatagctgcgaccatcaagagttgctgggtttctgctaggcaactt

SEQ ID NO: 1166 - DNA, 1657 bp, Zea mays
  Clone ID: TF_ZmC13115_1
ccctccgaggctcggccgggaaagaaaaaaaaaaggggttgcaattttgctgggagcctgggacgctgagtcagacccccaccgatggcgtccgaatcctccccgcccccggcgggggcgccaccgcctggtctgggagacaagctagcggtgttctgggacgagggcatgctggcccacgacgccggccgcggcgtgttcgactcgggccgcgaccccggattcctggatgtgctcgaccaacacccggagaacgccgaccgcgtccgcaacatggtctccatcctccgccgcgggcccatcgcgcacttcctctcctggcactcgggccgccctgcccacgcctccgagctcctctccttccactcctcagaatacatagaggagctcgtccagacgaacgccaccggagccaagaagaagctctgtgagggcacgttcttgaacccgggctcctggggtgcggcgcttctagcggccgggaccacgctctcctccgcgaagcacatactagacgggcaggggaacctggcctacgcgttggttcgcccccctggccaccacgcgcagcccgaccacgccgatggctactgctttctgaacaatgccggacttgctgtgcaactggctctggattccgggcgcgcaaaggtcgccgttgtggatattgatgtgcactacgggaatggcaccgcggagggcttctatcggacagacaccgtgttgacgatgtctcttcacatgatgcatggttcttgggggccatcgcatccgcagagtggctccgtcgatgagattggtgagggcaaggggcttgggtacaatctcaatatacctttgcctaatggaagtggagatgctgggtatgaatatgcgatgaacgagttggttgttccatcgattgataagtttcagcctcaactgttgtttcttgtggtcggccaagattccagtgcgtttgatcccaatggaagacagtgcttgaccatggaaggctacaggaaaattggacaaataatgaggcgcctggctgatcgccattgcaatgggcaaatactggttgtccaggaagggggttaccacatcacttattcggcatattgtctgcatgctacactggaaggagttttggatctggaagccccgctgcttgatgacccaatcgcttattatccggaggatgataaatacactatgaaagtcgttgacatgataaagagctactggaaggaatcggttcctttcctaaaggaaatttagaggaaataatgttcgcgccctcaatgttcaaattgcaggaaactccacattcctggacatcttcaattgaattgggaagaacattgcacgtctacgttttcaggccgtttaagattatctgattgacagtttcacgcctaacattgtacaggatagattaagaacattgtttgctgctgctcttgaatttctgcaatcaggatctcgtcagcctatttttgataaacagtcgatcttttttttttccctgagatgcttttggcggcagtagaaggtaggcggtgcttgagagtgacagagggccatgtaaccaggggataaatcttgattgactagtccaagcaaagggtgatgctcgcaaaaaaaaaaaaaaaaaaggcttttattcccatcaggt

SEQ ID NO: 1167 - DNA, 1945 bp, Zea mays
  Clone ID: TF_ZmC29909_1
cggggaagcctaaaccccgaaattataaagcggccgggctcggccgcaaggcggggatcttcgtgaggaccttcaaccatctcaggcggaatggcggcttctggtgagggcgcgtcgctgccgtctccggcgggcggggaggatgcgcaccgccgccgcgtcagctatttctacgagccgtcgatcggagactactactacgggcaaggtcacccgatgaagccccaccgcatccgaatggcgcactcgctggtggtccactacggcctccaccgcctcctcgagctctcccgcccctacccggcctctgaggccgacatccgccgcttccactccgacgactacgtcgccttcctcgcgtccgccaccggaaacccgggtgtcctcgacccgcgcgccattaagcgctttaacgtcggtgaggactgccccgtgttcgacggtctcttccccttctgccaggcctccgctgggggaagcatcggcgccgccgtcaagcttaaccgcggggacgccgacatcaccgtcaactgggcgggcggcctccaccacgccaagaagagcgaggcctccgggttctgctacgtcaacgacatcgtcctcgccatcctcgagctcctcaagttccacaggcgtgtgctatatgtagacattgatgtccaccatggagatggcgtggaggaggccttcttcactacaaaccgagtcatgactgtttcctttcacaagtatggggattttttccctggtactggacatatcactgacgttggggcagccgaagggaagcattatgctctgaatgttcccctgagtgatggtatcgatgacaccacctttcgtggtctgtttcaatgcatcattaagaaagttatggaggtttatcagccagacgtggttgtcctccaatgcggagctgactctttggctggagacaggttaggttgcttcaacctgtctgtgaagggtcatgctgactgcctccgtttccttaggtcgtacaatgttcctatgatggttttaggtggtggaggttacaccatcagaaatgttgcacgctgctggtgctacgagaccgcagttgctgttggagttgaacctgataacaagctgccttacaatgattactatgagtactttggccctgattatactcttcatatccaaccaaaaagtgttgaaaacctgaataccacaaaggacttggagaacataaagaacatgatattggagaacctgtcaaagatagaacatgttcccagcactcaattccatgacagaccgtcagaccctgaagctccagaggagaaagaggaggacatggacaagaggccacctcagcgcagcagattatggagcggaggagcttacgactctgatacagaggatcctgacagcctgaaaagcgagggtaaagacgtaactgctaacttccagatgaaggatgaaccaaaagatgatctgtagaagtttcagaagtgcccccaaagttactgagttgtcaatgggatcgtcgacatgcatgttgaagagtggggacgcatctgaacctgtccgtgctgatatctgccgctgtgcatctgtaacagactgaacgttttgctggttccagctttcctgcgtgttggtaactagactagatatatggccctttggtgggtcccaaactgttgagctggagaaatgaagtgattattctcgcatgatttactgtagcatgcatgtaatcattacccattagttcattaggctatcaacagtagtttactcatccccatattcaaacttcactatgcgcgcatacagtgatttgagtgaccatatggataaactttgaagatgaattttgggtagtgtttggtttcgaagtgtaatggaatagagccgccccgctcttaattcagcgccgtgatggcggacggcggctacggcggggggggcggtt

SEQ ID NO: 1168 - DNA, 1514 bp, Zea mays
  unsure (1)..(1514): unsure at all n locations
  Clone ID: TF_ZmC29703_5
cattgggtacctcgaggccggccgggctgaactacctatggtactgtcatcaatttgagactcccatggttgacaactttaaaaaaaaaaaaaaaaaaaaaaggggaaaaaaggagagataacacacacacacacaaaccccaatcccctgcggcggcgatggacccgtcatcggcgggctccggcggcaactccctcccgtccgtcggccccgacgggcagaagcggcgcgtgtgctacttctacgacccggatgtgggcaactactactacgggcagggccatccgatgaagccgcaccgcatccggatgacgcactcgctgctggcgcgctacggcctcctcaaccagatgcaggtgtaccgccccaacccggcccgcgaccgcgacctctgccgcttccacgccgacgactacatcaacttcctgcgctccgtcacgccggaaacgcagcaggaccagatccgcctgctcaagcgcttcaacgtcggcgaggactgccccgtcttcgacggcctctacagcttctgccagacctatgcgggcgcctccgtcggcggggccgtcaagctcaaccacggccatgacatcgcaatcaactggtcggggggcctgcaccacgccaagaagtgcgaggcgtcgggcttctgctacgtcaatgacatcgtgctcgccatactcgagctgctcaagcatcacgagagagttctgtatgtcgatatcgatatccaccatggtgatggagtggaggaggctttctacacaacagatagggttatgactgtctcgttccacaagtttggtgattatttcccaggacaggggatatctncatgctgaactaaacatatatcatttatgccaacatgaacaaaaactggatgagatcatttattttagttcgttttatcttccaagtcttcaactatctacataaagtgattggaagctatcagaaatgtaacttcacaaatgatctttagtgtcggttgaatttgccctggtattctattggaaatgattagtcaaaacctgattgttttttggacatgtttggtgtacagcaagatgaagatcaagatgatccagatgaacgacatgatcctgactctgatatggaagtggatgaccacaaggctgtggaagagtcatcgaggaggagcattctaggtataaaaatcaagagagaatttggtgaaaatgcgaccagagtacaggatggtggcagggttgcatctgaacatagaggactggaacccatggcaggagacattggttcctccaagcaagctcctcaggcagatgccagtgcaatggccatcgatgaaccaagcaatgtcaagaatgaacctgagagctcaactanattgcaaggccaagcagctgcgtaccacaagccatagctgcgaccatcaagagttgctgngtttctgctaggcgacttcctgcttgatttggacagtccagaaaacagaagtgaatccgcaatacgtccctgccatttcaaatttgac

SEQ ID NO: 1169 - DNA, 1640 bp, Zea mays
  Clone ID: TF_ZmC2148_1
ggggtggcagagtactgtggcagcgcggtacgctccgcatcaacatgctacgaagcgtgcgatccgattagaggaccatgttcggcatggcacactaaccagggaggcattttatgatgatccagcactcttctgcttgtcaaagtcatcatttggatgctataatgtggaggaacagattcatgacatcgcgaagagaacaaaaacaaatcaggagttgggatgcacagtgctcagcaaatcaggatcaagcttctatagagaaatgcaatgctccaaagaatttaccaatacctgataattcacttctcgatgctcgtattctctattgtacctctcctgccctgggtcataacaaagaagcacacccagaatcgaacaaaagagttcctgtgatagttgatactcttgagaaattggagcttagtcccaagcatcgtggttcacaggttcttgaaattcaaaatttcaaccctgcttctctagatgatgttgcacgagttcattcaagatcttacatcactggactcgaaaaggctatgggcagagcttcagatgaaggtctgatattgattgaagggacaggaccaacatacgctacagaaactactttccgagaatcacttctatcagctggtgccggaatcacactggttgattcagtggccaccaggacatcatgctgttcctcaaggtcccatgggtttttgtgtctttgggaacattgcagtggcagctcggtacgctcagcatcaacatggactaaagcgtgtgatgataatagattttgatgttcaccatggcaatgggacgtcagattcattttatgatgatccagatatcttcttcttgtcaactcaccagcttggaagctaccctggtactggtaagatcaatgaagtcggacagggtgatggtgaaggcacgacactcaaccttcctctgcccggtggcgcaggtgactacgcaatgagatgtgcatttgatgaggtcattgctccatcggcccatcgattcaagcctgatataatccttgtatcagctggatacgacgcacacgcgctggaccctctggctggccttcagttcacaacaggcacgttctacatgctggcatccagcatcaagcaggtggccaaggaactctgtggtggccgctgtgtcttcttcctggaaggcgggtacaacctgcagtcgctctccagctccgttgccgacacgttccgtgcattccttgatgagcccagcggacgcgtggggtttgatgatccagcgatacttttcgaagagccgactcggaagatcaaggaagcaatcgagaaggccaagagcatccactcactctaggctgtcagctaattttcccctcaatccccagaggggtagccctaaattgggaaaaggtgctgtcagcagtggcactgcagaactgcaagatcttgtggcaattggcattttgcaggtaggtagtgcatagtttgaacttggaaggcctggtcattttaatttagccaattctcaccagaaaatggaattaccattctcagtagaagcagtgtatagtataatactagctgtatatattgaccaaaagttatgtgctacattattaattttaaaactatgttaaaggttctaaa

SEQ ID NO: 1170 - DNA, 984 bp, Zea mays
  Clone ID: TF_ZmC22838_1
gtccaccgcaaccattcggcttctcccaaatcccggcacggcggcacgggacctctccctctctctcccgctggcgggcgatggcctcctcctcctcttcctcacctgcgcccgccttggccggggaggcgctacgccagaaacgcatcctctccagcaagctctacctcgaggtcccgtcctccaaggcgccggtggtttactcgccggcatacgacatctccttcctcgggcttgagaagctgcacccgtttgaatccgccaaatggggccgcatctgtaggtacctcaccagggaagggtacctcgacaagaaacggatggtggagccattggaagcctgcaaggaggatttgctagtggtgcacacggaggcgtatttgaacagtctcaaatgcagcttcagagtttcctccattgtagaggtccctcctgtgtcgcttgtccctaattggattgtgcacagaaagctactacaccccttccggaagcaggtgggtgggtccattttatcagccaaacttgcatttgagagaggttgggctattaatgttggtggaggatttcaccattgttcggcagatgaagggggtggattttgtgcatacgctgacatctccctctgcatccattttgcttttgtccgtctaaatatctcaagtgtattgatcatagacctggatgcccaccaaggaaatggacacgaaaaagattttgctaatgatgcatttagatgatgtaattgttcacagatcgaaattgaaaaacagcagtttttttctcgaacgaagctggagagatacgtgtctttgcatatagaagagaaaaaatagtacaaggagagatcaaaagacctctccaagagaaaaacagcagttccatccaactgttatactgcaatgaattccgacggtctcatgctatcagttttgtaacagtccacattaatatgatgtagacaccaaaataaaggacgggttttgt

SEQ ID NO: 1171 - DNA, 2138 bp, Zea mays
  Clone ID: TF_22135464
cttccgctttctcccttactcgcgctcagcacgcaggcgacggcgtcggcgctcaggtcgggctctgggcgacggcgtcatcggcttctcctcccgcctctctccagtcgcctcgcgccctcgcctccggtcctccgcacaccggccggtgaccctgctcacactgatgtggaggcctcaaaagagaaccgtggagcatgcagtttgaacaatgatcgtgctgatgctctagaagaagaggccaatgtttccacagctaggataggtcatgttgagagtgctgaccctggtggctctgtgggtgtagaaaaggaaattttcatggctgttaatgaggagtctgagggggagcaagctggggcaacactggaggatctgtttttctttaatggtgaagaggatgatgacagtgattgggaacctgctagtcgccttgttgtgaatagatggttttgcttgaactgcacaatgccaaatgtggacaagattacatattgcatgaattgccgtgagcttccaggatctgttgtagatggatatgatgtcttcaaaaagcaaattgcacaaacagctttgttatctgctgacacagggttgctgccagtgtctacggcgattggttttgatgaaagaatgctgctccacagtgagctagaagttaaaccaaatccacatccagaaagaccggatcgccttcgcgccattgctgcaagtcttgctgctgcagggatctttccctcaaaatgtgctttggtacctcctcgagaaatcacgaaggaggaacttcttatggttcatagtccagaccacattgaaagtgtcgagcagacaaagaacatgctttacagttacttcacttcggatacttacgcaaatggacattcagcatgtgctgccaaacttgcagctggattatgtgctgatcttgctagtttgatagtatctgggcgtgttcgcaatggctttgcgctggtaagacctcctgggcatcatgcaggggtgaagcaagcaatggggttttgtcttcacaacaatgcagcagtagctgcgttagctgcaaaaagagcaggtgccaagaaagtcctcatagttgactgggatgtgcaccatggaaatggcacacaagagatattcgacggggacaaaacagtcttgtacatatcattacatcgtcatgaggatggaaacttttaccctggaactggagctgctcatgaggtgggagttcttgatggtcaaggattctcagttaatataccttggagccgtggtggtgttggagatgatgactacatctttgcttttcagactgtggtgcttccaatagcttcagagtttgccgcagacatcactataatatctgcaggattcgatgcagctagaggtgaccctctgggttgttgtgacgtcactccaactggatactcttggatgacatccctgctagctggttcctcaaatggaagattgttggtgatacttgagggaggatacaatctccggtcgatatcctcatcagctactgaagttgttaaggtcctacttggggagggtcccaatcgtgcttcatttgtagtttcaccatcaaaagaggccttgagtactgtttctcaagtcctgaagattcaacaacagttttggccagttttaggtccaacatacgcatcactacaggcgcagcaggggtcggtttcttccaatcatagtaatgagctgaagaaaaggaagcgtccaggaggaggaccagggcccttctggtggaagatgggaagcaaaaggcttctatacgaagcgcttattgagcctcgcagccgtccgaggaaactcaaggggtcaactggttcagcagcgccttagacttagatgggcagtttgctggccgttgatcttctagacatgaacagggtagctcgctgaccgcgtttcctcaagcagagtaggctgcgtttacctagaaaacctagttttggctggttacttgcatgatggtcgaccgtttcagatggagtttgacagcaaacccgttgtgttaaccatgcgtggcgtatcagccgatgtttcatgcatgctactgtctttttctttggttggtttcgtaccatagatagacgtgtgtagcgaccatcgatgaagggcga

SEQ ID NO: 1172 - DNA, 1989 bp, Zea mays
  Clone ID: TF_22135466
cttccgctttctcccttactcgcgctcagcacgcaggcgacggcgtcggcgctcaggtcgggctctgggcgacggcgtcatcggcttctcctcccgcctctctccagtcgcctcgcgccctcgcctccggtcctccgcacaccggccggtgaccctgcaaaaggaaattttcatggctgttaatgaggagtctgagggggagcaagctggggcaacactggaggatctgtttttctttaatggtgaagaggatgatgacagtgattgggaacctgctagtcgccttgttgtgaatagatggttttgcttgaactgcacaatgccaaatgtggacaagattacatattgcatgaattgccgtgagcttccaggatctgttgtagatggatatgatgtcttcaaaaagcaaattgcacaaacagctttgttatctgctgacacagggttgctgccagtgtctacggcgattggttttgatgaaagaatgctgctccacagtgagctagaagttaaaccaaatccacatccagaaagaccggatcgccttcgcgccattgctgcaagtcttgctgctgcagggatctttccctcaaaatgtgctttggtacctcctcgagaaatcacgaaggaggaacttcttatggttcatagtccagaccacattgaaagtgtcgagcagacaaagaacatgctttacagttacttcacttcggatacttacgcaaatggacattcagcatgtgctgccaaacttgcagctggattatgtgctgatcttgctagtttgatagtatctgggcgtgttcgcaatggctttgcgctggtaagacctcctgggcatcatgcaggggtgaagcaagcaatggggttttgtcttcacaacaatgcagcagtagctgcgttagctgcaaaaagagcaggtgccaagaaagtcctcatagttgactgggatgtgcaccatggaaatggcacacaagagatattcgacggggacaaaacagtcttgtacatatcattacatcgtcatgaggatggaaacttttaccctggaactggagctgctcatgaggtgggagttcttgatggtcaaggattctcagttaatataccttggagccgtggtggtgttggagatgatgactacatctttgcttttcagactgtggtgcttccaatagcttcagagtttgccgcagacatcactataatatctgcaggattcgatgcagctagaggtgaccctctgggttgttgtgacgtcactccaactggatactcttggatgacatccctgctagctggttcctcaaatggaagattgttggtgatacttgagggaggatacaatctccggtcgatatcctcatcagctactgaagttgttaaggtcctacttggggagggtcccaatcgtgcttcatttgtagtttcaccatcaaaagaggccttgagtactgtttctcaagtcctgaagattcaacaacagttttggccagttttaggtccaacatacgcatcactacaggcgcagcaggggtcggtttcttccaatcatagtaatgagctgaagaaaaggaagcgtccaggaggaggaccagggcccttctggtggaagatgggaagcaaaaggcttctatacgaagcgcttattgagcctcgcagccgtccgaggaaactcaaggggtcaactggttcagcagcgccttagacttagatgggcagtttgctggccgttgatcttctagacatgaacagggtagctcgctgaccgcgtttcctcaagcagagtaggctgcgtttacctagaaaacctagttttggctggttacttgcatgatggtcgaccgtttcagatggagtttgacagcaaacccgttgtgttaaccatgcgtggcgtatcagccgatgtttcatgcatgctactgtctttttctttggttggtttcgtaccatagatagacgtgtgtagcgaccatcgatgaagggcga

SEQ ID NO: 1173 - DNA, 1795 bp, Zea mays
  Clone ID: TF_22135468
cttccgctttctcccttactcgcgctcagcacgcaggcgacggcgtcggcgctcaggtcgggctctgggcgacggcgtcatcggcttctcctcccgcctctctccagtcgcctcgcgccctcgcctccggtcctccgcacaccggccggtgaccctgcaattgccgtgagcttccaggatctgttgtagatggatatgatgtcttcaaaaagcaaattgcacaaacagctttgttatctgctgacacagggttgctgccagtgtctacggcgattggttttgatgaaagaatgctgctccacagtgagctagaagttaaaccaaatccacatccagaaagaccggatcgccttcgcgccattgctgcaagtcttgctgctgcagggatctttccctcaaaatgtgctttggtacctcctcgagaaatcacgaaggaggaacttcttatggttcatagtccagaccacattgaaagtgtcgagcagacaaagaacatgctttacagttacttcacttcggatacttacgcaaatggacattcagcatgtgctgccaaacttgcagctggattatgtgctgatcttgctagtttgatagtatctgggcgtgttcgcaatggctttgcgctggtaagacctcctgggcatcatgcaggggtgaagcaagcaatggggttttgtcttcacaacaatgcagcagtagctgcgttagctgcaaaaagagcaggtgccaagaaagtcctcatagttgactgggatgtgcaccatggaaatggcacacaagagatattcgacggggacaaaacagtcttgtacatatcattacatcgtcatgaggatggaaacttttaccctggaactggagctgctcatgaggtgggagttcttgatggtcaaggattctcagttaatataccttggagccgtggtggtgttggagatgatgactacatctttgcttttcagactgtggtgcttccaatagcttcagagtttgccgcagacatcactataatatctgcaggattcgatgcagctagaggtgaccctctgggttgttgtgacgtcactccaactggatactcttggatgacatccctgctagctggttcctcaaatggaagattgttggtgatacttgagggaggatacaatctccggtcgatatcctcatcagctactgaagttgttaaggtcctacttggggagggtcccaatcgtgcttcatttgtagtttcaccatcaaaagaggccttgagtactgtttctcaagtcctgaagattcaacaacagttttggccagttttaggtccaacatacgcatcactacaggcgcagcaggggtcggtttcttccaatcatagtaatgagctgaagaaaaggaagcgtccaggaggaggaccagggcccttctggtggaagatgggaagcaaaaggcttctatacgaagcgcttattgagcctcgcagccgtccgaggaaactcaaggggtcaactggttcagcagcgccttagacttagatgggcagtttgctggccgttgatcttctagacatgaacagggtagctcgctgaccgcgtttcctcaagcagagtaggctgcgtttacctagaaaacctagttttggctggttacttgcatgatggtcgaccgtttcagatggagtttgacagcaaacccgttgtgttaaccatgcgtggcgtatcagccgatgtttcatgcatgctactgtctttttctttggttggtttcgtaccatagatagacgtgtgtagcgaccatcgatgaagggcga

SEQ ID NO: 1174 - DNA, 2616 bp, Zea mays
  Clone ID: TF_ZmC6866_1
aattcggcacgaggttccgctttctcccttactcgcgctcagcacgcaggcgacggcgtcggcgctcaggtcgggctctgggcgacggcgtcatcggcttctcctcccgcctctctccagtcgcctcgcgccctcgcctccggtcctccgcacaccggccggtgaccctgcgtgcgtgcctctctctctctctctctctcccttcccgcctccggtggatcgtcaacgccgcccggcccgggtggcagcaccgcgcgcgacctgaggggtgagggcagcgggagccagcagccgctgctccaccaaggcggtcgcgccgcttttggagcgcttatgccccccggtccgctgagcgcttagtgcagtttttttggaacatgagacctcctagcagtggcaaaaagactgaggtctcccatagcgtggggaaatgtggggtttctgatcaagcttgtcatggcaaatgccaaagctgtggcattgatgcaaaacctttttgtgctggagtgaacgaagtctccttgttgactggcagtcacactgatgtggaggcctcaaaagagaaccgtggagcatgcagtttgaacaatgatcgtgctgatgctctagaagaagaggccaatgtttccacagctaggataggtcatgttgagagtgctgaccctggtggctctgtgggtgtagaaaaggaaattttcatggctgttaatgaggagtctgagggggagcaagctggggcaacactggaggatctgtttttctttaatggtgaagaggatgatgacagtgattgggaacctgctagtcgccttgttgtgaatagatggttttgcttgaactgcacaatgccaaatgtggacaagattacatattgcatgaattgccgtgagcttccaggatctgttgtagatggatatgatgtcttcaaaaagcaaattgcacaaacagctttgttatctgctgacacagggttgctgccagtgtctacggcgattggttttgatgaaagaatgctgctccacagtgagctagaagttaaaccaaatccacatccagaaagaccggatcgccttcgcgccattgctgcaagtcttgctgctgcagggatctttccctcaaaatgtgctttggtacctcctcgagaaatcacgaaggaggaacttcttatggttcatagtccagaccacattgaaagtgtcgagcagacaaagaacatgctttacagttacttcacttcggatacttacgcaaatggacattcagcatgtgctgccaaacttgcagctggattatgtgctgatcttgctagtttgatagtatctgggcgtgttcgcaatggctttgcgctggtaagacctcctgggcatcatgcaggggtgaagcaagcaatggggttttgtcttcacaacaatgcagcagtagctgcgttagctgcaaaaagagcaggtgccaagaaagtcctcatagttgactgggatgtgcaccatggaaatggcacacaagagatattcgacggggacaaaacagtcttgtacatatcattacatcgtcatgaggatggaaacttttaccctggaactggagctgctcatgaggtgggagttcttgatggtcaaggattctcagttaatataccttggagccgtggtggtgttggagatgatgactacatctttgcttttcagactgtggtgcttccaatagcttcagagtttgccgcagacatcactataatatctgcaggattcgatgcagctagaggtgaccctctgggttgttgtgacgtcactccaactggatactcttggatgacatccctgctagctggttcctcaaatggaagattgttggtgatacttgagggaggatacaatctccggtcgatatcctcatcagctactgaagttgttaaggtcctacttggggagggtcccaatcgtgcttcatttgtagtttcaccatcaaaagaggccttgagtactgtttctcaagtcctgaagattcaacaacagttttggccagttttaggtccaacatacgcatcactacaggcgcagcaggggtcggtttcttccaatcatagtaatgagctgaagaaaaggaagcgtccaggaggaggaccagggcccttctggtggaagatgggaagcaaaaggcttctatacgaagcgcttattgagcctcgcagccgtccgaggaaactcaaggggtcaactggttcagcagcgccttagacttagatgggcagtttgctggccgttgatcttctagacatgaacagggtagctcgctgaccgcgtttcctcaagcagagtaggctgcgtttacctagaaaacctagttttggctggttacttgcatgatggtcgaccgtttcagatggagtttgacagcaaacccgttgtgttaaccatgcgtggcgtatcagccgatgtttcatgcatgctactgtctttttctttggttggtttcgtaccatagatagacgtgtgtagcgaccatcgatggaaaaaaaccttgcacatctggaacggcatgcatctcagttattagccaaaaaaaaaaaaaaaaaaactcgcggcgcggattttctgtgcgacttgactgccctgtgcc

SEQ ID NO: 1175 - DNA, 590 bp, Zea mays
  Clone ID: TF_LIB4730-068-R1-K1-E12
gggtaccctcgggctcgccgggatcaactcacaattccgcattcgatccaactcctgagcactttctcctcgtccccgacaagccaatcgaagccgagatacggtcatggactccaccggcaccggagcagggggtaaggggaagaagggagcggccgggcgcaaggtcggcgggccaaggaagaagtcggtgtccaggtccgtgcaaggccgggctccagttccccgacggtcgcatggggccctacttgaacaagggcccttacccgcatcgtgtcggaaccggcgaccccgtctacctcggacgctgtagttgaatccttcagcgccttgtccgtgagatgtgcgtaggactgctagaccgacctccacttacagtcctactacgtcgccacgctgactgaggctgacgtggcctacctcgtggttctgtatgaggacaccaacctctgcgccatccacgccaagcgcgtcaccatcatgcccaaggacatgcagctcgcccgccgcatccgcggggagcgcgcataggcggtccggcggataggcctggggcccgttgcgcagtctcttctcggaagtttatacta

SEQ ID NO: 1176 - DNA, 370 bp, Zea mays
  Clone ID: TF_LIB4315-045-R1-K1-H10
cccaggcgtgcgaatctccctagcaggagaaccgcgggcaacgacaagcgctagccttcctactgtcccgatggcccgcacgaagcagacggcgaggaagaacactggcggtacggcgccaaggaagcaactggccaccaaggcggcgcgcaagtctgccccggcgaccggccgattgaagaaggcggagcggtaccccccgtcccttcacgctacgggagagccgcagtacccgaagagcacggagctgctgatcccctcgctgccgttccagcgcctggtgcgcgagaacgcccaagacttgcagaccgaccttcaggttccagagctccgcccgcgccgagctgaaggaagcgttcgaggcctacct

SEQ ID NO: 1177 - DNA, 454 bp, Zea mays
  Clone ID: TF_LIB4730-025-R1-K1-G11
tctgatcctcactcgttcggtggcccgcccgaataccacgccgacgaagtccagcggcgtcagcgcgccgaggaaccagctggggactaaggaacccctctactctgcccctgtgaccggcggagtgaagaaggcacaccgtttccgccccggtaccgtcgtgttcagatatatccgcacgtaccacaccactcaggagctgctgattaacaacatgtccttcagcgcctggtgttccagatcccagaggactccaggacctgacctgcggcttagatgagctctgctgtatctcttctgacggacgcttatggagggctacctcgatcccgcacttcatcgagggtaccctctgatgccatccactacacgcgcaacaccgtcatgtccaaggacttgcagctagccccactaatacgaggacaaaaggcctaagctgcatactttctgccat

SEQ ID NO: 1178 - DNA, 1417 bp, Zea mays
  Clone ID: TF_ZmC11101_1
cctcgaggccggccgggaaaaaaactacggcccatccgctaattttggctcggcccataacaattctgattacgcgactcgctgatcgccagcttgtggtacgcgagccgtacgcctcgacggccccggatatcctctagcgccttcccacaatcgcgcttctgcggttctgccgccgacgtccgcgccgccgacgtccgcgcccgcgtccctcgctgctttgccctctccaccctccgccatcaccgccgcggcgtccttctgtaccggatccgtcgcagccaccactccgcagatccgctgggttgacgtccacggagctgctccggggatgtcgtcctccgcttccagcgtcgagggcgacgccgccggagagttcacggaggtcgtaatcgtgcgtcacggcgagacgtcatggaacgcctcgcgcatcatacagggacacttggatgcagagcttaatgatattggaaggcagcaagctgttgcggttgctcatcgtctttctaaagaagtgaaaccagttgccatatactcttctgatctgaagcgagcagcagagactgcgcaaacaattgcaagaatttgcaatgtgccaaatgtcgtgttcgatccagcactgagagaaagacacattggagatctgcaaggcatgacgcttcaagatgctgctacagagaggccagaggcatacaaagcttttatgtcccacaagagaaatcaacaagttcctggtggtggagagagtcttgatcaactgtcggagcgatgtgtgtcttttctgtacgacattgttggtaaacacaaaggggagcgagttatcctggtttcacatggcggcaccatcagagagctctacagacacgcgagtcccacgaagccgctccacggcaaaatacacaacacgtcggtgagcgtcatcctcgtgtccgacgccaccggccggtgcatcgtcaagatgtgcggggacgtcagccacctccaggagacgggcgtcctggagaacgccttcggtggcgacaagacctccgcctgagattccaacattcatcacgcgccgagagctctcggcaattatcacgcgccgagtgagcgctcgtttcggccgtctttttttccactgtaccaatcatcctgttgctaccagtagtggtctagcggagaatgatgcacacttccccccgctgggaacgcggcgatttttgctggaacagttgaaggccgagccggggcgaatccttttggcctggccgtgcactgcttgctgaactgcacgtacgcatgtggagctgaaacgatctgcgttcgctcaaaaaaaaaaaaaaaaaagcggccgaggggggccgaggcctacctcgtggggctctttgaggacactaacctctgtgccatccacgccaagcgcgttaccatcatg

SEQ ID NO: 1179 - DNA, 395 bp, Zea mays
  Clone ID: TF_LIB3180-021-P2-M1-B6
ttattcctcgcgcggcgaccacccaattcgaagcgttctgagagaccgaagaagcggtagaaatggctcgtaccaagcagactgctcgcaagtccacgggagggaaggctcccaggaagcagcttgccaccaaggctgtccgtaagtctgcccccaccactggtggagtgaagaagcctcaccgctaccgtcctggaactgttgccctccgtgagatccgcaagtatcagaagagcactgagctgctgatcaggaagctgtccttccaaaggctcggcagggaaattgcacaggactttaaaactgattttgcgtttccagagccattcggtgcttgcccttcaggaggcttctgaagcataccttgttgtcctgtttgaggacaccaacctttg

SEQ ID NO: 1180 - DNA, 699 bp, Zea mays
  Clone ID: TF_LIB5027-070-A1-XP1-H5
tcgggctaatactagccgtcctctgttgatcgtaccaccaccgctcacctctgtgttggctttctcacctcttccaacacgattctcactccgggttgcgattgccctcggctctgtccctaacgaatgtagcgtggcggggataggaaggcgatcgattcacgcgccgacgagaaagccacggacagcagctccaagtctgatcttcgagtgccccgcgataaggatcgccagtctactcaagggccgcaagtatagacacagagagtgcaagccggcgcccctgtgtacctccctgccgtgctccagtatcttgctgctgagggtcttgaactgtgcgggaatggcacactggacaacaagaagacccgccatcgtaccgacgtcctactttctctatctacgtactaaactagcataataagatctcccacttgatgagcaccgtgagcatcgctatcgtcgatgcaatgcccaacatccataacctgttttgtcccgaagaatgacgatggcttgcatctatcaaggtctcgtcttcgtcgacgaatactatgtccttgactacgcctggtggcacctccagaatagctgccgcatacgacatgtgctccgtgtactacgctaggcgtgccctgtacctgcctatgtgggtttctgctacactgcataactaagttactcttgcgcttgctaacg

SEQ ID NO: 1181 - DNA, 440 bp, Zea mays
  Clone ID: TF_LIB3595-050-Q1-N6-G7
aataaccagcggagtagatcatctatgttccacagcagggtaataatgatctaggagggccattacatatccggcgcgccggatttattgggcaggccacctatctactaggacagaaaaggtggggcgctctggggaaaggacacagcaaataacccttctaacagatccgctgatcccgcatcgcgctcagttgctggtgaacttggcgacggtcttggtttcctcttgaacggcgtgcttggcgagctctccagcgaggactatgagcacggggggctggatctcgagggacatgatggcgggcttgttgttgtaccacgccatgttggcgggcttgccggccagcttcttaaaaatggcgatgatgcaaggtagttcatgatggaaactggtcttggatgatatgccgatgacggggtgcacctgctttagcacct

SEQ ID NO: 1182 - DNA, 385 bp, Zea mays
  unsure (1)..(385): unsure at all n locations
  Clone ID: TF_LIB4730-034-R2-K1-E1
ggcgagagnagnacnaaggagggggaccncctgggaagcccncggggngcanncccggggaaaaaaaaaaaaaaacacgggaggagaaggggggaccccagcaancccnaagcagaagccggccanccncacncgcncgagggcccgcacgaagcagacggcgaggaagnccaccggcggcaaggcgccgaggaagcagcnggcgaccaagggggcccgcaagnccgccccngcgaccggcggagagaagaagccccaccgcnnccgccccggcaccgncgcgcnccgggagaaccgcaaggaccagaagagcacggagcngccgaaccgcaagcagccganccagcgccgggggcgggagaacgcgcaggaagncaagaccgac

SEQ ID NO: 1183 - DNA, 299 bp, Zea mays
  Clone ID: TF_700086025H1
cccgagtctccagccaaccacatccagtccaccccatccccctcgaccccgacaaccccgagtcccgacccgatggcgcccaaggccgagaagaaaccagcggagaagaaaccggctagccgaagagtaagctgagaagacgaccgcaggcaagaagcccaagtccgagaagcgcctgcccggctcgaagttctccggcaaagaaggcggcgaaaagaaggggaagaagaatgccaataagaacgtggagacctacaaaatctagatcttcaaggtcctaaagcaggtgcaacccgaca

SEQ ID NO: 1184 - DNA, 533 bp, Zea mays
  Clone ID: TF_LIB4827-018-A1-N1-G11
attgggttctaaaggcggcgggatacttctgtcctaatcctccaaaatacggggaagacggcccggtgataccaactgatcaagagaaaggcccccaaccgctatcaaccggagtattgatggcgcctaggggggaacgaagcaggggctatgataccgcacgacgaggagcctgtcccgagaaggtgagaatcgtccggaagggaagaagtactaggaggagaagcgcctcccctccttcaagtacgaccccggcgaggtccacaacggcaagaacaaagacaagacgagcgtggatcacctacgagatctacatcttcacggggatgaagcaggcgcaccccgacatccgcatctcgaccgagggcatgtccatcatgaattccttcatcagcaacgtcttgctgacgttcaccgcgtagtccgccaagctcaccctgataccacaggacgcccaccatcacctcccgggagatccagacctccgtccgcatgcaccctaacggcgagctctccaagtacgccgtctctga

SEQ ID NO: 1185 - DNA, 488 bp, Zea mays
  Clone ID: TF_LIB4764-069-R1-K1-F8
cattgggtacctcgaggccggccgggaggcaccaccaggtgattaagctctcacgcgcatacgcctagtttgctctcctgccatgaaggatatcgcatcagagtgtacccatagcaaggcagcgtagccggtagaaaggccaacaacgaagggcgtcgagacaaggctgccaggcccacgaacaagtatctgttacggcctgcgaaagccgggctgcatcttcccgctggtcggatcggtcgttacctcaagaatgttcgtcactcgaagcgagtggtcactgtcgcccccgtctatcttgccggagtgcttgagtactctctctcgctctgaggagctggacctgggcgccaacgcggctaaggacaacaagaagacgcgcatcgtcccgcgacacttgctcctgtcgattcgtaacgacgttgagatcggcatagctgatgactggcgtcaccatcgcgcacggcgactgtcctcctcaacatcaa

SEQ ID NO: 1186 - DNA, 293 bp, Zea mays
  Clone ID: TF_LIB3245-260-P1-N1-C6
gtccttagcctaaattcctggaacaatgattgggagggttcttactttattcaagtccactgtcggaactgccctatcgtagcctgtacataccaatgcttccctcgagtatgtctaatcgaccggctgcttgaagaagcctcacctctttctccctgtcaccgtgttgctgctctagatccgcatgtaccagaagagcacggatctgctcatacgcaagctgcccttccagctcctggtccgcgagatctttcatgactttaagaccgacctcctttttcagtcctccgtct

SEQ ID NO: 1187 - DNA, 433 bp, Zea mays
  Clone ID: TF_LIB4740-076-R1-K1-A9
ggcgccctcctccctggcgctcgctccctgcagggagcagtttcccgggggcgacggcccagccatggcgcctttcttagtcgggcagagcctcggttctccctgcagaaggtccaggagtgatggaaaggcagggtactgaggaagcaggtcggcaccagggaggcgaggaagtgggagccgatgagcgtcggaggaaagaggggggggggggacagggcgcgaaatcgtggcgctgcgcgagatccgaaagtaccagaagagcacggagctgctgatccgtaagctgcccttccaggcgcctggtgacacgagatcgcgcaggacttgaagacagacctgcgattgcagagccacagcggtgctggggctcaaggagggccgccgagggctatctttgtacggtctctttgaggacaccaacctgtggagc

SEQ ID NO: 1188 - DNA, 506 bp, Zea mays
  Clone ID: TF_LIB3637-204-Q1-N6-D3
tttttttttttttttttttttttttttttttttttttttttttttttttttttttttttttttttttttttttttttttttttttttttttttttgggggaaccaggcattaaagagggggccccttttttgggaacaaatacagaacttaatccttagcagggacaaggagtaacttagtttagcgggggtacagaaacccaaatacccaggtacaaagaaaacctaagggactaaaaaaacacatggtgatacgggagcatccggggggggccaccagggggaggaaaggacttagtcctgggaaccagccgaaaccttggggctgccgccgccggcctttttggggagaaaaagggtatgggtggggggcattacaccaccggtggggaggggcaccgggcccagaaagggggaaagctttttgtcgttgcggacgggaaactggatgtggcccggaacaaagggggtttttttggtgtcacgggccgaattggcggccagct

SEQ ID NO: 1189 - DNA, 268 bp, Zea mays
  Clone ID: TF_LIB4148-023-Q1-N1-H1
gaaagatcagcacattgctttaattcaatcacacgcaaatcataataagccatcgctagcagtcatcacataaactgagccacgcgtaccggcgacgcccatcatgaccattacaaggatcctaggacgaggtgaactaccaaacgggcttagtgccctaggagaccgtgtgcttggggaggtccccggagaggaccaggcgcaccgaggtctggaactaccgggaggtgaaggagggcttcttgttgtagctcgccaccgaccccta

SEQ ID NO: 1190 - DNA, 460 bp, Zea mays
  Clone ID: TF_uC-zmroteosinte016h05a1
gcaggaacaagttcattgataaattggagaaatgagcaatcacagttcattgcactgaaaccaatacatctagaacattactcctacaggataaggaagccacgaaacgaatgccaccatctacttttagtaacaatacaacgacgagcagcacgacgggcgctcaagccctctcgcccctgatgcgccgcgcgagctggatgtccttgggcatgatagtgacgcgcttggcgtggatggcgcaaaggttggtgtcctcgaagagacccaccaggacgcctcggcggcctcctgcagcgccgcgacggcggaggactggaacctcagatcagtcttgaagtcctgcgcgatctcgcggacgaggcgctggaaggggagcttgcggatgagcagctcagtgctcttctggtacttgcggatctcgcggagcgcgacggtgccggggcggaagcggtggggc

SEQ ID NO: 1191 - DNA, 251 bp, Zea mays
  Clone ID: TF_LIB4300-003-R1-M1-B5
caccgcgccacatccagctcgccgttcgcaacgaccaatagctctcccgtttgctgggcacggtgaccatcgctagcggtggtgacactgcccaacattcataaccttttgctcccgaagacacgacgagcagcaggcagcgtctcaagggtgcgtgattggtgacaggagactaagtccttgactacacctggaggcaccgttcacaatgctgtcgtgtctacatgtgtctagagtagtacctttggcct

SEQ ID NO: 1192 - DNA, 389 bp, Zea mays
  Clone ID: TF_LIB3227-021-P1-K1-E2
ctcttatttttttttttttagaacctttatatttttttttattcttcagttgtatgagtttttgtttttttttactccagagaaaccggaaaaaggcgaagaagggtgccggcggggcaagggagtcggacccagtacgaactaagagacgccgtccgtaaaaaacgggctgcaattccccgccggccgcaaaaaacgcgggctgaagaaggcccgccactcgcagcgcgtgggcactggcacccccgtataccgggacaacgccctgaaaaacctcgccctcggggaactggagtaggcaaggaacgcggccaaagaaaacaagaagacgcgcggggggccgcgccacaagcttctagcgatccgcaacgacgaggagcttgggaagc

SEQ ID NO: 1193 - DNA, 425 bp, Zea mays
  Clone ID: TF_LIB4758-140-A1-K1-E2
ttgggtacctcgaggccggccgggaatttatgccctaagattgactaccctagccctcaccctactcgatagccgtgccgacaccaccgaagacaggccctacatgagtcagctccgatgacactgcttccgagctacccggactccacgatcccactcatcctccatgtcaccaaggctgcccggaagactagcccccaccattggcggatcgaataactctcaccgctactcgcactgcaactgaagccctcagggagatccgaaagaatcacaaaagaactgaaatgctgatctccaagctgcccttccagaggctcggcgggtaaattgtgcagcactccacaactgacatgcgatgccaaagccatgcggtgattgccctctaggaggctgcagaggtataccttgctactactgtttga

SEQ ID NO: 1194 - DNA, 267 bp, Zea mays
  unsure (1)..(267): unsure at all n locations
  Clone ID: TF_LIB5026-053-Q1-XP1-C6
cctgtgcggcgctcgagcggccggtttcgatcactcgcattcccattcgttccactcctgagcactttctcctcgtcccagacaagccaatcgaagccgagatacgaccatggactccaccggcaccggagcanggggtaaggggaagaagggagcggccgggcgcaaggtcggcgggccaaggaagaagtcggtgtcgaggtccgtgaaggccggtctcccgttccccgtcggccgtatcggccgcttcttgccccagggccgcta

SEQ ID NO: 1195 - DNA, 197 bp, Zea mays
  Clone ID: TF_LIB3150-077-P2-N2-B2
cccaaggtcccttttttttctcgatctggaagcgcgcgcagtagcagccatggacgtgagcggagcatgcgggaaggcgaagaagggcgcggccgggcgcaaggccggcggtccgacgaagaagtcggtgtcgcggtcctccagggtcggtctgcagtttcccgtcagccgagttgggcggtacctcataaagggcc

SEQ ID NO: 1196 - DNA, 349 bp, Zea mays
  Clone ID: TF_LIB3357-024-P1-K1-D4
ctcgcattttccttgcaaccgattgcctatccccctcccaaccaaagaccgatggcgcccatgggcgagatgtatgcccgcggcgaagaagccggtggaggaggagcccgcggccgatatgactaccgtcgggaagaagcccatggcggagaagcgggtccccgctgtctagtccgtcggcttggatggcggcgtgggcaagcgtggcatgaagtagggcatgattagcgtggagacgtacatgatctacatcttcaaggtgctgatgctggtgcacccggacatcggattcttctgcaaggccatgttcatcatgaactccttcatcaacgacattttctagaagctg

SEQ ID NO: 1197 - DNA, 289 bp, Zea mays
  unsure (1)..(289): unsure at all n locations
  Clone ID: TF_uC-zmroteosinte032e10a1
ctctagggggnatgcgcggttttttcctttcaagcggggaaagggaccgcttacacaatacagttactttcttacataaaagacatcaaccgggcccaaaaagcaaacacagtgggaactaccaccgcggctacacagctaaccgttctactttggtactactgcaagaagaggagactagtgcacgtcacattgtttggcttggagctggtgaacttggtgacggctttggcgccctcggagaccgctggcttggctagctcgccgggtaggtcaaggcggacggggg

SEQ ID NO: 1198 - DNA, 278 bp, Zea mays
  Clone ID: TF_LIB3150-071-P1-N1-E2
ctctagttttggcgcccacaggcaaattctcgtgcactcaatcgcgagcataggcagcactgcatgcatggacgccagcggagccggtagcatggcgattaacggggcggctgggcgcaaggctggcggccccatggaagaagtcggcgtcgcggtccagcaaaggccggtctggagttccccgtgagccggatcgggcgctacctgatgaaggggcggggcgcgcagcgcgtgggcaccgtcgcccgcgtgtatctaggcgacgtgcttgagtacct

SEQ ID NO: 1199 - DNA, 412 bp, Zea mays
  Clone ID: TF_LIB4185-034-R1-K1-G10
cccctcgagttttttttttttttttttttttttttttttttttttttttttttttttttggaacaaacggaaggtcacaatgggctttttttaaaacacgcacaacaggctggatctagggctacataaaccagcattttccccgtcaagccacaccttgggaattgcaaaaacaaaaaccgcagcgacaacagggaggcgcgagcgcaaccgggatagcctacccgccgaacccgtaaagggggcggccctggcgcttgagcgcgtaaacaacgtccatggctgtgacggtcttgcggggcgcgtgctcggggtaggggacggcgtcccggatcacgttctccaagaaaaacttgaggaccccgggggtctcctcggaaaagaacccggagaagggctttaagccgcccct

SEQ ID NO: 1200 - DNA, 463 bp, Zea mays
  unsure (1)..(463): unsure at all n locations
  Clone ID: TF_LIB4975-015-R1-K1-D7
cngtacacaaaactgctccctctgcaatgctgtactcgcactgctcagatgcgcgcctcgcaatttctccactgttccaagacgctactcgcttcgtatcccgaacgccatctgctctttcactaacgatatgtagccatgtcggcagagaggtaaggcgatcggatcaggtgccgacaacaacgccacgttcagcagctccaaggctggcctcgagttccccgtgggaaggatcgccaggctcctcaaggccggtaagtatgccgagagagtcggagccggcgcccctgtctacctcggtgccgagttcgaatatcctgcagctgaagctgttgagctgatcgtcctcgccgaatgggagagaaagaagatcctgaacgtaccatgcctgatccccacggcgccagggagaggaagactccccgcacgggctgcttatgcgagacatcagtagccctggagg

SEQ ID NO: 1201 - DNA, 1009 bp, Zea mays
  Clone ID: TF_ZmC2089_41
aatcacctcagcagcacagctcagcttccacccactctcaacccctcccgccggagcccaagcaaggaagcgacgatggacggcagcaaggcgaagaaggtggcggcgaagaagttcggcgggccgaggaagaagtcggtgaccaagtccatcaaggccgggctccagttccccgtcggccgcatcgggcgctacctcaagaagggccaccacaccccctcctcccccaccctccgctcccctctcgccgcccattgttctgcctgcgggaaccatctcatatctcggccaagatgagggaaatcctgcacatccagggtgggcaatgcggcaaccagatcggtgccaagttctgggaggtggtgtgtgatgagcatggcattgacccaactgggcgctacaccggtacctctgacctgcagttggagcgtgtcaatgtctactacaatgaggcctcctgtggtcgctttgtgccccgggctgttcttatggaccttgagcctggcaccatggacagtgtccgcactggcccttacgggcagatcttccgccctgacaacttcgtctttgggcaatctggtgcgggtaacaattgggccaagggccactacaccgagggtgctgagcttatcgattctgttttggatgttgtgaggaaggaggctgagaactgtgactgtctgcaaggattccaagtatgccactctcttggtggtggtaccgggtctggcatgggtaccctgttgatatctaaaatcagggaggagtaccctgaccgcatgatgctgacgttctcagtgttcccctcaccaaaagtatctgatactgtggttgagccatacaatgcaactctctcagtccatcagctggttgagaatgctgacgagtgcatggttcttgacaatgaggctctctatgacatctgtttcaggactcttaagctgaccacacctagctttggggacttgaaccatttaatctctgctaccatgagtggagtcacatgctg

SEQ ID NO: 1202 - DNA, 438 bp, Zea mays
  Clone ID: TF_LIB4730-062-R1-K1-C2
ctgcttacaaggaaggcggactgggccccaacaaggaatacagccctaggcaaagaaagcgcctatccgatgggcaaaacctccagcaaagcgagatgatagggcaatatggggaaaagagaaggctaaaaagtccacggtagtaccttgacaagaactacatcttcaatgtgatgaaccaggtgcaccctgacataggcatctacttcaaggctcatgtccataatgaactccttcatcaacgacatcttctagaagctcagcgtggcgagtccaccaagctgtcgcgctataacaagaagcccaccgtgacctcccgcgagatacagagctcggtgcgcctcttgctaccaggctagcttgccaagcacgccgttctgcgaggtcaccaagagccgtcaccaagatcacattgtgagtacgtgcatagtactaggc

SEQ ID NO: 1203 - DNA, 646 bp, Zea mays
  Clone ID: TF_LIB4732-087-A1-K1-B7
gctattcttgtcctggcatccgcagagatgttgttctgttctgctgaccatttagctgttgccccgccgcgcatgaggaagaagagagcagaggaggatggctcgtacgaatcataccgcccgcttgtccgcgggaggcaatgccccccgcttgctgctcgtcaccaaggcggcgaggaagtcggcgtcgactaccggcggagtgtagaaggcccacaggtacaggcccgtgaaccgtggcgctgctcgagatccgcatgtaccataatagcactgagctgctgatccgcaagctgcccttccatggcctggtgcgcgagatcgcgcaagacttctagacagacctcgcggttccatgagcctagctctgttatggtgctccaggaggccgtcgaggcctacctcgtcggtctcttcgaggacatcaacctctgtgtcatccacgctaagcgtgtctccagtcatgcccataggacattgagttcgtccgccgcatccgtgttgagcgcgcgtagacatcatctccggtgatctgatgaatgtctagttaccaatacaatgtatgctgtattagcgtctctgttctgtattcgatattttggattcggatgcagtgaacaactgctttacctatgaaaaagaagaa

SEQ ID NO: 1204 - DNA, 438 bp, Zea mays
  Clone ID: TF_LIB3632-044-Q6-K6-D7
cgactgagccaagctcagccatcgacttgctgtctgagtcctctatagccgcttcgatggactgcacgatgcaaacagctgggaagtcgaccggcgagaaggcccccagtaagcagatggccactaatgctgcgcgcaagacggccagggccaccggcggggtgaagaagccgaaccgctggcgccccgagaccgtcgggctagcgcgagatgcgcaaggaccagaagagaactagatctgctcatccgcaatctgcccttccagcgcctcgtcgcgcgatatcgcgcaggactgcaagactgatctgaggtcacagtcctccgctcgcaagacgctgcaggaggccgacgaggcgtacctggggtggcttttataggacaccaaccttagggccctccacaccaagcgcgtaactatcatgcccaacgtcatccatc

SEQ ID NO: 1205 - DNA, 341 bp, Zea mays
  Clone ID: TF_uC-zmflteosinte39a06b1
gcctaatctcgccttccgaggaaacccacctgtttaccacagacccgagcggaagaagccatgtccgggcgcgcaaggggtggcaaggggctcgtcaagggcgggacgaagcgtcaccggaaggtgctgcgcaacagcatccagggcatcaccaagccggcgatccggcggctggcgaggaggggcggcgtcaagcgcatatatgggctcatctacgaggagacccgcggcgtgctcacgatctcactccagaacgtgatccgtgatgccgccacctacaatgagcacagtcgtcttatgaacggcacagccatggacgtcgactacgcgctcaagcacca

SEQ ID NO: 1206 - DNA, 323 bp, Zea mays
  Clone ID: TF_LIB3227-021-P1-K1-A10
ctttaccaaatacaccgccggctctgtttgcccatcttcacgccaagcacggaatgtccgatggcttgtttcgaagcatacagcgctcaagtcgacgggcggtaaggcgccccctaagcagctgtccaccaaggcattacgcatgtctgtccccgcaaccggtggcattaagaatcctaaccgcttccgtcccgacaccgtttcactacggaagattctcatgttccatatgagcacggagctgctcatgtctatgctgaccttccagcgccttttccgtgtgatcgcgcaggattttaagaccttccttctcttccagtcct

SEQ ID NO: 1207 - DNA, 343 bp, Zea mays
  Clone ID: TF_LIB3279-011-P1-K1-F2
cagaacttaatttcttgcgcccacagccaatgttttttcaactcaatcgtggtttaagcgtggtgctgcacacatggacgccagcgtagcaggtagaacggcaaataaaggggcgcctgcgcgcaaggttgtcgcccccaggaagaaatcggtgtcgagaatcattaaggccgcactgcaatgtctcatacgacggatcgggcgctacctcaagaagggtgaggcactcacagctcagttggcactcaggcctatgtgtatcttggcaacgtgctagaatacctggccactcatgtgcttgagctcgccgggaacgcggtgaaagacaacaagaagacgcgca

SEQ ID NO: 1208 - DNA, 487 bp, Zea mays
  unsure (1)..(487): unsure at all n locations
  Clone ID: TF_LIB4730-068-R1-K1-G9
ccgttctcaaaccaacctagcaattcgccgcagcctctcaccctntgtagggcggacctcccgcagccgccgcacagatggcacccaaggcggagaagaagccggcggccaagaagcccgcggaggaggagcccgcgacagagaaggtggagaaggctccggcggggaagaagcccaaggccgagaagcgcctcccggcgggggggggggggagggcggcgagggcaagaaggggaaaaagaaggcgaagaagtccgtggagacctacaagatctacatcttcaaggtgctgaagcaggtgcaccccgacatnggcatctcggccaaggccatgtccatcatgaactccttcatcaacgacatggtgggagaagctcgcgggcgagcccgtttaagttggcgcgctacaacaagaagcccaccatcatctcgcgggagatccagaccttggtgcgcctggtgcgccgcggggagctcgaaaagaacg

SEQ ID NO: 1209 - DNA, 415 bp, Zea mays
  unsure (1)..(415): unsure at all n locations
  Clone ID: TF_LIB3279-194-Q1-K6-F7
ccgggncgacccagcgnccggnnctagnacgcgagcggccgcgngacgngcgngaggagncnggagncggacgggaacgaaaaggcgaaaacccagnggcncgaggnnccccggagcggaggcganggcngggaagggagggaaaggcnngcncgccgcgaagaccacggcggccaagnccgccgngaaggacaagggggagaagggcccaancncacgcnccncccgcgccggcccccagnncccnngggggcggnnccaccgncagcngangcaaaggacgcaggcaaangggcgcgnnggggccaccgcagccgncnaccccgcngcccccccggaggacccgaccgccgaggggcnggagccggcggggaaggcnngcaaggagcngaaggggaagcggggcaccccncgc

SEQ ID NO: 1210 - DNA, 417 bp, Zea mays
  Clone ID: TF_jC-zmshLIB3587P023b04a1
ggtaacagccaaacccatacccagtggggattaacaccacataatgtggggtaatcatcccaaatggactatatagtactagggatcaactaacagaaatgacaagcatgttcgttgcggttttaatccaccggtttctgttttttctacagacagcagtagtccgaacggttttaattcagcagcagtgaacaacccaactcaggcattttgcaaaacatgcaccacattgtttgcctaaactttaaacctgcataaaggaactttttgggcgacttggcggaggcggccttcttgggagacttcttctctttgccttccttggcagcagcgacagcggttttcttggggagcagcacagggttgatgttgggcagaaccccgccgtgtgcgatggtgacgccggccagtagcttc

SEQ ID NO: 1211 - DNA, 369 bp, Zea mays
  Clone ID: TF_LIB3079-024-Q1-K1-D7
gattagaacctctaaaatttcccccactcgcctgtcgaagcagaacctgtagcattcatggaggccagctgtacacggtagcaaggggaagatgggtgcggacgatctcacggcacgctgttccaggaagaagtttgtgacgcggtccttcaaggcctgtctgcagttccccgtcaacctgatcggactctacctcacgaagggccagtacgtgcagcgcgtgaacactgtcgcgtacgtctacctagtcgccgtgctggaatacctcgtcggcgaggttctcgaattggcaagaaacgccgcgaacgacagcattaacacgcgcatcatcccgctccacgtgctattggcgatccgcatcgacgagga

SEQ ID NO: 1212 - DNA, 502 bp, Zea mays
  unsure (1)..(502): unsure at all n locations
  Clone ID: TF_LIB4744-058-R1-K1-C4
ggtaccctcgggttcggccggnaaccaagcagtatgacttctctgaggagaggcctgctcgtaattcctcgtgggagcgaggacgtgtacgccttcgtgacgcaaaaaaacagaagcatcactagagttataccggacgggaaggatcatgcgcggtgagaacggggaagagactcgacaaccatgtctccaatctgtgtgccccggtacagctcgatgatcaggagcccaagctttgcctacgacgaccctatggtctactttggatccgactaccgcagaggattactgcatggaagatcggaccactggggatcgacggactgccgcgggagaacactcaggatttagagacagacctgagctaccagagtgttagcgggctccccgctgcaaggggcgttacagggctacctcgtcgggctcttcgaggacaacaaactttgcgccattcacgccaagcgcgttaccatcatgcccaaggtcatgcagctcgcccgcc

SEQ ID NO: 1213 - DNA, 448 bp, Zea mays
  unsure (1)..(448): unsure at all n locations
  Clone ID: TF_jC-zmX700043548a1
ggaattcggctcgaggcattccccatttccgattcccaatttagttttttcctaccagcctctngcaaactcaggagagggacccgatggcacccaaggcggacaacaacccggcggcgaagaagcccgcagaggaggagcccgcggccccggcggagaaggcccccgctgggaagaagccgaaggcggagaagcggctcccggcgggaaaatccgccggcaaggaaggcggtgttgacaagaaggggcggaagaaggccaagaagagcgtggagacgtacaacatctacatcttcaaggtgctgaagcacgtgcacccggacatcggcatctcctccaaggccatgttcatcatgaacctcttcatcaacaacatctttctagaagctcgccgggaaggcgccaagcttgcccgttacaacaagaagcccaccttacctcccgggag

SEQ ID NO: 1214 - DNA, 697 bp, Zea mays
  Clone ID: TF_LIB4975-035-A1-K1-G6
attggtacctcgagccggcgggcgggatcgctctcccacgatcgagccgctccggtcatcttccctctcgcctctgccaccacttccactcccctatcgtcctgtcgtgataaggaatgttgccactcgcaccagtgattgttgctggcggctctaagaatgcgaatcccaggtgctctctcggttgctttgctgattcccgtgctgaggatcgctcggctcctcaagggcggcaagtactaccgagcgcgtgggatccggcgcccctgtgtacctcaccgctggactccagtacctcgacgctgaagtcctgtagcttgctgggaacgcatcgaggatatacacaaaaagacccgcgtcgtgccgcgacacatccacatcaccgagagctacgacaaggagtctcgacctacctgctgtgtcgatgcacaccatcgctgcagaagttcctgcttatgcccacacatctctgcagcacctcctccccaagaatgctggctcgtctcgaggcttccaccgtcgatgacgatgacaactcgtgaactggcccactggataataagattcgctaccgacgtgtatcctatgtatatgacgtgagtactacaacatggctttgaaagctcgatgcgtttgccaatgataatacatcctttcttggatccctaacatcggtgattcatatgtgaatacgggt

SEQ ID NO: 1215 - DNA, 367 bp, Zea mays
  Clone ID: TF_LIB3079-035-Q1-K1-D5
gtacgcctccaattcgttctgaacaggcatgggttaaatcgagcaagcaatgacacgaggagagggatcatacgaagcatagcgccaacaagaccaccggaagctaggccgcacgcaagcacctgggcacgaaggtggccaggaagtcggcgccgacgaccgcacgcacgaacaagcccgacaagtacaggcacaggaccatggccctgaccgagatcctgaagtacaacaagagctcccagctgatcatccagctgttgatcttgcagcgcctgttccatgagatcgttcacgacatcaatacggatttgcagatgcagatgcacgcccagatggacgtccaagaagccgtcgaggaatacctcga

SEQ ID NO: 1216 - DNA, 395 bp, Zea mays
  Clone ID: TF_LIB3070-005-Q1-N1-G9
acccaaacttcttacaaaggaacccaattccgcaaccgtcagcctatttcaatagccccccttgcctatactataccctccatcaatgaaaccttcttatgatacacctcaagctaagaccgtcttcctatacaacaaatccaacgccgaaatactcctccctcatcacaagtccacaagcatagatggtggcgagaagaaggctaagaagaaggcaaagaagtcggtggaaacgtacaatatctacatcttcaaggtgctgaatcaagtgctcccggacattggcatctcgtccaaggccatgtccatcatgaactccttcatcaacgacatcttcgagaagctggctgcggatgcaatcaatctgtcgctctacaactagaagcctaccatta

SEQ ID NO: 1217 - DNA, 479 bp, Zea mays
  Clone ID: TF_cC-zmle18900030g11d1
gcggaaccccgggtagacccacgcgaacgaagcccgattcccaatccagcaaaccctaccagcctctagcaaactcagagagggacccgaaggcacccaaggcggagaagaagccggcggcgaaaaagcccgcagaggaggagcccgcggccccggcggagaaggctcccgcagggaagaagcccaagggggagagccgcacccggcgggaaaatgcggcggcctggaaggcggagttgacaagaaggggcggaagaaggccaagaagagcgtggagacgcacaagatctagatcctgaaggcgctgaagcaggtgcacccggacatcgggattcctgcaaggccatgtccaggatgaactccttcatcaacgaccaactcgagaagctcgccggcgaggcggccaaactcgcccggaacaacaagaagcccaccagacctcccgggagagccagaacctcgatcggctcgatctaccc

SEQ ID NO: 1218 - DNA, 366 bp, Zea mays
  unsure (1)..(366): unsure at all n locations
  Clone ID: TF_LIB4730-002-R1-K1-C8
tatgtcgccggtcctatggcccgaacgaagcaaacacctggaagcgcaccgacggagcgtgacccccgaaagtcagcttcctctaaggctgaacgcaagcggggccccaccaccggcggtgtgaagaagccagaccgtttgcaccccgataccgcgcggcttcacgagattctctcgtaccaaaagagcactgagctggtcatccgacagctacaataacatggtctctttcgagagatcgcgcaagactaccagactgatctgacgttgcaggactccgccgcagctgtgtctgaagaggccnagcgaagaagacctggagaagctcttccaggacaccaacctttgtgtcatgcactccaagcg

SEQ ID NO: 1219 - DNA, 494 bp, Zea mays
  unsure (1)..(494): unsure at all n locations
  Clone ID: TF_LIB4744-070-R1-K1-D6
gcgcggcgatttcccganncgaagcgngcggagagaccgaggaagcgggagagaaggctcgnaccaagcagactgctcgcaagnccacgggagggaaggctcccaggaagcagcttgccaccaaggctgcccgtaagtctgcccccaccactggtggagtgaagaagcctcaccgctaccgccctggaactgttgccctccgttttttttcaaggagcagaagagcacngagcngccgancaggaagggggccnncagaggggcggagggaaanngacaggacnncaaaacggannngcgnnnccagagccaaagcggagcnnaaccnccaggaggcngcngaggcanaccnngnnggccngnnngaggacaccaaccngngcgccanccangcnaagcgngngaccancangccaaaggacanncagcnggcaaggagganccgcggcgagagggccnaancgccaccncaaacancgngacaaaaacangaa

SEQ ID NO: 1220 - DNA, 283 bp, Zea mays
  Clone ID: TF_LIB3227-024-P1-K1-B11
cgcaacgaccaggagctcgggaagctgctgaccggcgtgaccatcgcccgggtgttggtgttgcccaatatcaacccggtcctgctgcccaagaagacggcggagaaggcgtccagcggcgggagcaaggaggccaagtcgcccaagaaggccgtcaagtcccccaagaaggcatagggtttggaggcggatccaatgttgtcatgtgtacgctgtaagcgggcaatgtgattggctatgtattctgtttgctcaagatgctttatggcattcctaaaggaat

SEQ ID NO: 1221 - DNA, 312 bp, Zea mays
  Clone ID: TF_LIB3067-018-Q1-K1-F2
atcctcgcatttcttcccatcccccttcgcaacccaaaccccaactcgccccgcatcgatggcgcccaaggccgagaagaagcccgcggcgaagaagccggcggaggaggagcccgcggtcgttaaggcgcccgccgggaagaagccgaaggcggagaagcgggtccctcctggcaagtccgctgccaaggagggcggcgagggcaataagggcaagtaaaagggcttgaagagcgtttaaacctacaagacctacatattcaaggtgctgaaccacgtgcacccggacattgacatctccttcaaggccat

SEQ ID NO: 1222 - DNA, 1774 bp, Zea mays
  unsure (1)..(1774): unsure at all n locations
  Clone ID: TF_ZmC4285_2
gggtacctcgagccggccgggtctcctccagatgtcatccgcgacgctgtgacctacacggagcacgcccgtcgcaaaaccgtcaccgctatggacgtcgtgtacgccctcaaacgccagggccgcactctctatggcttcggcggctaggttaggtgtgggtaattgcctgtccaggtgtctcggatctgtggnactagtttggntgccttcctgtgntcgtnttgtagnanntgnngtatctggcttgcttttttttcatgatgaaaatactgtttgccgtgtagttctgtaatattttttttgtataatgttaagattgagancaagcatctgtgctaatcttaattattaattgttattgccctcgaggccggccggggggccgaactaggcagcgtggaaaggctacgaagagcggagaggcgctccattgaagcggacggcaacgagctctgcatgctgcgctgcgcccttctcaccgccgccagcccgccagaaggtctcctccccgtctctagagtggctctttctctctccgtcaaatggctctcgcgtgcgcctctcacgcgtgccgctttctcctcgccggccaggcgagatctttccacgcccagccctaccatgccaaggtcggcgtggtggagttcctgaacggcgtcgggaaaggggtggaggcgcacgccgcgaagctggaggaggctgtgggcggcgacctccagaggctccttgaggcccgcacgctgcggctcaagaagctcggcatcccctgcaagcatagaaaattgattttgagttttgcacacaagtaccgtcttggtctctggaagccccaagcagaacccaggaaagttgaataaagttggttcgttcttgaaagatagtctactgttggactgaggcatgtttgggacattgaatatttgctttgtaatttagaaacctcaaacctttgttctctgtctctagccatacttatttgcaaccattacgcaaaaaaaaaaaaagattctagaaagattccaacttattgtgtgtgggtttgctccttttgtaataacaaatcataagactgttggtttcatccctaattcatcaggattaaagtggattgagggaggttttgacttgtaggggattcaatccctctcaatccttgcggtttgataaaaccgaacagggtcaaaggtgcagccccctgtgataatctgtcacttgatgtttgtatttttacttaggtttcttaccaacaacattgcagttttgttaacgtagcctaagtaaattgattaggttcagagttggacccgacggtccacaattcaacaatgttgtaatgacatagaagtttttgtggttctacgctgccctttcaagctgcaaatgcgcattatctgtttgcactgtgatgattttagtaatttcatgtggttgccacaggtagcaaattgaacactctagttataggacccatgggaaggctggatccacaacccgccaggacaggccaggggcgctgaccggatggaggactgttcgaacatgttcgctcacacgagacaagactaaggccccgccgaagtctacgggacctctggctctgacaccaccaagagaggtccatgtgcggcgcggcaccatacagctggtccctgcgtagacatgcacgattagggccgccgtctgagataaaacttaccgaaatgactggctgtaacctctcctagtgggaatattctggggataaaccaggcactccagggacgaaatgtct

SEQ ID NO: 1223 - DNA, 490 bp, Zea mays
  Clone ID: TF_uC-zmroteosinte001d08a1
gggcaggcccagttctgcagtcttaacaacgggatcgggaacaatggccataaaacccaacggggcggggaacaatggtcatcagtcttaacagctcaaataggcccagatcatattatccatcactccccctaccaaataaattgggccacgtttaccaaccccccccagcctagtcctatgaaccttaaaaaggggggaacctggggccggccttggggcccccggagaccgggtgcttggcaagccccccgggggggcccaggccccccggggtctggaccccgcggggggggacggggggcttcttgttatagcgcgccagcttgggggactcggccgggggcttctcaaaaatgtccttgatgaaggggttcatggtggacatggccttggaccaaatgcccatgttggggggcccctggttaagcaccttgaaaatggaaaacttgaagggccccacggactttttaaacttttttttcccctt

SEQ ID NO: 1224 - DNA, 376 bp, Zea mays
  Clone ID: TF_LIB4764-031-R1-K1-C2
tgggtacctcgagccggcctggctagccacgcatcgtcgccctcaaattcgttccgtccaggcaaggaagaaatcgagcagccaaggagaggagaagatggctcgtacgaagcagaccgcccgcaagtccaccggaggcaaggccccgcgcaagcagctcgccaccaaggcggcgaggaagtcggcgccgacgaccggcggcgtgaagaagccccacaggtacaggcccgggacggtggtgctgcgcgagatccgcaagtaccagaagagcacggagctgctgatccggaagttgccctctcacagcctggtccgtgagatccctcatgacttctagacggatctgcggttccatagccacgtccgccctgcccct

SEQ ID NO: 1225 - DNA, 339 bp, Zea mays
  Clone ID: TF_ZmC1048210_1
aacgccagcgccgcctcttgcttgctgagctccagccgaggagaagggggtaagtaaggaggtgctcataccatggctcgtacaaagcagactgcccgcaaatccaccggtggtaaagcacccaggaagcaactggctacaaaagccgctcgcaagagtgcgccctctactggaggggtgaagaaacctcatcgttacaggcctggtactgtggcgctccgtgaaatcagacgctatcagaagtccactgtgcttctgattcgcaagctccccttccagcgtctggtgcgagaaattgctcaggactttaaaacagatctgcgcttccagagcgcagta

SEQ ID NO: 1226 - DNA, 343 bp, Zea mays
  unsure (1)..(343): unsure at all n locations
  Clone ID: TF_LIB3150-075-P1-N1-G7
tcttcctttctccctagcaatctctatcatcagataggagttctttgcaaagcggtagacttcctactctcccnatgtcccgcacgaagcatactgcgaggaagtccactggcgacaaggcgcctatgaagcatctgtccacgaaggcagttcgcaagtctgccccggctaccgtcggagtgaataagccccaccgtttccgccccgtcaccgtcgcgctccgttagatccgcaagttccatgaatagcacggagctgcttatccacatgcttccgttccagcgcctggtgcttgagatctgcccatgattttcaagaccgaccttctcttccagagctcctt

SEQ ID NO: 1227 - DNA, 361 bp, Zea mays
  Clone ID: TF_LIB4735-001-R1-M1-F3
tcttagcagtggtaacaacgcagagtactttttttcttttttttttttttttttttttgccctttttttttgtttttttctttcttctaggagctcgggaagtctgttggcaggcgtcaccatcgcgcacggcggcgtcctccccaacatccactccgtgctcctgcccaagaaggcggcggagaaggcggccagcgccggctgcccggagcccaagtcccccaagaagggcgcctcgccccccacgaaggcttagaaaggcggggcttccttcgcactgtgtgctgccgcatgctcgggtctagctccgcgggtgggatgcgccctgctctaggttggtgcttgcgccttattgcctgcc

SEQ ID NO: 1228 - DNA, 314 bp, Zea mays
  Clone ID: TF_LIB3245-236-P1-N1-H10
aaatccaccaacggcataccagcgtgtccgggattccgtcgagttgactgggccagagaataatctttgaccagaagaggcgaatatgagttccggcggcgggaggggcaaacccaaagggtgcaaagctgtgtctcgggcgaccaaaggccggctgtagtttcccgtctggcgcatatggcgctacctcaaaggcgggaagtacgcccagcgcgtctgcggtggtgcgcccgtctacctcttcgccgtcctagagtatatctcggcagaggtgttggaactggcgggcaacacggcgcgcgacaacaagaaga

SEQ ID NO: 1229 - DNA, 470 bp, Zea mays
  Clone ID: TF_LIB3606-056-Q1-N6-B3
aaaaaaacccgggttttccttttcccttgggaaggacaaaagggggcgggggggaagcaaatcccccgccaatcacattggccggttacaacccacccatggcaacatggggtccccccccaaaccctttgccttttgggggggctggggggcctttttgggggaatgggcccccttgttccccccggggggccccttttcccccgtttttttgggcaaaaggacccggtttattttgggcaacccccccccgggggggaggggcaccccgggaaaaaatttccccagctcctttttgttggggatcccccacaacacggggggggggacaaagcccgttttttttttttccttgggagggttgccggggagctccaaaaccccaggggggaggtcctccaaaacggccccaaggtaaacgggggccccctttcccacccccttcgcgtaagggcccttcttgggggagc

SEQ ID NO: 1230 - DNA, 624 bp, Zea mays
  Clone ID: TF_LIB4975-032-A1-K1-C10
gttgatcaattattctgtgcatctgctcctcatcccaccggatgagtaagcaaggcgcagtagcacctatcgggctgccgccgcaaagaaggaacgcgaggaaatcagcctaactgattacctgctatagttgccactcctctatgcgcaaatgaccccgaccgcgactcctccggcgccgccgggcacctcgtcgtcgtactactacacctcgcgtgtgagggtgtcgaacttggccggaaagcagcaaggcaatacaagaaaacacgaatagagccacgccacatccagattgttgtgcggcaacgaggactagctgactgatatggtagcggctgccaccatctggagcagagcgggtatgcataaaatacatcagcagctgttccacaagaaaagatgcctcctccaaagacaatgccgactacaaccacaaatgtaactgcttgctgcagaagtgatacgatcacctgctatgtacttcgacgaataggatgcatcggtgtctgtccaatgcccaggagaatgctatgttgggatatacagtgacaatataagctgtgatgatgcatgtgatgagaacgtcgaatgactgatctcacgatggcatgctcggtgagaaag

SEQ ID NO: 1231 - DNA, 445 bp, Zea mays
  Clone ID: TF_LIB3279-216-Q6-N6-G10
ggggaaaccagcgcccaccctaagtgacatcaattataaattttaaaacatagccagattggaacacttcctaccacttgtccactacggatgaattttacgaattggaacacccacaaatgtgaacttccacaaaggcaagcctggaacaaatgcaaaccatactacggggccactcccagatgccgtaaacagagaatgtaggccctttaaccaggggtcctcctagccaggtgaatgcccttgggcataatggacacccgcttggcctggatggcgcacagattattgccctgcaataaacccaccaggtacacctccggaatctcctgcagcgcaagcaccgaatggttcttgaaactaaaataagcttgaaatactgagcaattttcctgacaaggctttggaacggaagctctcttatgagcaggagaaggctcttctg

SEQ ID NO: 1232 - DNA, 560 bp, Zea mays
  Clone ID: TF_LIB4742-078-R1-K1-H5
ttggggccctcgaggccgggcggggtgttcctagaaaggagagacggttggcatctcccctgagagggacgggaacagcttcgggctttcctctagcaacattgcggttaagggtctctgcttcggcagatctaacccaaattttataaaaaaaaaaaaaaaaaaaaaaaaaaaaaaaaaaaaaaaaaaaaaaaaaaaaaaaaagattacaaacccggcctctggccggcctaccaccacaggtcaccgggggttgggtttctcccctcttccggacccgcttctccgtccggattccctctggtctttccctaacgaagggagccatggcggggaaagggaaagcgatcggctcaggggcccccaaaaaggccacggccaggagctccaagggtggcctccagttccccgggggaaggatccccaggttcctcaagggcggcaagcatgcccagagagtcgggcccggcgcccctgtctacctcgctggcgggctcgagaatcttgctgctgagggtcttgagctggccggcaatgcggcacgtgacaacaaaaagacc

SEQ ID NO: 1233 - DNA, 280 bp, Zea mays
  Clone ID: TF_LIB4730-056-R1-K1-C4
agaacatgctaggtgatgacgaagccggcgatccagaggtgggataagattagggcgggaaagaggctgatggggcataataacaaggccgcgcgcagggccggaacgagctagagcaagcaacgccattaagaaggcacgtaccagacgcgagacctacaagatctagagctgcaacgtgctgaggtaggtgtaccccgacatggcaaggtcgtcaagggccatgtccataatgaaatatttcataagcgacatctcggagaagctaggctggcacgcc

SEQ ID NO: 1234 - DNA, 566 bp, Zea mays
  Clone ID: TF_LIB4742-096-Q1-K1-A6
ctcgaggccggccgggtcgcatttcgcttcgttccactcctgagcactttctcctcgtcccagacaagccaatcgaagccgagatacgaccatggactccaccggcaccggagcagggggtaaggggaagaagggagcggccgggcgcaaggtcggcgggccaaggaagactcgcattattccgcgccacgtgcttctggcgatccggaacgacgaggagcttgggaagctgttgggcggcgtgaccatcgctcacggcggtgtgctccccaatatcaaccctgttctgctgcccaagaagacggcggagaaggcgtccagtggcgggagcaaggaggcaaagtcgcccaagaaggccgccaagtcccctaagaaggcatagactgactgtccggagtgatctgatgtttagcagtaccttgttaccagtatgcggtgatgcgtaggctgcagatgggacgaatgtgcttgtatgtgtatgtgtcctgctgcatgttgtcctttgctatttagaatggaagaagaaatgccttgtttctctgaaaaaaaaaaaaaaaaaagcgggc

SEQ ID NO: 1235 - DNA, 334 bp, Zea mays
  Clone ID: TF_LIB3088-004-Q1-K1-E10.6C0
ggcccttggaggagatgccgatgtcggggtgacctgcttaggaccttgaagatgtagatcttgtaggtctccacgctcttcttcgccttcttcctacccttcttgtcgccgccctccttgccggcggacttgcccgcaggtagccgcttctccgccttgggcttcttccccgcgggggccttgtccgccggagccgacttctgcgagggctcctgctgcggcaacttcttcggcgacggcttcttctccgacttgggcgccatgaataccgctcacattttctggatgataggagtaggagcgatggaaaacgatgatgcgctgtgaagatgtt

SEQ ID NO: 1236 - DNA, 306 bp, Zea mays
  Clone ID: TF_LIB3159-018-Q1-K1-C12
acgcgccgcagtatcatccatggacgtgagcggagcaagcggtttagcgtataatggcgcggcggggcgcttggcctgctggccgaccaataaatctgtgtcgcggtcctccaaggccgggctgtatttccccgtcagccgcgtctggcggtacctcaaaaagggccggttcgcgcagcgtgtttgcacgggtgcccccgtctacctcgccgccgtcctggagtacctcgcggccgaagtgctcgatctcgtctgctacgcggctaggtgacaacatgaagacgcgcatcattccgcgccacgtgc

SEQ ID NO: 1237 - DNA, 638 bp, Zea mays
  Clone ID: TF_LIB4740-040-R1-K1-C7
ctcttgggtgcatcctctacgcgagcgggccgcttatcccatccagccgagcacggtcgtcgtcggaaccggagaagggagggaggaagggagcgcgagatggacaaggccaataagcatagcgccggagcggaggagaaggcgaccaaaagcaggagccacggatgcacggagctgttcgtcgcggaggactacgacggtcctgatcgcgcttcgccgggttcctcgcctacctgggcgggtagggcatcctggcctacgacgacgggtacaactacaccgagacgtacatgatgtatatcttttatgtgttgcacgatgtgcacggagccattggctgctggagcaccggcatgctcatcatgagcttcttgattaacgatatatttgagaatgttgccgctgacgccatgaagttggcgcgctacaacacgaagaccacacataaccttgcgcgagattcagacctcggctgcgcctgggactcaccggtgagtttgccaagcacgccgtatacgagggcactaaggccgttactaagtttacctcgttttatgatccttgtgatggtcatgtgcgcgctggcggtaggcgtggctcagctgatgtgatactgatagcgatggatgatgatgatc

SEQ ID NO: 1238 - DNA, 689 bp, Zea mays
  Clone ID: TF_ZmC697_49
attagaagttcgaaacacggaaatgcggtactcatatattactgtttgacagtggcttagagtggtcgaacccaacaaccgctaacaataagcactagcacgtcatccagaatactctcgatttcttgaccgcgacccaagacttttgccacggccaccagcggcggtagcgcctctcagccgccgaatccgtagagggtgcgaccctggcgcttgagggcgtagacgacgtccatggcggtgacggtcttgcggcgggcgtgctccgtgtaggtgacggcgtcgcggatgacgttctcgaggaagatcttgagcacgccgcgggtctcctcgtagatgagccccgagatgcgcttcacgccgccccttctcgccagccgtaagaccgtcaccgccatggacgtcgtctacgcgctcaagcggcagggccgcaccctctacggatttggcggctgaggggtcaggggtgtccgccagctgctgctggtcgtggcagaagtcttgggtcgcggtcacgaaatggagtgattcgagagtattcttgcccatgggcttagtttcgtaggcttatcactctagactctagtgccttggtccagtagtagcatacgacttgtactgcatttctttgttctgaacctctaaatatgatgaaatgtggattcacttgatctcacagacaaccagtt

SEQ ID NO: 1239 - DNA, 508 bp, Zea mays
  Clone ID: TF_LIB4742-047-R1-K1-H7
cattgggtacctcgaggccggccggggcgcgcatagacatcgacgcgagcgaatccctcttatcgcattcgtagccttctgttgcatcacaccagcgtcgaaatcccaccatccgtcatcgatggcgcccaaggcggagaagaagactgctgcgaacaagccagcgcaggacgagtccgctgccgataagggcccatgggtgaagaagacctacggccaaaagcgtctcccggtggcccagtcaatgcggcaaagaaggcgtcgacgagaatggtgagacaaaagctgacatccccgtggatacctacaagatctacctcttcgaggggctgaagcaggatcaccccgacatctgcctctcttccaaaggcatgtccatcctgaactccttcctcgacgacgtcttccacaagttcgcctgggatggtgccaagcttgcgcgctatcgacaagaatcccaccatcccctctctacagattcatacctctgtccgccttgtacttccct

SEQ ID NO: 1240 - DNA, 393 bp, Zea mays
  Clone ID: TF_LIB4975-026-R1-K1-H6
aatcacagcgaccatctcctcgcatttcttcccatccgatccccccttcgcaaccaaaaccccaactcgccccgcatcgatggcgcccaaggccgagaagaaacccgcggcgaagaagccggcggaggaggagcccgcggccgagaaggcgcccgccgggaagaagccgaaggcggagaagcgggtccccgctggcaagtccgctgccaaggaaggcggcgagggcaagaggggcaagaagaagggcaagaagagcgtggagacctacgagatcgacatcttcaaggtgctgtatcaggtgcacccggtctttggcatctcctctttttttttttttctcccgccctcccccattactgttatgtgtttagtgcttctttgctgattgcgttt

SEQ ID NO: 1241 - DNA, 493 bp, Zea mays
  unsure (1)..(493): unsure at all n locations
  Clone ID: TF_LIB4669-008-R1-K1-F3
tgcatctcagcagcactagcagtgacaaactctaacttggcttctagctgggttacaccccaaaactaaaactagaggcggcgacggcaacaagcggggcgtaaagcattggcggcaaggcgaccactctgcagctggccacgaaggcggcgcgcaagtctgcccnggcgaccggcgtgatgaagaaagccccaccgtttccgtccgggggggggggcgctccgggagatccgcaagtatcagaagagcacggagctgctgatccgcaagctgccgttccagcgcctggttcgtgagatcgcccaggacttcaagaccgaccttcgcttccagagcttccgccgtcgctaggctgaaggaggcgtccgaggcctacctcgtcgggctcttcgaggacaccaacctctgcgccattcacgccaagcgcgtcaccattatgcccaaggagcagccagcttgcccgagcgccatccgtggggaagaggcctaggcc

SEQ ID NO: 1242 - DNA, 206 bp, Zea mays
  Clone ID: TF_jC-zmXLIB3526060bc11b1
gcgcgccgtattagcagccctggacctgagcggagcaggcggtaaggcgatataaaggcgccgcggggccgcaaggcccgcgggcccacgaagaactcggtgtcgcggtcctccatggcccgggcgcacctccccgtcagccgcctcgggcggtacctcaaaaagggccggtacgcgcagcgtgtaagcacgggtgcccccgtcta

SEQ ID NO: 1243 - DNA, 473 bp, Zea mays
  Clone ID: TF_jC-zmXLIB3527P074Bh05d1
gattaaaacaacgaaacatacacagactgacaggcaggtacatcaaactacattagctttggtctagctagctgctacccggcctgattacactatcaactacacatacgtacaggagctactagctagtctagtttttttgcatgaagtagcatcagctgcagtacgcactacttccaaggtcgtacggccggtacagaaaacatgtagctacctagctaggcggcataggacatgtacttggagatggctttggtgccctcagagatggcgtgcctgaccagctccctggggagcacgagcctgacggcgctctgcacctcgcggcaggtgagcgttgccttgcccgtggccttggacaggcgcgccgcctcgtccgcgaggcgctcgaacatgtcggccatcatcatgtccagcacctggatggcgtgccccgacacgcccaggcccgggtgcacctgccttagcacgcg

SEQ ID NO: 1244 - DNA, 266 bp, Zea mays
  unsure (1)..(266): unsure at all n locations
  Clone ID: TF_LIB5025-070-A1-XP1-F2
gccggccggatcggaccgttcacgcgctcagttcttggcacagagccaaatttttctccactcaatcactgcagccatggacgccagcggagccggtagcaaggcgaagaagggggcggctgggcgcaaggctggcggccccaggaagaagtcggtgtcgcggtccgtcaaggccgggctgcagntccccgccggccggatcgggcgctacctcnngaaggngcgggacgngcagcgcgtggctacccttccccccccgtttatct

SEQ ID NO: 1245 - DNA, 616 bp, Zea mays
  Clone ID: TF_LIB4764-066-R1-K1-A7
attgggtacctcgaggccggccgggggcagtgtctcaagtttcctcggagttgatgcgatggttgtaaagggagggaaaggattgttcgccgcgaatactacggagtgcaagtccgccgaaaaagacgaggggaagaaggcgcccaatttcacactcttcccgagacggcctccaattccctgtaggacgaatccaccgtcaactgaagaaaaggactcaagaaaatggacctgatgttgccaccgtacccgtatactccgctgccatcctggaatacttgactgccgaagtactggaacatggatggcaatgctagcaaggatctgaaggtgaatcgtatcaccccatcgccatttgcagttaggcattcctgcagacaacgacatgaacaccctcatcaagagcaccatcgaatgaggaggtgccatcccgaacattcacaagctcctgatcgacaagacctccaaggagtgaagactaggagatgcgcatctataggtcaaactagacttctgtgcactcctcggcgagaccttggcatcctggagggattagatgagctggcaggaagtagctcctctgtgaaacgcttgcctgatactgcttcatcaggta

SEQ ID NO: 1246 - DNA, 332 bp, Zea mays
  Clone ID: TF_LIB3070-010-Q1-N1-H2
ctctactccacactctcgatctctaagggcagcaacatgagtctagctgacatggactcatagcgcagtcttgattccggctataagtgcgaaccaaaggcgcgtgacgatcgcaatgcctgcgggcctaggaagaagtcattgacgaggtccgtcgaggccgagctgcagatatctgaatggcgaatatgtcggtacctgttaaacgtatggtacacgcagcgcgtatgcaatggcgcttccgtctacctggccgacgtcctatagtacctggccgacgaggtgctggtgctgatctgtgactctgacatagacgacatgatgacccgcat

SEQ ID NO: 1247 - DNA, 937 bp, Zea mays
  Clone ID: TF_ZmC25865_2
gccggccgttccgagaacgatctcagtctccctagcaatctctagcagcagatcctcgtgcgaagcaaagcgctagccccttcgtactgtcccgatggcccgcacgaagcagacggcgaggaagtccactggcggcaaggcgccaaggaagcagctggccacgaaggcggcgcgcaagtctgccccggcgaccggcggagtgaagaagccccaccgtttccgccccggcaccatctccacgcagccgtccgatggccaagcggctcgccggcgccgacaaagaggtgctcgtcgaggtggtgaggttcacgcataagagcggactgaggggctgtgacggcggctggaaggatttcctggcccagaacgacaggaagtttggcgcgtcggtgagcgacccgaggaagcgctccagggacgtgctgttcgccttcctgcagaccttccccgaggatttccagaagaaacacttgatgccactagtctgacgagagccaccggaagattttaatgcttcaggtgcataggctctgcattaatattctcatgacagcatacgcagccgcaattttggtaggagcgtcatctacgaacctgtatcagaagattgtcattgtgtctggtcatggcttgcctgcctccacactctggcaaagagcacaacaatttgacattgagaataaggattgtatcacacaattttatatgttcatttggaagttattctacgccgagtattttcttataccatttgtgtagtaaagaatcatgcgaagaacaacacccctggtatagacatgtgaaggtttattgctaatgttactctaccgaatggtctgaatgtctatgcgtcatttgtatgtaatatgactatttgttgtatcagggtaacaactggagcaaatgtaccgtatatattaagcattaatttaacttt

SEQ ID NO: 1248 - DNA, 342 bp, Zea mays
  Clone ID: TF_LIB3150-029-Q1-N1-H11
tacaccagaaaaattcccagttctttggtccgcgtcagagaggcggcggcgatgtctgggcgcggcaagggcggcaagggtctgggcaagggcggcgcgaagcgccaccggaaggtgctccgcgacaacatccaaggcattaccaagccggcgatccggaggctggctaagaagggtggcgtgaaacgcatctcggggctcatctaccaagagacccgcggcgtgctcaaaaacttttttgagaaccttaatcgggacccccttacctaaacgaacaacccccccggaagaccgtgaccgccatggacgttgtctacacgctcaagcgccaaggacgcaccc

SEQ ID NO: 1249 - DNA, 556 bp, Zea mays
  Clone ID: TF_LIB3606-014-Q6-N6-G11
gtgtggtgttttttttttttttttttttttttttttttttttttttttttttttttttttttttttttttttttttttttttttttttttttaccttcataacagccaaattggtttgccaagaacatcggtccccgattggggggcaagggggggggggggccctcgcctagttcaaacctttcagaaacagggggacagggcggcaatcagggcctttcgcccctgatgcggggcgcgagctggatgtccttgggcatgagggggacccttttgggggggggggggcaaaggggggggtcctaaaagagacccaccaaataccccttggggggctccttcaacggggggacagggggggactggaacccaagggggggtttgaaggcttgggcgaactcacccaccaaccggtgggaggggagcttccggaggagcagctcccggctcttttggggcttggggatctcccggaaaggaaccgggcccggggggaacctttgcgggtttttcacccccccggggggcggagcccacttgcgcccccccttggggg

SEQ ID NO: 1250 - DNA, 391 bp, Zea mays
  Clone ID: TF_LIB3088-050-Q1-K1-G10
actacgcgttcgcccacgcgtgctggcacgcgtccgactaatctactctacaccagatatggttctcagttctttggtgcgcagtcagagaggcagcggcgatgtctgggcgcgtcaaggtcggcatgggtctgatccagggcggcgcgaagcgccaactgaaggtgctacgcgacaacatccatagcatcaccaagccgatgatccggaggctggttaggatgggtggcgtgaagctcatctaggagcttatatactaggagacccgaagcgtgctcaagatctttctcgagaacgtcatccgcgacaccgtcacctacaccgagcacgctcgccgcatgaccgataccgtcatgtacgtcgtctacgcgctcaagcgctagggacgcac

SEQ ID NO: 1251 - DNA, 622 bp, Zea mays
  Clone ID: TF_LIB4975-003-R1-K1-H11
actctcatttttcccgcgttccacctagaagaggccgaagaatcccaccctcaaggctgacgagcatgagttgaccgcacgtgcgaccgtgggaaggggaagccagcgaccaagtctgagcgctgctcttccaaggctgggctccagctccccgtctgggcgcatctacaagaaacctcaaggcctcctagtacacggagcgcgaaggtgacgtctctgccgagtacctctcctgcgacctcgatcagctccccgacgaggggctgtatatgtccgcgaacgtctgctccttacaacgacaacaaccggatcgtgccccaccacattcatttgcggttgctgaacgacgaggaggtgagcaaggttctgggcactgagacgatcgcgatcggcgtcgagaagtctaacatccaccagaatttgctgccgatcaaggctgacctccaggagcacatcgagtccgactcccaggagctctgaatgcacattctgaacgaggacagacgcaaggcgatgtgtggcatgtcctggatcgacgctgttgaccatgttcttgagactgatcgttgtctgcgacgtgaacaaatgcaatatgctgctccatgaacgaacgcatgaacat

SEQ ID NO: 1252 - DNA, 474 bp, Zea mays
  Clone ID: TF_LIB4740-003-R1-K1-H7
acagacatggaattcttgcggtctaaaccaaccttcgcgccgcggcggaacctctgaccctcgcgagtgcaggcctacgcgaagcggtcgacagaggacctgcagggcggaaacgaagacacgctgcaccaagccatctcaggcggagagagcgacctacaatggggctaaggccgcaagggctacagaatcctcggtcgacaagtgcttctcaccacccacgtctacggactgaccggagtgcacccaagcctaaacgacacgctataagactgcgcagacctacaagcatctacctcttcaaggtgctgtagctgctgcacacccacttggatatttatcacaacgacctccccatcatgaactccttcatgaacgacatttacgataagctcgagctcgagtacgccaagctgtcgcgctaccacacgaagcacaccatcacctgacgctagatccactacctcggtgcgc

SEQ ID NO: 1253 - DNA, 383 bp, Zea mays
  Clone ID: TF_LIB4729-116-A1-K1-H12
ccaggcggccgggaccacaacaacacccgcacacggcccgactctcctcctccgcccgcgtacctctcggcttcggcgctgcccgggcgcggcaagggcggcaaggggcatgggacaaggcgcgcgcgccacagccgccacacgcaaggcgcctgcgccgacaacatccagggaataacgaagccggcgatcagtaagctggacagaaggggtggagtcaagcgcatttctgggatcatctaagaggagaccacccgcgcgctcaacatcttcctcgagaacgccatccgcgacgccgccacctacaccgagcacgcccgccgcaagaccgtccccgccacggatgccgtctacgcgctccagtgccagagacgcacgctcta

SEQ ID NO: 1254 - DNA, 264 bp, Zea mays
  Clone ID: TF_LIB3150-002-Q1-N1-C10
gatggatagaaggaacatatcaatcccaactcatcgacagcactcccccaaaaaccgcagagctgaaacacaaccatgcggagcgcgtcggcgccggggcccgcgcgtacctttacgccgttctagagcatatcgccgccgaggtgctggagctggccgggaacgctgatcgggacaacaggaagaaccgtatcgtgccgtgccacatacagctggcggtgcggaacgacgaggagctgagcaggctgttgtgcactgtgacga

SEQ ID NO: 1255 - DNA, 409 bp, Zea mays
  Clone ID: TF_jC-zmXLIB3526089bg07a1
atccaaaaaaccttggaaaaaaggtttttatccccctgaaaaaattacctggttcaggggattgaaccccgagaaatacgaaacaaaattttggggccaaaaattggtggggtggaacaaccccaaattaaaaaagggcctcctcaagggttgaaacaaattttttaagcacaatttggaattttttaaaaatttccacacttcattgttccttgagcaaccttttagcacgggcctaaaaggccgaggaaacgaaacaaagccgttttttcgggcgggggggatttaaaaggaaataaacttggtaacggccttggggcccttgaaaacggggggtttggcaaacttcccagaaaggacaaggtcctccaaagtttggatctcccgggaggttatggggggctttttg

SEQ ID NO: 1256 - DNA, 302 bp, Zea mays
  Clone ID: TF_LIB3205-052-P1-N1-G12
cttctttatgtttttttttttactgataacataggtcagtgccaatttaaaagcgtaatgttaatatgttatcatgcattctacatccaactacttgatgattcgtcaggaacccatactacagaacccagcacatcttctacatcttcgtgatcggtcactgatgaccagaaaatactaagcttaagtcactttcccacatgtgctgctggcaagctggatgttcttgggcatgatggagacgcgcttgacgtgtatggcgcagaggttggtgtccttgaatagtccgtcaaggtatgcct

SEQ ID NO: 1257 - DNA, 381 bp, Zea mays
  Clone ID: TF_LIB3116-028-P1-K1-C8
cccggcccggaatccccgggcggaccaacccttccgcttgggccggggacaacccaattcgaacctttcggaaagaccaaaaaaccggaggagatggttggtaccaagcagactgttggaaagtccacggaagggaaggttcccaggaagcagtttgccaccaaggttgcccgtaggtttgccccaaccactggtggagggaaaaagcttaaccgttaccgccctgaaactgttgccttccgggggatccgaaggtttaaaaaaagcactgagctgttgatcaggaagttgcccttccaaaggctcgtaagggaaattgcacaggacttaaaaactgatttgcgtttccaaagccatgcggggcttgccctccaggaggct

SEQ ID NO: 1258 - DNA, 456 bp, Zea mays
  Clone ID: TF_LIB4730-068-R1-K1-B4
cttacccaaagaatcgccctatttatgttgcctgctaaggaagcgagaaagactggtcaccgtcatacgactatgccatgtgcgcgctacgggcgggaaaggactggacaaggtctggagcaaagcgccaacgcagggggctacgcgacaacatccagagcatcaccaatccctcgatccgtactctgtctcgaagattagaagtgaagcgcatttgggcacttatctactaagagacccgaagcgttctcaagatcttcctctataacgtgattcgatacgccgacacctacaccgagcacgcacgccgcatgactgttaccgacatggacgttgcttacgcgctcaagcgctatggccgaaccctctacagcttctgcagctaggctggatgccttttatgcttgctgaagaggatgcctggttgttggtagggctacttcgattacctccttg

SEQ ID NO: 1259 - DNA, 440 bp, Zea mays
  Clone ID: TF_LIB3608-053-Q6-N6-A2
gacagagaaaaggcattccattttccattcagggaaccaacacgttccgaaatagccaaatgggcccgggataaaaaggacccaccaccatttattttagacattacaacgaccaacaggagcagcgcaacagtttaagccctttggcccctgatgcggggggcgagctggatgtccttgggcatgagggggacccttttggcgtggatggcccaaaggttggtgttcttaaaaagccccaccaggaacgccttcgggggcttttgcagccccgccacggccgaggactggaacccgaggtcccttttgaagtcctgcgcgatttcctggacgaagcccttgtaaggggagcttgagaaagagcaattccgtgctttttggggacttgcggatctcggggagagcgacagtcccggggcaggaagcggggcgatttttta

SEQ ID NO: 1260 - DNA, 516 bp, Zea mays
  Clone ID: TF_ZmC653_38
ctcaccggccaccgcgaatccagagccccacgccccgtccgaaccccagagcagagcaaagcctcctcgacctccctgtccccagccttccccgatggcccgcacgaagcagacggcgcgcaagtcgacgggcggcgtgaagaagccgcaccgcttccgcccgggcaccgtcgccgcgctgcaggaggccgccgaggcctacctggtgggcctcttcgaggacaccaacctctgtgccatccacgccaagcgcgtcaccatcatgcccaaggacatccagctcgcgcgccgcatccgcggcgagcgcgcctaggcggttcggttgcggcgcctgctcgctactgctggaggtgcttagtttagcccgtcatggttgtgttataggtgtgcgttgttttcaagagtaggcttcttgctatgtgctgatgttaacggaggattatgattagcagttctgaaaaaatgcaatggatgtgatctgctctatctacgaaaaaaaaaaaaaaaaaagcggcc

SEQ ID NO: 1261 - DNA, 1002 bp, Zea mays
  Clone ID: TF_ZmC697_108
cccggtgtcgacccaacgcgtcctttttccgtccgcgtagctctcggtttcggcgatgtcggggcgcggcaagggcggcaaggggctgggcaagggcggcgccaagcgccaccgcaaggtgctgcgcgacaacatccagggcatcacgaagccggcgatccgtaggctggccaggaggggcggcgtcaagcgcatttctgggctcatctacgaggagacccgcggcgtgctcaagatcttcctcgagttttttttttttttttttacttgatgaaacactactaacaagatgcatcacaaatgtctggcaccaacaagaaacccgcaagccgtaaaacagaacaaaattttaaccagacctatcacgaaaacatgtaacacaacaacggcatatcttagcaaatttatctctgagagccccaggactaaacacgaaatattcatggtaatacgaaaacagagatggagtgtgtccgatacaacaaatcgacagctaaagcaggactattcgggaggccgagcatctagaagcggagcttggtaaagaaccacctgttcttgccggtcttgaacctctcctcaaggcgcgctttggccgtcttgcaggcggcgaccttcttgtcgtgggtagagagtgcgtcgggcccaccggtggcgacatccttgaaatcgacgtcgagggtgtagcgggtgggcatgaggtgagtgaagttgacgagcttgatgaagcacttgacgcgcgacttcttcgcagtcttcttggcggagtccttgcggatcaccttctttgggtacttggcgaggcctgcgacgaggcagtggccataggggcggtcgcgggtgccctcctcgaacacgcgcacgataactgccttcctgccggcgaagcggccctggaggaggataacggccttgccgggcttgaggaacttcaccatcttcggatgctgctgccgctgctgcgccgccgccgccgccgggagtgtagggtttggctcgtgc

SEQ ID NO: 1262 - DNA, 270 bp, Zea mays
  Clone ID: TF_LIB3078-019-Q1-K1-H11
cccactcgttcggacacacgcgtgctatcgctcggttactcaaggccgccaagtactccgagctgatgatctcctgcgtccctggctacatcgccgctttcctcgagtacctcatcgctgaggtcctggagcttgctggaaactcaactagggataacaacaatacccgcatcgtgccgcgtcacatacagctctccgtgcgcaacgactacgagctgaccaagctgctttgaggtgccaccatcactagacgctgcattatgcccaaca

SEQ ID NO: 1263 - DNA, 447 bp, Zea mays
  Clone ID: TF_LIB3088-044-Q1-K1-D2
cgcagtccttcgaggacgcgttggagtacgccttcggccagatctgccgctaccctgaagaggggcctggtactcacaatgcgtgatcactgggacatgtgtctacctctgatccatcctgaagtaccttgctgcatacgttatggagttggcagggaacgcggcgagagacaacatgaagacgctcatcattccgcgccacgtgcttgtgacgatccgcatcgactatgagctcggctagctgctggcaagtgtcaccatctttcacaggggcgtactgggcaacatccagtgcgtgctaatgtccaagaatgcggcggaaaaagcggtcagcgccgtcagcaaggagcccaaatgccccaagaagggcgccatttccaacaagaaggcttacaaagtagggactgtatttgcactgtgtgctgtagcatgctcgcgtctagatct

SEQ ID NO: 1264 - DNA, 387 bp, Zea mays
  Clone ID: TF_LIB3279-054-P1-K1-D6
cgagcacttgcgggcactcatgagtggatgcccgagccgcccttttctgatctctttcgtgaccgattggatcgattcctgataggcacccaaggccgagaagaatcccgcgtgagaagaagccttctgaggagaaggccgagaagaagccaagggcggagaagcgcgtgccgagcaaggagggctgcgtgactaagggaacgaagactgctatgaagagcgtctagtcttacaagatctacattttcaaggagctcaagcaagtgcacccggtcattggcatctaagccaaggccatgttcattatgaactccttgatcaacgacatcttcgagaagctcgccttcgaggccgcgaagctcgcccgctacaacaaggagcccacca

SEQ ID NO: 1265 - DNA, 482 bp, Zea mays
  Clone ID: TF_LIB4741-128-A1-K1-C2
aagaaagcctccattcctgagtctccggacaaccagcatcgatgtccacgccatcctcctcagactgcgacaacctggagtctcgacccgatggcgcccaaggccgagaagaagccacgggagaagaagccggcggccgaggtacaaggcggaaaagacgaccgcaggctaaatgcccaagctcgagaaccgcctgtccgtctcgaactcctccgtgaaggagggcgtggcagaatacggggaagaagaacgccccgaagagcgtggagacctaccaaatctacatcttcaaggtcctaaagcaggtgcaccccgacatcggcatctcctccaagggcatgtccatcgtgaactccttcatcaacgacatccttcgataatctcgtcgtcgaggccgataagctcgcccggtacaacaagaagcctaccatcacctcccgcgagatccagacctccgtgcgcctcgtactcccagtagagct

SEQ ID NO: 1266 - DNA, 433 bp, Zea mays
  Clone ID: TF_LIB5027-045-B1-XP1-B5
tcggagcacaaatcctcttcctcgagttctcctcaaccaaattcaaagtcacagcggcgaaactctcggcgatgtctggccgcggcaagggcgggaagggtctgggcaagggcggcgccaagcgccaccgcaaggtgctgcgtgacaacatccgggctcatctacgaggagacccgcggcgtgctcaagatcttcctcgagaacgtcatccgcgacgccgtcacctacaccgagcacgcccgccgcaagactgtgaccgccatggacgttgtctacgctctcaagcgccagggccgcaccctctacggtttcggcggttaggtcgcccctctcccggtggcgaattacgtggtggcggtggcggtcgtgttgtgttcttggtctagttagtctgtgttgtctttatcggtgctgctttctgcgccgcctgcac

SEQ ID NO: 1267 - DNA, 373 bp, Zea mays
  Clone ID: TF_LIB3150-050-Q1-N1-E6
gcgtgacgagcgtgaggaggcgggtgtcgtactgaatcgaaaaggcgtaaactcagtctctcgagtttcctcggaccggaagccatggctgccaatgaagcgaaaggcttgctcgccgcgaaaactacagcagccaaatccgaccacaaggacaaggtgaataaggtcccaatctcacgctcctacggcgcccgactacagttacctgttcggcgtatccaccgtcagctgaaacaacagactcatgcaaatgctcgcgttcgagctacctgaaccgtctactgagctcccattctctaatacttgactgccgacgttctggaacttgctgcgaacgctagtaaggatctgaaagtgaagcgtatcactcctc

SEQ ID NO: 1268 - DNA, 266 bp, Zea mays
  Clone ID: TF_LIB3158-017-Q1-K1-G9
tatcaatcgttttccatggctcgtaccaagcaaaccgctcgcaaatccaccggtggaaaggctcctaggaagcaactcgccaccaaggctgcaaggaaatctgcaccgacaaccggtggagtcaagaagcctcatcgctatcgccctggaactgttgctcttcgtgagatccgcaaataccaaaagagcacagagcttctgatccgcaagctccccttccagcgtcttgttcgtgaaattgcgcaagacttcaagaccgatttgag

SEQ ID NO: 1269 - DNA, 419 bp, Zea mays
  unsure (1)..(419): unsure at all n locations
  Clone ID: TF_LIB3600-027-Q6-K6-A5
tttttcaaaaaaaaaaatgaggggatcaaatagnaggcacgctacgttggtagaaagtgtagcatgccaacattcctacttcaccgtccaatccaatcccatccacccaccagttcgaagcggaggcgaccggcaacctgcggcggtgatgtcaggcaggggcaagggcggtaagggggggggggggggcggcgcgaagcgtcaccggaaggtgctgcgcgacaacatacaggggatcacgaagccggggatccggaggctggcgaggaggggtggagtgaagcgcatctccgggctgatctacgaggagacccgtggagtgcttaagatctttctgaagaatgggatgcgagactctgtgacctatatggaggacgatcgttgtaaaaacgtgagtgatatggatgaagtgtgggggt

SEQ ID NO: 1270 - DNA, 559 bp, Zea mays
  unsure (1)..(559): unsure at all n locations
  Clone ID: TF_LIB4740-069-R1-K1-C9
gggtaccctcgggctcgccggggcctgcgtcctctcacccccggtgccttcgagctttgactctacgcccatcttccaaagcctttgcttctttcttatctggggatctcctctgatcatggttcgatggagggaccagcgatacggctcaggcgcacgccagaaggcacatgagcaggagctccaaggccgggctgcaggtcccagtgggaaggatcgccaggatcctcaaggtcggcagggacgcctagaggctcaccgccgtggcccccgtctacctgactggcgcgctcaagtatattgctgctgaggtgctaccacttgccggcaacacggcttgagacatcaagaagacgccgatgaaggcacacgccacatccaggtggacgttacggacgacgaggaggtctcccgcttgctccgtactgggaccatctccagtggtggtgtcctgcccaacatgacacaacctggtggtgaacctgactgacgaggagggcagcgacaaggctgctgatggcgatgatgactanaccgaccacacctagtctttgatgcg

SEQ ID NO: 1271 - DNA, 598 bp, Zea mays
  Clone ID: TF_LIB4976-052-A1-K1-H6
tgcggttattcgattcacagcgctcaccacaccaaacagcaagtgaaaattccccaatcctctcgctctctgcgtcgatgatgccgtggcgtggcaaggtgcggctagcggcctagcgcaatgaccgtcgctcaaacgtcaccgatacggtgctgccgcgacaacatccaggggatcacgaagccagctatccggaggctggcgcgacgaggcgacgagaagcgcatctcgcggctcatctacgaggagacccgcggtgcgctcccgagcttcctgtagaacgacatccgcgacgacgtcacctacaccgagcacgcgcgccgtatgaccgtcaccgccatgtacgccttctatgtccttaagggcctcggccgcaccctctatggcttctacgggtaagtttgccgcgttcgtgcctcgcctcaccgtgggtgcggctctggtgttgctgcagatcacaagcagtttgtggagggtgaaaagatgctagctactgtataactgcaaagccgcacgccacacatggcgtggttgcctgaacaattgctgtcaatgctgagcttgctctggactcacacatgctccattctgtgtacaa

SEQ ID NO: 1272 - DNA, 417 bp, Zea mays
  Clone ID: TF_LIB3088-044-Q1-K1-B10
gccggcttctaatccgtactctttgtggcttcgcattcatggcgccctacgcggttaagaggcccgtttcgaacagagccacataggacgatcccattgccaataccgctccttccgcgaagaactccaatgcggcaaagcctatcacagcatgcaaatccgccttcacagactacggcaagggaatagaggtgccggtcgaaggtcaagaagagcagtgcagacctacaacatctacatcttcaaggcgctgtagcaggtgcacgcgaacatcaacatcttctataacgtcatgtgcatcatgaactacttgatcaacgacatcttccagaagctcgccgtcgaggccgtcaagctcacgcggtacaacaagaagctcaccatcacgtcccgtgagatccagatcttcctgcgcct

SEQ ID NO: 1273 - DNA, 328 bp, Zea mays
  Clone ID: TF_700613664H1
tgccgagacaaagcccgcggagcagaatccgacggatgagactgtcgagaagaagcgcaaggccgctaatcgagtaccacgaatggattgcaggaagaactacgtggatgcacactgcaaatacagcgtcactacgtacgagatctacatcatcaacagtgtcatgcacgtgcacgcggacatcggtatatcgtccaacgacatgtccatcatgaactccttcatcaacgacatctacgagaagctggctgtcgaggccgacatactcgcccgctacaacaagatgctcaccataacctcccgggagatccagacttcggtgcgcctc

SEQ ID NO: 1274 - DNA, 512 bp, Zea mays
  unsure (1)..(512): unsure at all n locations
  Clone ID: TF_LIB3600-058-Q1-N6-B8
attatccaaaatcaggaccaatcgctgttactaccataaatcaatcacccacagacacaacatacgtaccatgcttccgagcgctcgattgcaaaatcgacagattacaccggtattgctgcaataataccacaaaaagcatcacacagagacatgtgccctaaccagtccccaatatgaagaggcacctaccctagcctcctaagccgtacagggtgcctccctgtcgctcgagcgcgtaaacaacgtccatggcggtcacgggcttgcggagcgcgtgctccgtgtaggtgacagcatcgcggataacgttctctagaaaaatattaagcacgccaagggtctcctcgtacatgagccccaaaatgcgcttcacgccacccctcctaaccagactgacagatcaccggcttggcgataccctgcatgttgtcgtgtacaccttccgagtgggcgcttcgagccgnccttgcccagacccttgccgcccttgccgcacccagacatatacg

SEQ ID NO: 1275 - DNA, 517 bp, Zea mays
  Clone ID: TF_LIB4740-021-Q1-K1-A12
aacacctctcgtcaactgtccttagacgccgacctctggttcctgcctgccacacggcgcacacagtggtgaagaagccctccgacacgattctcccatgttggaggatccccttgaccagagaatgtggagattgtatacgaaggcgaagaagcccttgtcgacaagcgcctagggtgacctatctgccaagaccccggactgggacgaggcgctaaaacgaaggcagcgaccttcgatgtgacctacagcatctattttttgacggctctgaaggaattgcactccaaaatctggatttccgctaaatgcatgaccatcatgaactccttgatcaacgacttcttcgagaagctcatggccgtgtacaacatgctgtcgcgcatcaactagatgctgatcatgacctacctccagatccacacctagaagcacctcgtcttccccggcaagctcgccgagcacgccgtctgcgacggcactaacggcgctacgaacttgatctactgttaggatg

SEQ ID NO: 1276 - DNA, 657 bp, Zea mays
  unsure (1)..(657): unsure at all n locations
  Clone ID: TF_LIB4965-006-R1-XP1-E12
gccggccgggttgggacacaccaagaagcaagaaaactagaaaaggctcctcccgaccgcaacgcccctcatctccctcgaccccgacatccccgacccgatggcgcccaaggcggagaagaagccagcggagaagaagccggcggccgaggagaaggcggagaagacgaccgcagggaagaagcccaaggccgagaagcggctgcccgcgtccaagtcctccggcaaggagggcggcgagaagaaggggaagaagaaggccaagaagagcgtggagacctacaagaagcccaccatcacgtcccgcgagatccagacctccgtgcgcctagtcctccccggagagctcgccaagcacgccgtctccgagggaaccaaggccgtcaccaagttcaccagcaactgagcgcgctgcgggatccgcggatctgttagaagggttctttgctggtgtcctttccccagtcccccaccctacccgcctagtagctagcttgcctgctctataaatccggcgcgccggattgtaatggtcctcttagatttgatgtccctgttgtggaatatagttgtatctctccgcttgctattttgannnnnnnnnnnnnnnnnnnnnnnnnnnnnnnnnnngaaaaaaaaaaaaaaaaaaggccccta

SEQ ID NO: 1277 - DNA, 468 bp, Zea mays
  Clone ID: TF_LIB5045-035-B2-K1-C4
gggtacctcgaggccggccgggcctggattccggccgccgaccgccgctggttttctttcttctcgcccaagccgcgccgccggcgcggtcctttgtaaaggcctagcggcacgggagcgggctgcgctccctctctctggattaggcaaagcatcctcctgtttggatcggcatggacaagacgacgaccacaccactgccggactgaacaaagctcaccgctaccgccctggaactgttgccctccgtgagatccgcaagtatcagaagagcactgagctgctgatcaggaagctgcccttccagaggctcgtcagggaaattgcacaggacttcaaaactgatttgcgtttccagagctcatgcggcgcttgccctccaggaggctgctgaggcataccttgttggactgcctgaggacccccacctgagagccatccatgatcaacgtgtgaccatcatgcccc

SEQ ID NO: 1278 - DNA, 355 bp, Zea mays
  Clone ID: TF_LIB3070-014-Q1-N1-C4
cttcgatggccccagggcggcaagaagccgtcggctaataagcctgcagaggaagagcccgcgacagacaacgcggagaacgcttcggcgtagaagaagcccaatgccgagaagcgccttccggcgggcaagttcgtcgctaaggaaggcggcgagggcatgacggggacaaagaaagcgaataattccgtggtgacctacaagatctacatcttcaaagtgctgaagcaggtgcaccttgacatcggcatcttgaccaacgccatgtccatcatgaactccttcatcaacgacatcttcaagaagctcgcggtcgagtccggcaagctggctcgctataacaagaagcccaccg

SEQ ID NO: 1279 - DNA, 421 bp, Zea mays
  unsure (1)..(421): unsure at all n locations
  Clone ID: TF_LIB4766-069-R1-K1-H2
ggacccgngggcncccnnggcggccangaagccggcggcgaagaagcccgcagaggaggagcccgcggccccggcggagaaggcccccgcggggaagaagccgaaggcggagaagcggcccccggcgggaaaacccgccggcaaggaaggcgggggggacaagaaggggcggaagaaggccaagaagagcggggagacgnacaagaccnacancnncaaggggcngaagcaggggcacccggacancggcaccnccnccaaggccagggccancangaacnnccacagcaacgacancnncgagaagcccgccggcgaggcggccaagcncgcccgggacaacaagaagcccaccancaccncccgggagaaccagaccnccgnccgccccggncaacccggggagcncgccaagcacgcc

SEQ ID NO: 1280 - DNA, 449 bp, Zea mays
  Clone ID: TF_LIB148-064-Q1-E1-B9
accacgcgtcagaacacgcgtccgcgccattggccatcgcttgaatccatttaggaaaaggttgcttcttggacgtatgccgctataagcaaaacggagtgacaaagttggaagaaaatgcctcgagcaggtaaagttgtgtctcgctcggttgtaggaggtgaccgaaacagaagagaaccaacacttataaggattggtcaacctcaagcttccactaccgcgaaaagttcgactagtgccaaaccacatagatatcgtccaggtacgagagcgctgatggaaatacgcaagtttcaaaagagtaccgacttgttgattcgcaagttaccgtttgcacgtctggttaaggaaataactcagcactatcatcacgaacttcgctggcaagtggaggcagtactagcccttcaaacaagtgcagaggactacctagttggtttgttgga

SEQ ID NO: 1281 - DNA, 623 bp, Zea mays
  Clone ID: TF_LIB4979-027-A1-K1-C12
attccacccttaacatctcctcggattttttctcctacgagccgctcgttcgaatcaaataccacctccatgcaggtccatgccaccatgggccgaaaaaagacgctgggaaaataatgctgcaggtgatgacgccgctgactagatagcgctccctctccatgaatgcatatcgaggagaaccgtgactgcgctcggagagactgctgccaagcataagtacggagagcgaaacgttgccgatgaagggcaaaaagagcgcgcagagctacgatatctacctcttcattgcggtgaactcggcgcacacgaaagttggaagctactgcaaggccatgttcttcctgaactccttcatgagcgatatcatcgagaggctcgctgttgaggacatcaatatcgctcgctatagaaagagaactaccatcacctcccgtgagatcacaacctccgtgcgccacttccttaccgggtagcttgacatagcactgcgactccgaaggctccaacgtcgtgcaccaagttcacctcgtgctaaggtgcatggtcgtcgcttgcaggattctctcctggggtcacgacactagctgtagataggcgctactgcctggtgctctatatgc

SEQ ID NO: 1282 - DNA, 398 bp, Zea mays
  Clone ID: TF_LIB3357-029-P1-K1-B9
atgcacacatttcttaccattacttgccatacgatccccccttcgcatccaaatccccatctcaccgtggatggatgggtcccaaggccgagaactaacccgcggcgtacaagccggcagaagaggagcccgcggccgataatgcgcccgccgggaagaagccggaggcggggaatcgggtccccgcttgcaaggcccctgccaaggaaagcggcgagggcaataagggcaagaagaagggcaagaagagcgcggagacctacaagatctacatcttcaaggtgctgaagcaggtgcacccggacatttggatatcctccaaggccatgtgcattatgaactccttcattaacgatatcttcgagaagctcgctgctgaggccgacaagctcgcgcgc

SEQ ID NO: 1283 - DNA, 561 bp, Zea mays
  unsure (1)..(561): unsure at all n locations
  Clone ID: TF_LIB4185-031-R1-K1-A10
atcttatatctttttctattttagcaccacagatgatcgtttagaagcaaagcgaccaccagagatcacagataagatacagaaagcgtggttttccctgcaaccgaatccaaaagaacgaatacaagaacaccgacgctaatacggcctatttgatgggcaactaaacattcataagatcctcggagatgaagggtaccctcgctcgtgacggatgctgttggacgaactggatgtccttgggcatgatggtgacgcgcttgggggggatggcgcagaggctggcgtcctcaaagaggccgacgaggtaagcctcggcggcctcctggagcgccagcacggtgtggctctgaaaccggaggtctgtcttgaagtcctgaagcgatctcgcgcaccacttgctggaagggcagcttgcggatcagcacctccgtgctcttgtggtacttgcggatctcgcgcagcgccacgggtacgggcctgttcctgtggggcttnttcacgccgacggtcgtcggcgccgacttcctagccggcttggtggagagctgcttgcggggg

SEQ ID NO: 1284 - DNA, 421 bp, Zea mays
  Clone ID: TF_cC-zmle1890011f01a1
ttttggtttcgatacaactatattccaaaacaggggcgggatatctaatagggcaatgacacttgggccctatttatcaacccagcaaactttttgctgggctgcgctggtccgccgagaacatcaacactatcacgggccatacataagcgatgacgggtggaggacactacgaagaacccgtgtaagaaggggatacctaacaaatccgtggacgctgcaggctgctcaattgctggtgaacttggtgacggccttggttccctcggagacagcatgtttgcggagctctcctgggaggaccatgcgcacggaggtctggatctcgcgggaggtgatggtgggcttcttgctgtacctggcagagctggaggactcggcgcgcagctttttgaatatgtcgttgatgaacgagttcatg

SEQ ID NO: 1285 - DNA, 567 bp, Zea mays
  Clone ID: TF_LIB4827-050-A1-N1-B2
ccggccgagacgccgtgactccgccgcaaagagagggagagtccaccgttattcgtgtcctggcatccgcagagagcttgttccgtcctggcaaccaaaatgcaagttgccccgccgcgcacaggaagaatagagcagaggaggatggttcgtacgaatgagaccgcccgtaagtccacgggaggaaaggccccccgcaagcagctcgccaccaaggcggagaggaaatcggcgtcgaccaccggctcagtgaagaagccccatagtgacatggcccgaaaccgcggcgctgaacgagattccctagtacaagaagagcactgagttgctgatccgtaagctgcccttccagaggctgtggcgcaagatttcgcaggactttgagaaagaccttgggttatatactcacggcgtgttgcatgtccagaaggctcttgaggcctacctcgactatctcttcgaggactgcaaactctgcgacatcgacgctaacatcgtcgccatcatgcgctgggacttacaactcctccgccgtgttgggggtcatcgcctgtatccatcatttcc

SEQ ID NO: 1286 - DNA, 532 bp, Zea mays
  Clone ID: TF_LIB4764-069-R1-K1-H1
cctcgaggccggccgggatccacccatcagtacccaaccttcccctacaccagaaaaatccccagttctttggtccgcgtcagagaggcggcggcgatgtctgggcgcggcaagggcggcaagggtctgggcgaggggtggcgtgaagcgcatctcggggctcatctacgaggagacccgcggcgtgctcaagatctttctcgagaacgtcatccgcgacgccgtcacctacaccgagcacgcgcgccgcaagaccgtgaccgccatggacgtcgtctacgcgctcaagcgccagggccgcaccctctacggcttcggaggctaggctaggcgcctcttcgtagtcggggactggttaggggacatgtctctgtgtgatgctttctgaggtagtattgctgcaatagctgtgtaatccatcgcttctgcaatgaagcgctttgaagcatgctacgtatgttgtgtctgtgggtgattgtatttctggtagtaacagtgattcttcctgaaaaaaaaaaaaaaaaaagcggcc

SEQ ID NO: 1287 - DNA, 735 bp, Zea mays
  Clone ID: TF_LIB4185-041-R1-K1-F4
gccctccctcgagttttttttttttttttttttttttttttttttttttttttttttttttttttttttttttttttttttttttttttttttttaaaaagggaaggggcccgggtgtcctaaaaaaacccccccaaaggggtggggggacaaaaactttggggatctcccctaaacatgatctaattaaacggcccaattgttaagggaaaaattgtttaaaaacaggaaacccctctcccccttttggggggactaaagggcctttttgggctccttggcccccttttgggccccctttttggggaggaccccaggggggattttggggaggacccccccgggggcaaggggaaccccccccaaaagtttgccaagctccttttttttggggatgggaaaaacccccgggcccggaaaaaaccccctttttttgttgccccttgccgggttgccgggaaactcaaccccctcggccggggggtcccccaaaacggggggaaggaaaaagggggcccccgtccctaccccctgggggaaccggccttttttgaggcccccccccccccggttgacgggaaactgccccccccccctggaggaccccaaacccgatttttttgtgggccccccggctttggcccccgccgggcctttttttgccttaccggcgggtccgttaaaggacatgggtgttacgggggggcttccaaatggaaaaaaaaaagggccctt

SEQ ID NO: 1288 - DNA, 585 bp, Zea mays
  Clone ID: TF_LIB4171-011-R1-K1-G10
ggtaccggcccccttcgcggtttttttttttttttttttttttttttttttttttttttttttttttttttttttttttttttcaaaaacagccaaatggtttggccaaaaacatgggcccccgatggcgggacaaaaagcgataaagcccttcgcctatttcaaactttacaaaaccgggaaaacagagcagcattcgggccctttcccccttgaggcggggcgcgacctggatgccctgggccataaggggaaccctttggggggggagggcccaaaggttggggccctaaaaaaaacccaccaaatccccctggggggcctcttgcagggggggaacgggggaggacggaacccaagggtcggttttgaagttttgcgcaatctccccccccagccgtgggaggggcagtttccggagaagcagctccgggctttttgggaactgggggatctcgcgaaaagcaacgggcccggggcgaaacctgggcggttttttcaccccgcggggggccggacccgatttgcgcaatcaaaggatttaaaatggaaaatcggcctcgggccaaattcctgcagccgggg

SEQ ID NO: 1289 - DNA, 621 bp, Zea mays
  Clone ID: TF_LIB4729-112-A1-K1-B10
gaaggtttctccgccactgagtccccatctcacgcatctccttgtaccacaacactgccattcacccaactcggcggcgatgactgggcgcgtcaagagagccaagggaatggggaaggccggcgcgaaacgccaccgcaggttctccgcgacaacatccatggtatcacgaaggcgaaaatccggaggatggaccaggcaggggcagccgtgaagcgtatctccgggcttatctactaggaaacccgcggcgggctcaagatcttcctcgagaatgacatccgcgaacgcgccacctacaccgagcacgctcgccgcaagaccgtcaccgccaaggatgttgtgtacgccctcaagcgccagggccgcactctgtacggcatcgatggctgatagcatctcttccctcgtatgcagcggctgccggcggagtttcctcagtaccctctgacttgattggcttggtgtacagagttatcatattagaatacctctgatgcgcttcgttatcgggcgaaatcatgtgccccagcagcgctgtgaaatcgagatcaagatgtatctttctttggagtaatgaaatgccaaaatcgagatcaagatgtatcttttctttgaagc

SEQ ID NO: 1290 - DNA, 378 bp, Zea mays
  unsure (1)..(378): unsure at all n locations
  Clone ID: TF_LIB3279-014-P1-K1-D8
ccgcaagctgcccttccagcgcctgggccgcgagatcgcgccggactggaagaaagannanggttccagtcctccgccgtcgccgcgctgcaggaggccgccgaggcctacctcgtcggcctgttcgaggacaccaacctgtgcgccatccacgccaagcgcgtgaccatcatgcccaaggacattcagcttgcccggcgcattcgcggggagcgcgcctaaggggcccggcggataagccgtgggccggggggcaaggtctttttgggaggttggactacagggcggggccggggggaagagggggggtcttgtaaaaaagggtcaaaacaagggaaaatctttggtgggataaagggaaaagcgactttgtgtggt

SEQ ID NO: 1291 - DNA, 496 bp, Zea mays
  Clone ID: TF_LIB3279-192-Q1-N6-E9
aaaaaaaaacaggggttttttttttcctttttaaatagcaaaggacaattgggggggggacacatccccttccaagccctttggtccaatttggagcctacgcataaccgttttcgggaaaaagggtcctgttaaaaataaaatcactccggacaggaagtttttgcctttttaggggacttgggggcttttttgggcaattttgcctttttgttcccgccattggaccctttttccgccgtttttttgggaaaaaaaaaagggttttttttggggagcacacccccgggagcgatggtaacccccccaaaaagtttccaaagttttttgtttttccggatcgccaaaagcacgtggggcggaataatgcgagtttttttgttgtccctggaagatttaccggggagctccaaaacctaaggggggaggttttcaaggacagcggcaaggtaaacgggggccccggtcccaacacccttggcgtaggggccctttt

SEQ ID NO: 1292 - DNA, 527 bp, Zea mays
  Clone ID: TF_LIB4730-090-Q1-K1-H2
accggccaccgcgaatccagagccccacgccccgtccgaaccccagagcagagcaaagcctcctcgacctccctgtccccagccttccccgatggcccgcacgaagcagacggcgcgcaagtcgacgggcggcaaggcgccgcggaagcagctggcgacgaaggcggcgcgctgcaggaggccgccgaggcctacctggtgggcctcttcgaggacaccaacctctgtgccatccacgccaagcgcgtcaccatcatgcccaaggacatccagctcgcgcgcgcatccgcggcgagcgcgcctaggcggttcggttgcggcgcctgctcgctactgctggaggtgcttagtttagcccgtcatggttgtgttataggtgtgcgttgttttcaagagtaggcttcttgctatgtgctgatgttaacggaggattatgattagcagttctgaaaaaatgcaatggatgtgatctgctctatctacatgttttctgtctttgtcctggaatcccatggtgtttagcattg

SEQ ID NO: 1293 - DNA, 623 bp, Zea mays
  Clone ID: TF_LIB4730-113-A1-K1-G1
cctcgagccggccgggacattcattccaccccatgcccctttacctcgactccccgaatcccgacgctatggcgcccaaggccgacaacaactctcggcatgagaagccggcggccgaggagaaaggggagaagacgaccgctggcaagatgcccaagtccgagaagcgcctgaccgcctccaagtcctccgggaaggagggggcggagaataatgtgaagaagaaggcccagaagagcgtgggagacctacgagatctacctcttctaggtcctaaagcaggtgcaccccgtagcatcgtcatctcctctcatggtgatgtccatcatgaactccttcatgaacgacatcttccagaaggtcgccggttaggacgctaagctcggccggcatctctggaagcccagcatcaactctcgctggatccagacctccgttgtgccatcatcctgcccaggattagctctgccaaagacttcgtttgcgaggtatactcatgtcgtcgccaatgtcttcagccatggatcactctgcaccgtccacgtgattagttaagtctcctcttcttacgagggttcttctgagggtcttctacccctccgcctccgctgctatgtatgtgc

SEQ ID NO: 1294 - DNA, 433 bp, Zea mays
  Clone ID: TF_jC-zmX700240924b1
cttcttaggtccctttttttttctcgatctggacgcgccgcactagcagccatggtcgtaagcgaagctggcggaaaggcgaacaactgcgccgatgagcgcacgttcggcgcgccgactaagatttttgtgtcgcgaccctacatggatcgtctgcagttccctatcagacgtgttgggcgcctcttataaaagggccgatgccctcccatgctaatcacttctgcccccttctacatctccgacagtctggattacttactgaacgtggtgcttgcgctcaccggaaacccggaaagggacaacaagaagacgcgcatcatcccgcgccacagtgctcttctgcatcaccaacgacacgtagctctgcaagctgatatccgcagtctccatctcacacagcggatttctccccaacatacacactgtgctc

SEQ ID NO: 1295 - DNA, 511 bp, Zea mays
  unsure (1)..(511): unsure at all n locations
  Clone ID: TF_LIB4729-048-R1-K1-H3
cgggacgacacgactctcggcaacggatatctcggctctcgcatcgatgaagaacgtagcaaaatgcgatacctggtgtgaattgcagaatcccgcgaaccatcgagtttttgaacgcaagttgcgcccgaagccttctggcggagggcacgtctgcctgggcgtcacgccgcctcgcatcaaaccaactctttcccaaatccaccgccggctcggctcgcccatcttcgcgccaagcaccgaatctccgatggcccgcacgaagcagacggcgcgcaagtcgacgggcggcaaggcgccccgcaagcagctggccaccaaggcggcgcgcaagtcggcgccggcaaccggtggcgtgaagaatcctcaccgcttccgccccggcaccgtcgcgctccgggagattcgcaagtaccagatgagcacggagctgctcatccgcaagctgccctttcagcgcctcgtccgtgagatcgcgcatgatttcaaagaccgacctncgctttcagtc

SEQ ID NO: 1296 - DNA, 449 bp, Zea mays
  Clone ID: TF_cC-zmle189068a05d1
gccgacgcgtgggcggacgcgtgggcgtacgcctgggctggagctttctctttttgctgccagggacaacaagaaggcgcgcgtgattccgtgccacgtgcttctggcgatccggaacgacgaggagcttgggaagctgctgggcggcgtaactatcgctcacgggggtgtgctccccaatattaaccctgttctgctgcccaagaagacggtggagaaggcgtacagtgtggggagcaaggaggcaaaatcactccaagaaggccgccaagtcccccaagaaggcatagactgactgtatggagtgatctgatgtttgagaggaccttgataccattctgctgtgatgcgtagggtggagatgggtcaaatgttcttgagtgtgaatgtgccctggtgcaagtggccctttgctatttaaaatggaagaggaaaagcctggttttctg

SEQ ID NO: 1297 - DNA, 491 bp, Zea mays
  Clone ID: TF_LIB4762-010-R1-M1-E1
ggtctcggggggcgccttttttttttttttttttttagtatcatgtgggccatctctaccagggctaactgattaatgcagtatagactctcgaatgctccactgggtgaaccatcaacctaggacagtctgaagtatgagaagacacagcaacgcgcgctgaaggaggaaccctaagatgaagccacgaagctgaccgtctgcgagcctgaggtgacgatgttcttgtcgagcttgacggggaggacgaggcccacctaggtttggccctactggaaggcgctagggggctgtctgacgtagcggtcgagctaggtctgcttggactggatgttcttgaagatgagccccatgaaggagcgcatgatggacatccccttgggccaaatgccaatgtccggatgcaactgctttagcaccttgtagacccagagcttgagcgcctccacgctctccttaggcgtattctttccctgtttatggccggcctc

SEQ ID NO: 1298 - DNA, 1407 bp, Zea mays
  Clone ID: TF_ZmC10394_1
atttgcggacgcgtggggttggcacgtgctggtcatttagaagaagcatgggattttattgaggaaatgcctggcaaggtagatgccgtcatgttaggcgctttgcttgctgcttgccggaaatgcaagaacactgaggttggtgagagggtcatcaataggattatgaagctggagccatcaaactcgtggaactacgtggtgtcatccaagatttatgcaacctcagataaaatggatgaatctgcaaggatgatagggctaatgagggagaggggtgtcaacaagactccagggtgcagctgggttgaggttaatggaaaagttcttgaattctatgcaagcactgaaccacagcatggtgcggaagatatgtatcaactcatgggcgtactggtaaatgagatgagactaaagggatatgttccaaaccttgatctggtgtagcacgtaataaagcatatttcctgttcttcttggagcaaaaggaatgacttatgctaattcacaggaggaggaaaatcgcaaaatgaaataaacagaggaacgacaagaacagcagcagccaacaatatgatgggataccatactataatataaaacgaaaaagagggaacacccaaatgctaaacctcaatagctgatactctttgcctgatttcaacttcttccttaatgcagtgaaccatttgcagcgtgctaagcaatcgttattgacaattatttaccttctcacttgttcaataaagtgtgccgcatggaatctctcatttggctattgggacctttttatggtctacttcctaccaccaccaccaagtcagtttgtttgtaagctgggaagataagagttcagttacaccatgtggctccttaaatatgcacatgatttttaatgttacaggacaaggtgaggttggcaactattgatggatccttacttctagagttgcgctgaagctatcttttgttcgcttgttttgttcttagaatactttgttttgtgctaattttgttcatccacttcctgcatatggatactaatggggaagagggcaagaagagcgtggagacgcacaagatctacatcgctgaagcaggtgcaccctggtattggaatcccctgcaaggtcatgtctgtcatgaactcgctcatcaacgacatcttcgagaagcttgccggtgaggctgccaagttcatcggctacaataagatgcccaccatcacatcctaggacatccaagggcatcaaggccgtcaccaagttcacctcgtcttaggcttcttctccggtgcttctgtgtcttcgtgtgagtaacatgttggttggtcggaggcttggctgttatggtatcgtgtaattgccgcggtggctttttggcagaatggaatgctatggttatgtg

SEQ ID NO: 1299 - DNA, 530 bp, Zea mays
  Clone ID: TF_LIB4762-024-R1-K1-G4
gacacccacacaaattcaggaactcgcatttttctgcgtcatccaagttgtggcggcgcagcgctcggtttcggcaatgtcggcgcgcggcaagggcggcaaaggtctgggcaagggcggagcaaatcgccaccgtaaggtgctccgtgacaacattcagggcatcaccaatcccagcgatccgtatgtctgtgctcggcaggggccggcgatgaagcgcatgtgcggtgtcttatctactaggagacccgcggagtcctcaagatcttcctcgagaacgtcatgcgcgacgccgtcacctacaccgagcacgcacgccggaagaccgtcaccgccatggacgtcttctacgcgctcaagcgccagggccgaaccctctacggcttcggaggctaggctggatgcctcttctccttgctatcgtggatgcctgcttgttgttagggttactgcgtttagttgcttggctgtgacgtgtcggactattgctagtagtattcttgaaggtgtgcttcgaatgtaaaactttt

SEQ ID NO: 1300 - DNA, 685 bp, Zea mays
  Clone ID: TF_LIB4975-064-Q1-K1-A6
gtgttccatttgcttcggctcatctcagatcaagctagcgcacctgacacccaccacctccctcccagatccaccaccccagtcatgggcaccgcctttgactccccgacctcctgccccgcggccgcgaaccttccacgacaacccttgcccacctttggacggcgcgagacgcgccggggcatgagcgttgccgaaaacccggacacgcttacgccccggtacgattgcgcttggcgagatccgcaagtaccacaatacgacgaagctgttgcatccagcggctcaccttcaagcggctccgccgctagatcgcgcaggacttcaagacggagctgagggaccactgctccgacgaggcggcgatgcaagaggccgtggacgtgtacctgaagagactcttagaggacaccaacctctgcaacatccacgtcaagatggacaccatcatgtccaaggacatccagatcgacagccgcatcagggacgagagggcttgatcagcggcgatgctgcagttcttggctgcaatgtctgaagaatatggagcctagggctgatggtgatacagggtggcccttactggcccgaccagacgtcgcagctccaatatgctagcatttgggaggacgcgccgccgcaaggcatgttcatttgagcatgaaactcagaagctgcagatctc

SEQ ID NO: 1301 - DNA, 405 bp, Zea mays
  Clone ID: TF_LIB3357-030-P1-K1-H5
tcgtttttctttttcttttttaactcaagaccgatggctcccaagggcgagtataatcccggggcgaataagccggcggaggatgagcccgctgtggataatacgactgttgggaagaagtccaaggcggagaagcgggtccccgtgggcaagtccgtcggcaaggagggcggttagggcaatcgttgcatgaataagggcatgaagagcgtggagacgtacaatatctacatttttaaggtgctgaagcaggtgcacccggacatctgcatttcctccaaggtcatttccatcatgaactccttcatcaacgacatcttctagaagctggccggcgaggccttcaagctttgctctctacaacaagaaatgccaccattacgttccgtgagattcatactttcc

SEQ ID NO: 1302 - DNA, 362 bp, Zea mays
  unsure (1)..(362): unsure at all n locations
  Clone ID: TF_LIB4730-014-R1-K1-A9
ccggacacccgcaatcttaatctcccagcaatccctagcagagccttccatcctcactcgctcgatggcccgcacgaagcagacggcgaggaagtccaccggcggcaaggcgccgaggaagcagctggcgactaaggcggcccgcaagtctgcccctgcgaccggcggagtgaagaagccccaccgcttccgccccggcaccgtcgcgctccgggggaggcgcaagtaccataagagcacggagctgctgatccgcaagctgccgttccagcgcctggtgcggtagaccgcccccgccttgctcaccgaccgacgcctcccncccctattcctcgctccgttcccctgacacaccgcctgcc

SEQ ID NO: 1303 - DNA, 927 bp, Zea mays
  unsure (1)..(927): unsure at all n locations
  Clone ID: TF_LIB4762-019-Q1-K1-H6
gctgcagccgaccgcaacgcccctcatctccctcggccccgcacatccccgtacccgctggcgcccaaggcgtacaagaagccagcggcgaagaagccgtcggccgaggagaaggcggagaagacgaccacagggaaaaagcccaaggccgagaagcggctgcccgcgtccaacacctccgccaaggagggcggaaagaagaaggggaagaagaaggccaagaagagcgaggagacctacaagatctacatcttcaaggcgctgaagcaggtgcaccccgacatccgcatatcctccaaggccatgtcccatcatgaactccttcatcaaccacatcttctcacaagcttggcccgcgaggccgcccagcctggcgccgnacaacaagaaacccaccatcacgtcccgacgagatcccaaacctccctacctcctactcccttcccccgtagaagctcgacaaaacacgccccactcccgacacaaccaagggcccgccaacccaagtcccacccaccaaacctaaactcgcttcccgggcatcccctccgcttcctgttactaaacgttccttttgttttgcttatctttttcccccaccccccccctccctaacccccccccacccccctcaccctcgcncttcctccccacaccccccccccccccccccgtcgcggcacaccgctanctttcccctatctcgccctcccccccccgccccccaacccccccccccccccccctcccnnccccccttcaaccccccccaccccacccaaaacacccccccccccnccccacccccctccccccctacccatcactaccctcccccctcccacacccccccccctcccttccccccccctcccccctcccccccccnctcccgccccttcccccccccccccctccccctccccc

SEQ ID NO: 1304 - DNA, 403 bp, Zea mays
  Clone ID: TF_LIB3076-019-Q1-K1-A2
ttccgaattcgaggcacgagtcacgcgctgatcccgcatctcgtgccaactaccatagcactttcatcgtcgtacgacacaagcacaatgcgaaggggaaatacgacgcactgactccaccggcaccgtgagcatgggctaaggctaagaacgaagcgggccaacacaaggtccgccttccaaggaagaaaccagggtcgaggtccctgaaagccgatcttcaattctgcgtacgacgtatcgggcgctacttgaagaagggccaatactcacagtacgtcggtaccggcgcccatgactacctcgacgctgctctcgaatacctcaccgctcaggatctggaactcgacggtaatgctgacacggacaacatgaagactcgtattattccgcgccacgtgct

SEQ ID NO: 1305 - DNA, 334 bp, Zea mays
  Clone ID: TF_LIB3357-024-P1-K1-E7
ctcctcgtcccagacaagccaatcgaagccgagatacgaccatggactccaccggcaccggagcagggggtaaggggaagaagggagcggcctggcgcaaggtcggcgggccaaggaagaagtcggtgtcgaggtccgtgaaggccaatctccagctacacgtcggcctcattgggcgctacttgaagaagggccgctacgcgcatcgtgtcaacaccaacgcccccatgtaccttgacgctgtgcttgaatacctcgccgctgaggttctagtgctctacattaatgctggcagtgtcaacaagatgactagcattattacgctccacgtgct

SEQ ID NO: 1306 - DNA, 447 bp, Zea mays
  Clone ID: TF_LIB4742-074-R1-K1-C10
ccggccggggtatcctagccctcaattggttacatacaggcaaggtagaaatcgagtagtcaggagaggagaagatggttcgttcgaaacagaccgccctgaagttcaccggaggtaaggccccgcgctagcagatcgcctccaaggtggacgtggaagtcggcgccgacgaccggcggagacgaagaagccccacatgtactggcccgagactgtggtgctgcgcgatgatccgcatgtaccataacagcacggttgtgctgatcggtaaggtgtccttccagtgcctgatccgtgatatcgctcaggacttcaagactcatctggtgtttcagagccacgacgccctggtcctccatgaagccggcgatggctacctcggcgggctgttcgaggataacaacctctgcgccgtccacgcagatcgcgtcaacatcatgcccaaag

SEQ ID NO: 1307 - DNA, 720 bp, Zea mays
  unsure (1)..(720): unsure at all n locations
  Clone ID: TF_LIB4730-101-Q1-K1-H3
aatctaattcacagcgctcaagttctcgcgcccacggccaaatttttctccactcaatcgcggaataatctgcactgcagccatgtacgtcagcgtagtcggcatcaaggcgaagaagggggcggctggtcgcaaggctgtggtccccangaacaatcggtgtcatgcctcagtcaaggccgggctgcagttccccggcggtcggatcaggtcgctacctcaagaaggggcggtacgcgcagcgcgtgggcaccggggcccacgactatctcgtcgccgtgtttgagtacctcgtctgcgaggtgttggagttggacgataacgcggcgaaagacaacaacgagagacctagccatcgtctgcgcgcacacttatgctccgtgtgagatctctgaaccgactactgtaggctcaggcaagcttgcttgtcatggcagtcaccattcgctgctacgcgcgactgtaccttcgcccaaccatgcaaacccagcgatctccttgccacaagtaatcgtggcaggcgcataagcgctcacatacggcagtgcagcaagcgatgagcaactaccctaaaaaggacgccctgttctcatataaggcagctcaagtccccgaagagaggcttacatattagtcacttcactagcggtctgctgtagcatgatctcggacacatctgtgtgacttatgtgctgcagcctaattgcctcttttgcttgc

SEQ ID NO: 1308 - DNA, 421 bp, Zea mays
  Clone ID: TF_LIB3357-059-P1-K1-H11
ggctgaccccaccaacagcaagcgaaaatctcccgataccctctagtcttcgtggaaaagatgtcggctcgcgccaaaggcggtaagggcctgggcaagggcggatcgtaacgccaccgaaaggtgctccgcgacaacattcatgggatcacaaagcctgctatccgtgcgctagcgcacaggggcggcatgaagcgcatctgcggtctcatctactaggagacccgcagcgttctcaagatctatctgagagaacgtgatccgcgacacctgaacctacaccgagcacgcgcgccgtaagaccgtcacagccatggacgttgtctacgcactcaagcgccagggccgtacactctactgtttcagccgttaagataagccagtcacgcctccgtgtcatcactgcggttctattgttttt

SEQ ID NO: 1309 - DNA, 586 bp, Zea mays
  Clone ID: TF_LIB3600-040-Q6-N6-C10
ttttgtttttttttttttttttttttttttttttttttttttttttttttttttttttttttttttttttttttttttttttttttttttttttttttttttttgggcacacataagggggggtttccattggtgacaacaaaggggggggggggggtggggacattggtgattaggaaaccatttctttcaaaagacccggccatttgtacaaacttccgagaagagactgggccacgggctttccgggcgggcgggcccttaggggccctccccggggatgcggggggcaaactggatttccttgggcataaaggggacccccttgggggggatgggccaaaggttggggtcctcaaacaggcccacaagggaagccttgggggccttctggaacgggggaacgggggaggactggaagcgggggtcggttttaaagtcctgggcaattttggggaccaggggctggaagggcaatttggggataaacaactcccggcttttttgggacttggggatctcgccccccgccacggggcccggggggaaggggggcggtttcttcacccccccgggcgaaggggcc

SEQ ID NO: 1310 - DNA, 406 bp, Zea mays
  Clone ID: TF_jC-zmXLIB3526P037af07a1
ggttggggtcttttttttttttttttttttttttttttttttggacccccaaataagcaactagctggattcaataaacattggtactggtccataaaataacagttgctaccgggggaaaccaaacacagcagcccctaactacaggaagacacccgaacattccagggaagcctcgaagcggaggccacccagcctaagacgaggggaacttggagacggccttggtgcccttggaaaccgggtgcttggggaacttcccggggaggaccaggcgcacggaggtctggatctcacgggaggggaaggggggctttttgttgtaccgggcaagcttggcggccttgggggcaagcttcttaaaaatgtcgttgatgaaggagttcattatggacatggccttaaa

SEQ ID NO: 1311 - DNA, 432 bp, Zea mays
  Clone ID: TF_LIB3355-039-P1-K1-D9
ctcgcattttccttgcaaccgattgcctatccccctcccaacccaagaccgatggcgcccaaggcctataagaagcccgcggcgaataagccggcggaggaggatcccgcggcggagaagacgaccgccgggaagaagcccaaggcggagaagcgggtccccgcggtcaagtccgccggtaaggagggcggctagggcaagcgtggcaagaagaagggcatgaagagcgtggagacgtacaagatctacatcttcaaggtgctgaaacaggtgcacctggacatcggctttttgtccaaggccatgtccatcatgaactccttcattaacgacatgttttacatgctgctcgccttatccgtcaagctctgcgcgctataacaagaagtccactcatttcgttctcgtagatccatacctgctagcgccttc

SEQ ID NO: 1312 - DNA, 668 bp, Zea mays
  unsure (1)..(668): unsure at all n locations
  Clone ID: TF_LIB4975-031-A1-K1-C6
ctcgaggcggcgggcgggaaatagaccagtaaatgctcattgttcgtctacctccggttcgcctgttcgcaatccgccgcttcccatcccgcgatggccgctccatttgatcaaattcgcgagggcgcccacgggcgatgaagaacgccgcgccataagaaccgacggaggagaacgcgagacaagactaggggggacaacgcgtgccggctctgagggcgcggagaataaggggaagaagaatgccaccaagaccgtctagacgtactagatctacatcttcctcgtgctctagctcgcgctcctggacattgtgtatctcgtccaaggccatgtccatcatgaactccttcatcatcgacatcttcgacaggctgtctgccgaggtcgtctatgctcgtccgctactagcaagaagcccactataacctcccgggatatccacacttcggagcgtctcgttgttcccggcgagctcgccgagcacgccgtctccgagggcacccatgatgatgccaagttcgcttcctcttagatcgccgccggcggtgcgacggctctggttcgtttcctcgtgttnaagcncagtgctactacgttgcccgaggaacaatgtactgctggaaatttctaatatatttccagattgtgccgaaaaaaanatcaat

SEQ ID NO: 1313 - DNA, 395 bp, Zea mays
  Clone ID: TF_LIB3059-049-Q1-K1-G1
cacgctcttgcgcccagacccaaatatttctccactcaatcactgcagtcatggacgccaacggagccagtagcaaggcgaagaacggggcggctgggcgcaaggctggcggccccaggaagaagtccgtgtctcggaccgtcaaggacgggatgcaatttcccgtaggtcggatcgggcgctacctcaagaagggccggtacgcgcaacgcgtgggcaccagcgcccacgtgctatctcgccgtcgtgcttgagtacctagccgacgaggtgctggagctggacgtcaacgcttcgaaggacaacaagaagacgcgcatcgtaccgtgccacgtgctcctggcgatcgcgaactacgttgaactcggcgcgctactgtctggcgtcaccatctg

SEQ ID NO: 1314 - DNA, 507 bp, Zea mays
  Clone ID: TF_LIB3637-242-Q6-K7-A5
cgcgccctggctcccgggcgaaccgatggccctctacttatccccccagcgcaaatccgggctctcctcctggcgctacaagccttggccttccgcggcaccgggattggcgctgcctcccccgagctggggagggcctgcaactactagctgtgctggggttttccgtggggagtgagcggtcacctcctccagggcggccagtacccggaacacggggacgccctggctcctggttacctagacgttgaacaagcttacgcgccaggtgaggttctgcaactcgcagagaactcagagagggataacatgaagactccaatccggccgctgcacatccaggtcggcgtgcgcaacgacgaagagcagaccaagctggttggcggtgccaccagcgcgagcggcggcggtatgcccactatgcactatgaactaccgaccaagaacgctggctctaccaaggctaccacctgcaaaggacgactactagcagcgctgcccactgca

SEQ ID NO: 1315 - DNA, 397 bp, Zea mays
  Clone ID: TF_LIB4758-112-R1-K1-B11
ccggccgggaattcgtcgctcaagctagtccgccacgagagcttcgtgtcggtcgagtcaatcgaaaaaggaagttgcacctgccgcggatagcaagaacagaggagaggaggatcggctcgtactgcaagtcagaccgcccgcacagtccactgtcgaggcaagtccccccgcaagcagctcgccaccaaggcgacgaggaagtcggcgccgacgaccgtcggcgtgaagaagccccacaggtacaggtccgtaaccgtgtggctgcgcgagatccgcaagtaccagaagagtacggagctgctgatccgcaagctgcccttccagcgcctggtgcgcgagatcgcgcaggacttcgagatatattttttttttcagagccccgccggggtggcac

SEQ ID NO: 1316 - DNA, 412 bp, Zea mays
  unsure (1)..(412): unsure at all n locations
  Clone ID: TF_uC-zmflteosinte93b03b1
ggaccggccggaagcccgggcgacccacgcgccgttcttcccaaacaancccccacnnncnncgaggcgaggagagcgagaaaaacagggcaccggcagcgacgatgacggggcgcggcaagggcggcaaaggaccgggcaagggcggagcaaagcgccaccggaaggtgcgacgagacaacatccagggcatcaccaagcccgcgatccgcaggctggcacggaggggcggcgagaagcgcaaaacggggcataactacgaggagacccgcggcgcccccaagaacttcctcgagaaacgacatccgcgacgccgacacctacaccgagcacgcacgccgcaagactgataccgccaaggacagcgactacgcgcccaagcgccagggccgaacccccaacggcatcggag

SEQ ID NO: 1317 - DNA, 313 bp, Zea mays
  Clone ID: TF_LIB3150-033-Q1-N1-C6
gcaaagcaaagcgctagccttcctactgtcccgatggcccgcacgaagcagacggccaggaagttcactggcggcaaggcgcctatgaagcacctggccactaaggccgctcgcaagtttgccacggctaccggctgagtgaagaagccccaccgtttccgtcccgacaccgtcgagctcctggagatccgcatgtaccagaagagcacagatctgctgattcacaagctgccgttccagcatcatgtgcgtgagatcgcccaggatttcaagaccgaccttcgcttgcagagctgcgtcgtcgccgcgctga

SEQ ID NO: 1318 - DNA, 408 bp, Zea mays
  unsure (1)..(408): unsure at all n locations
  Clone ID: TF_LIB4730-060-R1-K1-F3
acccgcaccccacancactcanccacagcncgcagccgnannccngncncggaggcgcgctcgccgcncacgaggcccgcacgaagcaaacagcaaggaagncgaccggcggcaaggccccccggaagcagcnggccacnaaggctgcgcgcaagncggccccggccaccggcggcgngaagaagccccaccgcgnccgccccggcaccggcgggcgccgcgaganccgcaaggaccagaagagcacngagcngcncaaccgcaagcnccccnnccagcgccncgnccgcgagaacgcgcaggacnncaagacngancngaggnnccagacccccgccgncgcggcgcngcaggaggccgccgaggcgnaccnggnggggcncnacgaggacaccaaccnnagcgccc

SEQ ID NO: 1319 - DNA, 745 bp, Zea mays
  unsure (1)..(745): unsure at all n locations
  Clone ID: TF_LIB4729-057-R1-K1-C7
gcaccaccgacgcgccgcccaaaccctaggcgtcgacgctcgacgacgttcgccatggttcgcacgtcaacacgacccacctcctgtatcacgtcgaatggcacctcacaagggcagacactggataaaccggacgacaccaacgggcagtcggcctgtaccgcaccggtcattgccgggcgccgcacggaatccagagctccggacgatcggcgcatggctgtcacacggaccagaggcttgctagtctctcgcagacaagccggcatgcgcctacgctacgcttaagcaggggcgcgcgaccacgcagacgtgtgggcactggctgcggtacctacctcgccgtggctctgaagcacctcgtcgccgagggtgtgacccaccgagccaaccagggaaaggacaacaacatgagccgcatcatgccgcagccatgtgctcctgaagatccgaacgacgaggagctcgggaagctgatgaacgtcctcaccatcgcgcacggcggcgtgctccccaacatccactgcgtgctcctgcccaagaaggcgcgggacaaggtggacagcggcggcagcaaggagcccaagttccccaagaagggcgccaagtaccccaagaaggcttagaaagtagggtcttcatttgcgctgtgtgctgtagcatgttcgtgtctagatctgtggatgggatgtgtcatgctttagtatcgnccttgtgctctattgtatgttcgtcttcatcgaga

SEQ ID NO: 1320 - DNA, 388 bp, Zea mays
  Clone ID: TF_LIB3070-004-Q1-N1-G12
gcttgttctcttcgtgcccgacaagccaatcggagccgagatacggccatggactccaccggcaccggagcaaggggtaaggggaagaagggagcggccgtgcgcaaggtcagcggaccaaggcagaagtcggagtcgaggtccgtgaaggccgggctgctgctacccgtcagtcgcatcgaccgcaactggagaaagggccttaaccacaaggggttgggagccgtgcccacgatttacctaacggttgacctgaattccttggcgctgatgttcctgaagctagctgttaaggctaccggggccaccaggaaacccggatttattccgcgccacgtgctcctggcaacccgaaccaacaggaagctcgagaagctgttgggcggct

SEQ ID NO: 1321 - DNA, 500 bp, Zea mays
  Clone ID: TF_jC-zmshLIB3569P023a05a1
ggggatgacatcaataacgattcaaagcttcaaacagccaaacccacagttaagtttggatacccgttcaacaacccggggatatatcacgattattaagtagtcctaaaaggggtggataaaaaactccaaaccccccaacagccaacagtttgcccatgcatatgctactggggttacagtcaaacaggccaaggacagtttactaaatcattttttcacaaaacttacagggggagagaggggaacacccaaaacgagcgcagagtttttcctcccgtcgacagaattacccccttttgccacggatcctttttgccaactgaatgtccttgggcatgatggtcacccccttggcatggatcccccacaaattggtttcttcgaaaaaaccaaccaggtaggcctttgctgcctcctgcaaaacaagcacggcatggctctggaagcccaaatccgtcttgaaatcctgagcaatctccctgacaagcctttggaac

SEQ ID NO: 1322 - DNA, 439 bp, Zea mays
  Clone ID: TF_LIB4730-112-A1-K1-A4
gcgcggagctgctcatccgcaagctccccttccagcgcctggtccgagagatcgcgcaggacttcaagaccgacctccgcttccagtcctccgccgtcgccgcgctgcaggaggccgcggaggcctacctcgtcgggctcttcgaggacaccaacctctgcgccatcgcacgccaggcgcgtcaacatcatgcccaaggacatccagctcgcccgccgcatccgcggggagcgcgcttaagcgtttacggttgattgtcactactgtagatgtgtaggctatgttctcgccatgctctaggtctgtttccctcttatctgtcattttggtttcatcctgaacggtgaagcgtgggcaagagctatcggtgcctgcctgagaactggagtgatctattggcgccacaagaataaaaaaactggcggccctggaagctcca

SEQ ID NO: 1323 - DNA, 280 bp, Zea mays
  unsure (1)..(280): unsure at all n locations
  Clone ID: TF_700051888H1
gcatccgcaggctctcgagctctagtccatcccctcgatctcgtagcgcacagcagcagtcaggcggccatggacgccagcgcagcgatagccggcgggaaagcgaagaacggcgcggccgggcgcaaggccggcgggccgaggaagaagtcggtgacgaggtccgtcaaggccgggctgcagttcaacgtcggccgcatcgtgcggtacctgaagaacggccggtacgcgcagcgntcggcacaggcgcacccgtctacatggccgccgtcctcgagta

SEQ ID NO: 1324 - DNA, 240 bp, Zea mays
  unsure (1)..(240): unsure at all n locations
  Clone ID: TF_LIB3180-060-P2-M1-H6
attccctttttacccactctgttttactccaccaccgccataccancgcgccgagctattaaaaagaggtcggcgggcnaaagagtantctcagacgagaagaggtgaatatgagttccggcggcggcaggggcaagcccaaggggtccaaggctgtgtctcggtcgaccaaagctgggctgcagttccccgtcggccgtatcgcgcgctacctcaaggccggcaagtactccgagcgcg

SEQ ID NO: 1325 - DNA, 319 bp, Zea mays
  Clone ID: TF_LIB3279-051-P1-K1-C7
cagccatggacttgagctgagcaggcggtaaggagaagaagggcacggacgggcgcaaggccggctggccgacaaaaactcggtgtcgcggtcctgcagggccgggctgcagttccccgttagacgtgttgggcggtacttcataatggggcgattcgcgtaccgtgtaggcactggtgcctacgtatacctcgccggcgtactgtagtacctagaaggcgacgtacttgatctcgacggctacgctgtaattgacaacgagaatacgcgcatgatcccgcgccacgtgctcttctccatccgcaacgacgaggagatc

SEQ ID NO: 1326 - DNA, 464 bp, Zea mays
  unsure (1)..(464): unsure at all n locations
  Clone ID: TF_LIB3279-180-Q1-K6-D12
gggggggggccaaaaaagaagccagcgggagaagaagccggcggccgaggagaaggcggagaagacgaccgcaggnaagaagcccaagnccgagaagcgccngcccgccncgaagncctccggcaaggagggcggcaagaagagagggggggaggggggctttcctctttttggagaccnacaaaancnacancgncaggggggggaggcaggngcaccccgacaccggcancnccnccaaggccangnccancangaaccccnncancaacgacaccnncgagaagcncgccggcgaggccgcgaagcncgcccggggcaacaagaggcccaccancaccncccgcgagaaccagaccgccgngcgccgcgnccncccaggagagcgcgccaaacacgccgncnccgagggaaccaaggccgncaccaaggncaccagcaanggagcagcccccagcggccac

SEQ ID NO: 1327 - DNA, 467 bp, Zea mays
  Clone ID: TF_LIB4071-010-Q1-N1-D9
agctccttgttaaggactaggcgcacggaaggactggatctcacgggaggagatggtaggcttgttggtatagcgcgcgagctaggcggcctgagcagcaagcttctcaaagatatcgttaatgaaggagttcatgatggacatgggcttggaggagatgccaacgtccgggtgcacctgcttcagcacctagaaaatgaagatcttgaaggtctccaacgctcttcttgcccttcttattgcccctcttgccctcgccgccttacttggcaaagagacttgccagcggagacccggtactccgacttcagcttcttcccggtgggcgccttatcggaagcggtctccttctgcgccgactactacaacgcgagtctctaataggacatgggcgccatagatgcaaggcgagatggggattcggctgcgaacggaggatcggatggcaagaaatgcgaggagacgcc

SEQ ID NO: 1328 - DNA, 267 bp, Zea mays
  Clone ID: TF_LIB3607-024-Q6-K6-H11
cgtgggcggagcctcccgctgtgcggggggacacaaagataatgatccgaaagctgccgttccagcgcctggtgcgtgagatcgcccaggacttcaagaccgaccttcgtttccagagctccgccgtcgccgctctttttttggcgtccgaggcctaccttgtggggggtggggggggacacctatctctgcgccattcacgcctagcgcgttaccattatgcccaaggacatgtcatttgcccgccggatccgtgtggtgagggcc

SEQ ID NO: 1329 - DNA, 328 bp, Zea mays
  Clone ID: TF_LIB3236-043-P1-N1-A7
ggggagcacacataaggggcgatttccattgctgacaacaaagagggtggcatggtgtgagacattgttgatcaatgcaccactccttgcaaacgacccgaccattagtacaaacttgcgagaagagcctgccccacgggccacggtctatccggccggccgtctaagctccctccccaaggatgcggcgggcaagctggatttccttgggcatgatagaaacccgcctggcgtggatggcacaaaggttggtttcctcaaacaggccggccaggtatgcctcggcggccttctgcagcgcggtgacgggggatgaatggaaacgggg

SEQ ID NO: 1330 - DNA, 384 bp, Zea mays
  Clone ID: TF_jC-zmXLIB3526P099bg02a1
ggagcgccttagtattacccatggtcgtgaagcggaacatgttaaaatgttaaaaagggcgcggtcggtttttatgtttttttttcgacgaaaaagacggaaaaacagccctccagggccagtctgctaatacccgtcaaccgcgaaaggggggacctcaaaaagggccggtacccgcattgtttatgcaaggaggcccccggatacctcgacgacggcctggagtacctcggggacaaggtgctcgagctcgccgacaacgcggcaagggacaacaagaagacgcgcatcatcctgcgctaagtgctgctcggcatccgcaacgacgaggaggtaggtaagctgctggccggcataaccatcgcccacggcggcgtgctcccc

SEQ ID NO: 1331 - DNA, 349 bp, Zea mays
  Clone ID: TF_700572124H1
cggcatatctgctcgcatttccttgcaaccgattgccttcagccgtcccaacccacgaccgatggcgctctacgacgataagaagcccgcggcgcataatccggcagattatgaccccgcggcggtgaacacgaccgccgggaacaagcccaaggcggacaagcggatccccggtgtcaagtccgccggcaaggaccgcggcgatggcaatcgtggcgagacgaagtgctagaagatcgtggagacgtgcaagatctacatcttcaaggtgctgaagcaggtgcagccggacatcggcatctcctccaaggacatgtccatcatggactccttcatcaacgacatcttc

SEQ ID NO: 1332 - DNA, 343 bp, Zea mays
  Clone ID: TF_LIB3078-007-Q1-K1-F11
cccacgcgtccgtccacgcgtccgcggacgcgagtgcggtcccgccatccaaccagaggggaagttgagcacacgagcataggtagaagagagcagacgatgatggctcgtacgaagcacaccgcccggaagtccacggtaggcaaggcccccagcatgcagctcgccaccaaggcggcgaggaagtctgcgccgacgaccggcggcgtgaataagccccacaggttcaagcccggaacagtgtcgctgcgcgagatcctcatgtaccagaagagcacggtgctgctgatccggaagctgcccttgcagcgcctggtgcgcgagatcgcgcatgacttcaaga

SEQ ID NO: 1333 - DNA, 353 bp, Zea mays
  Clone ID: TF_LIB3088-006-Q1-K1-F10
gttctagatcgcgagcggtcgcccttttttttttttttttttttttttttttttttgttttgttttttttttgggggggccggcaagcttgcgcgctacaacaagaagcccaccatcaccttccgcgagatccaaacctccgtgcgcctcgtgctccccggggagctcgtcaagcacgccgtttttgagggcaccaaggccgtcaccaagttcaccttcttctaggcttgcacgctcgccctttgtaggcttctcttgggttgatgttccccttgagttgtaactagatgttgcttggttatttgtcggcgctgctcttcttttgtaagaactgcgtcatgtaacccaccaag

SEQ ID NO: 1334 - DNA, 443 bp, Zea mays
  Clone ID: TF_LIB4730-038-R1-K1-A2
gcgtcttcgtactcgcctatctccgcgacccaaaggggtcccccttctcccattcttctctcatttctcaccaccggcgccgataccccctttcgacaacaccatgagggagtgcatctcgatccacatcgggcaggccgggatgcaggagggaaacccctgctgcgagccgtactgacggaagcatgggagggcgggcgatgcaagaataccggcaggaagagcgaggggacgtacaagatctacattttcaaggtgctgaagcaggtgcacccggacatcggcatctcctccaaggccatgtgcatgatgaactacttcatcaacgacatcttcaagaagctggccggcgagggcgacaagcttgagcgctacaacaagaagccgaccatcacgtaccgggagatccagacctacgagcgtctcgtgctccccgctgagct

SEQ ID NO: 1335 - DNA, 674 bp, Zea mays
  Clone ID: TF_LIB4746-033-R2-K1-C10
cattgggtacctcgaggccggccggggaatcgttgtcctcaatttctgcacgtccagggacggaagacatcgagcatcaacgagatgagaacatgcgtcctacgaagccgaccgccggagagttcagcggaggctgggccccgcgaccgaagctcgtcaccgaggcgccgaggaaggaagcgccgactaccgacgctgaagagaagccccacctgcacaggccaggtacggtggctgtgctcgaaatccacaagtaccatagcaaaaccgaactggtgatccgataggtgcccttccaggaactcgggcagagaatcgctcatgacttcaagacggatgtgaggttccagagccacgccgtcctggccctccaagaatccaccgaggcctacctcgactgtctgttcaatgacaccaacctctgtgccatccacggtgagcgcgtcaccatcctgcccaaatgacatccacctcgccttgcacgatccgaagataacgagtgcatgagtatctcacgcccggccccatggcaagaacatggatggatggagagcaatttgtaactttatgctgatagttcgatgttaaacggcgcgggaagacgcatcgaaaaacggctatactcgtgtattatgtgcaggagaacttgtatgccgcttcgtcccgaagcgaac

SEQ ID NO: 1336 - DNA, 440 bp, Zea mays
  unsure (1)..(440): unsure at all n locations
  Clone ID: TF_LIB3600-054-Q2-K6-B9
ccccgcgtccgctccgccgtcgcggcgctgcaggaggccgccgaggcgtacctggtggggctcttcgaggacaccaacctttgcgccatccacgccaagcgcgtcactatcatgcccaaggacatccagctcgcgcggcgcatcaggggcgagagggcttgagcgcccgtcgtgctgctcgttgttgtagtgttactagaagtagatggtggcattcgtttcgtggcttccttatcctgtaggagtaatgttctagatgtcttggcttcagtgcaatggactgtgattgctcatttctgaaatttatcaatgaacttgttcttgcaaaaaaaaaaaaaaaaaaaaaaaaaaaaaaaaaaaaaaaaaaaaaaaaaaaaaaaaaaaaaaaaaaaaaaaaaaaaaaaaaaaaaaaaaaaaaaaaaaaaaaanggggggggccg

SEQ ID NO: 1337 - DNA, 440 bp, Zea mays
  unsure (1)..(440): unsure at all n locations
  Clone ID: TF_LIB4729-090-Q1-K1-H12
cggggcgacacgctccagcgctcccccgcacctccgctcccacaccgccgccccgcacgaaccacacggcgcgcaagtccaccggnggcaaggcgccgcggaaccagctggcgaccaaggcagcgcgcaagtcgcccccggcgaccggnggcgccgaagaagccgcaccgcttccgcccgggcaccgtggcgctccgcgagatccgcaaggaccagaagagcacggagctgctcatccgcaagctccccttccagcgcctggtccgcgagatcgcgcaggacttcaagaccgacctccgcttccagaactccgccggcgccgagctgcaggaggacgcggaggcctacctcgcccgcctcttccaggacaccaaacctctgtgccatccacgataaacgcgacacccatacactgcccacggacatccagctcgcccgcc

SEQ ID NO: 1338 - DNA, 614 bp, Zea mays
  Clone ID: TF_LIB3596-044-Q6-K6-B10
ctttcttctcaaaccaacctagccattctccacagtctgtcatctggcgagtcctggcctctcctatctccgccagtatggcacccaaggcgtatatgaagcctgcggccaacaagcccgctggaggaggagcccccgacaaactaagcgctttaatgctccggcggggtaacagcccatggccgagaagtgccttccggcgggcaagtccaacgagggcgtgcagggcaagacggggaaaaagcaagcgaagaagtccgcggagacctacaagatctacatgttcaacgtgctgaagcaggtgcaccccgtcatcggcatctcgtccaaggtccatgtccatcatgaactccttcatctactacatcttcgagaagctcgcggccgagtccgccaagctggcgcgctacaacaagaagcccaccatcacctcccacgagatccatacctcggtgcgcctcatcctccccgaggagctcgccatgcacgctcgtctacgaggcactaacgccgttacgaatttcacctcgctctgaagatccttctaatggtcatgtgggcgttaacggtaggcgcggctgaacttatgtgatactgctagcgatggatgatga

SEQ ID NO: 1339 - DNA, 575 bp, Zea mays
  Clone ID: TF_LIB3600-020-Q6-K6-G8
atccccgcggggggcgagccgacctatcgtcctgtcgtggaggaagcaatggcggtccgtggcaaggcgattggcgctggtgccgctgaagaaggcaacgtcaaggagctccaagctgggctgcagtttcccgtgcggcagagatcgcctcggatcctcaagggcgggggggacgccaagcgcgtgggcaccggcgcccctgtctacctcgcagatggcctggagtacctcgccgatgaggtcctggagcttgctgggaacccaatgagggataacaagaagacccgcatcgtgcctcgtgacatgcaactcgccgtgcgcaacgacgaggagctgaccatatctgcttggtggtgccaccatctggagcggtggcgttatgcccaacatccaccaccacctcctacccaaaaaggctggctcgatcaaagcttacaccggcactaacgatgacaactgatactgcccactggagaatgcattcaataccggcttgtttcctaagtttagcacgcacctacacggcatgtctttgatagctctatgtgtttgacaatgacaatagtttctttctt

SEQ ID NO: 1340 - DNA, 450 bp, Zea mays
  Clone ID: TF_LIB3355-036-P1-K1-E9
tggtacgcctgcagcgctagccggtcccgaatcccagtttcgacccacacccacgcgttcgtatccggacaacaaccaaaaagcacgttgccccgccgcgcagaggaagaagagagcagaggaggatggctcgtacgaagcaaaccgcccgcaagtccacgggaggcaaggccccccgcaagcagctcgccaccaaggcggcgaggaagtcggcgccgacgaccggcggcgtgaagaagccccacaggttcaggcccggaaccgtggcgctgcgcgagatccgcacgtaccagaagagcacggagctgctgatccgtaagctgcccttccagcgcctggtgcgcgagatcgcgcaggactttaagacagaccttcggttccagagccacgccgtgctggcgctccatgagggccgcgaggcctaccttgtaggcctgttcgaggacacca

SEQ ID NO: 1341 - DNA, 440 bp, Zea mays
  Clone ID: TF_LIB3067-035-Q1-K1-C2
cccacgcgttcgtccacgcgttcggccacgcgtccgttcacgcgtccggcaagtaccagaagagcacggagctgctcatccgcaagttgcccttccagcgccttgttcgtgagatcgcgcaggacttcaagaccgatctccgctttcagtcctccgccgtcgccgcgctgcaggaggccggcgaggcctacctcgtggggctctttgaggacactaacctctgcgccattcacgccaagcgcgtcaccatcatgcccaaggacattcagctcgcgcgccgtattaggggccagagggcctgagcgaggcgaggctctcttaccgtaggcggcgttcgtgttgctttcggcctgcttggaagacttgtgcttctcttgggttactttttggtggcatttggcattttggtaccatagtgctttgtcttagtatcttagggg

SEQ ID NO: 1342 - DNA, 644 bp, Zea mays
  unsure (1)..(644): unsure at all n locations
  Clone ID: TF_LIB4975-058-Q1-K1-C4
ngactcgcaatcttcaatctccccagcaatccctagcagaagccttccatcctcactcgctcgatggcccgcacgaagcagacggcgaggaagtccaccggcggcaaggcgccgaggaagcagttggcgactaaggcggcccgcaagtctgcccctgcgaccggcggagttaagaagccccaccgcttccgccccggtaccgtcgcgctccgggagatccgcaagtaccagaagagcacagagctgctgatccgcaagctgccgtcccagcgcctggtgcgggagatcgcgcaggacttcaagaccgacctacgcttccagagctccgctgtctccgcgctgcaggaggcggctgaggctaccttgtcggtctcttcgaggacaccaacctctgcgccatccacgccaagcgcgtcaccatcatgcccaaggacatccagcttgcccgccgcatccngtggggagagggcctaagcatcgtatattctgtcatcagtgcccgatcagaagatgtagagnatgtgctgggttctggtagttttgggttactgtcgaatcatcgaggtaagttgggttgttcactggctgtaacttattatcatgatgcatatgaaatggcaatgaacttatgttatcagttctcg

SEQ ID NO: 1343 - DNA, 712 bp, Zea mays
  Clone ID: TF_ZmC114_19
aaaaaggcctcgcgggtcgcaaaccgctctctgttgatttgggatttgggaggcgctcgagttttcaggtaaaccatagtttagtgaccaatggctcgtactaagcaaactgctcgcaagtccactggagggaaggctcctaggaagcaacttgccaccaaggctgctcgtaagtctgcacccacaactgggggagtaaagaagcctcatcgttaccgccctggaactgttgctcttcggtgggtgacacatgattcttttgattgtttactgtttattacacttcaaataatatgacaattgttctccctgactttgcagtgaaatccgcaagtatcagaagagcactgacctgctcataaggaagcttccgttccagaggcttgtcagggagattgcccaggatttcaagactgatcttcgtttccagagccatgcggtgcttgcgctgcaggaggctgcggaggcgtacctggtgggtctattcgaggacactaatctgtgcgccatccatgccaagcgcgtgaccatcatgcccaaggacattcagctggctaggaggatccgtggtgaaagggcctagattctctgtttacggctactgggagtggctccgtagtatggtttgcatctgttcgatgcttgcttttgtggaagtttacatttgtgggtgttcgaattcgtaatattcatccgtagtggacaagtggta

SEQ ID NO: 1344 - DNA, 558 bp, Zea mays
  Clone ID: TF_LIB3597-054-Q1-K6-A2
cccgggtcttctccctacatcacacctcgtgcaacgcaaagcgctagccttgctactgtcccgatggcccgcacgaagcagaggggaggaagtccacttggcggcaagggcgccaaggcaagcagctggccaccaagcggcgcgcaagtctgtccccggcgtaccggcgggagtgacagaagccccaccgtttccgccccggcaccggcgcgctccgggagatccgcacgtaccagaagagcacggagctgctgatccgcaagctgccgttccagcgcctggtgcgtgagatcgcccaggacttcaagaccgaccttcgcttccagagctcccccgtcgccgcgctgcaggaggcgttcgaggcctacctcgtcggtctcttcgaagacaccaacctctgcgccattcacgccaagcgcgtaaccatcatgcccaaggacatccagctcgcccgtcgtatccgtgtggagagggcctatgcgtcgcggcggcggacgtctaagtagtattcccagtttctgtcatcaccgtctggctagaaggtgtacaagatgtgcc

SEQ ID NO: 1345 - DNA, 470 bp, Zea mays
  Clone ID: TF_uC-zmroteosinte048a10b1
agctttttcaccacagcttctcaccaccgttaccttggatggcacccaaggcggaaaagaagccggtggcgaagaagcccgcagaggaggagcccgcgacagagaaggcggagaaggccccggcggggaagaagcccaaggtcgagaagcgcctcccggcgggcaagtctgccggtaaggatggcggcgagggcaagaaggggaaaaagaaggcaaagaagtccgtggagacctacaagatctacatcttcaaggtgctgaagcaggtgcaccccgacatcggcatctcgtccaaggccatgtccatcatgaactccttcatcaacgacatcttcgagaagctcgcggccgagtccgccaagctggcgcgctataacaagaagcccaccgtcaccttccgcgagatccaaacctcggtgcgcctcgttctccccggcgagcttgccaagcacgccgtctccgagggcacc

SEQ ID NO: 1346 - DNA, 498 bp, Zea mays
  Clone ID: TF_jC-zmXLIB3526088dc05b1
cgagtctccagccaaccgcatccagtccacccctatccccttcgaccccgacaaccccgattcccgacccgttggcccccaaggccgaaaaaaacccaccggaaaaaaagccggcggccgaggagaaggcggaaaaaacgaccgcaggtaaaaagcccaagtccgagaagcgcctgcccgcctcgaagtcctccggcaaggagggcggcgagaagaaggggaagaagaaggccaagaagagcgtggagacctacaaaatctacatcttcaaggtcctgaagcaggtgcaccccgacatcggcatctcctccaaggccatgtccatcatgaactccttcatcaacgacatcttcgagaagctcgccggcgaggccgctaagctcgcccggtacaacaagaagcccaccatcacctcccgcgagatccagacctccgtgcgcctcgtcctcccaggagagctcgccaaacacgccgtctccgagggaaccaaggccgtca

SEQ ID NO: 1347 - DNA, 524 bp, Zea mays
  Clone ID: TF_ZmC653_30
tccggatccacgctcgcatccgatttccaatttcaaatccttcgatcgcgcaagtcggctccggccaccggcggcgtgaagaagccgcacaggttccgccccggcaccgtcgctctccgcgagatccgcaagtaccagaagagcacggagctgctcatccggaagctgcccttccagcggctggtgcgtgagatcgcgcaagacttcaagaccgaccttcggttccagtcctccgctgtcgccgcgctgcaggaggccgccgaggcgtatctggtgggtctctttgaggacaccaacctctgcgccatccacgccaagagggtcaccatcatgcccaaggacatccagctcgcgcgccgcatcaggggcgagagggcctgattgctgctctgtcttcctgtttctgtaatgtctgaactaggcgatggactctatcgcttcttgtcctgcaatcgtgtaccgatgttcttggcaaatcaatttggctgttatgaatgcaaaaaaaaaaaaaaaaaaggccccta

SEQ ID NO: 1348 - DNA, 338 bp, Zea mays
  Clone ID: TF_LIB3150-013-Q1-N1-B10
aaaggctcctcccgaccgcaacgcccgtgatctacctcgaccccgacatccccgacccgatggcgcccaacgcggagaacaagccggcggataagaagccggcggccgaggagaaggcggagaagacgaccgcacggaagaagcccaaggccgagaagcggctgcccgagtgcaagtccttcggcaaggagggcggccagaagaacgggaagaagaacgccaacaagagcgtgcagacctacaagatctacatcttcaaggagctgaatcacgtgcaccccgacatcggcatatgctacaaggccatgtacatcatgaactccttcatcaacgacatc

SEQ ID NO: 1349 - DNA, 542 bp, Zea mays
  unsure (1)..(542): unsure at all n locations
  Clone ID: TF_LIB3150-013-Q1-N1-B10.F2
aaggctcctcccgaccgcaacgcccgtgatctcacctcgaccccgacatccccgaacccgatggcgccccaaggcggcgcaaaaagccagcggagaagaagccggcggccgaagagaaggcggaaaagacgaccgcaggngaaaaagcccagggccgagaagcggctgcccgagtccaagtcctccggcaaggagggcggcgagaagaaggggaagaagaaggccaacaagagcgtggagacctacaagatctacatcttcaaggtgctgaagcaggtgcaccccgacatcggaatatgctccaaggccatgtccatcatgaactccttcatcaacgacatctttgagaagctggccggtgaggccggcaagctggcgcggtacaacaagaagcccaccatcacgtgccgcgagatccagacctccgtgcgcctagtcctccccggagagctcgccaagaacgccgtctccgagggaatccaaggcgtcaccaagttcaccaccaactgaccgcgctgcgggatccgcggatctgttagaag

SEQ ID NO: 1350 - DNA, 648 bp, Zea mays
  Clone ID: TF_LIB4979-052-R1-K1-E6
accgcaatcttcaatctccccagaaatccctagctgaatccttccatcctcactcgctcgatggcccgcacgaagcatacgggcgtaggaagtccaccggaggcaaggagccgaggaagcagttggcgactaaaggggcccgcaagtctgcccctgcgaccggcggagttaagaagccccaccgcttccgccccggtaccgtcgagctccgggagatccgcatgtaccagaagagcacagagctgctgatccgcaagctgccgttccagcggctggtgcgtgagatcgcgcaggacttcaagatcgacctacgcttccagagctccgctgtctccgcgctgcaggaggcggatgaggactaccttgtcggtctcttcgaggacaccaacctctgcgccatccacgccaagcgcgtcaccgtcatgcccaaggacatccaggttgcccgccggatccgtggggagagggcctaagcatcgtatattctgtcctcagagcccgatcagaagatgtacagatgtgctgggatctgtagtctgggttactgtcggatcatcgagttagttgattgttcactgctgtaagttattatcatgatgcatatgaaatgggaatgaactatgttatcagttctcgaaaaagaaaaca

SEQ ID NO: 1351 - DNA, 697 bp, Zea mays
  unsure (1)..(697): unsure at all n locations
  Clone ID: TF_LIB5045-063-Q1-K1-C9
gacacagcaatcttcaatctcccgagcaacccctagcagaagcctccagcaaagcaaagctctagcccttccattctcactcgctcgatggcccgcacgaagcagacggcgaggaagtccaccggcggcaaggccccgaggaagcagctggcgactaaggcggcgcgcaaatctgcccctgcgaccggcggagtgaagaagccccaccgcttccgccccggcaccgtcgcgctccgggagatccgcaagtaccagaagagcacggagctgctgatccgcaagctgccgttccagcgcctggtgcgggagatcgcgcaggacttcaagaccgacctacgcttccaaagctccgctgtctccgcgctgcaggaggcggctgaggcctaccttgtcggtctcttcgaggataccaacctctgcgccatccacgccaagcgcgtcaccatcatgcccaaggacatccagcttgcccgccgcatccngcggggagagggcctaagcgtcatattctctgtcatcagtgcccgatcagaagatgtagagatgtgctgggtnntctgtagtttgggttactgtcgaatcatcgaaggtactgggttgttcactgctgtaacttaattatcatgatgcatatgaaatggcaatgangctctgttatcagttctcgaaaaaaaaaaaaaaaaaggcccctagggcc

SEQ ID NO: 1352 - DNA, 556 bp, Zea mays
  Clone ID: TF_LIB5116-040-A1-PF1-C2
actcctcctcccacctcccagtgaaacaccaccgcaccccacaatcccacggctctccccggcgaagtagcagcggcatccatggcccccaaggcggagaagaagccggtggcggagaaggccgagaagacgacggcagccaagaagaccaaggccgagaagcggccgccggcgtccaaggagggcggcgagaagaaggggaagaagaagtccaagaagagcgtggagacgtacaagatctacatcttcaaggtgctgaagcaggtgcacccggacatcggcatctcctccaaggccatgtccatcatgaactccttcatcaacgacattttcgagaagctcgccggcgagtcggccaagcttgcgaggtacaacaagaagcccaccatcacgtcccgggagatccagacctccgaccgcctcgtcctccccggcgagctcgccaagcacgccgtctccgagggcaccaaggctgtcaccaagttcacctcctcctaggctaggatggttttctgtaatagtcagctgttcagaccatgtcttcctgtaacttgtg

SEQ ID NO: 1353 - DNA, 653 bp, Zea mays
  Clone ID: TF_LIB5116-002-A1-PF1-D2
aactcagatcgccgccgcacccgatctccaagaacacaccaccaccagagccgccgacccccaatccccgatggcccgcacgaagcagacggcccgcaagtccaccggcggcaaggcgcccaggaagcagctcgccaccgaggctgctcgcaagtcggcgccggcgaccggcggcgtgaagaagccccaccgcttcaggccgggaaccgtcgccctccgtgagatccgcaagtaccagaagagcacggagctgctcatccgcaagctccccttccagcgtctggtgcgggagatcgcgcaggacttcaagaccgacctccgcttccagtcctccgccgtctctgcgctgcaggaggccgccgaggcgtacctggtggggctgttcgaggacaccaacctgtgcgccatccacgccaagcgcgtcaccatcatgcccaaggacatccagctcgcccgccgcatccgtggggagcgcgcctaggttcgtcctggtcgccggtaatgcttgctagctgttcttgtcgtgtgatcctggtgtgtgcctggtgcttctgtttgtcggtgtcgatatgatgtgtcatctggtcctatgtatggtgatggtcgaatgaaattgcaatggaaagttcagttatcgatctgatgctcgaacg

SEQ ID NO: 1354 - DNA, 668 bp, Zea mays
  unsure (1)..(668): unsure at all n locations
  Clone ID: TF_LIB5116-019-A1-PF1-F5
atcgcctctctctttctactactccagcccagtcaaacttctctcgacctcgaagcatcagccgccgcaccatggcccccaaggcagccgagaagaagccggtggagaagacccccgcgggcaagaagcccaaggcggagaagaaggtgccggcgtccaaggagggcggcgacaagaaggggaagaagaaggccaagaagagcgtggagacctacaagatctacatcttcaaggtgctcaagcaggtgcacccggacatcggcatctcctccaaggccatgtccatcatgaactccttcatcaacgacatcttcgagaagctcgccggcgagtccgccaagctcgcgcggtacaacaagaagcccaccatcacgtcccgggagattcagacctccgtccgcctcgtcctccccggcgagctcgccaagcacgccgtctccgagggcaccaaggccgtcaccaagttcacctcggcctagtttcctggtctgattcttgtgttcccttcctggtccttgtctgatgaattctgtaggtagctgtgttctgacagtgtcatgcgacattgtcatcttgtaacagagtttctgcttgtggntttgtggctgttattcggtctggttaaatagtcaacttcacctcatcctagtattctcatctaatgtggt

SEQ ID NO: 1355 - DNA, 629 bp, Zea mays
  Clone ID: TF_LIB5116-045-A1-PF1-H7
agctaccagcaccacacctctccccgtccaagtagcagcaaccaacggcatccatggcccccaaggcggagaagaagccggtggcggagaaggccgagaagaccacggcggggaagaagaccaaggccgagaagcggccaccagcgtccaaggagggcggcgagaagaaggggaagaagaagaacaagaagagcgtggagacgtacaagatctacatcttcaaggtgctgaagcaggtgcaccccgacatcggcatctcctccaaggccatgtccatcatgaactccttcatcaacgacatcttcgagaagctcgccggcgagtccgccaagctggcgcgctacaacaagaagcccaccatcacgtccagggagatccagacctccgtccgcctcgtcctccccggcgagctcgccaagcacgccgtctctgaggggaccaaggccgtcaccaagttcacctcctcttagatagcctgctcttgtgtcttctctgaatgtgttgacttctcgtggctgtttgatgaatccattgtactctgtagttagatgttcagaacgcaccattttgtaatttgcgaggacacaaatgtttcaggatttggaggaaatagtaatggtgttgctttg

SEQ ID NO: 1356 - DNA, 648 bp, Zea mays
  Clone ID: TF_LIB5116-047-A1-PF1-H1
ccgatccagcgcaacttccgccaacaccacaccccgacaatccccgtcgccgaagaagtagcaagcaagatggccggaaggaagggcggcgacaggaagaaggcggtgacacgctccgtcaaggccgggctccagttccccgtcggccgcatcgggcggtacctcaagaagggccgatacgcccagcgcgtcggatccggcgcccccgtctacctcgccgctgtcctcgagtacctcgccgccgaggtcctggagctcgccggcaacgcggccaaggacaacaagaagacccgcatcatcccgcgccacctgctgctcgccgtccgcaacgaccaggagctcggcaagctgctcgccggcgtcaccatcgcccacggcggcgtcatccccaacatcaacgccgtgctgctccccaagaagtcccccgccgccgccgagaaggaggccaagtcgcccaagaagaagacctccaccaagtcccccaagaagaagaccgccgccaccaaggagtaaccgcccccatagcctggccagtgttgcttagatccatttctcatggactaagatgagaccctgtatgtaatgcctgctagtctgtagtgcccgtcagattcgtcgagcaaggatgatattgtatctgtgatttct

SEQ ID NO: 1357 - DNA, 758 bp, Zea mays
  unsure (1)..(758): unsure at all n locations
  Clone ID: TF_ZmC644467_1
actcacccagagcattccaatccagcgccagcaccaccgccgccagctccacacctcgagagggacgcctcgtcgccggagaagcagcaagaagaagatggccggaaggaagggcggcgataggaagaaggcggtgacccgctccgtgaaggccgggctccagttccccgtgggccgcatcgggcgctacctcaagaagggccgctacgcgcagcgcgtcggctccggcgcccccgtctacctcgccgccgtcctcgagtacctcgccgccgaggtcctggagctggccggcaacgcggccaaggacaacaagaagacccgcatcatcccgcgccacctgctgctggccgtccgcaacgaccaggagctcggcaggctgctcgccggcgtcaccatcgcccacggcggcgtcatccccaacatcaactccgtgctgctccccaagaagtcccccgccgccgccgagaaggaggccaccaagtcgcccaagaagaagaccgccgccaagtcccccaagaagaagaccgcagccaccaaggagtagccgtccccgtccccatagcctagccagtgttgctgctctgttccatttctcatggacaagatgagtagtagtcgtttggttggcagatctgtatgtagtgcctggtagtctctagtgaccctttcctcagattcgtcgagcaaaagggtgggcattgtatctctgatttctgtgngaaatactatactanagatgcatccatctgaatcttagt

SEQ ID NO: 1358 - DNA, 1510 bp, Zea mays
  Clone ID: TF_ZmC369_149
gaggctggccggaacacagcgaacacatctcctcgcatttcttcccatcccccttcgcaacccaaaccccaactcgccccgcatcgatggcgcccaaggccgagaagaagcccgcggcgaagaagccggcggaggaggagcccgcggccgagaaggcgcccgccgggaagaagccgaaggcggagaagcgggtccccgctggcaagtccgctgccaaggagggcggtgagggcaagaggggcaagaagaagggcaagaagagcgtggagacctacaagatctacatcttcaaggtgctgaagcaggtgcacccggacattggcatctcctccaaggccatgtcgatcatgaactccttcattaacgatatcttcgagaagctcgctgctgaggccgccaagctcgcgcgctataacaagaagcccaccatcacatcccgtgagatccagacctccgtacgcctcgtccttcccggggagctcgccaagcacgccgtctccgagggcaccaaggccgtcaccaagttcacctcggcctaggctgcgcggccgccgcttgcaggattctctcctgtgttcacgtctcttgctgtagttaggtgctgctgcctgctggcttctatgtatgttgtctatctgtctgtagcaactgtgttatctgataggaccgtaatggtgcttattcaacccagctatatgtttctatgtgaaaaaaaaaaaaaaaaaaaaaaaaaaaaaaaaaaaaaaaaaaaaaaaaaaaaaaaaaaaaaaaaaaaaaccaccggcgaccacatctcctcgcatttcttcccatccgatccccccttcgcaaccaaaaccccaactcgccccgcatcgatggcgcccaaggccgagaagaaacccgcggcgaagaagccggcggaggaggagcccgcggccgagaaggcgcccgccgggaagaagccgaaggcggagaagcgggtccccgctggcaagtccgctgccaaggaaggcggcgagggcaagaggggcaagaagaagggcaagaagagcgtggagacctacaagatctacatcttcaaggtgctgaagcaggtgcacccggacattggcatctcctccaaggccatgtccatcatgaactccttcattaacgatatcttcgagaagctcgctgctgaggccgccaagctcgcgcgctataacaagaagcctaccatcacctcccgtgagatccagacctccgtgcgcctcgtccttcccggggagctcgccaagcacgccgtctccgagggcaccaaggccgtcaccaagttcacctcggcctaggctgcgcggccgccgcttgcaggattctctcctgtgttcacgtctcttgctgtagttaggtgctgctgcctgctggcttctatgtatgttatctatctgtctgtagcaactgtgttatctgataggaccgtaatggtgcttattcaacccagctatatgtttctatgcgaaaaaaaaaaaaaaaaaaggcccctagggcc

SEQ ID NO: 1359 - DNA, 371 bp, Zea mays
  unsure (1)..(371): unsure at all n locations
  Clone ID: TF_LIB3356-022-P1-K1-H9
ttcnaattccgattatcaatccagcataccctaccatccttttgcaaactcataggggggcccgatggcaccgagggcggataataaaccggcggcgaagaagcccgcagaggaggagcccgcggccccggcggagaaggctcccgctggaaagaatccgaaggcggagaagcggttcccggcgggaaaatccgccggcatggaaggcggtgttgacatgaaggggcggtagaaggccaagaagagcgtggagacgtacaatatctacatcttcaatgtgctgaagcaagtgcacccggacatcgtgatatccttcaaggccatgtccatcattaacttcatcaataacgacatcttctagaagctcggcg

SEQ ID NO: 1360 - DNA, 425 bp, Zea mays
  unsure (1)..(425): unsure at all n locations
  Clone ID: TF_LIB3227-024-P1-K1-G6
atcacatcgtatttcttcccatccgatcccgccttcgcaaccaaaaccacaacgggcgggttatcgattgctttcaaggcccaaaacaaacccttgctgacaaaaccggctgaggatgagcccgcggtctagaaggcgcccgcacgcaagaagccgatagccgagaatcgggtccccgctggcaagtccgctgccaaggaaggccctgagggcaagaggcgcaagaagaatggcaagaagagcgcggaaacctacaagatctacatcttcaacgtgctgaagcaagtgcacccggacattgccatntcctcccaggccatgtccatcatgaactccttcattaacgatatcttcgagaagctcgcttctgatgccggcaagctcgcgcgctataacaagaagcctaccatcaccttccggagatc

SEQ ID NO: 1361 - DNA, 1573 bp, Zea mays
  Clone ID: TF_ZmC2879_6
tcgcggacgcgtgggcggacgcgtgggcggacgcgtgggcggacgcgtgggggacattggtgcgctttctggtggtcacaccctgggaagatgccacaaggacaggtctggatttgagggagcctggacgtccaaccctttgatctttgacaactcttacttcaaggagcttctgagcggatagaaggaaggccttctgcagctaccaagtgacaaagccctcctctctgatccatccttccgtccacttgttgacaaatacgcatcggacgaggactctttctttgctgactacgccgaggcccacctgaagctttcagaattgggatttgctgaggcgtaacgaaccagaagagtgtggtggctgtcgccggtcgaccttgtgttttttttgtctgcttttctcttgaacgaagatgtgatgaactcagctgaagatgtagtgtgtatgttgtcatggtttatttttctattttatttatctatctataatatctatcggagaaggtttgatatgaagcggaaaaaaaaaaaaaaaaaaaaaaaaaaaaaaaaaaaaaaaaaaaaaaaaaaaaaaaaaaaaaaaaaaaaaaaaaaaaaaacccccgaaatcttaaatccccccagaaatcccaagaaaaagccttccatcctcactcgctcaagggcccgaacaaagaaaacggggagaaagcccaccgggggaaaggccccaagaaaaaagttggcaacaaagggggcccgaaagtttgcccctgcaaccgggggagtaaaaaagccccaccgtttccgccccggaaccgtcgcgctccggaaaatccgcaagaaccaaaaaagcacggagttgctgatccgaaagttgccgtcccagcccctggggcggaaaatcgcgcaggacttcaaaaccgacctacgtttccaaagctccgttgtctccccgctgaagaagggggttgaggccaacctgcccgggctcttctgcgtcagaaggttacaaatttgggcgccatccacgcaaaggggggggggggttagctttggcaatgagtacgcttgaaaagaaattccctgcatccagaccgtttggtatcaagtacaagtttcacttagaggtaagtgggacttgtttttcgttaatatatgccttgtgtttcgtttaaaggatcgtgggggggtggactaatttttaatagtcttttggatttaaatatctagtctagtttgggtaagtagtttctgtcgtctcaaattagtagtttcccagattggctttcttttggactttcttttgtctgtatttataaattctgaaagaaaaacaagtggtgaattaaattcttctgcaacatgcaggatgctgttgattgcccagaatgggttgttccattccatctcttcaaattattggcagaggaggtactggaggggttctattgcttcaacagtcctctgtgcagcctatatgcctcaccaatgcttgttacatattgtttgccaatgtttcacagtatgatctcgagctggttctgatgaagaactttcatgaatttgtacacgagtacttgcaaaaacc

SEQ ID NO: 1362 - DNA, 357 bp, Zea mays
  Clone ID: TF_LIB3227-014-P1-K1-B9
acatcttcaaggtgctcaagcaggtgcacccggtcattggcatctcgtccaaggggatgttcatcatgaactccttcatcaacgacatctacgataagctcgccgtctaggccgccaagctcgcccgctacaacatgaagcccaccatcacctcccggtagattccagacctcggtgcgcctcgtcctccccggtgagctcgccaagcacgccgtatcctaagggaccaaggcggttaccaagattacatcctcttagggtgccgtctcacgttgttactttcctgtctaattcttatatataggctcttacttgggtgtcttcttcaactaatgtataaatttgattataattgct

SEQ ID NO: 1363 - DNA, 467 bp, Zea mays
  unsure (1)..(467): unsure at all n locations
  Clone ID: TF_LIB4073-010-Q6-K1-H10
ccccgggctcgacccacgcgctccgacgatagccctttgntcctctgctcccggggaagcgagctcgcagcacaggccgcgagccatggcactccaccagccgctcggagcgggtaggggaagggcgaagaaggggagcggcccggacgcaagggtccggcgggccgagggaagaagtcagtgtncgagggtcggtgataggccccgggctccagttccccgtgcgggggggtgcggnngcgctacctgaagaagggccccgctacgcgcagnncgcgtcggcaccccggcgctcnnccgtctacctcnngccgccgtccctcgagtacccctcgccgctgaggttnctggagctcgccgggaacgccgccagggacaacaagaagacgcgcatcatcccccgccgcgtgctgctcgcgatccgcaacgacgaggagctcgggaagctgctgtccggtgtggccatt

SEQ ID NO: 1364 - DNA, 532 bp, Zea mays
  unsure (1)..(532): unsure at all n locations
  Clone ID: TF_LIB4740-141-A1-K1-E12
tgttgacgactacctccctggcgccgtacctgctgccgcctgctggccctttcgctgccgtgcctgccggcggtgaccgcgccggcggggtccgggtacggcgcggcgccgggcgtggcggcgctggcggaggcggccgtggcgtacgccacctcggagaccgtgccgcagcagtcggtcgacgagatctcgctgtcgctggccgtgctgcggcggcgcgcgccgctgcggctgctggtgttcgtgctggagacccactacgaggatgaagaacgcgatgatctgatccgcaagctggccttccatggactggtgcgcgagatcgcgcaggacttcaagatttacctccttttccccacccacgccgtgntggcgctccaggaggccgccgaggcctacctcgtaggaataaacaaggacaccaacctctgcgccatccacgctaagcgcgtcaccatcatgcccaaggacatccagctcgcccgccgcatccgtggcgagcgcgcgaacccatcatctccggggatctgat

SEQ ID NO: 1365 - DNA, 308 bp, Zea mays
  Clone ID: TF_700380613H1
ccatccgatccccccttcgcaaccaaaaccccaactcgccccgcatcgatcgctttctattttgagtttttatcttctgtgaagattgtggctgaggatgtgcccgctgccgataaggcgcccgccgggaagaagccgaagcgacgaagcgggtccccgctggtaagtccgctgccaaggaatgcggcgatggcaagaggggcaagaagaagggcaagaagagcgtggagacctacaagatctacatcttcaaggtgctgaagcaggtgcacccggacattggcatctcctccaaggccatgtccatc

SEQ ID NO: 1366 - DNA, 418 bp, Zea mays
  Clone ID: TF_ZmC119_816
gcacgaggttccccgtcggccgcatcgggcgctacctcaagaagggccgctacgcgcatcgtcccgcgccacgtgctgctggcgatccgcaacgacgaggagctcgggaagctgctgaccggcgtgaccatcgcccacggcggcgtgttgcccaacatcaacccggtcctgctgcccaagaagacggcggagaaggcggccagcggcgggagcaaggaggccaagtcgcccaagaaggccgccaagtcccccaagaaggcatagggtttggaggcggatccgatgttgtcatgtgtaggttgtaagcgggcaatgtgattggctgtgtatctgcttcgctcaagttgctttatgtcattcctaatggaataggaaatgccgtgtttcttaagaaaaaaaaaaaaaaaaaaggccccta

SEQ ID NO: 1367 - DNA, 439 bp, Zea mays
  Clone ID: TF_LIB4732-042-R1-K1-D11
acaccatataaaatacatacgaatcctacaattctgcccttgccgtcgtcatcctgtcctctgcatctacggtatgtagactgctccctcctcctctccgctctgaatggcccgaacgaaggatacgtcctccatagtcgaccgtgggcaaggcgccgcggaatgcaactggccactcaatgctgctggcaagtcggccccggacacgggcggcgtgaataagccgcaccgcttccgccccggcaccgtcgcgctccgcgagatccgcaagtaccagaagagcacggagctgctcatccgcaagctccccttccagcgcctcgtccgcgagatcgcgcaggacttcaagacggacctgcggttccagtcctcggccgtggcggcgctgcaggaggccgcggaggcgtacctggaggggatcttcaaggacaccaacctc

SEQ ID NO: 1368 - DNA, 545 bp, Zea mays
  unsure (1)..(545): unsure at all n locations
  Clone ID: TF_LIB4172-005-Q1-L1-A5
aattcggcacgaggccgcatcgtcgccctcaaattcgttccgtccaggcaaggaagaaatcgagcagccaaggagaggagaagacggcttcgtacgacagcagaccgcccgcaagtccaccggaggcaaggcccccgcgcaaagcagcttcgccactcaatggcggcgaaggatagtcttgcgcccgaccgaccggcggcgtgaagaagccccacaggtaccaggcccgggaaggtggctctgcgccgagaaccgcaagtacccagaagagcacggagcttgctgatccccgaagttgcccttccagcgcctggtccgtgagatcgctcaggacttcaagacggatctgcggttccaaagccacgccgtcctgccctcaaaggaaacccgccgagcctacctcgtcggcctgttcgaagacaccaacctctgcgccatccacgccaagcgcgtcaccatcatgcccaaagacatccagctcgcccgccgcatccgcggcgagcgcgcgtnaaggcgtatctcgcgcccggccccagtggcggcgg

SEQ ID NO: 1369 - DNA, 665 bp, Zea mays
  Clone ID: TF_LIB5026-032-Q1-XP1-D12
gccggccgggttcgggagaatagtcaagtaccccatttccaaggggtacctgttgaaaatcgtttcaacaaatccgtccaaaactttttaagaaaaatgaaaaagttttgaactcgaaagtttttccaaaagatgcctgctaaaaattgtttcaatctctcaccaaaacagataagaagtatatcactgaaaattactatccagccataggggtatatgaagagcgcaaattcctttataccccacccaaaactcgcaattccgcattcgttccaactcctgagcactttctcctcgtcccagacaagccaatcgaagccgagatacgaccatggactccaccggcaccggagcagggggtaaggggaagaagggagcggccggacgcaaggtcggtggtccaaggaagaagtcggtgtcgaggtccgtgaaggccgggctccagttccccgccagacgcatcgggcgctacttgaagaagggacgctacacgcagcgtgtcgataccggcgcccccgtatacctcgccgctgacctcgaatacctcaccgctgaggttctggagctcgccggtaatgctgccagggacaacaagaagactctggttattccgtgccacgagcttcttgagatccggaacgacaagtagctttgttaacctgttg

SEQ ID NO: 1370 - DNA, 445 bp, Zea mays
  Clone ID: TF_LIB3245-532-P1-K1-A1
cggacgcgtgggcaatctccccagctatccctagcagaagccttccatcctcaggcgctcgatggcccgcacgaagcagacggcgaggaagtccaccggcggcaaggcgccgaggaagcagctggcgactaaggcggcccgcaagtctgcccctgcgaccggcggagtgaagaagccccaccgctttcgccccggcaccgtcgcgctccgggagatccgcaagtaccagaagagcacggagctgctgatccgcaagctgccgttccagcgcctggtgcgggagatcgcgcaagacttcaagaccgacctacgcttccaaagctctgctgtcttcgcgctgcatgaaggcgctgatgcctaccttggttggcttcttcaggacaccaaacctttggcccttccagccaagcgcgtcaccatttatgcccaaagacattcagcttgc

SEQ ID NO: 1371 - DNA, 611 bp, Zea mays
  Clone ID: TF_LIB4185-042-R1-K1-H6
ttggggtaccgggcccccttctcgagtttttttttttttttttttttttttttttttttttttttttttttttttttttttttttttgcgaaaatagtatgccaaaattatatattgccctgctcaaatcaactttcaaatgacaaacattccatacagtcaaaaggcgccacggggcttaaggacctactaaaaaggagcttaggacgaggggaacttggggacggccttggggccctccgaaacggggtgcttggcgagctccccgggtaaaacgaggcggacggaggtctggatctcccgggaggggagggggggctttttgttgtagcgggcgaacttggccccctccccggcgagcttttcaaaaatgtcgttgatgaaagagttcatgatggacatggccttggaggaaatgccgatgtccgggtgcacctgcttcagcaccttgaaaatgtaaatcttggacgtctccacgctttttttggcctttttccgcccctttttggaaacaccgccttccttgccgggggattttcccgccgggagccgcttctccgccttcggtttcttcccagggggggccttctccgccggggccgcgggctcct

SEQ ID NO: 1372 - DNA, 1151 bp, Zea mays
  unsure (1)..(1151): unsure at all n locations
  Clone ID: TF_ZmC838_10
cacggcgccaacggagcggcacctacatcagccgcgccgccgcgctgcccagcaagtgcggcgtcgccctgccgtacaagatcagcaccaacgttaactgcaacacgtacgactgactacacacacgctcctgcatatatgccgtgttctctcgttccaatactgctctgcagctagattattaccattgcgcttgcgccggccgttctgtgtttctggactacaccgacgtgctgtaaccttgtttctctctctctgtttctctttgcaggattaattaagtgatgaggcgtcctgtgcgcgtccgggcgaggaatgcatgcatggcgctggcggagagtaataaaataatgctactggtattttaagctatatcgaggtgtgcctgtctctagtcatttattatggtgtttaggaatggtctacacagttcgtaacggtgtatcgtggatgcatgttgccgcgagcagagtacgtaggcatgaaccgatgtgtgcgcttctgtctgtttactctctctatgtagtaatgtgtgggtgctttgatccagatgtattcgctcgtgagtcgtggaagtagatcgtttcagtatcaaaaaaaaaaaaaaaaaaaaaaaaaaaaaaaaaaaaaaaaaaaaaaaaaaaaaaaaaaaaaaaaaaaaaaaaaaaaaaaaaaaaaggtaccccgcatcccacataattaatccacagttggaaggcggattcctgtctcgaatcctttttcgccgttccgagggcccgcacgaagcaaacagcagggaagtcgaccgggggaaaggccccccggaagcagttggccactaaggttgcgcgcaggtcggccccggccaccgggggggtgaaaaagccccaccgtttccgccccggaactgtcgcgctccgggagatccgcaagtaccaaaaaagcactgagctgttaatccgaaagctccccttccagggcctggtccgggaaatcgcgcaagacttaaagactgatctgaggttccagtcctccgccgtcgcggggctgaaggaggccgccgaggcgtacctgggggggctcttcgaggacaccaacctttgcgccatccacgccaagcgcgtaactatcatgcccaaggacatccagttcgcgcggngcataagggg

SEQ ID NO: 1373 - DNA, 677 bp, Zea mays
  Clone ID: TF_LIB4570-006-R1-K1-G2
ggccgggctagaccccgcatcgtcgccctcaaattcgttccgtccaggcaaggaagaaatcgagcagccaaggagaggagaagatggctcgtacgaagcagaccgcccgcaagtccaccggaggcaaggccccgcgcaagcagctcgccaccaaggttcgtctctacctacccgtaccgatctgctgttccgatcccctcgattgttcccgttgtaagacggtgctgacgcggcggcggttgttatttcgttgcaggcggcgaggaagtctgcgccgacgaccggcggcgtgaagaagccccacaggtacaggcccgggacggtggctctgcgcgagatccgcaagtaccagaagagcacggagctgctgatccggaagttgcccttccagcgcctggtccgtgagatcgctcaggacttcaagacggatctgcggttccagagccacgccgtcctggccctccaggaagccgccgaggcctacctcgtcggcctgttcgaggacaccaacctctgcgccatccacgccaagcgcgtcaccatcatgcccaaagacatccagctcgcccgccgcatccgcggcgagcgcgcgtaggcgtatctcgcgcccggccccagtggcggcggagggatggaggagggcaatttgtaaccttatgctgtttgttcgcttttag

SEQ ID NO: 1374 - DNA, 935 bp, Zea mays
  Clone ID: TF_ZmC369_101
cattgggtacctcgaggccggccggggccatcaccaatcagtcagtcacagctcacagcaaacaccgcgaagccgcccccgctcccaaacccgaccgagcaaagcgcaaagccccccaaccgcggatcaatccgcagcatcgatggcgcccaaggcggagaaaaagccggcggcgaagaagcccgcggaggaggagcccgcgaccgagaaggcggagaaggctccggcagggaagaagccgaaggcggagaaacgcctccccgcgggcaagtccggtgccggcgagggcaagaagggcaagaagaaagccaagaagagcgtggagacctacaagatctacatcttcaaggtgctcaagcaggtgcaccccgacatcggcatctcgtccaaggccatgtccatcatgaattccttcatcaacgacatcttcgagaagctcgccgcggaggccgccaagctcgcccgctacaacaagaagcccaccatcacctcccgcgagatccagacctccgtccgcctcgtcctacccggcgagctcgccaagcacgccgtctctgaaggcacaaaggcggtcaccaagttcacttcgtcttagattggttgccttccctctcgtttgtactggtgtctggtagtagatctcatctagttgggggtgctgttgctagtcggtcgtgggtccctttggtatgataggccctgttcaatgggtatgcaagtgattagtttgtatatggttgtagtagatctcgtttcagctgtgattcttattactgctatgctatagttgtagtgatctcgttcccatttcttgatgcagtcctatcaactatatggttgttttaaaaaaaaaaaaaaaaaaaaaaaaaaaaaaaaaaaaaaaaaaaaaaaaaaaaaaaaaaaaaaaaaaaagggcggccctcgcgatctagaac

SEQ ID NO: 1375 - DNA, 899 bp, Zea mays
  Clone ID: TF_ZmC369_148
cattgggtacctcgaggccggccgggccgggatcaccaatcagtcagtcacagctcacagcaaacaccgcgaagccgcccccgctcccaaacccgaccgagcaaagcgcaaagccccccaaccgcggatcaatccgcagcatcgatggcgcccaaggcggagaaaaagccggcggcgaagaagcccgcggaggaggagcccgcgaccgagaaggcggagaaggctccggcagggaagaagccgaaggcggagaaacgcctccccgcgggcaagtccggcgccggcgagggcaagaagggcaagaagaaagccaagaagagcgtggagacctacaagatctacatcttcaaggtgctcaagcaggtgcaccccgacatcggcatctcgtccaaggccatgtccatcatgaattccttcatcaacgacatcttcgagaagctcgccgcggaggccgccaagctcgcccgctacaacaagaagcccaccatcacctcccgcgagatccagacctccgtccgcctcgtcctacccggcgagctcgccaagcacgccgtctctgaaggcacaaaggcggtcaccaagttcacttcgtcttagattggttgccttccctctcgtttgtactggtgtctggtagtagatctcatctagttgggggtgctgttgctagtcggtcgtgggtccctttggtatgattggccctgttcaatgggtttgcaagtgattagtttgtacatggttgtagtagatctcgtttcagctgtgattctttattactgctatgctatagttgtagtgttctcgttcccatttcttgatgcagtcctatcaactatatggttgtttagttacatgttctttttttaacctacatccatcaccatcagtacggttttacc

SEQ ID NO: 1376 - DNA, 823 bp, Zea mays
  Clone ID: TF_ZmC369_50
aaacgtgcctagaaatcgaccgagcgaatccctcgcatcgcattcgcagcctttgctgcatcacaccaccgcgaaaccccagcagccgcatcgatggcgcccaaggcggagaagaagccggctgcgaagaagccagcggaggaggagcccgctgccgcgaaggccccggcggggaagaagcccaaggccgagaagcgcctcccggcggccaagtcgtccggcaaagaaggcggcgacaagaagggtaagaagaaggcgaagaagtcggtggagacctacaagatctacatcttcaaggtgctgaagcaggtccaccccgacatcggcatctcttccaaggccatgtccatcatgaactccttcatcaacgacatcttcgagaagctcgccggcgaggctgccaagcttgcgcgctacaacaagaagcccaccatcacctctcgggagattcaaacctctgtccgccttgtccttcccggcgagctcgccaagcacgcggtctccgagggcaccaaggccgtcaccaagttcaccagcaactgagcgcgctgcgggatccgcggatctgttagaagggttctttgctgtgtcctttccccagtcccccaccctacccgcctagtagctagcttgcctgctctataaatccggcgcgccggattgtaatggtcctcttagatttgatgtccctgttggggaatatagttgtatctctccgcctgctatttttctcattctttaggaaaatggaaatctggtcattttaaaagggagattactaggctcgtcgcaaattcgcggttaaaaaaaaaaaaaaaaaaac

SEQ ID NO: 1377 - DNA, 801 bp, Zea mays
  Clone ID: TF_ZmC369_62
aaaaaaaaaaaaaaaaaaaaaaaaaaaaaaaaaaaaaaaaaaaaaatcaccaatcagttagtcacagctcacagcaaacacggcgaagccggccccactcccaaacccgaccgagcaaagcgcaaagccccccaacctcggatcaatccgcagcatcgatggcgcccaaggcggagaaaaagccggcggctaagaagcccgccgaggaggagcccgcgaccgagaaggcggagaaggctccggcagggaagaagccgaaggcggagaagcgtctccccgcgggcaagtccggcgccggcgagggcaagaagggcaagaagaaggccaagaagagcgtggagacctacaagatctacatcttcaaggtgctcaagcaggtgcaccccgacatcggcatctcgtccaaggccatgtccatcatgaattccttcatcaacgacatcttcgagaagctcgccgcggaggccgccaagctcgcccgctacaacaagaagcccaccatcacctcccgcgagatccagacctccgtccgcctcgtcctccccggcgagctcgccaagcacgccgtctctgaaggcacaaaggcggtcaccaagttcacttcgtcttagataggttgccttccctctcgtttgtactggtgtctggtagtagatctcgtctagttgggggtgctgttgctagtcggtcgtgggcccctttggtgtgataggccctgtttaattggtttgcaagtgattagtttgtatatgggtggagtagatctcgtttcagctgtgattctttattactgctatgcta

SEQ ID NO: 1378 - DNA, 742 bp, Zea mays
  Clone ID: TF_ZmC369_68
atcaccaatcagttagtcacagctcacagcaaacaccgcgaagccggccccactcccaaacccgaccgagcaaagcgcaaagccccccaacctcggatcaatccgcagcatcgatggcgcccaaggcggagaaaaagccggcggctaagaagcccgccgaggaggagcccgcgaccgagaaggcggagaaggctccggcagggaagaagccgaaggcggagaagcgtctccccgcgggcaagtccggcgccggcgagggcaagaagggcaagaagaaggccaagaagagcgtggagacctacaagatctacatcttcaaggtgctcaagcaggtgcaccccgacatcggcatctcgtccaaggccatgtccatcatgaattccttcatcaacgacatcttcgagaagctcgccgcggaggccgccaagctcgcccgctacaacaagaagcccaccatcacctcccgcgagatccagacctccgtccgcctcgtcctccccggcgagctcgccaagcacgccgtctctgaaggcacaaaggcggtcaccaagttcacttcgtcttagataggctgccttccctctcgtttgtactggtgtctggtagtagatctagtttggggtgctgttgctagtcggtcgtgggcccctttggtgtgataggccctgtttaattggtttgcaagtgacacatttgagcaccaaactgttgtagtattcaagatgcaaattgcgcccactac

SEQ ID NO: 1379 - DNA, 778 bp, Zea mays
  Clone ID: TF_ZmC369_77
atcaccaatcagttaatcacagctcacagcaaacaccgcgaagcgcgaagccggcccgctcccaaacccgaccgagcaaagcgcaaagccccccaacctcagatcaatccgcagcatcgatggcgcccaaggcggagaaaaagccggcggcgaagaagcccgtggaggaggagcccgcgacggagaaggcggagaaggctccggcagggaagaagccgaaggcggagaagcgcctccccgcgggcaagtccggcgccggcgagggcaagaagggcaagaagaaggccaagaagagcgtggagacctacaagatctacatcttcaaggtgctcaagcaggtgcaccccgacatcggcatctcgtccaaggccatgtccatcatgaattccttcatcaacgacatcttcgagaagctcgccgcggaggccgccaagctcgcccgctacaacaagaagcccaccatcacctcccgcgagatccagacctccgtccgcctcgtcctccccggcgagctcgccaagcacgccgtctctgaaggcacaaaggcggtcaccaagttcacttcgtcttagataggctgccttccctctcgtttgtactggtgtctggtagtagatctcgtctagttgggggtgctgttgctagtcggtcgtgggtccctttggtatgataggccctgttcaatgggtatgcaagtgatttgkttgtatatkgttktagtagatctcgtttcagctgttattctttattactgctattckatagtctcgaatacaac

SEQ ID NO: 1380 - DNA, 732 bp, Zea mays
  Clone ID: TF_ZmC369_89
tggacggccatagaaatcgaccgagcgaatccctcgcatcgcattcgcagcctttgctgcatcacaccaccgcgaaaccccagcagccgcatcgatggcgcccaaggcggagaagaagccggctgcgaagaagccagcggaggaggagcccgctgccgcgaaggccccggcggccaagtcgtccggcaaagaaggcggcgacaagaagggtaagaagaaggcgaagaagtcggtggagacctacaagatctacatcttcaaggtgctgaagcaggtccaccccgacatcggcatctcttccaaggccatgtccatcatgaactccttcatcaacgacatcttcgagaagctcgccggcgaggctgccaagcttgcgcgctacaacaagaagcccaccatcacctctcgggagattcaaacctctgtccgccttgtccttcccggcgagctcgccaagcacgcggtctccgagggcaccaaggccgtcactaagttcacatcatcttagatttgaggtagtagctattgggtggcgttggtagttgtgtctcaatttgtctgctactaatagtggtagcagtatccatgtgtagttgggttgtggtaagaattgtgttaaactggtaatacgtttgaaattgcttttttcaaaaaaaaaaaaaaaaaaaaaaaaagtactctgcgttgttacactgcttaaggacatattccagcacacggcggccgtactag

SEQ ID NO: 1381 - DNA, 416 bp, Zea mays
  Clone ID: TF_LIB3078-055-Q1-K1-F9
acgcggacgcgtgcggtggatctccgggagattcgtaggtgccaaagcagcacggagctgaggacacggaacctccctataagggcctggaaacggagatcgctctcaactgccagaccgatctcaggttccagtactccaccgactgtgttctgtatgaggccgtctaagcgtacctcgtggggctctttgatgacactaacctgtgcgccatccactccaagcgcgtcaccatcatgcctactgacatccaactcgcacgccgcatcaacggagacaaggcctgaacgatgcgagctcatctcactcaaggccccgtagttgctgatgcttacctgctagcaggacttgtgctcatcgcggttacctttgtgccatcaacgacatcttcgtgccactgtgcttgctcttagaat

SEQ ID NO: 1382 - DNA, 327 bp, Zea mays
  Clone ID: TF_LIB3070-010-Q1-N1-G7
gacgaaaattaatgctcgacacataagacaaccgcagacgggtatatctgagaaggacatggggaagaaggccaccatctaatggtctaccccacgggcctgcaatttgctgttctacgaatacaccgtcagctgatgcaaaagacttaggcaaatggccgcgttggtacctctgcagccgtctactctgccgtcattctgcagtacttgactgccaaggatctggaactggctgtgaacgctagcttggatctgaacgtgaagcgtatcacccgtcgccacctacagtttgccattctcggagacaatgagcttgacactcttatt

SEQ ID NO: 1383 - DNA, 342 bp, Zea mays
  Clone ID: TF_LIB3088-036-Q1-K1-H8
gtgcggcagggcacagcatacaccgcgaatttcgattccggcccgctcccaaacccgaccgagcagagcgcatagccccccaacctcagatcaatccgcagcatcgatggcgcccaaggcggagaaaaagccggcggcgaagaagcccgaggaggaggagcccgcgacggagaaggcggagaaggctccggcagggaagaagccgaaggcggagaagcgcctccccgcgggcaagtccggcgccggcgagggcaagacgggcatgaagaaagccatgaagagcgtggagacctacaagatctacatcttcaaggtgctcaagcaggtgcaccccgacattgg

SEQ ID NO: 1384 - DNA, 329 bp, Zea mays
  Clone ID: TF_LIB3354-075-Q6-N6-E3
gggggaaaggacagcccaattttttaattcaattcccccccgatcatcatcatccatcggtggggggatcacataaactgggccacccctaccggcggcccccacatgaccattacaggggtcctaaaacggggggaactttgtaacggccttagggccctcggaaaccgggtgcttggggagctccccggggaggaccaggcccccccaggtctggatctcccgggaggggatggggggctttttgttgtagccccccaacttgggggactcggccccgagcttttaaaaaagtcgttgatgaaggagttcatgatggacatggcctt

SEQ ID NO: 1385 - DNA, 601 bp, Zea mays
  Clone ID: TF_LIB4729-041-R1-K1-E9
aatcttgcttgtgttcgcattccttccatctatcctagacctacttagtcaccaacaagcgcgcgtgcgtgcatgcatgcaacccagcactgaatctagatggaaggaaagcaaggaagcgagcggtcgcaaggacggccggccgagcaagaaataagtgactaagaccgtgaaggacggcctccatttccccgcccgtcggatggatcgctacctacaataaagaacggctacgtacacgcagtgcgtagggaggcccgcctctacctacgctggcgtcctggatgacctacctggtcagggactggatctagctggcaacgctggctaggacagccagaagacacacatgcatccgcgccacctactgcttgctatccataccgaccaacgactagctaagctagttgctggctggaccatccatcacgcacggcggtttgccaacataaatccacccctgcttgctaagaaaacagaggagaaagaatgcatccaccggagcaagcaaggcaagcaagccaacaaagacggcaagcacctcaacaaagatagatattggaggcagatccaacctatgcatgcataggtaggaagcgag

SEQ ID NO: 1386 - DNA, 267 bp, Zea mays
  Clone ID: TF_LIB4730-068-R1-K1-F4
ccccattgcacgactgccacatgtcggcgtccttcgcgccaagccccaaagactacgatggaccgcacgaagcaaacggcacgcatgtcaacgggcggcaaggcgccccgaaagcagctggtgaccaaggcggcgcgcaagtctgcgcctaccgccggcgtcgtgaagaagccccaccggttaggggggggcacggttacgctacggtagattcggaagtaccagaagagaacggagctgcctatccgcaagttgcccttacagcgc

SEQ ID NO: 1387 - DNA, 667 bp, Zea mays
  Clone ID: TF_LIB4974-021-Q1-K1-A5
gaatcactaaaccgtactcggtgcgtcctaaaccaccgctcacctcgatatggctttctcccctcttccgactcgcttctctgtccggattccggattccctctgctctttccctaaccattgtagccatggcctctgacaggcacggcgatcggctcatgttcctccaagaaagccacgaacaggagttccaaggctggcctccagatccccgtgggaaggatcaccagaatccgcatggccgatgagaatgcccagagagacaatgccgtggccactgcctacctcgctgccgtgctccagtatattgctgctgaggctctgtgattgcgcggaatgcctgacgtgacaacacagaagacccgaatctgacggtgccacattctgctcggcgccagcaaaaactagaatgtctcgcggttgatgggcacggggaccatcgctatggatgccgtaatgacctagatgcataaacttttgatcccaataaatgtcgaccacatatctgccaaggctgcacctggagactaggactatgctgttgactactgctgatgacacctccaggatgatggcggagccacgtgagactgagcagtacgctacgtgttacacgtagatgatcatgcgtgatgctgcaacatgctacactaagatactgttgaga

SEQ ID NO: 1388 - DNA, 346 bp, Zea mays
  unsure (1)..(346): unsure at all n locations
  Clone ID: TF_LIB3069-003-Q1-K1-G4
gcagtctcnagttacaattcccaatccattaaactttaccagccttttgcaaactcagaggagnacgttattgtacccaaggcggagaagaagcctgtttttaagataccctctgaggacgagcccgtggccccggcggataaagcccccgctgtgaataagcctaatgcggataaactgctcccggcgggaaaatccgacggcaaggaatgccgtgttgacaagaacgtgcggaagaatgccaagaagagcgtggagacgtacaagatctacatcttcaaggtgctgaagcatgtgcacccagacatcggcatctcctccaaagccatgtccatcatgaactcct

SEQ ID NO: 1389 - DNA, 606 bp, Zea mays
  Clone ID: TF_LIB3279-200-Q1-K6-G11
ctcacgcgttcgctcatcttttctcgtttagaacctctaatatttaccccactcgccagtcgcagccatacctgtcgccatggacgccagcggagccaataacgaggcgaacaagggcgcggccggccgcaaggcaagcagccccaggaagaagtccgtgacgcgctccctcaaggcccggctgcagctcctcgtccgccggatcaggaactacctgaacaaggaccggttcgcccatggcgtgggcacttacctccccgtctacctggactacctcctggactaccttgtcgactaggttctggacttggcaagggacaccgcgaaagacaacatgatgacgcgcatcatgctgctccacatgctcctcgacatccacatcgacaaggagctcgggaagctgatgataggcctcaccatcgtgcacggcaacatcctctccaacatccactccatgctcctgcccaagaaggcggccaacaacgcgggcaacgcccgcaacaacgagcccaagtgcgccaagaacggcaccaagtcctccaagaaggcttactaagtagggacttcatctgcactgtgcgctggagcatgctcgtgtctagatct

SEQ ID NO: 1390 - DNA, 495 bp, Zea mays
  Clone ID: TF_LIB4762-006-R1-K1-G10
gggtctccaaacccttaaccaggagctctaggccttattccatgttctctgatgccgctcctggcatcgctacgaaccttatcacccataccctgtctcgttgtgccaacacctactaagccgctgaccgctaacgctgtccataagagaaggcctgagaccgctgaagcaaataagccccaccacgctcggcccgggctcgcacgggctcagcgtgatccgctttacgacaaaaagcacggagctgccgctactcaaggtgccggaccagcccctgatgcggcagatcgggcaggacgtcaagaccgacctacacttccacagttctgctgtctcaaggcttgaggagccggctgaggcctaccttgtcgtgctcttggaggacaccaacctatgcgccatccacgccaagcgcgccaccatcctgcccaaggacatccagcttgcccggcgtattcgcggagatgaggggctaagcgtgacattgcactgtgc

SEQ ID NO: 1391 - DNA, 517 bp, Zea mays
  Clone ID: TF_LIB4300-007-R1-M1-G1
acgcgcgagatcgcacaaatcctcttgctcgagttctcctcaaccaaattcaagtcacagtggtgaaactctcggcgatgtatggcgcgtggcaagggcgtataagggtctgggcaagggcggagccaagcgccaccgcaaggtgctgcgtgacaacatccagggcatcaccaatccggcgatccgcaggttggcgaggaggggcggcgacaagcgcatctccgggctcatctacgaggagacccgcggtgtgctcaagatcttcctcgagaacgtcatgcgcgacgccgtcacctacaccgagcacgcccgccggaagactgtcaccgtcatggacgctgtctacgcgcccaagcgccagggccgcaccctctacggtttcggcggctaggtcggtccatctcccggcggcgaattacctggcggctgtggactgtggaggtcgagttgtgtgtttcgtctagtgtagtctgagatgtctactattggtgctgatttctgtggcggctgaacacta

SEQ ID NO: 1392 - DNA, 437 bp, Zea mays
  Clone ID: TF_jC-zmXLIB3527P083cd11d1
ctggggttgcacccacattgaagacagattatctgatagaagggaatgacgtggaaaccacaatggacagatctactaaccagcttcagttcagcggacgacctacagacgtaaagatctactgaacacgagcattaaccatcacagctgtttatgcgccggcccctctatgccttattgggggacttgacggccttcttgggcgacttggtctccgagggcgccgccttgtcagcggactttttgggcaggagcaccaggatgatggtggggaggactccggcgtgggcgatggtgacaccggacagcaggttgctgagctcctggtctgtgcggatggaaaggagcacctggctcgagatgaggcgggttttcttgtggcccttggaagagctggcggccagctccagcaccttggcggtcaggtacttgaggac

SEQ ID NO: 1393 - DNA, 749 bp, Zea mays
  Clone ID: TF_LIB4762-143-Q1-K1-C1
ccggccgggaaaaatttcaaaaaaggaaaaaaaaaaaaaaaaaaaattaaaaaaaaaaaaaaaaaaaaaaaaaaaaaaaaaaaaaaaaaaaaaaaaaaaaaaaaaaaaaattcccccggtttaatcaacccttaaggggaaagtggcctccccctcgcctcccggccgggaaaagggaggggggcccggggaaaggttttcggggttggccccgcaaaaaaggaaacgtcaaggatttccagggcgggattccatttccccgtcggaaggttggccaggttcctcaggggggaaaagaaccgggagggggtcgggcccggcccccccgggaacctcgccgccgtcctcaagaacctcggggttggggttctcaaatttgccggaaaccccggggggaacaaaaaaaaaacccgttttgggccgcgccacttccattttgttgggcgcaacaacgaggagttgcccaaactgtgggggggggcccccttcgcgggggggggggttttgcctaacttccttcagatttggctccccaaaaaggttgcctcctccaaggccagggtcaacaacaacaacaattgaaattgtttcctgaaaaaaggatccaaccccccccttgttttgaagaaataggaggatgttgtcttcgggaaggatccggttttgttggaaaggaaatttaaattagtttcggtttttttaaagggaagggaaacggggttggaaatctcagggttgaatgctcgttg

SEQ ID NO: 1394 - DNA, 444 bp, Zea mays
  Clone ID: TF_jC-zmX700345539a1
caagcacccgcacgtaagctcggaattcggctcgagattccttccatctcccatttacttcctcagacccgagaagcgcagctgcggccatggacgccaccggcactggagctggagggaaggcgaagaagggagcggccggtcgcaaggccagcgggccgaggaagaagaccgtgacgaggtccgagaaggccgggctccagttccccgccggccgcatcgggcgctacctcaagaagggccgctacgcgcagcgcgtcggcagtagtgcccccgtctacctcgcggacgacctggagcacatcgccgctgaggacctggagctcgccggagactctaacaatgacaccaagaagacgcgcatcgtaccgagccccgggccgctggcgatccccaaccacaaaggagcccgagaagctgctgaccggcgtgaaccatcgccca

SEQ ID NO: 1395 - DNA, 449 bp, Zea mays
  Clone ID: TF_LIB3137-005-Q1-K1-A2
ctgatttgcgtttccagagccatgcggtgcttgccctccaggaggctgctgaggcataccttgttggcctgtttgaggacaccaacctgtgcgccatccatgctaagcgtgtgaccatcatgccaaaggacattcagctggcaaggaggatccgcggcgagagggcctaatcgccacctcaaacatcgtgacaaaaacatgaagtcctggggttattgttaatctggtgccattgtaaggacatatgagtagggtttgttttgtggatcgcaagtttctcttctgctactggtgctgctacctttgctggtgttattgctaggggcgaatactaaagtaactatgcgctgacagtctggactagcagtgttatgtgcgcttgttgaccttgcgcgccatgcttggggccgattggtccgttatgtcaaagaatggcgtacaaggcgggt

SEQ ID NO: 1396 - DNA, 395 bp, Zea mays
  Clone ID: TF_LIB3279-015-P1-K1-G10
cgcattcgttccaactcctgagcactttctcctagtgccagacaaagccaatcgagggcaaaatacaacattgacttcaacggcacccgaacaaggggttaggggaaaaagggagcggccggccgcaaggtcggccggccaaagaagaagtcggtgtctaggtacgagaaggcctgtcttcagttccccgaaggccgaatcgggcgctacttgaagaagggccgctacgcgcagcgtgtttgcaccggcgccctcgtctacctcgccggtgtcctctaatacctctccgcttaggttttggagctcgcccataatgcttccagggacaacaagaagactcgcattatttcgcgccacgtgcttctggctatccggaacgacgaggagcttgggaa

SEQ ID NO: 1397 - DNA, 440 bp, Zea mays
  Clone ID: TF_jC-zmXLIB3527P004bf03a1
catattcggtccgtcctggccaggaagaaatcgagcagccaaagagaggagaagatggctcgtacgaagcatacctgcctgtaagtgcacgcggaggctagagaccctgctgcatgcagttcgccaccaaggcggcgaggaagtctgcgccgaccatcgtcgtgcgtgaagaagccccacatgtacaggctcggcacggtggctctgcgcgagatccgcatgtaccagaagagcactgagctgctgatcctgaagctgccctttcagcgcctggtgcgtgagatcgctcaggactttaagacggatctgcggttccagagccacgccgttctggcccttcaggaagccttcgaggcctacctagtcggtctggtcgaggacaccaacctctgcgccatgcacgccaagcgcgtcaccatgatgcccatagacattcagct

SEQ ID NO: 1398 - DNA, 417 bp, Zea mays
  unsure (1)..(417): unsure at all n locations
  Clone ID: TF_LIB3957-024-Q1-K6-B2
ccgnatttccaatttcaaatccttcgacgcgcagcgccgcccgccctctcgcagctctctccgatggcccgcacgaagcagacggcgaggtaagtcaactggcggcaaggcgccgcggaagcagctggccaccaaggcggcgcgcaagtcggctccggccaccggcggcgtgaagaagccgcacaggttccgccccggcaccgtcgctctccgcgagatccgcaagtaccagaagagcacggagctgctcatccggaagctgcccttccagcggctggtgcgtgagatcgcgcaagacttcaagaccgaccttcggttccagtcctccgatgttaccgcgctggaagaggcctactaggcgtatctggtgggtctttttgaggacaccaacctgtgtcgcatccaccccaatagggg

SEQ ID NO: 1399 - DNA, 642 bp, Zea mays
  Clone ID: TF_LIB3594-060-Q1-N6-D6
gtgtttttttttttttttttttttttttttttttttttttttttttttttttttttttttttttttttttttttttttttttttttttttttttttaacagccaaattgttttgccaagaacattggtccccgtttgcgggacaaggaggggtggagtccatcgccttgttcagacttttcagaaaccgggagacagggcagcatttaggcccttttcccccttatgcggggcccgagctggatttccttgggcatgatggggacccttttggcgtggatggcccaaaggttggggtcctaaaagagacccaccaaataccccttgggggccttctgcagcggggggacaggggaggactggaacccaagggcggttttgaagttttgcgcgatctcacccaccagccgttggaagggcagtttccggatgagcagctccgggcttttttggtacttggggatctcgcggaaagcgacggtgccggggcggaacctgtggggttttttcacccccccggtggccggagcccatttgcgcccccccttgggggccaattttttccggggggccttgccgccagttgatttccttgccgtttgttttgtgcgggccattagaaaaagcttcaagagggcgggcg

SEQ ID NO: 1400 - DNA, 498 bp, Zea mays
  Clone ID: TF_LIB4071-005-Q1-N6-H8
aaaacgagcaatcgcattccattttccattcagggaggacaacacgcccgaaatacccaaataggcccggcataaaaaagcccccaccaccatatacttaaaacattacaacgacgaacagcagcagcgcgacagcaaaagccctctcccccctgatgcggggggcgagctggatgtcctggggcatgaaggggaccctcttggcggggatggcccaaaggttggggtcctcaaaaagccccaccaggaacccctccggggcctcctgaagggccgccacggccgaggactggaaccgaaggcccgtcttgaagccctgcgcgatctcacggacaaggcgctggaaggggagcttgcggatgaacagccccgggctcttcgggaacttgcggatctcgcggagcgcgacggggccggggcggaagcggggcggttttttcaccccgcccggggccggggccgacttgcgcgccgccttgggggccagctgcttccggg

SEQ ID NO: 1401 - DNA, 739 bp, Zea mays
  Clone ID: TF_LIB4766-057-R1-K1-E7
ccggccggaccccgcatctcctatgcccagctagatctttgcgacacatatcgaaacagctctagctagtgcgctcgacgcctaacctggtttccggtatggattccaagcagatcggagccatgacctgcttcattgccatcaccgctctcggcttccgtccctgcgcatccgccgagcgcatggtacggtgacttgccaaggatggcctccacatccctgagggaaggatcgccaggttcctcaaggacggcaagtatgccgagagagacggcgccggcgcccctgtctacctcgctgccgtgctcgagtatcttgctgctgaggttcttgagctggccggcaatgcggcacgtgacaacaagaagacccgcatcgtaccgcgccacatccagctcgccgtccgcaacgacgaagagctctcccgcttgctgggcacggtgaccatcgctagcggtggtgtaatgcccaacatccataacctgctgctcccgaagaaggacggcggcggcagcgccaaggctgcggatggtgacgaggactaagtccttgactacgcctggtggcacctccaggatgctgccgtatcaacatgtgtctgtgtagtacgttaggtgttcgttgtagctgggtatgtgagttgctgtaacactgctaaactaagttactcttgtgtttgctaaggattaagttctgtatttggtgctataaaagtgcatcctttgaatgactggttcat

SEQ ID NO: 1402 - DNA, 1173 bp, Zea mays
  Clone ID: TF_ZmC369_116
cattgggtacctcgagggccggccgggcacacaccaagaagcaagaaaactagaaaaggctcctcccgaccgcaacgcccctcatctccctcgaccccgacatccccgacccgatggcgcccaaggcggagaagaagccagcggagaagaagccggcggccgaggagaaggcggagaagacgaccgcagggaagaagcccaaggccgagaagcggctgcccgcgtccaagtcctccggcaaggagggcggcgagaagaaggggaagaagaaggccaagaagagcgtggagacctacaagatctacatcttcaaggtgctgaagcaggtgcaccccgacatcggcatatcctccaaggccatgtccatcatgaactccttcatcaacgacatctttgagaagctggccggcgaggccgccaagctggcgcggtacaacaagaagcccaccatcacgtcccgcgagatccagacctccgtgcgcctagtcctccccggagagctcgccaagcacgccgtctccgagggaaccaagcacgccgtcaccaagttcaccagcaactgagcgcgctgcgggatccgcggatctgttagaagggttctttgctgtgtcctttccccagtcccccaccctacccgcctagtagctagcttgcctgctctataaatccggcgcgccggattgtaatggtcctcttagatttgatgtccctgttgtggaatatagttgtatctctccgcttgctatttttctcattctttaggaacttggaaatctggtaattttgccgggagataactaggatcatcacaaattcgcgttgacaacgcgacctcacaaggtcgaaggctcgtgcgtttgttgtttcagtctcagattcttcagcacaagggtatttgtgagcggcaacgatgtctgtcttgcagccatacgatgattacaattttttttgtctgccagaacctgccaatgtgtgatgacataagagcgtctcaagcatgtgggtacattttgctctcgtcaatgtgtgatggtacaagttgctctaaagatttcgatttgtgttaacctgattgattagctggtcataacaaatgctttcagagtttgcaaatagtatctggtgcattctttcagaatgcattcttttttatggtaaagctattcacaatgg

SEQ ID NO: 1403 - DNA, 442 bp, Zea mays
  unsure (1)..(442): unsure at all n locations
  Clone ID: TF_3341041
ataacaaattctacattgttgcagaagcaacctagcacaggcctaaatatataacaaattctacattgttgcagaagcaacctagcacaggcctaaatataaacttggtaaccgccttggtcccttcggatacggcgtgcttggcgagctcgccggggaagacgaagcgcaccgaggtctggatctcccgggaggtgatggtgggcttcttgttgtancgggcgaacttggcggcctcggcagcgaacttctccaaaatgtcgttgatgaaggagttcatgatggacatggccttggacgaaatgccaatatccgggtgcacctgcttgaacaccttgaagatgtagatcttgtacgtctcgacgctcttcttcgccttcttctttcccttcttctcgccgccctccttgctcggcacgcgcttctccgcccttggcttctt

SEQ ID NO: 1404 - DNA, 797 bp, Zea mays
  unsure (1)..(797): unsure at all n locations
  Clone ID: TF_ZmC369_51
gccggcctggctgggaacacagcgaacacatctcctcgaatttctttccatccgatccccccttcgcaaccaaaaccccaactcgccccgcatcgatggcgcccaaggccgagaagaagcccgcggcgaagaagccggcggaggaggagcccgcggccgagaaggcgcccgccgggaagaagccgaaggcggagaagcgggtccccgctggcaagtccgctgccaaggagggcggcgcgggcaagaggggcaagaagaagggcaagaagagcgtggagacctacaagatctacatcttcaaggtgctgaagcaggtgcacccggacattggcatctcctccaaggccatgtcgatcatgaactccttcattaacgatatcttcgagaagctcgctgctgaggcagccaagctcgcgcgctataacaagaagcccaccatcacatcccgtgagatccagacctccgtacgcctcgtccttcccggggagctcgccaagcacgccgtctccgagggcaccaaggccgtcaccaagttcacctcggcctaggctgcgcggccgccgcttgcaggattctctcctgtgttcacgtctcttgctgtagttaggtgctgctgcctgctggcttctatgtatgttatctatctgtctgtagcaactgtgttatctgataggaccgtaatggtgcttatttaacccagctatatgtttctatgtgaatcatctctctatcggttattgagtacctttatattgtgatgntgatgtgaatgtgatttataaaatgcgtcagtttct

SEQ ID NO: 1405 - DNA, 822 bp, Zea mays
  Clone ID: TF_ZmC369_84
cattgggtacctcgaggccggccgggaccgaaatcttccgtcccaaatcgaccgagcgaattcaccacagcttctcaccaccgataccttcgatggcacccaaggcggacaagaagccggcggcgaagaagtccgcagaggaggagcccgcgacagagaaggcggagaaggccccggcggggaagaagcccaaggccgagaagcgcctcccggcgggcaagtccgccggtaaggagggcggcgggggcaagaaggggaaaaagaaagcgaagaagtccgtggagacctacaagatctacatcttcaaggtgctgaagcaggtgcaccccgacatcggcatctcgtccaaggccatgtccatcatgaactccttcatcaacgacatcttcgagaagcttgcggccgagtccgccaagctggcgcgctataacaagaagcccaccatcacctcccgcgagatccagacctcggtgcgcctcgtcctccccggcgagcttgccaagcacgccgtctccgagggcaccaaggccgtcaccaagttcacctcttcttaaggttcatagtactaggctgggtggtgttggtagacgtggctcaatttatctggtaggggtagtgatggatgatatgatctgcgtctatttgagctgttaagactgatgaacattgttccacgtcacgttgtgtttgatggacattgttccagatcacgttgttaagactgcagaactgtgtctgacatggaacaagtatgatactcgaaatttctgtgagtgcattgaaacgtgaaatctgcagtccttaaaaaaaaaaatctggaat

SEQ ID NO: 1406 - DNA, 719 bp, Zea mays
  unsure (1)..(719): unsure at all n locations
  Clone ID: TF_LIB5116-007-A1-PF1-C8
acaaaccagagcagcgcgcaccgccgcccacgcatctcgagtagtttccagctcgccggagacgcagcaagcaagaagatggccggaaggaagggcggcgacaggaagaaggcggtgacccgctccgtgaaggccgggctccagttccccgtcggccgcatcgggcgctacctcaagaagggccgctacgcccagcgcgtcggctccggcgcccccgtctacctcgccgccgtcctcgagtacctcgccgccgaggtgctggagcttgccggcaacgcggccaaggacaacaagaagacccgcatcatcccgcgccacctgctgctcgctgtccgcaacgaccaggagctcggcaggctgctcgctggcgtcaccatcgcccacggtggcgtgatccccaacatcaactccgtgctgctccccaagaagtcccccgccgccgccgagaaggaggccaggtcgcccaagaagaagacctccaccaagtcccccaagaagaaggtcgccgccaaggagtagcccgcccatagactactgtcgtgacattgcttaggtccatatcagggagaggatgatgagttttggttggttggatcctgtgtgtaattgcctaagtctgtagtggctgttacattagttcgatgaacagccggtagatgggcgctgtaatttatctctgatttatgtccggaatggctanagatgcaatcctttcaacc

SEQ ID NO: 1407 - DNA, 678 bp, Zea mays
  Clone ID: TF_ZmC369_99
acgacgagcactcgccgccactcaccagcaaattcccaagccgcccctttccccatctctttcgcgacccatttgatcgattcctgatggcgcccaaggccgagaagaagcccgcggagaaaaagccggcggaggagaaggccgagaagaagccaagggcggagaagcgcgtgccgagcaaggagggcggcgagaagaagggaaagaagaaggcgaagaagagcgtcgagacgtacaagatctacatctttaaggtgctcaagcaggtgcacccggacattggcatctcgtccaaggccatgtccatcatgaactccttcatcaacgacatcttgcgagaagctcgccgccgaggccgccaagctcggcccgctacaacaagaagcccaccatcacctcccgggagatccagacctcggttcgcctcgtcctccccggcgagctcgccaagcacgccgtatccgaagggaccaaggcggttaccaagtttacatcctcttagggtgccgccgcacgttgctacgatcctgtttaattctcatatttaggcctgtgctaggttgttcgtgcaacaatgtagaatttgttataattgctgaatgaatcagttacccctgttgaagttttctaatatattaatcttgctagtaaaaaaaaaaaaaaaaaactcgagcccgg

SEQ ID NO: 1408 - DNA, 575 bp, Zea mays
  unsure (1)..(575): unsure at all n locations
  Clone ID: TF_LIB3279-011-P1-K1-H6.F2
ggaaaccagattggtttagcngaacagaggaagcaggacgcttcctcttcgttcacggttccttggcggggccnagcnaaagaacatgcttcaacacactctggaacacaccacgggggggggggcgcagagacccttggcacacgagggctgacggggccccatcagtccagttcaccggctcgggcgctcggagccagatctacgccttggtggccttcttgggggacttggtggccttcttgggcgacttgggggcggtcttctcggccttctcagccttctcgggggccttcttggggagcagcaccgggttggtgttggggatgacgccgccgtgggcgatggtgacgccggacagcagcctcccgagctcctggtcgttgggggtggccngcagcaggtgcctgggcacgatgcgggtctttttgttggccttgggggggttcccggtccgctcctgcccctttggtgggaggttctcgaggacgggggcgaggtagacgggggcgcctggacccacccggctgggcgtaacggccctttttggggagcgcccgatgcggccgtcgggg

SEQ ID NO: 1409 - DNA, 283 bp, Zea mays
  Clone ID: TF_LIB3088-011-Q1-K1-D5
gcgcagacgcgtgggcaggcggcaaggccccttggaagcatctggcgaccaaagcggcgcgcgagtcggcccctgcgaccggcggcgtgaagaagccgcaccgattccgaccgggcaccagggcgctgcgcgagatccgcaagtaccagaagagcacggagcttctcatccgcaagctggccttgcagcgcctggtccgcgagatcgcgcatgacttcaagaccgacctccgcttgcagtcctacgccgtcgacgcgctgcacgaggcctaccaggcctacct

SEQ ID NO: 1410 - DNA, 344 bp, Zea mays
  unsure (1)..(344): unsure at all n locations
  Clone ID: TF_LIB143-046-Q1-E1-C10
cgtttcaaccttttccatcgctcctaatcctaacaaccaaaaaatctgagccgtaattattggccccaaaggcggaaaaaagcccggcgcaaaaaagtgcggangagaaccctcggaaaagcggctccgcggagaaagcccccgcggggaagaagccaaagcggagaagcggctacctgcgggcaagtccgccggcaaggaggcggcaacaaaaggtagaagaagcgaagaagagcgtggagacctacaagatctacatcttcaaggtcctgaagcangtgcaccccgacatcggcatctcctccaaggccatgtccatcatgaactccttcatcaacgacatc

SEQ ID NO: 1411 - DNA, 381 bp, Zea mays
  Clone ID: TF_uC-zmflteosinte78g07b1
cccacgcgatcgtcaagacctcctcagaccccgagaagcgcaggggcagccatggacgccaccggcgctggagctggagggaaggccaagaagggagcggctggtcgcaaggccgcgggccgaggaagaagcaatgacgaggtgcctgaaggccgggctccagctccgcgtcggacgcatcaggcgctacctcaggaagggccgatacgcgcagcgcgtcggcagcggtgcccccgtctacctagcggccgttctggagtacctcgacgccgaggtcctggagctcgccaggaacggtggcaaagacaacaagaagactcgcatcagtccgcgccacgtgctgctggcgatccgcaacgacgaggagctagggaagctgct

SEQ ID NO: 1412 - DNA, 509 bp, Zea mays
  Clone ID: TF_jC-zmshLIB3569P054h03b1
cacagtggctttgtcctttctaggaagaaatcgagcagccaaggagaggagaagatggttcgcacgaagcaggccgcccgcaagtccaccggaggcaaggcccttagcaagcagctcgccaccaaggcggagaggaattctgcgccgacgacccgcggcgtgaagaaaccccacaggtacaggcccgggacggtggctctgcgcgagaaccgcaagtaccagaagagcacggagctgctgatccggaagaagcccttccagcacctggtccgtgagatcgctcaggacttgaagacggatctgcggttccagagccacgccgtcctggccctcaaggaagccaccgaggcctacctagtcggcctgtgtgaggacaccaacctctgcgccatccaccccaagcgcgtcaccatgatgcccaaagacatccaggtggcccgccgcatccgatgggagcgcgcgtaggcgtatctcgcgcccggacccagcggcaccggagggatggacga

SEQ ID NO: 1413 - DNA, 654 bp, Zea mays
  unsure (1)..(654): unsure at all n locations
  Clone ID: TF_LIB5116-021-A1-PF1-H10
accattcctcccaccttcaagcgcatctacacacacacacaccacagaccacctctccccgcccaagcatccccatccgcatcctcatccatggcccccaaggcagccgagaagaagccggtggagaagaccccggcggggaagaggcccaaggcggagaagaaggtgccggcgtccaaggagggcggcggggacaagaagggcaagaagaaggccaagaagagcgtggagacgtacaagatctacatcttcaaggtgctgaagcaggtgcacccggacatcggcatctcctccaaggccatgtccatcatgaactccttcatcaacgacatcttcgagaagctggccggcgagtcggccaagctggcgcgctacaacaagaagcccaccatcacgtcccgcgagatccagacctccgtccgcctcgtcctccccggcgagctcgccaagcacgccgtctccgagggcaccaaggccgtcaccaagttcacctccgcctgattcggtcctgtccctgtgtgtgtcttcctggtggatggatcgatgtcgccctgtagtttcctgctcggactttgtcctcttgtaacttgtgctggctgtgtcttgtgtgngatcatatttcatgatctggagaaatagtagcggtgcttattg

SEQ ID NO: 1414 - DNA, 2295 bp, Zea mays
  Clone ID: TF_ZmC19847_1
ctcgaggccggccgggccgggattgtcgagcacacagcttcggactcttctctagggagttcgcgcacaggctccacctcatcggcccccgcgaagtcagagccacatccctggttcgagccccagagcagagcagcctccccgatctccacccctctgtgatagtccgcatgaagcagatggcgcgcaagtcgatgggcggcaaggcgccgcggaagcagctggcaacgaagggggcgcgcaagtcggagacgaggacgcgcggcgtgaagaaggcgcaccagctccgcccgggcaccgccgcgctgtgcgagatccgtcagtacaagaagagcacggggctgctaatccgcaagctcttgttccagcgcctcgtcggccacgacgccacatggttcctgctcgacatcgccttctacagccacaacaggttccaggaggactccaccagcatcagcgggatccccatgtccaacaccaggagcgcagaggagaaggaggttctcgccacctcgcccaacaggtgtttgacgaattgcttcaaactcatacaaagttgttttagctgggatgcagtgccatatcaacagccttggccaccacctcatatgcaggtggagtttgggtgtggcagtgctgatttatgtccaattccatggccgtttttcaccacaattggtaccaatgaggagataattgacatcacatctgatgatgacaaggttgataatgtggttgatcagctgattgatgaacagatcgcagcagtagtctttgtgccagcgtgtatggaagctacgcctaataatgtgataaatacaagcaaaaccgtggagacctttgctgctcatcagtctcctgagtatgatagtggattgaaagataaggatcagagaatatcatttgaagatgagatatctgagggtgggcaagctgaacaaagtactccacaacaggaattgtgggctatgccaccagatactagtgaccgtgaaactgttgagaggacaaccagaagtattgaggtggagcatttctctcaggttgagtcaaagcataaaatgaactctatgtccgtggaagcttctgagcatgtcactatcactcagattgagaagaagccggttcaacaagttgagataactcaggagttagattcactgccgatatgttctagggagcattctaatgaggcacttgaaggggagagaacagtgcaggctgggttggaacaagagtgtgaggtgctggggatattgtcaacgatcacctcagatatttttgcaatagggctcagtccaaatcaatatactgtgtatttttatcggaatttgatggcctgcatgatgttaatccgtcgcagattcttgctgtcatttggacgtagttgggatgcggtgacgtataagcaaccatggccaccaccggtgcatgttgtgatactaggagatggcttttccgtcaggcttacaccttggcaaccacttgatactgatatctacagctttcctgtgaacaaaccagaatcatctgcaggtgtcttttgtattgcaacagaatcaacgcagtgtgcctatgattcccaatgaaacagtgtctcgacaatcctcttgatgatgcacagatgcctttatgaacagatgcaatacaaatctgaagagggatgtactcgggtagtgaaatgcctcccaccggctgacgcaagtttacttgtctgggctgttaatcagatgacagatccattgattgcattgatgtatgcggtccaagtgatgaattttctcaaggacaaagaggagtcacctcgagaggatgttttgctgctccagaaggacccatttgatggcaacaggcatcagaaacccaacgtgacacttgccatctccttgaggaaagatccaggagtcattgttgcgtgcactgccccaaccaacgaagtaccaacatatgtggaggactacactagtagctcacaatctgcaactgctggctagtggctatcaccgatgctcccggcatgacaactaaaatttcttaccatcagcggcttgggggcaagccgcatttcaagcggtggggaatgtcagcaacggtctaggggagacgctagacgaggcagccgtcgcggaagagcggcgatgtcccagcaaggagcagctcgcatatccgagccaaggagttatgtaaacgagtgggccatatgttgggccgcagggtgaagggtatttgagtctgtattccgtatgaactggttatgaaaagaaatagaatatcagaaaagccttcgtgctcccc

SEQ ID NO: 1415 - DNA, 351 bp, Zea mays
  Clone ID: TF_LIB3076-004-Q1-K1-A11
gcgacgccactgcgtgccgatctccgcatgtcgttaccatactgcttgagcgactttctacctcgtgcccagacaagtccatatcgagagcgcgagatactgaccagtggacgtgcacctggcacctggagcagcggggtaatggggaagaagtggagctggcctggcgcaaggtgctgcgggccataggaagaagtcaggagtctaggtccgtgaaagccgtgctccagttccccgtcggccgcatcgtgcgctacttgaagaatggccgctactcgcagtgtgtatgctccggctcccgcatctacctcgacgctgtactagaatacctaggcgatgacgatttttagc

SEQ ID NO: 1416 - DNA, 515 bp, Zea mays
  Clone ID: TF_LIB3600-051-Q1-N6-A5
aaagggtgaacgcttttatagcatcatatacatatattgaatatttaacatgcacaggagtatcatatagttaacggggtctctaggcacccacatatccctgctacagcgtgagaccataatgtactaacaaacacacatgagcgtatgctgtctgtattcgctagaacgagggaccagcgcgcatgcaaggacttaccactctttattagcaggagtctttacgatggagcagtcggatttgttggatagcaaaatgttatagttgttagggcattacaccagcgatagtgatggccaccgtagcccaacactaggcatagatttttagctttgcggaccgcgagctgcatgtggcgcgtcacgataccacttttatggtggtgacgtgcagcattgccgagcaactgacgaacctgaagagcaagatactctagcacgttattgaggtagacaggggcgccgtggtggcatttcttgtcatacttgccggccttgatgaacctggcgatact

SEQ ID NO: 1417 - DNA, 506 bp, Zea mays
  Clone ID: TF_LIB3595-063-Q1-K6-B6
gggcgaacgcctccctggatgcccaagatcccggagaacctgcggtgaaaactgcggctatggacgagcccaatggcgtgtacgtccccggcggccagaagccaggggaaaggaaatctagtcccactcaggcgatgaactgcgcatgtgagtctggcaaggcaaataggagccagccgacgggcgaggtcagcgtggaagacctacaagatctacatcttcaaggtggtgaagcaggtgcacccatacatccttatctactctaacgtcctgtgcattatgaactccttcatgaaccacatcttcaataagctggccgccgatgccaacaagctcgagcggtacaacaagaagcccaccatcacctaccgtgagatccaaacctccgttctcctcatcctgcccggtgagctagacgagcacaccgattgccatggcaccaaggtgcgcaccatgattagctaatgctacgctgcctggactgcgctatcaagctcgcctggtgt

SEQ ID NO: 1418 - DNA, 569 bp, Zea mays
  Clone ID: TF_LIB4762-009-R1-K1-H2
taccctccgggctcggccggggccaccttttgctatgatagttaaatatttctgggggatgaatcatagcttttccctcaaaacccaatcgcacatgtgggagacctagccctgccattgcaacgatccctttaatttatcctaccaccttatctgctcgattctaatactttaagggctagtttgggacacgcagctttagtcccatctctcaaaccatccgaccccacctcgccgctcactcccaagccagtccctgccggcagcgatggcccgcacgaagcagacggcgcgcaagtcgacgggcggcaaggcgccgcggaagcagctggcgacgaaggcggcgcgcaagtcggcgccggccacggggggcgtgaagaagccgcaccgcttccgcccgggcaccgtggcgctgcgggagatccgcaagtaccagaagagcacggagctgctgatccggaagctgccgttccagcggctggtgcgggagatcgcgcaggacttcaagacggacctccggttccagtcctccgccgtggccgcgctgcaggaggccgccgaggcctacc

SEQ ID NO: 1419 - DNA, 430 bp, Zea mays
  Clone ID: TF_LIB3597-038-Q1-K6-G10
gcccgcgaagtgccacccggcaggcgaaggctcctcgtgccaagccatgctcgcctaccaagggcggcaagagaagtatgcgccaacgacccacggtgtgaagaaaccccacaggttcaggcccgggacggttgtactgcgccagatccacacgtacacatgagacacggggctgctgatgccgaagtttaccttccagcgcttgatctgtgagatcactcaagacttgaagacggatctgaggttccagagacacgccttactggccctccataaagccggccaggcctacctggtctgactgttacaggacaccatactctgagccatacactcaaagcgcgtaaccatcatgccctaacacatgcagttcgcctatcccatacgctgctagcgctcgtaatcatatctgtcgccatgacccactggc

SEQ ID NO: 1420 - DNA, 386 bp, Zea mays
  unsure (1)..(386): unsure at all n locations
  Clone ID: TF_LIB3245-004-P1-N1-E8
cactcatccacagctcgcanccctatgcctggggcgaatcctgtctgggcggtgcnatnncccncacnaaacaaacagcaaggaagtcgaccggcggcaaggccccccggaagcagctggccactaaggctgcgcgcaagtcggccccggccaccggcggcgtgaagaaaccccaccggttccgccccggcaccgtctcgctcctcgagatccgcaagtaccagaagagcactgagctgctcatccgcaagctccccttgcagcgcctcgtccgcgagatcgcgcaggacttcaagactgatctgaggttccagtcctccgccgtcacggcgctgcaagaggccgccgaggcgtacctggtggggctcttcgagacaccaaccttt

SEQ ID NO: 1421 - DNA, 432 bp, Zea mays
  Clone ID: TF_LIB4979-046-R1-K1-F12
agatccatctcatctccctagcaatctctagcatgcagatcctcgtgcgaagcaaagcgctagcccccttcgtactgtcccgatggcccgcacgaagcagacggcgaggaagtccactggcggcaaggcgccaaggaagcagctggccaccaaggcggcgcgcaagtctgccccggcgaccggcggagtgaagaagccccaccgtttccgccccggcaccgtcgcgctccgggagatccgcaagtaccacaagagcaccgagctgctgatccgccagctgccgttccagcgcctggtgcgtgagatcgcccaggacttccagaccgacctcctcttttttttttccccccgcgccgcgctgcaggaggtgttccaggcctacctcgtcgggctcttttaggaaaccaacctctgccccattctccgcccagc

SEQ ID NO: 1422 - DNA, 722 bp, Zea mays
  Clone ID: TF_LIB4185-029-R1-K1-C8
cctcgagtttttttttttttttttttttttttttttttttttttttttttttttttttttaaaagcacattccttttccattaaaatagagggaaacgccatttcaaaggccccggggcaagaacaagcagattaaaaaaggcaactcctaacactacaaacaccattttgcgaacagaaggaaccgaacaaaagcaaggtttttacaagcagaaacccagaggaaaggcccaacaacggggacaacaacaacgggagatcaagccctttcccccctgatgcggcgcgcgagctggatgtccttgggcatgatggggacccccttggcggggatggcccaaaggttggtgtcctcaaaaagccccacgagggaggcctggggggcctcctgcagcgcgggaacaggggaggactggaagcggaggtcggtcttgaaatcctgcgcgatctcacggacaaggcgctggaagggcattttggggataaacagctccgggcttttttggtacttgcaaatctcccggagcgcgacggtgccggggcggaagcggggaggttttttcaccccaccggttgccggggccaatttgcgcgccgccttgggggccaattgtttggggggcgccttgccccccgtcaacttgcgcgccgtttgtttcgggcgggccatcggaaattcggtgcttggcgcaaaaatgggcaacccgagccggcgggggatt

SEQ ID NO: 1423 - DNA, 471 bp, Zea mays
  Clone ID: TF_LIB5025-020-A1-XP1-E2
gccggccgtttccgggacaccgcaatcttcaatctccccagcaatccctagcagaagccttccatcctcactcgctcgatggcccgcacgaagcagacggcgaggaagtccaccggcggcaaggcgccgaggaagcagctggcgactaaggcggcccacaagtctgcccctgcgaccggcggagtgaagaagccccaccgcttccgccccggcaccgtcgcgctccgggagatccgcaagtaccagaagagcacggagctgctgatccgcaagctgccgttccagcgcctggtgcgggagatcgcgcaggacttcaagaccgacctacgcttccagagctctgctgtctccgcgctgcaggacgcggctgaggtccaccttgcccggctcttcgaggacaccaacctctgcgccatccactccaagcgcgtcccctcatgcccaccgacatccatcttgcccgccgtatcc

SEQ ID NO: 1424 - DNA, 498 bp, Zea mays
  Clone ID: TF_LIB3279-174-P1-K6-D12
ccaaggccgagaagaagcccgcggcgaagaagccggtggaggaggagcccgcggccgagaagacgaccgccgggaagaagcccaaggcggagaagcgggtccccgctggcaagtccgtcggcaaggagggcggcgagggcaagcgtggcaagaagaagggcaagaagagcgtggagacgtacaagatctacatcttcaaggtgctgaagcaggtgcacccggacatcggcatcttctccaaggccatgtccatcatgaactccttcatcaacgacatcttcgagaagctggccggcgaggccgccaagctcgcgcgctacaacaagaagcccaccatcacctcccgcgagatccagacctccgtgcgcctcatgctcctcggagagctagccaagcacgccgttctttgagggcaccatggccgttaccaagttcaccttcttctatgcttgcacgctcgccctttgtaggcttctcttgtattgatgttcgccttgt

SEQ ID NO: 1425 - DNA, 511 bp, Zea mays
  Clone ID: TF_LIB4975-062-Q1-K1-F6
aatcatataacaatatagacacactggagtgaatagagaacagcctaggacaaacccaacgcgccagtcctgtctcgactgtgccgatgtctgggatgatacctcatcgtgaggctagctctgtgtcggcaagggggcagggaagcacgtgaccaccaaggccgaacgcaagtctgccccggcgaccggtggagtgaagaagccccaccgtttccgccccggcaccgtcgcgctccgggagatccgcaagtaccacaagagcacggagctgctgatccgcaagctgccgttccagcgcctggtgcgtgagatcgcccaggacttcaagaccgacctccgcttccagagctccgccgtcgacgcgctgcaggaggcgtccgaggcctacctcgtcgggctcttcgaggacaccaacctctgcgccattcacgccaagcgcgtcaccatcatgcccaaggacatccagctcgcccgccgtatccgtggggagagggcctaggagtcgtcccgg

SEQ ID NO: 1426 - DNA, 695 bp, Zea mays
  Clone ID: TF_ZmC653_26
gccggccgggcctcgaccaacgatctcagtctccctagcaatctctagcagcagatcctcgtgcgaagcaaagcgctagccccttcgtactgtcccgatggcccgcacgaagcagacggcgaggaagtccactggcggcaaggcgccaaggaagcagctggccacgaaggcggcgcgcaagtctgccccggcgaccggcggagtgaagaggccccaccgtttccgccccggcaccgtcgcgctccgggagatccgcaagtatcagaagagcacggagctgctgatccgcaagctgccgttccagcgcctggttcgtgagatcgcccaggacttcaagaccgaccttcgcttccagagctccgccgtcgctgcgctgcaggaggcgtccgaggcctacctcgtcgggctcttcgaggacaccaacctctgcgccattcacgccaagcgcgtcaccattatgcccaaggacatccagctcgcccgccgcatccgtggggagagggcctaggcgtcgtcgcggtggaggtcgaagtagtggtcgcagtttctgtcatcaccgtctggctagaaggtgtagagatgtgccgggttctgtagtttgggttatcggtcgaatcatgatgtagttggttcttcacagctgtaatttaactatgacgatgccatggcaaaaaaaaaaaaaaaaaaggccccta

SEQ ID NO: 1427 - DNA, 438 bp, Zea mays
  Clone ID: TF_LIB3088-044-Q1-K1-A3
ctcacgcgtccgatccgctgtcgcatgcgctgtatttcaagctctactccatgaagtgcagctccaagagcaacaccagcagggacgcgggcatggacggcaccgcagcaagagccaacaaggacgcgaacaagggcacggccggacgcacggccaacaagccgaggacgaagtccgtgacgaggtccctgaaggcccggctgcagcgcatcgtgcggcgtatgaagaaggatctgaacaaggaccgcgacgcgcagggcgtccgcacgtacgtggccgtctacctggacgacgtgctcgagtacgtggtcgaccaggtgctggaccttgccgacgacaatgacaaggacaacatgatgacgcgcatcatgctgctggacatgctcatggacaagcagctcgacgaggagctgggcaagctgatgatcggcgacagca

SEQ ID NO: 1428 - DNA, 247 bp, Zea mays
  Clone ID: TF_700021006H1
ttcggcacgagcaactcccaaggtccctttttttttgtcggtctggaagcgccgcagtagcagccatggacgtgagcggacaggcggtaaggcgaagaccggcgcggcggggcgcaaggccggcgggccgacgaagaagtcggtgtcgcggtcctccagggccgggctgcagttccccgtcagccgcgtcgggcggtacgtcaaaaagggccggtacgcgcagtgctaggcacgggtgcccccgtct

SEQ ID NO: 1429 - DNA, 571 bp, Zea mays
  unsure (1)..(571): unsure at all n locations
  Clone ID: TF_LIB4730-058-R1-K1-H4
ccgtcgccgttcttgttgttctacgataccaaaccccaaacatgctccaccggcacctctgctaccacacaacaccgatggcccgcacgaagaagacggcgcgcaagtccaccggtggcaaggcgccgaggaagcagctgacgaccaaagcagcgcgcaagtcggccccgacgaccggcggcgtgaagaagccgcaccgcttccggccgagcaccgtggtgctccaggagatccgcaagtaccagaagagcacggagctgatcatccggaagctcttcttccagcgcctggtccacgagatcgagcaggacttcaagaccgacctctgcttccagtcctccgccgtcgccgtgctgcaggaggccggaggaggactacctcgtcggcctcttcgaggacaccaacctctgcgtcatccacgccaagcgcgtcatcatgatgcccaacgacatccagctcgcccgccgcatccgngaggagcgcgcttaggcgattacggatgattgttactactggagatgattaggctatgtnctcaccatgtactaggtctgcttcgttattatttgtt

SEQ ID NO: 1430 - DNA, 389 bp, Zea mays
  Clone ID: TF_LIB3357-004-P1-K1-B2
ggcaattcgccgcagcctctcaccctcgcgagtcccgacctcccgcagccgccgcacagatggcacccaaggcggagaagaagccggcggccaagaagccccgcggaggaggagcccgcgacagagaaggtggagaaggctccggcggggaagaagcccaaggccgagaagcgcctcccggcgggcaagtccaaggagggcggcgagggcaagaaggggaaaaagaaggcgaagaagtccgtggagacctacaagatctacatcttcaaggtgctgaagcaggtgcaccccgacatcggcatctcgtcaaggccatgtcatcatgaactcttataacgacattcgagagctcgggcgagtcgcagctggcctcacagagccacatactc

SEQ ID NO: 1431 - DNA, 348 bp, Zea mays
  unsure (1)..(348): unsure at all n locations
  Clone ID: TF_LIB4829-035-R1-N1-G5
gattgggtatcctcgnacgccgccgggccctagccaccgcatcgtcgccctcaaattcgttccgtccaggcaaggaagaaatcgagcagccaaggagaggagaagatggctcgtacgaagcagaccgcccgcaagtccaccggaggcaaggccccgcgcaagcagctcgccaccaaggcggcgaggaagtccgcgccgacgaccggcggtgtggagaagccccacaggtacaggcccgggacggtggtgctgcgcgagatacgcaagaaacataagagcccgcggctgttgatacgtaaggtgccctttcaccgcgtggaccgggagatccgtttggaatgtttgatg

SEQ ID NO: 1432 - DNA, 555 bp, Zea mays
  Clone ID: TF_LIB4665-002-R1-N1-D12
ctctttttttttttttttttttttttttttttttttttttttggtatcttttttttgttattttttttgttttggtttttttttttttaaaggacagctgggaagaaccaactactttgggatgggaccgataacccaaactccagaacggggaaaatctttacactttttagccagacggggacgacagaaactgagactgctactttgacctcctccgccacgacgcggtaggccctttaacagggatacggggggcgaccttggatgcccttgggcatgagggtgacccccttggcgtgaggggcgcaaaggttggtgtcctggaaaagaccgacaaggtatgcctgggacgcctcctgaaggggggggacgggggaactctggaagcgaaggccgggcttgaattcctgggcgagctcacgcaccagtctctgaaacggaagctggcgtataagcacttgcgggctcttctggcactgggggatctcccggagcgcgacggtaccggggcggaaccgttggggctctttcactcccccgggcgccggggca

SEQ ID NO: 1433 - DNA, 729 bp, Zea mays
  Clone ID: TF_LIB4766-036-R1-K1-A9
cattgggaccctcgaggccggccgggacacggccacgcaccgaaactgccccgcccccgcagacactcgtcctccccgcgccacctcggggacgtcccggtccgcgacatccctgaccaccgcgatggccgccgccgccctccgctcctccgcacgccggctcctgcgtctcaccccggcaccctcgtcggctctgttcgccgcttcccggcccaccgccagggttgcaccgctctcacgccccatcgccgctctgtcaggtggcaacaatcctatctcatggaaactgagacgcttcttcagttcaaatgaaaagcacttgcctgcaatatctgatccagagatcgaagctgcatttaaggatttgttggctgctagttggaatgaacttccagattctctcgtagcggaagcaaagaaagcagtatctaaagcgaccgatgataatgctggtcaagaggctttttttccggcctcccattcctcgcgcggcgaccacccgattcgaagcgtgcggagagaccgaagaagcgggagagatggctcgtaccaagcagactgctcgcaagtccacgggagggaaggctcccaggaagcagcttgccaccaaggctgcccgtaagtctgcccccaccactggtggagtgaagaagcctcaccgctaccgccctggaactgttgccctccgtgagatccgcaagtatcagaagagcactgagctgctgatca

SEQ ID NO: 1434 - DNA, 2954 bp, Zea mays
  Clone ID: TF_ZmC460_2
ggccgcttttttttttttttccgttttttttttttttttattatacatcaaactgacctcatttatcaggctgaaagcatggccctgccttttataattacatatgtgtccaacgtaagtgtcagtgcatcccatgatggcatacatacatattttgcgtacatacacatcacatgactggataattacatatgtccaacgtaagcgtcagtgcaccccatgatggcatacatacatattttgcatacatacacacatcacatgactggagaatcatgcagagatctctcatctcagccaagatcaggaacgatgaagtagtcctcgtcgtcgtcgtcaggcacctccatccgtgacttcttgaacaggcgcgccccgttcgccttgtagaacccggcgttactcactggctgcggcgaggcgaagaactccgccatggcagttttagctggcgaatgggcgtggaacaggtcgatgtcctcgaaccactccagctccttgagcccaagagacgagtctttcttgtcgctggattcgtagtccgacagctcgaggaggtcctcgacggcccaaccggacggtggcaggaacggcgaggacggcacctcctgcggcagcgcgtccttgaccgtccttgttttggtggtcgtcccggcagctggcgcgctgacgacggccgcgggcttggagctgcccttgggcggcgccggcgggaggccctcggcgctggcgccgcagacggagctgaagccgacgcggatgccggtggcgaggtagcgctggtggttgccggagagcgtgccggggacgtggatgggctcgtcgcagtcgcggcagaggagcgccctgtcctcgacgcagaagatgaaggccggcctctcctggcacacgtcgcagcgcgggaggctggcggggagcgccgcggcgtcgccgagcgggagccgctggtgcttgctggcgagcttgttggcggcgtggatctccacgtcgcagcgcgcgcacagcgccgcctcgtcggcgcagcacaccaccgtggccgccgcggcctcgcacgcgtcgcactggatcctcatgccgcccgcccctttcctacgtaatccggagcttccagtggagacaggcaggccagcagccgcctaaaaaaatcagcatgggaacgcggacgcgtgggcggacgcgtggggcgtggttggcgcgtataaatcgcgcagcgcgcctaacggaaggcgcccgccgctgggccatgcgccccgggacgctggtgggcgtggataccgacgtcgcagcgcgcgcacagcgcggcctcgtcggcgcagcacaccaaggtgaattccgcgcgttcgcacgcatcgcaccaaatcgtcatcgcccttggatcactctgtggtggctctatactaccgtgtgcagctcgctaacccgacgcctggtcttttaagtctaaacgagatcagggacgatgaggtggtcctcgtcgtcggtgacctcggtccggcccttcttgctctggcgcaccccggcgacggcagtggcagtggctttggctggcctgtagtacgccgcgtcgttcgcggcctgggttccggaaagctccggtacctcggccaatctcctgccggctttcggcgtctgctcgtggaagaggtcgatgtcggtgaaccactccagctccttgaacccgagcggggactccttgtgcagcttgtcgctggactcgcagtcggagaactgcaggagctcgtcgacggcccagccctgtggcaggaactgcggcggcgagggcacctgctgcgccgcggaggagacggcggccttgggcggggcgtggtggtcggagtcgtcgtgggcgtcgcaggcgtcactgcacgctgacgaagcggaggcgaagccgacgcggatgccggtggcgaggtagcgctggtggttcccggagagcgtgcccgggacgtggatgggctcgtcgcagtcccggcagaagagcgcccggtcctccacgcagaagatgaacgccgctttctcctggcagacgtcgcagcgcgggaggctggcggagagagcctcgagcgggaggcgctggtgcttgctggcgagcttgttggcggcgtggatctcgacgtcgcagcgcgcgcacagcgcggcctcgtcggcgcagcacaccacggtggcagccgcgccctcgcacgcgtcgcactggatcttcatggccgctccacctctctgtctgcggtctatactcccaggcccagctcgctatcctgtcctgtcgtctcgcaagtcgcaacaacgagggaggcaaggacgaacaagataaggccaccgactgcgatggaggaggacgagcttgcgcgcgcgagcacgcaactggagcaatcagtgagctgccgctgccgggcgagcttgtggtggaggactcgccggggagacttgtggccaggggctcccggctcgtctccccgtgtactagctacacgccggaaccacgcttggacgcgccgattcaggtttttttttttgggctcactcggcggaacgggccctgtcactcccggtattgcctttttacatggttttgttattgatttgaagaaaatttggtcagaactcaggaccgtttgtagtacttgtcactcgagctctctgtacccaagtgaaagtgtcaggtgttgaggaaatgttatgttaaaaacatcggagatgtctcttagactgctactagtcggttgcccgtgcgttgcgccggtttacataatacctcacgtaaactatccataaatttttttaagattttcaaccggcgcatgtgctaaccgcccgccccaacccacgttagggcgttcgcgccccaagggcccgtcccattggctcagcccgcccggcagacgcgcctcggcgggccgcctcgaagctcccttcccaacgggcggcgtgcttaaaaaacacaaaataatgtacac

SEQ ID NO: 1435 - DNA, 457 bp, Zea mays
  unsure (1)..(457): unsure at all n locations
  Clone ID: TF_LIB4729-095-Q1-K1-F11
cctctcccgngagccgtaccccgcctcccggttcaaccaaatccctctcgcctcatccccaccagcgcaaagccgncctatcgacctgacnagagaagcaatggagnnccgagggaaggtagatggagctggtgccgcnaagaaagcaacgncaaggagctccaaggctggnctgcagattcccgtcgncaggatcgctcggttcctcaaggccgncaagtacgccgagcgcgtgggcgccggcgcccctgnctacctcccacctgtcctcnagtacctccccgctgaggncctgaagcttgctggnaacgcagcgaggaataacaagaagacccgcatcgtgccgcgtcacatcccgctccccgtgcgcacccacgaagagctgacccagctgcttgncgcagcccccctccccagcgccgcccccatgccccccatccaccaacccctcctcccc

SEQ ID NO: 1436 - DNA, 662 bp, Zea mays
  Clone ID: TF_ZmC369_37
ctcgaggccggccgggccatagaaatcgaccgagcgaatccctcgcatcgcattcgcagcctttgctgcatcacaccaccgcgaaaccccagcagccgcatcgatggcgcccaaggcggagaagaagccggctgcgaagaagccagcggaggaggagcccgctgccgcgaaggccccggcggggaagaagcccaaggccgagaagcgcctcccggcggccaagtcgtccggcaaagaaggcggcgacaagaagggtaagaagaaggcgaagaagtcggtggagacctacaagatctacatcttcaaggtgctgaagcaggtccaccccgacatcggcatctcttccaaggccatgtccatcatgaactccttcatcaacgacatcttcgagaagctcgccggcgaggctgccaagcttgcgcgctacaacaagaagcccaagcacgcggtctccgagggcaccaaggccgtcactaagttcacatcatcttagatttgaggtagtagctattgggtggcgttggtagttgtgtctcaatttgtctgctactaatagtggtaggagtatccatgtgtagttgggttgtggtaagaattgtgttaaactggtaatacgtttgaaattgctttttatggatgtggaatagttgtgttgcttgtct

SEQ ID NO: 1437 - DNA, 445 bp, Zea mays
  unsure (1)..(445): unsure at all n locations
  Clone ID: TF_jC-zmXLIB3526P100dc07a1
tcgacccacgcgggcggcgcattcgttccaaatcctgagcactttcttctcgtcccagacaagccaatcgaagccgagatacgaccatggactccaccggcaccggagcacggggtaaggggaagaaaggagcggccgggcgcaagggcggcgggccattgaagaaggcggtgtcnaggtccgtgaaggacggtcttcagttccccgtcggccgcatcgggcgctacttgaagaaaggccgctacgcgcagcgtgtcggcaccggcgcccccgtctacctcgccgatgtcctcgaatacctacccgctgaggttctggagctcgccggtaatgctgcccgggacaacaagaagactcgcattatttcgcgccacgcgcttgtggcgatccggaacgacaaagagccttgcgaagctgttgggcggggggccatcgctcaccggcg

SEQ ID NO: 1438 - DNA, 554 bp, Zea mays
  Clone ID: TF_LIB4665-006-R1-M1-F6
ccacgcgggcgggagcactcgccgccactcaccatcaaattcccaagccgccccttcccccatctctttcgcgccccatttgatcgattcctgatggcgcccaaggccgagaagaagcccgcggagaataatccggcggaggataatgccgagaagaagccaagggcggataatcgcgtgccgagcaaggagggcggcgagaataagggaaagaagaaggcgaagaagagcgtggagacgtacaagatctacatcttcaaggggctcaagcaggtgcacccggacattggcatctcgtccaaggccatgtgcatcatgaactccttcatcaacgacatcttcgagaagctcgccgccgaggcagccaagctcgcccgctacaacaagaagcccaccatcacctcccgggagatccagacctcggggcgcctcgtcctccccggggagctcgccaagcacgccgtctccgaagggaccaaggcgggtaccaaggttacatcctcttatggggccgccgccgccgcacgttgctaaattttctcatatttaggact

SEQ ID NO: 1439 - DNA, 633 bp, Zea mays
  Clone ID: TF_LIB4764-037-R1-K1-D4
cattgggtacctccgagccggccgggaaccgcaatcttcgatctccccagcaatccctagcagaagccctccatcctcactcggtcgatggcccgcacgaagcagacggggaggaagtccaccggtggcaaggcgccgaggaagcagctggcgactaaggcggtccgcaagtctgcccctgcgaccggcggagtgaagaagccccaccgcttccgccccggaaccgtcgcgctccgggagatccgcaagtaccagaagagcacggaggtgctgacccgcaagctgccgttccagcgcctggggcgggagatcgcgcaggacttcaagaccgacctacgcttccagagctctgctgtctccgcgctgcaggaggcggctgaggcctaccttgtcgggctcttcgaggacaccaacctctgcgccatccacgccaagcgcgtcaccatcatgcccaaggacatccagcttggccgccgcatccgcggtgagagggcctaagcgtcatattttctgtcatcagtgcccgatcagaagatgcagagatacgctgagttctgcagactaggtactgtcagatcatcgagtgttggcctgtcactgctgtaacttaattatcatgatgcatatgaaatg

SEQ ID NO: 1440 - DNA, 656 bp, Zea mays
  Clone ID: TF_LIB5026-055-A1-XP1-F7
gcaggcagaggcagctcagcagcagccagctccatccatcctctttcccctcctcgcttcgcttcctcggcggattcctcctccctcggccgtccccgtcccctttttcaacgctcgcaggtaagcagataggcaccaagggtgaccgtaagtctgcccccaccactggtggagtgaagaagactcaccgctaccgccctggaactgttgccctccgcgagatccgcaagtatcagaaaagcactgagctgctgatcaggaagctgcccttccagaggctcgtcagggaaattgcacaggacttcaaaactgatttgcgtttccagagccatgcggagcttgccctccaggaggctgctgaggcataccttgttggcctgtttgaggacaccaacctgtgcgccatccatgctaagcgtgtgaccatcatgccaaaggatattcagctggcaaggaggatcccgcgccgagagggcctaatcgccacctcaaacatcgtgacaaaaacatgaagtcctggggttattgttaatctggtgccattgtaaggacatatgaatacggcttgctttgagaatagacaagttctcttctgctaatgttgctgctacctttgatggtgctattgctaaggccgaaaacttaagttaactatg

SEQ ID NO: 1441 - DNA, 509 bp, Zea mays
  Clone ID: TF_LIB3354-104-Q6-K2-B1
ggcatccgcagagagcttgttccgtccaggcaaccaaaaagcatgttgccccgccgcgcataggaagaagagagcagaggaggatggctcgtacgaagcataccgtccgcaagtccacgggaggcaaggccccccgcaagcagctcgccaccaaggcggagaggaagtcggcgccgacgaccggcggcgtgaagaagccccacaggtacaggcccggaaccgtggcgctgcgcgagatccgcaagtaccagaagagcacggagctgctgatccgcaagctgcccttccagcgcctggtgcgcgagatcgcgcaggacttcaagacagacctccggttccagagccacgccgtgctggcgctccaggaggccgccgaggcctacctcgtcggtctgttggaggacaccaacctctgggccatccacgctaagcgcgtcaccatcatgcccaaggacatccagctcgaccgccgcatccgtggtgagcgctcgtagccatcatctccgggg

SEQ ID NO: 1442 - DNA, 573 bp, Zea mays
  unsure (1)..(573): unsure at all n locations
  Clone ID: TF_LIB4666-020-R1-K1-G6
tttttccggcctcccattcctcgcgcggcgaccacccgattcgaagcgtgcggagagaccgaagaagcgggagagatggctcgtaccaagcagactgctcgcaagtccacgggagggaaggctcccaggaagcagcttgccaccaaggctgcccgtaagtctgcccccaccactggtggagtgaagaagcctcaccgctaccgccctggaactgttgccctccgtgagatccgcaagtatcagaagagcactgagctgctgatcaggaagctgcccttccagaggctcgtcagggaaattgcacaggacttcaaaactgatttgcgtttccagagccatgcggtgcttgccctccaggaggctgctgaggcataccttgttggcctgtttgaggacaccaacctgtgcgccatccatgctaagcgtgtgaccatcatgccanaggacattcagctggcanggaggatcccgcgcgagagggcctaatcgccacctcaaacatcgtgacanaaacatgaagtcctggggttattggtaatctggtgccatttgtaggacatatgagtagggttt

SEQ ID NO: 1443 - DNA, 575 bp, Zea mays
  Clone ID: TF_LIB4742-057-R1-K1-E4
cctcgaggccggccggggccaccgaaatcttccgtcccaaatcgaccgagcgaattcaccacagcttctcaccaccgataccttcgatggcacccaaggcggacaagaagccggcggcgaagaagtccgcagaggaggagcccgcgacagagaaggcaagaaggggaaaaagaaagcgaagaagtccgtggagacctacaagatctacatcttcaaggtgctgaagcaggtgcaccccgacatcggcatctcgtccaaggccatgtccatcatgaactccttcatcaacgacatcttcgagaagcttgcggccgagtccgccaagctggcgcgctataacaagaagcccaccatcacctcccgcgagatccagacctcggtgcgcctcgtcctccccggcgagcttgccaagcacgccgtctccgagggcaccaaggccgtcaccaagttcacctcttcttaaggttcatagtactaggctgggtggtgttggtagacgtggctcaatttatctggtaggggtagtgatggatgatatgatctgcgtctatttgagctgttaaaactgatgaaca

SEQ ID NO: 1444 - DNA, 676 bp, Zea mays
  Clone ID: TF_ZmC519748_1
atcttctctgtctctgctacatctcccgcccagccaaacttctctctcgccttcgaagaagaagccgcagcatccatggcccccaaggctgctgagaagaagccggtggagaagacccccgcgggcaagaagcccaaggcggagaagaaggtgccggcgtccaaggagggcggcgacaagaaggggaagaagaaggccaagaagagcgtggagacgtacaagatctacatcttcaaggtgctcaagcaggtgcaccccgacatcggcatctcctccaaggccatgtccatcatgaactccttcatctacgacatctttgagaagctcgccggcgagtccgccaagctcgcgcgctacaacaagaagcccaccatcacgtcccgcgagatccagacctccgtccgcctcgtcctccctggcgagctcgccaagcacgccgtctccgagggcaccaaggccgtcaccaagttcacctcgtcctaggctcctcgtgcattagttcttgtgtttctttcctgttcctcgtctgatgagttctgtagctagctgtgtgtgttctgacagtgtcatcctgtaacaatggtgctgcctgaataaatagtcgtcttgctgcttgaatggacgactgtcgctagtatgcttgactgccacatgtttaatcagtttcttctcgggc

SEQ ID NO: 1445 - DNA, 680 bp, Zea mays
  unsure (1)..(680): unsure at all n locations
  Clone ID: TF_LIB4730-027-R1-K1-A5
nacaacgatcacagtctccctagcaatctctagcagcagatcctcgttcgaagccaagcgctagccttcctactgtcccgatggcccgcacgaagcagacggcgaggaagtccactggcggcaaggcgccaaggaagcagctggccacgaaggcggcgcgcaagtctgccccggcgaccggcggagtgaagaagccccaccgtttccgccccggcaccgtcgcgctccgggagatccgcaagtaccagaagagcacggagctgctgatccgcaagctgccgttccagcgcctggtgcgtgagatcgcccaggacttcaagaccgaccttcgcttccagagctccaccgtcgccgcgctgcaggaggcgtccgaggcctacctcgtcgggctcttcgaggacaccaacctctgcgccattcacgccaagcgcgtcaccatcatgcccaaggacatccagctcgcccgccgcatccgtggggagagggcctaggcgtgttcgcggtggagttggaaagtagtagtcgcagttttctgtcatcactgtctggttagaagttgaagagattgcccggttatgtagttttgggttattggtcgaatcattatgtagtttgggtcttcactgctgtaatttaactatgactatgcaatgcaaatgaagttcctcgttatcacttcg

SEQ ID NO: 1446 - DNA, 814 bp, Zea mays
  unsure (1)..(814): unsure at all n locations
  Clone ID: TF_ZmC369_106
cattgggtacctcgagggctgnccgggacaacacctagaagcaagaaaagcctcctcccgtccgcatcgcccctcatctccctcgaccccgacatccccgacccgatggcgcccaaggccgagaagaagccagcggagaagaagccggcggccgaggagaaggcggagaagacgaccgcagggaagaagcccaaggccgagaagcggctgcccgcgtccaagtcctccggcaaggagggcggcgagaagaaggggaagaagaaggccaagaagagcgtggagacctacaagatctacatcttcaaggtgctgaagcaggtgcaccccgacatcggcatatcctccaaggccatgtccatcatgaactccttcatcaacgacatcttcgagaagctggccggcgaggcagccaagctggcgcggtacaacaagaagcccaccatcacgtcccgcgagatccagacctccgtgcgcctagtcctccccggagagctcgccaagcacgccgtctccgagggaaccaaggccgtcaccaagttcaccagcaactgagcgcgctgcgggatccgcggatctgttagaagggttctttgctgtgtcctttccccagtaccctacccgcctagtagctagcttgcctgctctataaatccggcgcgccggattgtaatggtcctcttagatttgatgcccctgttgtggaatatagttgtatctctccgcttgctatttttctcattctttaggaacttggaaatctggtaattttgccgggagataactaggatcatcacaaattcgcgttgacaacgcg

SEQ ID NO: 1447 - DNA, 807 bp, Zea mays
  Clone ID: TF_ZmC369_152
cattgggtacctcgaggccggccgggcacaacaccaagaagcaagaaaactagaaaaggctcctcccgaccgcaacacccctcatctccctcgaccccgacatccccgacccgatggcgcccaaggcggagaagaagccagcggagaagaagccggcggccgaggagaaggcggagaagacgaccgcagggaagaagcccaaggccgagaagcggctgcccgcgtccaagtcctccggcaaggagggcggcgagaagaaggggaagaagaaggccaagaagagcgtggagacctacaagatctacatcttcaaggtgctgaagcaggtgcaccccgacatcggcatatcctccaaggccatgtccatcatgaactccttcatcaacgacatctttgagaagctggccggcgaggccgccaagctggcgcggtacaacaagaagcccaccatcacgtcccgcgagatccagacctccgtgcgcctagtcctccccggagagctcgccaagcacgccgtctccgagggaaccaaggccgtcaccaagttcaccagcaactgagcgcgctgcgggatccgcggatctgttagaagggttctttgctgtgtcctttccccagtcccccaccctacccgcctagtagctagcttgcctgctctataaatccggcgcgccggattgtaatggtcctcttagatttgatgtccctgttgtggaatatagttgtatctctccgcttgctatttttctcattctttaggaacttggaaatctggtaattttgccgggagataactaggatcatcac

SEQ ID NO: 1448 - DNA, 823 bp, Zea mays
  unsure (1)..(823): unsure at all n locations
  Clone ID: TF_ZmC369_78
cctcgagccggccgggaacccaagaagcaagaaaactagaaaagcctcctcccgaccgcatcgcccctcatctccctcgaccccgacatccccgacccgatggcgcccaaggccgagaagaagccagcggagaagaagccggcggccgaggagaaggcggagaagacgaccgcagggaagaagcccaaggccgagaagcggctgcccgcgtccaagtcctccggcaaggagggcggcgagaagaaggggaagaagaaggccaagaagagcgtggagacctacaagatctacatcttcaaggtgctgaagcaggtgcaccccgacatcggcatatcctccaaggccatgtccatcatgaactccttcatcaacgacatcttcgagaagctggccggcgaggccgccaagctggcgcggtacaacaagaagcccaccatcacgtcccgcgagatccagacctccgtgcgcctagtcctccccggagagctcgccaagcacgccgtctccgagggaaccaaggccgtcaccaagttcaccagcaactgagcgcgctgcgggatccgcggatctgttagaagggttctttgctgtgtcctttccccagtcccctaccctacccgcctagtagctagcttgcttgctctataaatccggcccgccggattgtaatggtcctcttagatttgatgcccctgttgtcgaatatagttgtatttctccgcttgctattttctcattctttaggaacttggaaatttagtatttttgccgggagataactgggatcatcacaaatttcgcgtgacnacgcgacctcacatgg

SEQ ID NO: 1449 - DNA, 529 bp, Zea mays
  Clone ID: TF_LIB4975-071-A1-K1-F1
atccaatcagcatctacagatcaagtataaccgcgaagccgcccccgctcccaaacccgaccgagtaaagcgctaagccccccaaccgcggatcaatccgcagcatcaatggcgtcgcaaggcgagagaaaaaggcggcggctagagaagcccgcggaggaggagcccgcgcaccgagaaggcggagaaggctccggcagggaagaagccgaaggcggagaaacgcctccccgcgggaaagtccggcgccgaagagggcaagaatggtagagtaagaaagccaagaagagcgtggagagctacaagatctacatcttcgaggtgctcaagcaggtgcaccccgacatctggcatctcgtccaaggtcatgtacatcatgaattccttcatcaacgacatcttcgagaagctcgacgtgtaggccgtcaagctcgaccgctacaacaagaagcccaccatcatctcgctcgagatccagatctccgtccgcctcgtcctacccggcgagctcggcaagcacgccgtctct

SEQ ID NO: 1450 - DNA, 257 bp, Zea mays
  Clone ID: TF_LIB3076-018-Q1-K1-E6
atctccgaacatctgctcagaccttttaagttctgctccggccatggacgccacgggcactggtactttattgaaggctaacaacgtatccgccggtcgcaaggccggccgtcccatgaagaaatctgtgacgaggtccgtcaaggccgggctccagtttcccgtctgccgcatcgggcgctacctcaaaaatggccgctactctcagcgcgtctgcagctttgcccccgtctacctcgcggtcgtcctgtaatacc

SEQ ID NO: 1451 - DNA, 410 bp, Zea mays
  Clone ID: TF_LIB3279-230-Q6-N6-E12
aaaaaaaacaaggcttttttttttcctttctaaatagcaaaggacaacttgcggggggacacatccccatacaggggcgttggccccatttgcagcctacccataaccgaatacggggaacaagggcctgctaaacatcaaatcactccggacaggcagtctatgcctttttaggggacttgggggcctttttgggcaattttgcctccttgctccccccactggaccccttttccgccgtttttttgggcaaaaaaacagggttgattttggggagcacacccccgggagcgatggtcaccccccccaaaagtttcccaagctccttttttttccggatccccaaaagcacgtggcgcgaaataatgcaagtttttttgttgtccctggcagcattaccgggaagctcc

SEQ ID NO: 1452 - DNA, 445 bp, Zea mays
  Clone ID: TF_LIB3608-007-Q1-N6-H1
gggccggggggggcaaccccaaataaaaacagggcctcctaagggtggaagcaaattatttgggggcaattgggaatattattaaaaatttccacactacattggtcctcgggcaacctattagcactggcctaaaagccgaggaaacaaaacaaagccgtcgttccgggcgggggggatctaagaggaagaaaacttggaaacggccttggggccctcggaaacggggtgcttgggaagctccccaggaaggacgaggcccaccaaaatctggatctcccgggagggtatggggggctttttgttgaaacgggcaaacttgggggccttggaagccaacttttcaaaaatgtcgttgatgaaggagttcatgagggacatggccttggacaaaataccaaaggccgggggcacctgcttgagcaccttgaaaaaagaaaaactt

SEQ ID NO: 1453 - DNA, 422 bp, Zea mays
  Clone ID: TF_uC-zmroteosinte022h10b1
cgcgaccacccgatacgaagcgtgtggagagattgaagaagcatgagtgatggctcgtaccaagcagactgctcgctagtccacgggagggaaggctcacaggaagcagcttgccaccaaggctgccctgaagtatgcccccaccactggtggagtgaagaagcctcaccgctaccgccctggaactgttgcccttcgtgagatccgcacgtaccataagagcactgagctgctgatcatgaagctgcccttccagaggcttgtcagggaaattgcacaggacttccagacttgatttgcgtttccagagccatgccgtgcttgccctccacgaagctgctgaggcataccttgttggtttgtttgggacaccaacctgtgcgccatacatgctaagcgtgtgaccatcatgccaaaggaca

SEQ ID NO: 1454 - DNA, 1019 bp, Zea mays
  unsure (1)..(1019): unsure at all n locations
  Clone ID: TF_ZmC2834_3
aggccggaggaagacggcggagaagcccaagaagaagctccagttcgagcgctcaggtggtgcgagtacctcggcgacgccggaaagggctgcnnnnnnnnnnnnnnnnnnnnnnnctggaggtgactcagttaagaagacgaaaccacgccaccgctggcggccagggactgtagcgctgcgggagatcaggaagtaccagaagtccactgaaccgctcatcccctttgcgcctttcgtccgtgtggtgagggagttaaccaatttcgtaacaaacgggaaagtagagcgctataccgcagaagccctccttgcgctgcaagaggcagcagaattccacttgatagaactgtttgaaatggcgaatctgtgtgccatccatgccaagcgtgtcacaatcatgcaaaaggacatacaacttgcaaggcgtatcggaggaaggcgttgggcatgatatataatatccattctgattgcatcattcttgtgaatttgtttgtaggagctagacattagtgttgttgaatgctgcatggttcctaatccttttcgcagtctaacatctgtggagttagtatgttacatggcaacggacgcgtgggtgtggactatatggcaacagccgaagattgtgtctgtgggataactggtggttttggttgctcttcagtagtttgtttgcttcagtctgcagtatggactatggagtaaactgcatgctgaaacccgaaccactgctgaaactgcatgctgaaacccgaaccactgctacggcagttgccaggatagcaggagggcctttatgcacagtggaattgagtagagaactgagtaaaccatggttctttctccttttgaactggaacacacacagttggatcttgtttctcttcttaggccattcatcgtgtttattaggggtgtaaatggtacaaatattatctgtccgtattcgaatttgatctatctaagaaggttgaaatccgaaaaaaaaaataaaaaaccctaacaatttcacc

SEQ ID NO: 1455 - DNA, 669 bp, Zea mays
  Clone ID: TF_LIB4975-051-A1-K1-E8
atgattaacatccgtcctctgtccgtcctaccccaccgctccctcggtttggctgtctcccctattacgcacacgcttctcgctccggattccgtattccctccgctctttccctaccgaacggagccatgatggacataggcaaggcgatcggatcaggcgccgccaagaaggccacgtccaggagctccaaggctgggctccagtgccccgtggtaaggatcgccaggttcctcaagggcgccaagtatgccgagagagtccgcgccggcgcccctgtctacctcgctgccgtgctcgagtatcttgctgctgaggatcttgagctggccgctaatgcggcacgtgacaacaagaatacccgtatcgtaccgcgccacatccagctcgccgtccgcaacgacgaagagctctcccgcttgctgggcacggcgaccatcggtagcgctggtgtaccgcccaacatccataaccttttgctcccgaagaatgccgtgggcacgagcgccaaggctgcggatggcgacgaggactaatgccttgactacgactggtgagaccttcaggatggtgccgtatcaacatgtgtctgtgcactacgttaagagccgcgtgaatgtgatcatgcgggctgctgtaacaatgctatcacaaggatctcctgtgctt

SEQ ID NO: 1456 - DNA, 699 bp, Zea mays
  Clone ID: TF_ZmC369_39
ctcctcgcatttccttgcaaccgattgcctatccccctctcaacccaagaccgatggcgcccaaggcggagaagaagcccgcggcgaagaagccggcggaggaggagcccgcggcggagaagacgaccgccgggaagaagcccaaggcggagaagcgggtccccgcgggcaagtccgccggcaaggagggcggcgagggcaagcgtggcaggaagaaggggaagaagagcgtggagacgtacaagatctacatcttcaaggtgctgaagcaggtgcacccggacatcggcatctcgtccaaggccatgtccatcatgaactccttcatcaacgacatcttcgagaagctggccggcgaggccgccaagctcgcgcgctacaacaagaagcccaccatcacgtcccgcgagatccagacctccgtgcgcctcgtgctccccggcgagctcgccaagcacgccgtctctgagggcaccaaggccgtcaccaagttcacctcctcctaggcttgcacgctcgccctttgtaggcttctcttgtgttgatgttcccccttgtgttgtagttagatgttgctggtttctctgtcggcgctgctcgtaactgcgtcatgtaacccagcaaggacttgtttaattgtgaatcagcaacactttgttgttgatcactttatgttccaaattctgagtttgacgctcg

SEQ ID NO: 1457 - DNA, 650 bp, Zea mays
  unsure (1)..(650): unsure at all n locations
  Clone ID: TF_LIB4669-005-R1-K1-D3
accctcggagtcttccggaccgcaatcttcaatctccccagcaatccctagcagaagccttccatcctcactcgctcgatggcccgcacgaagcagacggcgaggaagtccaccggcggcaaggcgccgaggaagcagctggcgactaaggcggcccgcaagtctgcccctgcgaccggcggagttaagaagccccaccgcttccgccccggcaccgtcgcgctccgggagatccgcaagtaccagaagagcacggagctgctgatccgcaagctgccgttccagcgcctggtgcgggagatcgcgcaggacttcaagaccgacctacgcttccagagctccgctgtctccgcgctgcaggaggcggctgaggcctaccttgtcgggctcttcgaggacaccaacctctgcgccatccacgccaagcgcgtcaccatcatgcccaaggacatccagcttgcccgccgcatccgcggngagagggcctaagcgtcatattctctgtcatcagtgcccgatcagaagatgtagagatgtgnctgnnttctgtaatttgggttactgtcgaatcatcgagtagttggttggtcactgttgtaacttaattattatgatgcttatgaaatggcaatgaagctttggttttactt

SEQ ID NO: 1458 - DNA, 640 bp, Zea mays
  unsure (1)..(640): unsure at all n locations
  Clone ID: TF_LIB4669-006-R1-K1-G9
ccctcgaggcttccggacccgaatcttaatctcccagcaatccctagcagaagccttccatcctcactcgctcgatggcccgcacgaagcagacggcgaggaagtccaccggcggcaaggcgccgaggaagcagctggcgactaaggcggcccgcaagtctgcccctgcgaccggcggagtgaagaagccccaccgcttccgccccggcaccgtcgcgctccgggagatccgcaagtaccagaagagcacggagctgctgatccgcaagctgccgttccagcgcctggtgcgggagatcgcgcaggacttcaagaccgacctacgcttccagagctctgctgtctccgcgctgcaggaggcggctgaggcctaccttgtcgggctcttcgaggacaccaacctctgcgccatccacgccaagcgcgtcaccatcatgcccaaggacatccagcttgcccgccgcatccgcggngagagggcctaagcgtcatattntctgtcatcagtgcccgatcagaagatgtagagantatgctggttctgtagtttggggtactgtcgaatcatcgagtgttgggctggtcactgctggtacttaattatcatgatgcatatgaaatggcaatgaactctgttatc

SEQ ID NO: 1459 - DNA, 641 bp, Zea mays
  Clone ID: TF_LIB4729-002-R1-K1-C10
acagcaatcttcaatctcccgagcaaagcaaagctctagccttccatcctcactcgctcgatggcccgcaccaagcagacggctaggaagtccaccggcggcaaggccccgaggaagcagctggcgactaaagcggcccgcaagtctgcccctgcgaccggcggagtgaagaagccccaccgcttccgccccggcaccgtcgcgctccgggagatccgcaagtaccagaagagcacggagctgctgatccgcaagctgccgttccagcgcctggtgcgggagatcgcgcaggacttcaagaccgacctacgcttccagagctccgctgtctccgcgctgcaggaggcggctgaggcctaccttgtcgggctcttcgaggacaccaacctctgcgccatccacgccaagcgcgtcaccatcatgcccaaggacatacagcttgcccgccgcatccgcggggagagggcctaagcatcatatatttctgtcatcaccgcccgatcaggagatgcacagatgggcctgggttctagcagtttgggttacctgccaatcatcgagaagttggtttgttaactgctgtaactttactatcacgatccataatgaaaagggcaacggaaccatttttatcaacagac

SEQ ID NO: 1460 - DNA, 698 bp, Zea mays
  Clone ID: TF_LIB4729-002-R1-K1-H10
acagcaatcttcaatctcccgagcaaagcaaagctttagccttccatcctcactcgctcgatggcccgcaccaagcagacggctaggaagtccaccggcggcaaggccccgaggaagcagctggcgactaaagcggcccgcaagtctgcccctgcgaccggcggagtgaagaagccccaccgcttccgccccggcaccgtcgcgctccgggagatccgcaagtaccagaagagcacggagctgctgatccgcaagctgccgttccagcgcctggtgcgggagatcgcgcaggacttcaagaccgacctacgcttccagagctccgctgtctccgcgctgcaggaggcggctgaggcctaccttgtcgggctcttcgaggacaccaacctctgcgccatccacgccaagcgcgtcaccatcatgcccaaggacatccagcttgcccgccgcatccggggggagagggcctaagcatcatatattctgtcatcagtgccccgatcagaaagatgtagcagatgtgcctgggttcctgtaggtttgggttactggccgatcatcgagtagttgggtggttcactgctggtacctttatttcatgatgcctttgaaatggctatgcaccatggcaatcagacctaggaaaaaaataaaaaaaaaggcggcccttcgggcctctgccttttggttcccctttt

SEQ ID NO: 1461 - DNA, 626 bp, Zea mays
  Clone ID: TF_LIB4729-040-R1-K1-C10
cggaccgcaatcttcatctccccagcaatccctagcagaagccttccatcctcactcgctcgatggcccgcacgaagcagacggcgaggaagtccaccggcggcaaggcgccgaggaagcagctggcgactaaggcggcccgcaagtctgcccctgcgaccggcggagttaagaagccccaccgcttccgccccggcaccgtcgcgctccgggagatccgcaagtaccagaagagcacggagctgctgatccgcaagctgccgttccagcgcctggtgcgggagatcgcgcaggacttcaagaccgacctacgcttccagagctccgctgtctccgcgctgcaggaggcggctgaggcctaccttgtcgggctcttcgaggacaccaacctctgcgccatccacgccaagcgcgtcaccatcatgcccaaggacatccagcttgcccgccgcatccgcggggagagggcctaagcgtcatattctctgtcatcagtgcccgatcagaagatgtagagatgtgctgggttctgtagtttggggtactgtcgaatcatcgagtagttggttggtcactgctgaaactaattatatgatgcatatgaagtggcaatgaactctttattc

SEQ ID NO: 1462 - DNA, 685 bp, Zea mays
  unsure (1)..(685): unsure at all n locations
  Clone ID: TF_LIB4729-041-R1-K1-D8
tgggaccctcgagccgccggaaccgaatcttcatctccccagcaatccctagcagaagccttccatcctcactcgctcgatggcccgcacgaagcagacggcgaggaagtccaccggcggcaaggcgccgaggaagcagctggcgactaaggcggcccgcaagtctgcccctgcgaccggcggagttaagaagccccaccgcttccgccccggcaccgtcgcgctccgggagatccgcaagtaccagaagagcacggagctgctgatccgcaagctgccgttccagcgcctggtgcgggagatcgcgcaggacttcaagaccgacctacgcttccagagctccgctgtctccgcgctgcaggaggcggctgaggcctaccttgtcgggctcttcgaggacaccaacctctgcgccatccacgccaagcgcgtcaccatcatgcctaaggacatccagcttgcccgccgcatccgcggngagagggcctaagcgtcatattctctgtcatcagtgcccgatcagaagatgtagagatgtgctgggttntgtagtttgggttactgtcgaatatcgagtagttgggtggtcactgctgaaactaatatcaatgagcaatgaaaggcaatgagctctgtatcaccgaaaaaaaaaaaaaaaaggggcctcgagctcaacttttggttc

SEQ ID NO: 1463 - DNA, 647 bp, Zea mays
  unsure (1)..(647): unsure at all n locations
  Clone ID: TF_LIB4729-049-R1-K1-E2
ggggaccctcgggcctccggacccgaatcttaatctcccagcaatccctagcagaagccttccatcctcactcgctcgatggcccgcacgaagcagacggcgaggaagtccaccggcggcaaggcgccgaggaagcagctggcgactaaggcggcccgcaagtctgcccctgcgaccggcggagttaagaagccccaccgcttccgccccggcaccgtcgcgctccgggagatccgcaagtaccagaagagcacggagctgctgatccgcaagctgccgttccagcgcctggtgcgggagatcgcgcaggacttcaagaccgacctacgcttccagagctccgctgtctccgcgctgcaggaggcggctgaggcctaccttgtcgggctcttcgaggacaccaacctctgcgccatccacgccaagcgcgtcaccatcatgcccaaggacatccagcttgcccgccgcatccgcggggagagggcctaagcgtcatattctctgtcatcatgtgcccgatcatgaagatgntagagatgtgctgggttctgtagtttgggttactgtcgaatcatcgagtagtgggttgttcactgctgtaacttaattatcatgatgcatatgaaatggcaatgagctctgttacc

SEQ ID NO: 1464 - DNA, 654 bp, Zea mays
  unsure (1)..(654): unsure at all n locations
  Clone ID: TF_LIB4762-025-R1-K1-B11
tcgaggtcctggcccgggacactcgcaanntcttcaatctccccagcaactccctagcagaagccttccatcctcactcgctcgatggcccgcacgaagcagacggcgaggaagtccaccggcggcaaggcgccgaggaagcagctggcgactaaggcggcccgcaagtctgcccctgcgaccggcggagtgaagaagccccaccgcttccgccccggcaccgtcgcgctccgggagatccgcaagtaccagaagagcacggagctgctgatccgcaagctgccgttccagcgcctggtgcgggagatcgcgcaggacttcaagaccgacctacgcttccagagctctgctgtctccgcgctgcaggaggcggctgaggcctaccttgtcgggctcttcgaggacaccaacctctgcgccatccacgccaagcgcgtgaccatcatgcccaaggacatccagcttgcccgccgcatccgcggggagagggcctaagcgtcatattttctgtcatcagtgcccgatcagaagatgtagagatatgctgggttctgtagtttggggttctgtcgaatcatcgagtgttgggctggtcactgctgggacttaattatcatgatgcatatgaaatggcgatgaactctggtatcaggc

SEQ ID NO: 1465 - DNA, 642 bp, Zea mays
  Clone ID: TF_LIB5027-040-B1-XP1-A5
ttgcaaaacagaggtcttcaatctcccgagataccaaagctctagccttccatcctcactcgctcgatggcccgcaccaagcagacgtctaggaagtccaccggcggcaaggccccgaggaagcagctggcgactaaagcggcccgcaagtctgcccctgcgaccggcggagtgaagaagccccaccgcttccgccccggcaccgtcgcgctccgggagatccgcaagtaccagaagagcacggagctgctgatccgcaagctgccgttccagcgcctggtgcgggagatcgcgcaggacttcaagaccgacctacgcttccagagctccgctgtctccgcgctgcaggaggcggctgaggcctaccttgtcgggctctttgaggacaccaacctctgcgccatccacgccaagcgcgtcaccatcatgcccaaggacatccagcttgcccgccgcatccgtggggagagggcctaagcatcatatattctgtcatcagtgcccgatcagaagatgtagagatgtgctgggttctgtagtttgggttactgtcgaatcatcgagtagttggctgttcactgctggaacttagtatcatgatgcatatgaaacggccatgaaacattgtatcagctctcgaac

SEQ ID NO: 1466 - DNA, 658 bp, Zea mays
  unsure (1)..(658): unsure at all n locations
  Clone ID: TF_LIB5116-032-A1-PF1-F7
ctccactctcgaaccttccaagctcctcccggcctcccctcgcttccaccgagtccctccgatccgatggcccgcaccaagcagactgcgcgcaagtccaccggcgggaaggcgccgcggaagcagctggcgacgaaggcggcgcgcaagtcggcgccggccaccggcggcgtgaagaagccgcacaggttccgccccggaaccgtcgccctgcgcgagatccgcaagtaccagaagagcacggagctgctgatccgaaagctgccgttccagcggctggtgcgggagatcgcgcaggacttcaagacggacctccggttccagtcgtccgccgtgtcggcgctgcaggaagccgcggaggcgtacctcgtcgggctgttcgaggacaccaacctctgcgccatccacgccaagagggtcaccatcatgcccaaggacatccagctcgcgcgccgtatcaggggcgagagggcctgatgaacgaattctctctgtctctgttctctgccgccgttgatgttcttggtgtcgtcgtcgtgtgttaggatttagaaaatgttgngttgtcgcctgctgcttaccattactagtatcttgtagcgatggttcgcctctggaatgtcgttcaatggaatgttaccgctgcttcattgctttg

SEQ ID NO: 1467 - DNA, 1528 bp, Zea mays
  Clone ID: TF_ZmC653_106
aaaaaaaaaaaaaaaaaaaaaaaaaaaaaaaaaaaaaaaaaaaaaaaaaaccgcaatcttcaatctccccagcaatccctagcagaagccttccatcctcactcgctcgatggcccgcacgaagcagacggcgaggaagtccaccggcggcaaggcgccgaggaagcagctggcgactaaggcggcccgcaagtctgcccctgcgaccggcggagtgaagaagccccaccgcttccgccccggcaccgtcgcgctccgggagatccgcaagtaccagaagagcacggagctgctgatccgcaagctgccgttccagcgcctggtgcgggagatcgcgcaggacttcaagaccgacctacgcttccagagctctgctgtctccgcgctgcaggaggcggctgaggcctaccttgtcgggctcttcgaggacaccaacctctgcgccatccacgccaagcgcgtcaccatcatgcccaaggacatccagcttgcccgccgcatccgcggggagagggcctaagcgtcatattttctgtcatcagtgcccgatcagaagatgtagagatatgctgggttctgtagtttgggttactgtcgaatcatcgagtgttggctgttcactgctgtaacttaattatcatgatgcatatgaaatggcaatgaactctgttatcagttctcgaaaaaaaaaaaaaaaaaaaaaaaaaaaaaaaaaaaaaaaaaaaaaatcacacagctttgcaaggccgccccatctctcaaaccatccgaacccccctcgccgctcactcccaagctaatccccgccggcagcgatggcccgcacgaagcagacggcgcgcaagtcgacgggcggcaaggcgccgcggaagcagctggcgaccaaggcggcgcgcaagtcggcgccggccacggggggcgtgaagaagccgcaccgcttccgcccgggcacccgtggcgctgcgggagatccgcaagtaccagaagagcacggagctgctgatccggaagctgccgttccagcggctggtgcgggagatcgcgcaggacttcaagacggacctccggttccagtcctccgccgtggccgcgctgcaggaggccgccgaggcctacctcgtgggcctcttcgaggacaccaacctctgcgccatccacgccaagcgcgtcaccatcatgcccaaagacatccagctcgcgcgccgcatccggggcgagagggcctgagcacccccggtctctactgcgattccttcgcttcctgatttctgtagcgggaagaactactgtagtaggcgaggaactactgcgtgttatattggggttgtgggtaggaaactaggaatgttctgttggtttcgatgcagtgccccccgtgatactgacatccgtgctgcttgttctgttcttcctactacgaatgcgattgttactattattttagcgtttgtttatgcggttatgcttctggaactgaacagtgctacttgttaccgctttctgccccaaaaaaaaaaaaaaaaaaaaa

SEQ ID NO: 1468 - DNA, 634 bp, Zea mays
  Clone ID: TF_ZmC653_48
aacagcaatcttcaatctcccgagcaaagcaaagctctagccttccatcctcactcgctcgatggcccgcaccaagcagacggctaggaagtccaccggcggcaaggccccgaggaagcagctggcgactaaagcggcccgcaagtctgcccctgcgaccggcggagtgaagaagccccaccgcttccgccccggcaccgtcgcgctccgggagatccgcaagtaccagaagagcacggagctgctgatccgcaagctgccgttccagcgcctggtgcgggagatcgcgcaggacttcaagaccgacctacgcttccagagctccgctgtctccgcgctgcaggaggcggctgaggcctaccttgtcgggctcttcgaggacaccaacctctgcgccatccacgccaagcgcgtcaccatcatgcccaaggacatccagcttgcccgccgcatccgtggggagagggcctaagcatcatatattctgtcatcagtgcccgatcagaagatgtagagatgtgctgggttctgtagtttgggttactgtcgaatcatcgagtagttggttgttcactgctgtaacttagtatcatgatgcatatgaaatggcaatgaactatgttatcagttctcg

SEQ ID NO: 1469 - DNA, 678 bp, Zea mays
  Clone ID: TF_ZmC653_70
ccgggaaaaaaaaaaaaaaaaacaccgcaatcttcaatctccccagcaatccctagcagaagccttccatcctcactcgctcgatggcccgcacgaagcagacggcgaggaagtccaccggcggcaaggcgccgaggaagcagctggcgactaaggcggcccgcaagtctgcccctgcgaccggcggagttaagaagccccaccgcttccgccccggcaccgtcgcgctccgggagatccgcaagtaccagaagagcacggagctgctgatccgcaagctgccgttccagcgcctggtgcgggagatcgcgcaggacttcaagaccgacctacgcttccagagctccgctgtctccgcgctgcaggaggcggctgaggcctaccttgtcgggctcttcgaggacaccaacctctgcgccatccacgccaagcgcgtcaccatcatgcccaaggacatccagcttgcccgccgcatccgcggggagagggcctaagcgtcatattctctgtcatcagtgcccgatcagaagatgtagagatgtgctgggttctgtagtttgggttactgtcgaatcatcgagtagttggttgttcactgctgtaacttaattatcatgatgcatatgaaatggcaatgagctctgttatcacgaaaaaaaaaaaaaaaaaaggccccta

SEQ ID NO: 1470 - DNA, 659 bp, Zea mays
  Clone ID: TF_ZmC653_79
ccgggacaccgcaatcttcaatctccccagcaatccctagcagaagccttccatcctcactcgctcgatggcccgcacgaagcagacggcgaggaagtccaccggcggcaaggcgccgaggaagcagctggcgactaaggcggcccgcaagtctgcccctgcgaccggcggagtgaagaagccccaccgcttccgccccggcaccgtcgcgctccgggagatccgcaagtaccagaagagcacggagctgctgatccgcaagctgccgttccagcgcctggtgcgggagatcgcgcaggacttcaagaccgacctacgcttccagagctccgctgtctccgcgctgcaggaggcggctgaggcctaccttgtcgggctcttcgaggacaccaacctctgcgccatccacgccaagcgcgtcaccatcatgcccaaggacatccagcttgcccgccgcatccgtggggagagggcctaagcatcatatattctgtcatcagtgcccgatcagaagatgtagagatgtgctgggttctgtagtttgggttactgtcgaatcatcgagtagttggttgttcactgctgtaacttattatcatgatgcatatgaaatggcaatgaactatgttatcactaaaaaaaaaaaaaaaaaagcggcc

SEQ ID NO: 1471 - DNA, 752 bp, Zea mays
  Clone ID: TF_ZmC653_85
ctcgaggccggccggggtttggatggatggatgaagaaggacaccgcaatcttcaatctccccagcaatccctagcagaagccttccatcctcactcgctcgatggcccgcacgaagcagacggcgaggaagtccaccggcggcaaggcgccgaggaagcagttggcgactaaggcggcccgcaagtctgcccctgcgaccggcggagttaagaagccccaccgcttccgccccggtaccgtcgcgctccgggagatccgcaagtaccagaagagcacagagctgctgatccgcaagctgccgttccagcgcctggtgcgggagatcgcgcaggacttcaagaccgacctacgcttccagagctccgctgtctccgcgctgcaggaggcggctgaggcctaccttgtcggtctcttcgaggacaccaacctctgcgccatccacgccaagcgcgtcaccatcatgcccaaggacatccagcttgcccgccgcatccgtggggagagggcctaagcatcgtatattctgtcatcagtgcccgatcagaagatgtagagatgtgctgggttctgtagtttgggttactgtcgaatcatcgagtagttggttgttcactgctgtaacttattatcatgatgcatatgaaagtggcaatgaactatgttatcaggaaaaaaaaaaaaaaaaaaaaaaaaaaaaataaaaaaaaaaaaaaaaaaaaaaaaaagaaaaaaaaaaaaaaaaaagcggcc

SEQ ID NO: 1472 - DNA, 879 bp, Zea mays
  Clone ID: TF_ZmC653_92
cctcgaggccggccgggaggcctccatattgacaaacagaaatcactgccaaatcccccagaaagtcaactcctccccaattccacgctgccaccaactcgccgtcctccgcgccaagcaccaaagctccgatggcccgcacgaagcagacggcgcgcaagtcaacgggcggcaaggcgccccgcaagcagctggcgaccaaggcggcgcgcaagtctgcgccggccaccggcggcgtgaagaagccccaccgcttccgccccggcaccgtcgcgctccgggagattcgtaagtaccagaagagcacggagctgctcatccgcaagttgcccttccagcgcctcgtccgtgagatcgcgcaggacttcaagaccgatctccgcttccagtcctccgccgtctctgcgctgcaggaggccgccgaggcctacctcgtggggctctttgaggacactaacctgtgcgccatccacgccaagcgcgtcaccatcatgcccaaggacatccagctcgcgcgccgcatcaggggagagagggcctgagcgaggcgagctcctctcaccgcaggcggcgtcgttgttgcttcgggcctgcttgtaggacttgtgcttctcttggtttcctttctggtggcagtggcatcttcgtaccattgtgcttgttcttagaatcttagggatagagagttgttcagttgctgggtaacctgattgtttatcttgcattcctgcctctgtaatggttgtctgctgtcttaatggaaatgatatttgcttttttaattcccagtttcatcaatatgttcaatctgtggttaatttttctgtggacaacattgtacccagtcagtttcatctataatataattccttatgtttt

SEQ ID NO: 1473 - DNA, 670 bp, Zea mays
  Clone ID: TF_ZmC825079_1
attgggtaccccctcgagggcccggcccgggacagcaatcttcaatctcccgagcaaagcaaagctctagccttccatcctcactcgctcgatggcccgcaccaagcagacggctaggaagtccaccggcggcaaggccccgaggaagcagctggcgactaaagcggcccgcaagtctgcccctgcgaccggcggagtgaagaagccccaccgcttccgccccggcaccgtcgcgctccgggagatccgcaagtaccagaagagcacggagctgctgatccgcaagctgccgttccagcgcctggtgcgggagatcgcgcaggacttcaagaccgacctacgcttccagagctccgctgtctccgcgctgcaggaggcggctgaggcctaccttgtcgggctcttcgaggacaccaacctctgcgccatccacgccaagcgcgtcaccatcatgcccaaggacatccagcttgcccgccgcatccgtggggagagggcctaagcatcatatattctgtcatcagtgcccgatcagaagatgtagagatgtgctgggttctgtagtttgggttactgtcgaatcatcgagtagttggttgttcactgctgtaacttagtatcatgatgcatatgaaatggcaatgaactatgttatcagttctccgattcc

SEQ ID NO: 1474 - DNA, 680 bp, Zea mays
  Clone ID: TF_LIB5116-061-A1-PF1-F4
aatagagtccagccacgaacacccgccgcgaaatcccaaatcaccaaccaaatcccctcccctcctctcccgcgtcccgacgagcaccagccatcagacatggacgcctcagccaccggagcgggagcgaaggcgaagaagggcgcggccgggcgcaaggccggcggccccaggaagaagtcggtgacgaggtccgtcaaggccgggctccagttccccgtcggccgcatcgggcgctacctcaagaatggccgctacgcgaagcgcgtcggcacgggcgcccccgtctacctcgccgccgtcctggagtacctcgccgccgagctgctggagctcgccgggaacgccgccaaggacaacaagaagtcccgcatcgtgcccaggcacctgctgctcgccgtccggaacgaccaggagctcgggaggctgctggctggcgtgaccatcgcgcacggcggcgtgctgcccaacatcaacccggtgctgctgcccaagaggacggcggagaaggagcccaaggagggcaagtcgcccaagaaggtcgccaagtcccccaagaaggccgacaagaaggcgtagagagagccgcgcgtcgattagcttaagctttgctgtaacagtgatcgctgttttactaattgtgtcgatgtagatctgtgctgtcatgaaaaattaattca

SEQ ID NO: 1475 - DNA, 682 bp, Zea mays
  Clone ID: TF_LIB4730-094-Q1-K1-D12
aaacgtttacagtctccctagctatctctagcagcagatgctcgttcgaagccaagcgctaggcttcctactgtgccgatggaccgcacgatgcacatggagaggaagtccactggcgggaaggcgccgatgaagcagctggtcacaaaggcggcgcgcaagtctgcctcggcgacctgcgtagtgaacaagccccaccgtttccgccccggcaccgtcgcgctccggtagatccgcaagaaccagaagagcacggagctgctgatccacaagctgccgttccagtgcctggagcgtgtagatcgcccagtacttcaagaccgaccttctcttccagagctccgccgtcgccgcgctgcaggaggcgtccgaggactacctcgtcgggctctgtcgaggacaccaacctctgctccattcacaccaagcgcatcaccatcatgcccaaggacattcagctcgtccgccgcatacgtggggagagggcctatgctgtcctctcggtgcatgtggaatgagaactctcagtgtctggcatcactgtctggctacaagatgtatacatgtggcggaatatggaggttgtcatattgatcgaatcattatgaattctgaatcttcactgctgtaattctactatgactatgcaagtggcaatgaatgtctcggttatcactccccg

SEQ ID NO: 1476 - DNA, 362 bp, Zea mays
  unsure (1)..(362): unsure at all n locations
  Clone ID: TF_LIB3356-007-P1-K1-D11
ttttaaacccatttcctcccaatccatcccgtctccaaacccgaactccaagtcgcccggcatcgatggcgcccaaggccganaagaagcccgtggcgaaaaagccggcggaggaggagcccgctgtcgagaaagcgccggccgggaagaagcccaaggcggagaagcgtgtcccagcaggcaagtccgtcgcaagggaggcggcgagggaaagaagggccgggagaagggcaagaatagcgttgagacctacaagatctacattttgaaggtgctgaagcaggtgcacccggaccatggcatttcctttaagccatggtcataatgaactcccttattaacgacattttttaaaaagctcg

SEQ ID NO: 1477 - DNA, 400 bp, Zea mays
  unsure (1)..(400): unsure at all n locations
  Clone ID: TF_LIB5025-057-A1-XP1-H11
gccggccgttccgaaacactacgatctccatctatctatttgcacatcgtcgtggaacgcgacggctagccttcctacctgttcctgtgggccgcacgaatcagagggcgcaggaagtccactagggggtgaggcagccaagagaagcgaactgtgccaccacaggcnggcgcggcaaactcatgccccaggggacgcgcgcaatcgaagaagccccaccgtttccgccccggtaccgaacttctgcgggagatccggaagtacaagaacagctcacaactggtgatacgcaagctgccgttacagaggctggcgcgggagatcgcacagaacttcaagagcgaccttagattccagagctcctccggctcatgagttgaggaggtctgcgagggcaacc

SEQ ID NO: 1478 - DNA, 540 bp, Zea mays
  Clone ID: TF_LIB4185-038-R1-K1-A7
ggaaaacggaaaacagagttaatggccttttaataggcataaggaaaattaagttacggcggggaacagccaacattcgaggattcgacggaaacccaaattacaaaacccagcatatttttacatttttggagcgggccctgaggacaaaaaatatgacgtttaggccctttccccggggaggcggggggcaagctggatgtccttggccatgaggggaacccccttggcggggagggcccaaaggttggggtcctcaaaaagcccgacaggggaggcctaagccgcctcttgcaggggggaaacagaaaagttttggaagcgtaggtcggttttgaagtcctgggcaatctcccgaaccaggcgctgaaacggaagtttggggataaaaagctccgggctttttgggaactgggggatctcccggagcgcaacggtcccggggcgaaagcgggggggttttttcactccgccggtcgaaggggcaaatttggggcccgctttagtcgccagttgtttcctcggcgccttgccgccggg

SEQ ID NO: 1479 - DNA, 613 bp, Zea mays
  Clone ID: TF_ZmC653_24
aacccgcatccacatcactcatccacagctcgcagccgtattcctgtctcgtatcctctctcgccgctccgatggcccgcacgaagcaaacagcaaggaagtcgaccggcggcaaggccccccggaagcagctggccactaaggctgcgcgcaagtcggccccggccaccggcggcgtgaagaagccccaccgcttccgccccggcaccgtcgcgctccgcgagatccgcaagtaccagaagagcactgagctgctcatccgcaagctccccttccagcgcctcgtccgcgagatcgcgcaggacttcaagactgatctgaggttccagtcctccgccgtcgcggcgctgcaggaggccgccaagcgcgtcactatcatgcccaaggacatccagctcgcgcggcgcatcaggggcgagagggcttgagcgcccgtcgtgctgctcgttgttgtagtgttactagaagtagatggtggcattcgtttcgtggcttccttatcctgtaggagtaatgttctagatgtcttggcttcagtgcaatggactgtgattgctcatttctgaaatttatcaaaaaaaaaaagaaagggcggccgccgacaagtgagctc

SEQ ID NO: 1480 - DNA, 522 bp, Zea mays
  Clone ID: TF_LIB5026-023-B1-XP1-G7
gccggccgggtcgcagcaccgcatcgtcgccctcaaattctgtctccgtccaggcaaggaagaaatcgagcagccaaggagaggagaagatggctcgtacgaagcagaccgcccgcaagtccaccggaggcaaggccccgcgcaagcagctcgccaccaaggcggcgaggaagtctgcgccgacgaccggcggcgtgaagaagccccacaggtacaggcccgggacggtggctctgcgcgagatccgcaagtaccagaagagcacggagctgctgatccggaagttgcccttccagcgcctggtccgtgagatcgctcaggacttcaagacggatctgcggtttttttttctcgccgccctgcccctccaggaagccgccgaggcctacctcgtcggcctgttcgaggacaccaacctctgcgccatccacgtcaagtgcgtcaccatcatgcccaaagacatccagttcgcccgccgtatccgcgctgagtgcgcgtaagtgtatctcgcgcccggcccca

SEQ ID NO: 1481 - DNA, 567 bp, Zea mays
  Clone ID: TF_9794541
gcccgcacgaagcaaacagcaaggaagcgaccggcggcaaggccccccggaagcagctggccactaaggctgcgcgcaagtcggccccggccaccggcggcgtgaagaagccccaccgcttccgccccggcaccgtcgcgctccgcgagatccgcaagtaccagaagagcactgagctgctcatccgcaagctccccttccagcgcctcgtccgcgagatcgcgcaggacttcaagactgatctgaggttccagtcctccgccgtcgccgcgctgcaggaggcgtccgaggcctacctcgtcgggctcttcgaggacaccaacctctgcgccattcacgccaagcgcgtcaccatcatgcccaaggacatccagctcgcccgccgtatccgtggggagagggcctaggcgtcgtcccggtggaggtggaagtagtagtcgccgtttctgtcatcactgtctggctagaaggtgtagagatgtgccgggttctgtagtttgggttatcggtcaaatcatgatgtagttgggtcttccctgctgtaatttaactatgactatgcaatga

SEQ ID NO: 1482 - DNA, 561 bp, Zea mays
  Clone ID: TF_LIB4730-042-R1-K1-G12
ggtaccctcccggtccgtccgggctatatagcatctcactccaacaacacaacgatcacagttctccctagcaatctctagcagcagatcctcgttcgaagccaagcgctagccttcctactgtcccgatggcccgcacgaagcagacggcgaggaagtccgctggcggcaaggcgccaaggaagcagctggccacgaaggcggcgcgcaagtctgccccggcgaccggcggagtgaagaagccccaccgtttccgccccggcaccgtcgcgctccgggagatccgcaagtaccagaagagcacggagctgctgatccgcaagctgccgttccagcgcctggtgcgtgagatcgcccaggacttcaagaccgaccttcgcttccagagctccgccgtcgccgcgctgcaggaggcgtccgaggcctacctcgtcgggctcttcgaggacaccaacctctgcgccattcacgccaagcgcgtgaccatcatgcccaaggacattcagctcgcccgccgtatccgtggggagaggtccctagcgtcttcccggtggaggtgga

SEQ ID NO: 1483 - DNA, 566 bp, Zea mays
  unsure (1)..(566): unsure at all n locations
  Clone ID: TF_LIB4975-022-R1-K1-H9
atcgagcgatctgcaatctcccatagcaatctactatcacgacactcctcatgagaagcacagacgctaggcccccttcgtatcgtgtgcccgatggcccggacgaagcagacggcgaggaactccactgacgacaaggcgccaaggaagcagctggccaccaaggcggcgcgcaagtctgccccggcgaccggcggagtgaagaagccccaccgtttccgccccggcaccgtcgcgctccgggagatccgcaagtaccagaagagcacggagctgctgatccgcaagctgccgttccagcgcctggtgcgtgagatcgcccaggacttcaagaccgacctccgcttccagagctccgccgtcgccgcgctgcaggaggcgtccgaggcctacctcgtcgggctcttcgaggacaccaacctctgcgccattcacgccaagcgcgtcaccatcatgcccaaggacatccagctcgcccgccgtatccgtggggagagggcctaggcgtcgtcccggtggaggtggaagtannantgnncgnttctgtcatnactgtttgggtagaa

SEQ ID NO: 1484 - DNA, 807 bp, Zea mays
  Clone ID: TF_ZmC653_110
aaaaaattcaaaaaaacagaacgatctcaatctccctagcaatctctagcagcagatcctcgtgcgaagcaaagcgctagcccccttcgtactgtcccgatggcccgcacgaagcagacggcgaggaagtccactggcggcaaggcgccaaggaagcagctggccaccaaggcggcgcgcaagtctgccccggcgaccggcggagtgaagaagccccaccgtttccgccccggcaccgtcgcgctccgggagatccgcaagtaccagaagagcacggagctgctgatccgcaagctgccgttccagcgcctggtgcgtgagatcgcccaggacttcaagaccgacctccgcttccagagctccgccgtcgccgcgctgcaggaggcgtccgaggcctacctcgtcgggctcttcgaggacaccaacctctgcgccattcacgccaagcgcgtcaccatcatgcccaaggacatccagctcgcccgccgtatccgtggggagagggcctaggcgtcgtcccggtggaggtggaagtagtagtcgccgtttctgtcatcactgtctggctagaaggtgtagagatgtgccgggttctgtagtttgggttatcggtcaaatcatgatgtagttgggtcttcccctgctgtaatttaactatgactatgcaatgacaatgaagttctcggttatcagttcccgaatatatgcgtctacaatctagatcaatctgaatatatacatgtatcgaaaccttatattctatttaatagaaaaaaaaaaaaaaaaaagcggccctcgagctccagc

SEQ ID NO: 1485 - DNA, 1784 bp, Zea mays
  Clone ID: TF_ZmC653_111
cctcgaggctcggccgggaaaaaaaaaaaaaaaaaaaaaactaaatgatgtgaaactttgaaagggaaagcgtccaatctgttcgattgtgatgtaccatgacagttctttcatattgaataggaagatctgatagaaacagaacgatctcaatctccctagcaatctctagcagcagatcctcgtgcgaagcaaagcgctagcccccttcgtactgtcccgatggcccgcacgaagcagacggcgaggaagtccactggcggcaaggcgccaaggaagcagctggccaccaaggcggcgcgcaagtctgccccggcgaccggcggagtgaagaagccccaccgtttccgccccggcaccgtcgcgctccgggagatccgcaagtaccagaagagcacggagctgctgatccgcaagctgccgttccagcgcctggtgcgtgagatcgcccaggacttcaagaccgacctccgcttccagagctccgccgtcgccgcgctgcaggaggcgtccgaggcctacctcgtcgggctcttcgaggacaccaacctctgcgccattcacgccaagcgcgtcaccatcatgcccaaggacatccagctcgcccgccgtatccgtggggagagggcctaggcgtcgtcccggtggaggtggaagtagtagtggccgtttctgtcatcactgtctggctagaaggtgtagagatgtgccgggttctgtagtttgggttatcggtcaaatcatgatgtagttgggtctaccctgctgtaatttaactatgactatgcaatggcaatgaagttctcggttatcaaaaaaaaaaaaaaaacgacacgactctcggcaacggatatctcggctctcgcatcgatgaagaacgtagcaaaatgcgatacctggtgtgaattgcagaatcccgcgaaccatcgagtttttgaacgcaagttgcgcccgaagccttctggcggagggcacgtctgcctgggcgtcacgccaaaaaaaagaaaaaaaaaaaaaataaaaaaaaaaaacctagccaccgcatcgtcgccctcaaattcgttccgtccaggcaaggaagaaatcgagcagccaaggagaggagaagatggctcgtacgaagcagaccgcccgcaagtccacgggaggcaaggcccccgcgcaagcagctcgccaccaaggcggcgaggaagtcggcgccgacgaccggcggcgtgaagaagccccacaggtacaggcccggcaccgtggcgctgcgcgagatccgcaagtaccagaagagcacggagctgctgatccggaagttgcccttccagcgcctggtccgtgagatcgctcaggacttcaagacggatctgcggttccagagccacgccgtcctggccctccaggaggccgccgaggcctacctcgtcggtctgttcgaggacaccaacctctgcgccatccacgccaagcgcgtcaccatcatgcccaaagacatccagctcgcccgccgcatccgcggcgagcgcgcgtaggcgtatctcgcgcccggccccagtggcggcggagggatggaggagtgcaatttgtaactttatgctgtttgttcgcttttagacggcgtggcgaagtagtgtaaaaacggctttacaagtctattttgtgtggtagttcgtgtaccgcttcgtcccgaagcgatcttggtaaaagactgatgattcgtgttgccaaacgacacaattcgtattttttttgtgtgccgtgtagaacacggtttgttgttattggaaatgttcacc

SEQ ID NO: 1486 - DNA, 668 bp, Zea mays
  Clone ID: TF_ZmC653_39
ctccctagcaatctctagcagcagatcctcgtgcgacgcaaagcgctagccttcctactgtcccgatggcccgcacgaagcagacggcgaggaagtccactggcggcaaggcgccaaggaagcagctggccacgaaggcggcgcgcaagtctgccccggcgaccggcggagtgaagaagccccaccgtttccgccccggcaccgtcgcgctccgggagatccgcaagtaccagaagagcacggagctgctgatccgcaagctgccgttccagcgcctggtgcgtgagatcgcccaggacttcaagaccgacctccgcttccagagctccgccgtcgccgcgctgcaggaggcgtccgaggcctacctcgtcgggctctttgaggacaccaacctctgcgccattcacgccaagcgcgtcaccatcatgcccaaggacatccagctcgcccgccgcatccgtggggagagggcctaggcgtcgtcgcggtggaggtggaagtagtagtcgccgtttctgtcatcactgtctggcgggctagaaggtgtagagatgtgccgggttctgtagtttgggatatcggtcaaatcatgatgtagttgggtcttccctgctgtaatttaactatgactatgcaatggcaatgaagttctcggttatcagttcccg

SEQ ID NO: 1487 - DNA, 732 bp, Zea mays
  Clone ID: TF_ZmC653_58
ttgggaccctcgaggccggccgggacagaacgatctcaatctccctagcaatctctagcagcagatcctcgtgcgaagcaaagcgctagcccccttcgtactgtcccgatggcccgcacgaagcagacggcgaggaagtccactggcggcaaggcgccaaggaagcagctggccaccaaggcggcgcgcaagtctgccccggcgaccggcggagtgaagaagccccaccgtttccgccccggcaccgtcgcgctccgggagatccgcaagtaccagaagagcacggagctgctgatccgcaagctgccgttccagcgcctggtgcgtgagatcgcccaggacttcaagaccgacctccgcttccagagctccgccgtcgccgcgctgcaggaggcgtccgaggcctacctcgtcgggctcttcgaggacaccaacctctgcgccattcacgccaagcgcgtcaccatcatgcccaaggacatccagctcgcccgccgtatccgtggggagagggcctaggcgtcgtcccggtggaggtggaagtagtagtcgccgtttctgtcatcactgtctggctagaaggtgtagagatgtgccgggttctgtagtttgggttatcggtcaaatcatgaatgtagttgggtcttccctgctgtaatttaactatgactatgcaatggcaatgaagttctcggttatcagttcccgaaaaaaaaaaaaaaaaaagcggcc

SEQ ID NO: 1488 - DNA, 674 bp, Zea mays
  Clone ID: TF_ZmC653_63
acacaacgatctcagtctccctagcaatctctagcagcagatcctcgtgcgaagcaaagcgctagccttcctactgtcccgatggcccgcacgaagcagacggcgaggaagtccactggcggcaaggcgccaaggaagcagctggccacgaaggcggcgcgcaagtctgccccggcgaccggcggagtgaagaagccccaccgtttccgccccggcaccgtcgcgctccgggagatccgcaagtaccagaagagcacggagctgctgatccgtaagctgccgttccagcgcctggtgcgtgagatcgcccaggacttcaagaccgaccttcgcttccagagctccgccgtcgccgcgctgcaggaggcgtccgaggcctacctcgtcgggctcttcgaggacaccaacctgtgcgccattcacgccaagcgcgtcaccatcatgcccaaggacatccagctcgcccgccgcatccgtggggagagggcctaggcgtcgtcgcggtggtggtggaagttgtagtcgccgtttctgtcatcactgtctggctagaaggtgtagagatggttatgtagtttgggttatctgtcgaatcatgatgtagttgggtcttcactgctgtaatttaactatgactatgcaatggcaatggagttccctgttatcagttccct

SEQ ID NO: 1489 - DNA, 904 bp, Zea mays
  unsure (1)..(904): unsure at all n locations
  Clone ID: TF_ZmC653_67
gcaatctctagcagcagatcctcgtgcaaagcaaagcgctagccttcctactgtcccgatggcccgcacgaagcagacggcgaggaagtccactggcggcaaggcgcctaggaagcagctggccacgaaggcggctcgcaagtctgccccggctaccggcggagtgaagaagccccaccgtttccgccccggcaccgtcgcgctccgggagatccgcaagtaccagaagagcacggagctgctgatccgcaagctgccgttccagcgcctggtgcgtgagatcgcccaggatttcaagaccgaccttcgcttccagagctccgccgtcgccgcgctgcaggaggcgtccgaggcctaccttgtcgggctcttcgaggacaccaacctctgcgccattcacgccaagcgcgtcaccatcatgcccaaggacatccagctcgcccgccgcatccgtggggagagggcctaggcgtcgtcgcggtggaggtggaagtagtagtcgcagtttctgtcatcactgtctggctagaagttgtagagatgtgccggtttatgtagtttgggttattggtcgaatcattatgtagttgggtcttcactgctgtaatttaactatgactatgcaatggcaatgaagttctcggttatcacttcccgaataaaaaaaaaaaaaaaaaaaaaaaaaaaaaaaaaaccgtggggagagggcctaggcgtcgncgcgggggaggtggaagtagaagncgcagtttctgtcatcactgtctggctagaagttgtaaagatgtgccggtttatgtagttggggttattggacaaatcattatgtagttgggtcttcactgctgnaattaaactatgactatgcaatggcaatgaagttctcggttatcacttcccgaat

SEQ ID NO: 1490 - DNA, 820 bp, Zea mays
  Clone ID: TF_ZmC653_72
cattgggtacctcgaggccggccgggacacaacgatctcaatctccctagcaatctctagcagcagatcctcgtgcgaagcaaagcgctagccccttcgtactgtcccgatggcccgcacgaagcagacggcgaggaagtccactggcggcaaggcgccaaggaagcagctggccaccaaggcggcgcgcaagtctgccccggcgaccggcggagtgaagaagccccaccgtttccgccccggcaccgtcgcgctccgggagatccgcaagtaccagaagagcacggagctgctgatccgcaagctgccgttccagcgcctggtgcgtgagatcgcccaggacttcaagaccgacctccgcttccagagctccgccgtcgccgcgctgcaggaggcgtccgaggcctacctcgtcgggctcttcgaggacaccaacctctgcgccattcacgccaagcgcgtcaccatcatgcccaaggacatccagctcgcccgccgtatccgtggggagagggcctaggcgtcgtcccggtggaggtggaagtagtagtcgccgtttctgtcatcactgtctggctagaaggtgtagagatgtgccgggttctgtagtttgggttatcggtcaaatcatgatgtagttgggtcttccctgctgtaatttaactatgactatgcaatggcaatgaagttctcggttatcagttcccgaatatatgcgtctacaatctagatcaatctgaatatatacatgtatcgaaaccttatattctatttaatagaacattcagctcatttacaaaaaaaaaaaaaaaaagcggcc

SEQ ID NO: 1491 - DNA, 729 bp, Zea mays
  Clone ID: TF_ZmC653_73
cattgggacctcgaggcggcgggacagaacgatctcaatctccctagcaatctctagcagcagatcctcgtgcgaagcaaagcgctagcccccttcgtactgtcccgatggcccgcacgaagcagacggcgaggaagtccactggcggcaaggcgccaaggaagcagctggccaccaaggcggcgcgcaagtctgccccggcgaccggcggagtgaagaagccccaccgtttccgccccggcaccgtcgcgctccgggagatccgcaagtaccagaagagcacggagctgctgatccgcaagctgccgttccagcgcctggtgcgtgagatcgcccaggacttcaagaccgaccttcgcttccagagctccgccgtcgccgcgctgcaggaggcgtccgaggcctacctcgtcgggctcttcgaggacaccaacctctgcgccattcacgccaagcgcgtcaccatcatgcccaaggacatccagctcgcccgccgtatccgtggggagagggcctaggcgtcgtggcggtggaggtcgaagtagtagtcgcagtttctgtcatcaccgtctggctagaaggtgtagagatgtgccgggttctggagtttgggttatcggtcgaatcatgatgtagttggttcttcacagctgtaatttaactatgacgatgccattgcaatgaagttctcagctatcagttccggaaaaaaaaaaaaaaaaagcggcc

SEQ ID NO: 1492 - DNA, 804 bp, Zea mays
  Clone ID: TF_ZmC653_89
tgcatgatgtctttctcgttaacctgaggcatttattgcatggaagacacctaatccattcataactcaagactgagaacacaacgatcacagtctccctagcaatctctagcagcagatcctcgttcgaagccaagcgctagccttcctactgtcccgatggcccgcacgaagcagacggcgaggaagtccactggcggcaaggcgccaaggaagcagctggccacgaaggcggcgcgcaagtctgccccggcgaccggcggagtgaagaagccccaccgtttccgccccggcaccgtcgcgctccgggagatccgcaagtaccagaagagcacggagctgctgatccgcaagctgccgttccagcgcctggtgcgtgagatcgcccaggacttcaagaccgaccttcgcttccagagctccgccgtcgccgcgctgcaggaggcgtccgaggcctacctcgtcgggctcttcgaggacaccaacctctgcgccattcacgccaagcgcgtcaccatcatgcccaaggacatccagctcgcccgccgcatccgtggggagagggcctaggcgtcgtcgcggtggaggtggaagtagtagtcgcagtttctgtcatcactgtctggctagaagttgtagagatgtgccggtttatgtagtttgggttattggtcgaatcattatgtagttgggtcttcactgctgtaatttaactatgactatgcaatggcaatgaagttctcggttatcacttcccggggaaaaaaaaaaaaaaaaaaccaaaaaaaaaaaaaaaagggccct

SEQ ID NO: 1493 - DNA, 709 bp, Zea mays
  Clone ID: TF_ZmC653_96
acacaacgatctcagtctccctagcaatctctagcagcagatcctcgtgcgaagcaaagcgctagccccttcgtactgtcccgatggcccgcacgaagcagacggcgaggaagtccactggcggcaaggcgccaaggaagcagctggccacgaaggcggcgcgcaagtctgccccggcgaccggcggagtgaagaagccccaccgtttccgccccggcaccgtcgcgctccgggagatccgcaagtatcagaagagcacggagctgctgatccgcaagctgccgttccagcgcctggttcgtgagatcgcccaggacttcaagaccgaccttcgcttccagagctccgccgtcgctgcgctgcaggaggcgtccgaggcctacctcgtcgggctcttcgaggacaccaacctctgcgccattcacgccaagcgcgtcaccattatgcccaaggacatccagctcgcccgccgcatccgtggggagagggcctaggcgtcgtcgcggtggaggtcgaagtagtggtcgcagtttctgtcatcaccgtctggctagaaggtgtagagatgtgccgggttctgtagtttgggttatcggtcgaatcatgatgtagttggttcttcacagctgtaatttaactatgacgatgccatggcaatgaagttctcagctatcagttcacaaaaaaaaaaaaaaaaaaaaggccccta

SEQ ID NO: 1494 - DNA, 332 bp, Zea mays
  Clone ID: TF_LIB3357-025-P1-K1-A5
agaacctctaaaatttcccccactcgccaggcgcagcagtacctgtagtcatggacgccagcggagcccgaagcaaggggaaaaagggtgcagtcgcgcgcaaggcactcggacgcagcaagaaatcaatgacgctgtccggtatggccgggctgcagttccacggaagacgcatcaggcgctacctgaagaaggggcggtactcgcagagagtgggcactgccagaccagtatacatctgctgcttcctgaactacctttccagcgacggtctcgagttatcacgcaacacttcaagagacaacatgaatacgcgagttatgccgcgccac

SEQ ID NO: 1495 - DNA, 395 bp, Zea mays
  Clone ID: TF_LIB3357-054-P1-K1-G3
ctcctagtattttccttgcaaccgattgcctatcccgctcccaaccaaagaccgatggcgcctaaggccgagtagaagcccgcgttgtagaatccggtggaggaggagcccgctgacgagaagacgaccgtctggaagaagcccaaggcggagaatcggatccccgttggcaagtccgcctgcaaggagggcggggagggcaagcgtggcaagatgattggcaagaagagcgtggtgacgtacaagatctacatcttcaaggtgctgaagcaggtgcacccgtacatcggcatctcctccaaggccatgtgcatcatgatctccttcatcaacgacatcttcgataagctggccggcgaggacgccaatctcgcgcgctacaacaagaagcccac

SEQ ID NO: 1496 - DNA, 380 bp, Zea mays
  Clone ID: TF_LIB4730-016-R1-K1-F7
gtagtctactctccgctactcaccagcaaattcccatgccggcccttagcccatctatttggtgccccattggatcgattcctgatggcgcccacggccgagaagaagcccgcggagaagaagccggcggacgagaaggccgagaagcagcctggggcggatatgcgcgcgccgagcaaggagggcggtgagaagatgggccagaagaaggcgatgaagagcgtcgagacgtacaagatctacatctgctaggtgctcagtcatgtgcacccggacattggcatttccaccagggccatgtccatcatgaactccttgatgaacgagattttcgagaagctcggcgccgcggccgtcaatctcgtccggtccagcaggaa

SEQ ID NO: 1497 - DNA, 669 bp, Zea mays
  unsure (1)..(669): unsure at all n locations
  Clone ID: TF_LIB4730-031-R1-K1-A2
ggtaccctccggagttccggccgggnatcaaaccaactatatatcacatattcaccgacggctncgctggctcatcttggcgctaagcaccgaatgtacgatggcccggacgaagcacacgaagcgcacgtcgaccgacgggacggcgcccaggaagcagctgaccaacaaggcgacgagcaagtcgggcacgtcaaccgcgggagcgaagaagcctaaccggtttcaccccttcaccgccgggctcggggagattcggaagtatccagaagagcacggagatgatcatgctgatgatgcccttgcagcgcttccagcgtgagatcgggcagaatttcaagaacgacctgagcttccagtgcttcgatgtctccgctctggacgaggtcgacgaggcctacctggtgtagctcttggaggacaccaacctctgcaacatccacgccaagcacgtcaacatcatgcccatggacatccaggtcatgcacctcatgaggcgcaagagggcttgaactgctggagctgccgttcacgttgttgaccctttcctctgtgtctttggttgtagaattcttgcttctgttggttttcttctgttcctatgatggtgatcatagtgttaggagtggcattagctaatctgcttgatcttgcagcgctgcctctgaa

SEQ ID NO: 1498 - DNA, 186 bp, Zea mays
  Clone ID: TF_LIB3597-024-Q1-K6-E2
gtctgttgctagctttcttcgtcatcgagagcccgagcccgccagtccgcgccggccccgaagaaggctccaagaagcggtgaccaaggcgcagaagaagacggcaataagcgcaagcgcagccgcaaggagagctactcggtgtacgtgtacaaggtgctgaagcaggtgcaccccgacacgggc

SEQ ID NO: 1499 - DNA, 368 bp, Zea mays
  Clone ID: TF_LIB3079-041-Q1-K1-C3
cccacgcgtccgggctcaccccatcatcagcacgcgaaaatctcccgatcccagctagtcttcgccgagaagatgttcgctcaccgtaagggcgtgaagggcctgggcaagggcggaccgaaccgccaccggaaggcgctccgctacaacatcgagcggatcacgaagccggcgatccagctgctggcgcgcaggggctgcgtcaaccgcatctccgggctcatctacgacgagacccgcggcgtactcaagatcttcctggagaacgtgatccgcgacgccggcacctacaccgagcacgcgcgccgcaagaccgtcacagacatggacgtcgactacgcgctcaagcgtccaggccgcaccctcta

SEQ ID NO: 1500 - DNA, 359 bp, Zea mays
  Clone ID: TF_LIB3279-004-P1-K1-H7
cgcgtccaaccttcggtcattttttattattcgatccaaggtaggcacccaagacctttactcactggggatcgatatggctcagggacaaaaagaaatttatggtgaatacgaccgtgaacgaggagctcgccgacaagattgcgctcgtcaataagaagccgaaggcggaaaagcgggtctatgctggtaagtacgctaccaacgaatgcggctagggcaagaggggctagattaagggcaagaagagcgtcgagacttattagatctacatcttcaaggtgctgaagcaagtataccctgacattggcatctccttcaaggtcatgttcatcatgaactccttcattaacgatatc

SEQ ID NO: 1501 - DNA, 549 bp, Zea mays
  unsure (1)..(549): unsure at all n locations
  Clone ID: TF_LIB3067-005-Q1-K1-G10.F2
cnncgtgntctggggcagtgtcgctcnnncccancgtggcgtgggccantgttcttctgtctttaccgctcnnnttggcgccggtcttttcntccctcncttccttttctctttttnnttgggccccgttttccggcggcgcgcggccttgttctttgnncctttnngaggggtggncttggtggcgggcttggtgccctcggggacggcgtgcttggcnngctcgccggggggggcgnggcgccccgcggtctggttctcgcggggggtggcggtgggcttcttgtttttgcgcgcccgcttggcgggctcggccgcgngcttctcgnngntgtcgttggtggnggggttcttgttgggcctggccttgggcgggntgccgntgtcggggtgcgcctgcttctgcnccttggnggtgttggtcttgttggtcttcccgggcttcttcgctttctttttcccctttttgccctcgccggcctcctttccggcgggcttgcccgccggggggggctttttgggcttgggcttttttcccgtcggggcctt

SEQ ID NO: 1502 - DNA, 646 bp, Zea mays
  Clone ID: TF_LIB4742-143-Q1-K1-C6
ctcgaggccggccgggatcagaatctcgagtctcctctgtcgcttccgcagcctttctagctctactccaccccctcgatatccaaatgcatcatttgcagtcacgcgatcatgcaagcgagcgcacccgtacccagagttcacgccatgaagggcgcggccgcgcgcaagggcggcggtgctaggaacaagttggtgacgacgtccgtccaggccggtctgcagtttcccgcatggccgcatcgggcggcacctgaacaaggcccgttacgcgcagagcgtcggcacggtagtccctgtctacctggcctccgtcctcgaatacctggccgccgaggtgctcggagctggctcgttattcgtgccaaggtacatcaagaagacccgcatcatcccgcgccacgtgctccttgtcatccgcaacgactaggagctcggcaatctgctgtccggcgttaccatcgctcacggcggcgtcctccccaacatcaacccggtgctcctgcccaagaagaccgcgtagaacgcggcgccccaggaggccaagtcgtccatgaatgccgccacgtcccctaagaaggcatatagggccgcctttaccgttgtgatgttgaatgctcgtgttcagtagatctttacgtctgta

SEQ ID NO: 1503 - DNA, 522 bp, Zea mays
  Clone ID: TF_LIB4976-005-R1-M1-E12
gaaacatataagctgggttggataagtaccattacgggccgatctgataacacaggtgctacagagagatagatagcatacatagaagccagtaggtaggagtacctaactacagtgagagacgtgagcaccggagagaatcctgcaagcggtggacgggcagcctaggccgaggtgaacttggtgacggacttggcgccctcggatacggctgtgcttggcgagctccccgggaaggacgaggcgcacggaggtctggatctcacgggaggtgatggcaggcttcttgctatagcgcgcgagcttgtgggactcactaacgagcttctctaagatatcgctaaggaatgagttcatgatggacatgggcttggaggaggtgccaatgcccgggtgcacctgcttcagcagcttgaagatgtaaaacttggatgcctccacgctcttcttgcccttcttcttgcgcctgttgccctcgtcggcttccttggtagcggactagccagtggggacccggttctc

SEQ ID NO: 1504 - DNA, 691 bp, Zea mays
  Clone ID: TF_ZmC653_29
aaccagatcgatctcaatctccctagcaatctctagcagcagatcctcgtgcgaagcaaagcgctagcccccttcgtactgtcccgatggcccgcacgaagcagacggcgaggaagtccactggcggcaaggcgccaaggaagcagctggccaccaaggcggcgcgcaagtctgccccggcgaccggcggagtgaagaagccccaccgcgctccgggagatccgcaagtaccagaagagcacggagctgctgatccgcaagctgccgttccagcgcctggtgcgtgagatcgcccaggacttcaagaccgacctccgcttccagagctccgccgtcgccgcgctgcaggaggcgtccgaggcctacctcgtcgggctcttcgaggacaccaacctctgcgccattcacgccaagcgcgtcaccatcatgcccaaggacatccagctcgcccgccgtatccgtggggagagggcctaggcgtcgtcccggtggaggtggaagtagtagtcgccgtttctgtcatcactgtctggctagaaggtgtagagatgtgccgggttctgtagtttgggttatcggtcaaatcatgatgtagttgggtcttccctgctgtaatttaactatgactatgcaatggcaatgaagttctcggttatcagttcccgaatatatgcgtctacaatctagatcg

SEQ ID NO: 1505 - DNA, 593 bp, Zea mays
  Clone ID: TF_LIB4979-098-A1-K1-E4
acagatcgatctcattctccctagcaactctctagtattactatcctgcgtgcgaatcaaagggctagccaccttcgtactgtgccgatggaccgcacgaagcacacggttgatgaagtccactggtgacaaggcgcctaggaagcagctggacaccaaggcgatgcgcaagtctgccccggcgaccggaggagtgaataaggcccaccgtttccgccccggcaccgtctagctccgggagatccgcaagtaccagaagagcacggagctgctgatccgcaagctgccggtccagcgcctggtgcgtgagatcgcccaggacttcaagaccgacctccgcttccagagctccgccgtcgccgcgctgcaggaggcgtccgaggcctacctcgtcgggctcttcgaggacaccaacctctgcaccattcacgccaagcgcgtcaccatcatgaccaaggacatccagctcgcccgccgtatccgtgaggagagggcctatgcgtactcccggtgcaggcgaaaactgtagagtgcgttactgaatacagtgcttggccacaaggcgtatagatataccaggcgtggatttgggt

SEQ ID NO: 1506 - DNA, 673 bp, Zea mays
  Clone ID: TF_LIB4185-043-R1-K1-A9
ttggggtaccggccccttctcgagttttttttttttttttttttttttttttttttttttttttttggataacagagctcattgccatttcatatgcatcatgataattaagttacagcagggaacaaccaactactcgatgattcgacagtaacccaaactacagaacccagcacatttttacattttttgatcgggcactgatgacagaaaatatgacgcttaggccctctccccggggatgcggggggcaagctggatgtccttgggcatgatggggacccgcttggcgtggatggcgcaaaggttggtgtcctcaaagagcccgacaaggtaggcctaagccgcctcctgcagcgcggaaacaggggagctctggaagcgtaggtcggtcttgaagtcctgcgcgatctcccgcaccaggcgctggaacggcagtttgcggatcagcagctccgtgctcttctggtacttgcggatctcccggagcgcgacggtgccggggcggaagcggtggggcttcttaactccgccggtcgcaggggcagacttgcgggccgccttagtcgccagttgcttcctcggcgccttgccgccggtggacttcctcgccgtctgcttcgtgcgggccatcgagcgagtgaggatggaaggcttctgctagggattgctg

SEQ ID NO: 1507 - DNA, 529 bp, Zea mays
  Clone ID: TF_LIB4762-059-R1-K1-C11
ggccggccggatcctgccaatcccccgaaagtaactcctccccaattccacgctgccaccaactcgccgtcctccgcgccaagcaccaaagctccgatggcccgcacgaagcagacggcgcgcaagtcaacgggcggcaaggcgccccgcaagcagctggcgaccaaggcggcgcgcaagtctgcgccggccaccggcggcgtgaagaagccccaccgctttcgccccggcaccgtcgcgctccgggagattcgtaagtaccaaaagagcacggagctgctcattcgcaagttgccctttcagcgcctcgtccgtgagatcgcgcaggactttaagaccgatctccgcttccagtccttcgccgtctctgcgctgcaggaggccgccgaagcctacctcgtggggctctttgaggacactaacctgtgcgccatccacgccaagcggcgtaccatcatgcccaaggacattcagctcgcgcgccgcatcaggggagagaaggccctgagcgaggcgagcttctctcacc

SEQ ID NO: 1508 - DNA, 741 bp, Zea mays
  Clone ID: TF_JC-ZMSHLIB3569P021H08_FLI
ttcgaaacaccctcgcacccacactctcccttcgtccccagcctaaatccccgcaaagatggctcgcacgaagcagacggcgcgcaagtccacgggcggcaaggccccgaggaagcagctggcgaccaaggcggcgcgcaagtcggcccctgcgaccggcggcgtgaagaagccgcaccgcttccgcccgggcaccgtggcgctgcgcgagatccgcaagtaccagaagagcacggagctgctcatccgcaagctgcccttccagcgcctggtccgcgagatcgcgcaggacttcaagaccgacctccgcttccagtcctccgccgtcgccgcgctgcaggaggctgccgaggcctacctcgtcggcctgtttgaggacaccaacctctgcgccatccacgccaagcgcgtcaccatcatgcccaaggacatccagctcgcccgccgcatccgcggggagcgcgcataggcggcccgccggataggccggtggcccgttgcgcagtctcttctcggaagtttgtactagtggtcgggtcgtgtggaaggagtggtgtactgatctgcaatgtctcaaaccatgtcaacctctttgttgtcatcaatggaaatcgctacttatgtgtgctaatcttcgtgctgcgtttgtttcgtagtaacacaattcgatggattcgtacctgtgaacaatcgattcatatcgtcaccagatgcgaaattggcagtttgtgttcaaatttc

SEQ ID NO: 1509 - DNA, 635 bp, Zea mays
  Clone ID: TF_LIB4729-084-Q2-K1-F4
ccggcgggaaccgttcccactcactcatccacagctcgcagccgtattcctgtctcgaatcctctctcgccgctccgatggcccgcacgaagcaaacagcaaggaagtcgaccggcggcaaggccccccggaagcagctggccactaaggctgcgcgcaagtcggccccggccaccggcggcgtgaagaagccccaccgcttccgccccggcaccgtcgcgctccgcgagatccgcaagtaccagaagagcactgagctgctcatccgcaagctccccttccagcgcctcgtccgcgagatcgcgcaggacttcaagactgatctgaggttccagtcctccgccgtcgcggcgctgcaggaggccgccgaggcgtacctggtggggctcttcgaggacaccaacctttgcgccatccacgccaagcgcgtcactatcatgcccaaggacatccagctcgcgcggcgcatcaggggcgagagggcttgagcgcccgtcgtgctgctcgtcgttgtagtgttactagaagtagatggtggcattcgtttcgtggcttccttgttctagatgtcttggcttcagtgcaatggactgtgattgctcatttctgaaatttatcaatggacttgttcttac

SEQ ID NO: 1510 - DNA, 615 bp, Zea mays
  Clone ID: TF_LIB4729-135-A1-K1-E10
attgggacctcgagccggcgggtcccagctcgatccgatttccatttcaatccttcgatcgcacagcgccgcccgccctcacgcagctctctccgatggcgcgcacgaagcagacggcgaggaagtcgaccggcggcaaggcgccgcggaagcagctggccaccaaggcggcgcgaaagtcggccccggccaccggcggcgtgaagaagccgcacaggtttcgccccggcaccgtcgcgctccgcgagatccgcaagtaccagaagagcacggagctgctcatccggaagctgcccttccagcggctggtgcgggagatcgcgcaggacttcaagaccgacctccggttccagtcctccgccgtcgccgcgctgcaggaggccgccgaggcgtacctggtgggtctcttcgaggacaccaacctctgcgccatccatgccaagagggtcaccatcatgcctaaggacatccagctcgcgcgccgcatcaggggcgagagggcctgattgctctgtcttcctgtttctgtagtgtctgaactaggggatggaatctatcgcttcttgtcctgcaatcgtgtactgatgttctaggcaaatcagtttggctgttatg

SEQ ID NO: 1511 - DNA, 656 bp, Zea mays
  Clone ID: TF_LIB4979-026-A1-K1-F2
actgaacgatctcaatctccctagcaatctctagcggcagatcctcgtgcgaagcaaagcgctagcccccttcgtactgtcccgatggcccgcacgaagcagacggcgaggaagtccactggcggcaaggcgccaaggaagcagctggccaccaaggcggcgcgcaagtctgccccggcgaccggcggagtgaagaagccccaccgtttccgccccggcaccgtcgcgctccgggagatccgcaagtaccagaagagcacggagctgctgatccgcaagctgccgttccagcgcctggtgcgtgagatcgcccaggacttcaagaccgacctccgcttccagtcctcggccgtggcggcgctgcaggaggccgcggaggcgtacctggtggggctcttcgaggacaccaacctctgcgccatccacgccaagagggtcaccatcatgcccaaggacatccagctcgcccgccgcatcaggggcgagagggcttgagctgtcgcgctgctgctgttcgtcgttgtaatgtctgaagtatatggtggtgggtgctttctatgccgtgcctatttggctatttcggacgtgttgtcctcactgaatggaaaatggaatgcgattgctcgtctgaaattaacgaatgaccttttacctgc

SEQ ID NO: 1512 - DNA, 657 bp, Zea mays
  unsure (1)..(657): unsure at all n locations
  Clone ID: TF_LIB4979-075-A1-K1-H8
ngatccgcaatcttcaatctccccagcaatccctagcagaagccttccatcctcactcgctcgatggcccgcacgaagcagacggcgaggaagtccaccggcggcaaggcgccgaggaagcagttggcgactaaggcggcccgcaagtctgcccctgcgaccggcggagttaagaagccccaccgcttccgccccggtaccgtcgcgctccgggagatccgcaagtaccagaagagcacagagctgctcatccgcaagctccccttccagcgcctcgtccgcgagatcgcgcaggacttcaagacggacctgcggttccagtcctcggccgtggcggcgctgcaggaggccgcggaggcgtacctggtggggctcttcgaggacaccaacctctgcgccatccacgccaagagggtcaccatcatgcccaaggacatccagctcgcccgccgcatcaggggcgagagggcttgagctgtcgcgctgctgctgttcgtcgttgtaatgtctgaagtatatggtggtgggtgctttctatgccgtgcctatttggctatttcggacgtgttgtcctcactgaatggaaaatggaatgcgattgctcgtctgaaattaaaaaaaaaaaaaaaaaaaaaaaaaagtaaaaaaaaanaaaaa

SEQ ID NO: 1513 - DNA, 839 bp, Zea mays
  Clone ID: TF_ZmC653_100
cctcgaggccggccgggccgggatccacagctcgcatccgatttccaatttcaaatccttcgatcgcgcagcgccgcccgccctctcgcagctctctccgatggcccgcacgaagcagacggcgaggaagtcaactggcggcaaggcgccgcggaagcagctggccaccaaggcggcgcgcaagtcggctccggccaccggcggcgtgaagaagccgcacaggttccgccccggcaccgtcgctctccgcgagatccgcaagtaccagaagagcacggagctgctcatccggaagctgcccttccagcggctggtgcgtgagatcgcgcaagacttcaagaccgaccttcggttccagtcctccgctgtcgccgcgctgcaggaggccgccgaggcgtatctggtgggtctctttgaggacaccaacctctgcgccatccacgccaagagggtcaccatcatgcccaaggacatccagctcgcgcgccgcatcaggggcgagagggcctgattgctgctctgtcttcctgtttctgtaatgtctgaactaggcgatggactctatcgcttcttgtcctgcaatcgtgtaccgatgttcttggcaaatcaatttggctgttatgaatgtgattcagtgatttgatttataacttttttgttccaaaattggaacaatcactgatccaagagagcgttgttttttgagccagaacataaaatctaggttttatcggttcttatattttatcgtgacagtagcagccaaaaaacagtgaatctaagcatatctattttaaaatatcaaatttgttctaataagaattcagatgtttagttcc

SEQ ID NO: 1514 - DNA, 1010 bp, Zea mays
  Clone ID: TF_ZmC653_102
cacgttagggcgttcgcgccccaagggcccgtgccattggctcagcccgcccggccgactcgccgcggcgggccgcctcgaagctcccttacagctcgcatccgatttcccatttcaaatccttcgatcgcacagcgccgcccgccctcacgcagctctctccgatggcgcgcacgaagcagacggcgaggaagtcgaccggcggcaaggcgccgcggaagcagctggccaccaaggcggcgcgaaagtcggccccggccaccggcggcgtgaagaagccgcacaggtttcgccccggcaccgtcgcgctccgcgagatccgcaagtaccagaagagcacggagctgctcatccggaagctgcccttccagcggctggtgcgggagatcgcgcaggacttcaagaccgacctccggttccagtcctccgccgtcgccgcgctgcaggaggccgccgaggcgtacctggtgggtctcttcgaggacaccaacctctgcgccatccatgccaagagggtcaccatcatgcctaaggacatccagctcgcgcgccgcatcaggggcgagcgcgcgtaggcgtatctcgcgcccggccccagtggcggcggagggatggaggagggcaatttgtaaccttatgctgtttgttcgcttttagacggcgtggtgaagaactagtgtaaaaacggctttaaagtctattttgtgcggtagttcgtgtaggccgcttcgtcccgaagcgatcttggtaaaagacttattcgtgttgccaaacgacacaattcgtattttttttgtgtgccgtgtagaacacggtttgttgttattggaatggttcatcgaaatctgtgtgcccgtttggttaaatatcgagggcacgggaatcagcagctagacctaatcgatgtactgtaattgccctcggtcgcaagacaatgaggcaattagcagtcgttgcgttggagggatggccggtcatgaaaaatgtggtgttattccggattttggaac

SEQ ID NO: 1515 - DNA, 846 bp, Zea mays
  Clone ID: TF_ZmC653_103
acccacgcgtccgcgctccggttacaaaacacccaaccccatcccaatctccgaacgcctcgcatcaaaccaactctttcccaaatccaccgccggctcggctcgcccatcttcgcgccaagcaccgaatctccgatggcccgcacgaagcagacggcgcgcaagtcgacgggcggcaaggcgccccgcaagcagctggccaccaaggcggcgcgcaagtcggcgccggcaaccggtggcgtgaagaagcctcaccgcttccgccccggcaccgtcgcgctccgggagattcgcaagtaccagaagagcacggagctgctcatccgcaagctgcccttccagcgcctcgtccgtgagatcgcgcaggatttcaagaccgacctccgcttccagtcctccgctgtcgccgcgctgcaggaggccgccgaggcctacctcgtggggctcttcgaggacaccaacctctgcgccatccacgccaagcgcgtcaccatcatgcccaaggacatccagctcgcgcgccgcatcaggggcgagagggcttgatctcccgttgtcgtcgtccacgttgttgggcctttcctctgtgtctctgcttgtagaatccttgcttctgttcggttccttctgttcgcatgatggtgttcgtagtgttaggagttgcattttctaatctgcttgttcttgcaccggtgcctctgaagtggcgtttccctctatcttaatggaaatggaatgtgctttaaaaaagaaatctgatgtctcgtttgtttccggaattgtaatcttattaacagaataggttatttttttaagatgtgaccttcgaccgtataagtctatctt

SEQ ID NO: 1516 - DNA, 1433 bp, Zea mays
  Clone ID: TF_ZmC653_104
tcataaggtgagaaagaagggcagatgttacgggcccgtacactttcagagaagctggagctcaggtggaactggccacctagcttatgaaggacagtgggttggttagcctggtccgccattaccacctcaaaactgttggcctggccttgggcaccggaggcggggaaggggaggcggtctgggcggcggcctcgactccgaactttacgtcagtaccgaagtcaataacccggccggccgggattcatctccattcgaaacaccctcgcacccacactctcccttcgtccccagcctaaatccccgcaacgatggctcgcacgaagcagacggcgcgcaagtccacgggcggcaaggccccgaggaagcagctggcgaccaaggcggcgcgcaagtcggcccctgcgaccggcggcgtgaagaagccgcaccgcttccgcccgggcaccgtggcgctgcgcgagatccgcaagtaccagaagagcacggagctgctcatccgcaagctgcccttccagcgcctggtccgcgagatcgcgcaggacttcaagaccgacctccgcttccagtcctccgccgtcgccgcgctgcaggaggccgccgaggcttacctcgtcggcctgttcgaggacaccaacctctgcgccatccacgccaagcgcgtcaccatcatgcccaaggacatccagctcgcccgccgcatccgcggggagcgcgcctaggcggccggccggccggataggccgtggcgcagtctcttctcggaagtttgtactagtggtcgggtcgtgtggagggagtggtgtactaatcagcaatgtctcaaaccatgtcaacctctttgttgtcatcaatggaaatcgctacttatgtgtgctaaaaaaaaaaaaaaaaaaaaaaaaaaaaaaaaaaaaaaaaaaaaaaaaaaaaaaaaacccccaccgaagcacagcgccggaaaccgccgccatcgatcgatcgcccggaaactgacctctaccgatgtctggagccggcaagaaggaaaaaaagcccgcggagggcggcgcccacatcaaccttaaggtcaagggacaggatggcaatgaggggttctttcgcataaaaaggcccacccagctgaaaaagctgatgaacgcctattgcgaccgccagtctggggacatgaatgccattgcattcctgtttgatggccgcaggcttcgcggcaagcaaacccctgatgagctggaaatgaaggacggcaacaaaatcaacgccatgcttcaccagaccggaggcagcgttcctagcaccacctaaaagcagcagctgcggagcctcgttttgctctccgccctgcgtagaactaaacaaaagggaaaaagtctttttaaggaacttgggatgctctggctccttgtgccattgctgagggacatccttagcct

SEQ ID NO: 1517 - DNA, 726 bp, Zea mays
  Clone ID: TF_ZmC653_109
cattgggtacctcgaggccggccgggagtaacccgcatcccacatcactcatccacagctcgcagccgtattcctgtctcgaatcctctctcgccgctccgatggcccgcacgaagcaaacagcaaggaagtcgaccggcggcaaggccccccggaagcagctggccactaaggctgcgcgcaagtcggccccggccaccggcggcgtgaagaagccccaccgcttccgccccggcaccgtcgcgctccgcgagatccgcaagtaccagaagagcactgagctgctcatccgcaagctccccttccagcgcctcgtccgcgagatcgcgcaggacttcaagactgatctgaggttccagtcctccgccgtcgcggcgctgcaggaggccgccgaggcgtacctggtggggctcttcgaggacaccaacctttgcgccatccacgccaagcgcgtcactatcatgcccaaggacatccagctcgcgcggcgcatcaggggcgagagggcttgagcgcccgtcgtgctgctcgttgttgtagtgttactagaagtagatggtggcattcgtttcgtggcttccttatcctgtaggagtaatgttctagatgtcttggcttcagtgcaatggactgtgattgctcatttctgaaatttatcaatgaacttgttcttgcaaagatttgccgacaaaaaaaaaaaagaagaaaaaaaaaaaaaaagcggcc

SEQ ID NO: 1518 - DNA, 634 bp, Zea mays
  Clone ID: TF_ZmC653_27
cccccgaggctggccgggatcccagctcacatccgatttctatttcaatccttcgatcgcacagcgccgcccgccctctcgccgctctctccaatggcgcgcacgaagcagacggcgaggaagtcgaccggcggcaaggcgccccggaagcagctggccaccaaggcggcgcgcaagtcggctccggccactggcggcgtgaagaagccgcacaggttccgccccggcaccgtcgcgctccgcgagatccgcaagtaccagaagagcacggagttgctcatccggaagctgcccttccagcggctggtgcgtgagatcgcacaggacttcaagaccgacctccggttccagtcctccgccgtcgccgcgctgcaggaggccgccgaggcctacctggtggggctgttcgaggacaccaacctctgcgccatccacgccaagagggtcaccatcatgcctaaggacatccagctcgcgcgccgcatcaggggcgagagggcctgatcgctgctctgtcttcctgtttctgtagtgtctgaactaggcgatggaatctatcgcttcttgtcctgcaatcatgtaccgatgttctaggtaaatcagtttggctgttatgaatgtgatcagtgatttg

SEQ ID NO: 1519 - DNA, 634 bp, Zea mays
  Clone ID: TF_ZmC653_32
ccggccgggatccacagctcccatccgatttcctatttcaaatccttcgatcgcgcagcgccgcccgccctctcgcagctctctccgatggcccgcacgaagcagacggcgaggaagtcgaccggcggcaaggcgccgcggaagcagctggccaccaaggcggcgcgcaagtcggctccggccaccggcggcgtgaagaaaccgcacaggttccgccccggcaccgtcgcgctccgcgagatccgcaagtaccagaagagcacggagctgctcatccggaagctgcccttccagcggctggtgcgcgagatcgcgcaggacttcaagaccgacctccggttccagtcctccgccgtcgccgcgctgcaggaggccgccgaggcgtacctggttggtctattcgaggacaccaacctctgcgccatccacgccaagagggtcaccatcatgcctaaggacatccagctcgcgcgccgcatcaggggcgagagggcctgattgctgctcttgtcttcctgtttctgtaatgtctgaactaggcgatggactctatcgcttcttgtgctgcaatcgtgtaccgatgttcttggcaaatcaatttggctgttatgaatgtgattcagtgatttgattt

SEQ ID NO: 1520 - DNA, 720 bp, Zea mays
  Clone ID: TF_ZmC653_34
gcgaatcctccatctgcccttgccgccgccgccgacggatccaggtctgtagactgctcactcctctacgctccgctccgaatggcccgcacgaagcagacggcgcgcaagtcgaccggcggcaaggcgccgcggaagcagctggccaccaaggcggcgcgcaagtcggccccggccacgggcggcgtgaagaagccgcaccgcttccgccccggcaccgtcgcgctccgcgagatccgcaagtaccagaagagcactgagctgctcatccgcaagctccccttccagcgcctggtccgcgagatcgcgcaggacttcaagacggacctccggttccagtcctccgccgtcgccgcgctgcaggaggccgccgaggcctacctggtgggcctcttcgaggacaccaacctctgtgccatccacgccaagcgcgtcaccatcatgcccaaggacatccagctcgcgcgccgcatccgcggcgagcgcgcctaggcggttcggttgcggcgcctgctcgctactgatggaggtgcttagtttagcacgtcatggttgtgttataggtgtgcgttgttgttttcaagaggtagcttcttgctatgtgctgatgttaacggtggattatgattagcagttctgaaaaaaatgtaatggatgtgatctgctctatctacatgttttctgtctttgtcctgcaaaaaaaaaaaaaaaaaagcggcc

SEQ ID NO: 1521 - DNA, 667 bp, Zea mays
  Clone ID: TF_ZmC653_37
cattgggtacctcgaggccggccgggacacacgcgaatcctaaatctgcccttgccgcccgatccaggtctgcagactgctcactcctctccgctccgaatggcccgcacgaagcagacggcgcgcaagtcgaccggcggcaaggcgccgcggaagcagctggccaccaaggcggcgcgcaagtcggccccggccacgggcggcgtgaagaagccgcaccgcttccgccccggcaccgtcgcgctccgcgagatccgcaagtaccagaagagcacggagctgctcatccgcaagctccccttccagcgcctcgtccgcgagatcgcgcaggacttcaagacggacctgcggttccagtcctcggccgtggcggcgctgcaggaggccgcggaggcgtacctggtggggctcttcgaggacaccaacctctgcgccatccacgccaagagggtcaccatcatgcccaaggacatccagctcgcccgccgcatcaggggcgagagggcttgagctgtcgcgctgctgctgttcgtcgttgtaatgtctgaagtatatggtggtgggtgctttctatgccgtgcctatttgggtatttcggacgtgttgtcctcactgaatggaaaatggaatgcgattgctcgtctaaaaaaaacaaaaaaaagcggcc

SEQ ID NO: 1522 - DNA, 678 bp, Zea mays
  Clone ID: TF_ZmC653_41
ttgggaccctcgaggccggccgggacacacgcgaatcctcaatctgcccttgccgccgccactgcccgatccaggtgtgcagactgctccctcctcctctccgctccgaatggcccgcacgaagcagacggcgcgcaagtcgaccggcggcaaggcgccgcggaagcagctggccaccaaggcggcgcgcaagtcggccccggccacgggcggcgtgaagaagccgcaccgcttccgccccggcaccgtcgcgctccgcgagatccgcaagtaccagaagagcacggagctgctcatccgcaagctccccttccagcgcctcgtccgcgagatcgcgcaggacttcaagacggacctgcggttccagtcctcggccgtggcggcgctgcaggaggccgcggaggcgtacctggtggggctcttcgaggacaccaacctctgcgccatccacgccaagagggtcaccatcatgcccaaggacatccagctcgcccgccgcatcaggggcgagagggcttgagctgtcgcgctgctgctgttcgtcgttgtaatgtctgaagtagatggtggtgggtgctttctatgccgtgcctatttggctatttcggacgtgttggttcactgaatggaaaatggaatgccatttctcgtcagaaaaaaaaaaaaaaaaaagcggcc

SEQ ID NO: 1523 - DNA, 727 bp, Zea mays
  Clone ID: TF_ZmC653_43
cgggaaaaaaaaacaaaaaaaaaaaagtaacccgcatcccacatcactcatccacagctcgcagccgtgttcctgtctcgaatcctctctcgccgctccgacggcccgcacgaagcaaacagcaaggaagtcgaccggcggcaaggccccccggaagcagctggccactaaggctgcgcgcaagtcggccccggccaccggcggcgtgaagaagccccaccgcttccgccccggcaccgtcgcgctccgcgagatccgcaagtaccagaagagcactgagctgctcatccgcaagctccccttccagcgcctcgtccgcgagatcgcgcaggacttcaagactgatctgaggttccagtcctccgccgtcgcggcgctgcaggaggctgccgaggcgtacctggtggggctcttcgaggacaccaacctttgcgccatccacgccaagcgcgtcactatcatgcccaaggacatccagctcgcgcggcgcatcaggggcgagagggcttgagcgcccgtcgtgctgctcgtcgttgtagtgttactagaagtagatggtggcattcgtttcgtggcttccttatcctgtaggagtaatgttctagatgtcttggcttcagtgcaatggactgtgattgctcatttctgaaatttatcaatggacttgttcttgcaaaaaaaaaaaaaaaaaaaaaaaaaaaagaaaaaaaaaaaaaaaaaagcggcc

SEQ ID NO: 1524 - DNA, 701 bp, Zea mays
  Clone ID: TF_ZmC653_47
cgctcttgttgtttccgagcccaaaccccagcacgctccacccgcacctccgctcccacacaccgatggcccgcacgaagcagacggcgcgcaagtccaccggtggcaaggcgccgcggaagcagctggcgaccaaggcagcgcgcaagtcggccccggcgaccggcggcgtgaagaagccgcaccgcttccgcccgggcaccgtggcgctccgcgagatccgcaagtaccagaagagcacggagctgctcatccgcaagctccccttccagcgcctggtccgcgagatcgcgcaggacttcaagaccgacctccgcttccagtcctccgccgtcgccgcgctgcaggaggccgcggaggcctacctcgtcggcctcttcgaggacaccaacctctgcgccatccacgccaagcgcgtcaccatcatgcccaaggacatccagctcgcccgccgcatccgcggggagcgcgcttaggcgtttacggttgattgtcactactgtagatgtttaggctatgttctcgccatgttctaggtctgcttcgttcttatttgtttttttttggtttcatcctgtgcgttgatgtgtgtcgatgagctatctgtgcctgtctgagagaaatagagtgatctattggcgccattgttgaacaccatgaagttggagacataaatatgcatgaacaacacaattaactgg

SEQ ID NO: 1525 - DNA, 629 bp, Zea mays
  Clone ID: TF_ZmC653_50
cggcacgagcccatttcgaatccttcgatcgcgcagcgccgcccgccctctcgcagttctctccgatggcccgcacgaagcagacggcgaggaagtcgaccggcggcaaggcgccgcggaagcagctggccaccaaggcggcgcgaaagtcggctccggccaccggcggcgtgaagaagccgcacaggttccgccccggcaccgtcgcgctccgcgagatccgcaagtaccagaagagcacggagctgctcatccggaagctgccgttccagcggctggtgcgtgagatcgcgcaggacttcaagaccgacctccggttccagtcctccgctgtcgccgcgctgcaggaggccgccgaggcgtacctggtgggtctctttgaggacaccaacctctgcgccatccacgccaagagggtcaccatcatgcctaaggacatccagctcgcgcgccgcatcaggggcgagagggcctgattgctgctctgtcttcctgtttctgtagtgtctaaactaggcgatggaatctatcgcttcttgtcctgcaatcgtgtactgatgttctaggcaaatcagtttggctgttatgaatgtgattcagtgatttgatttaaaaaaaaaaaaaaaaaa

SEQ ID NO: 1526 - DNA, 786 bp, Zea mays
  Clone ID: TF_ZmC653_51
aaatctcccaaggacatccagcccaaacacggtcaaacacgctccagcctccacccgcacctccgctcccacaccgatggcccgcacgaagcagacggcgcgcaagtccaccggtggcaaggcgccgcggaagcagctggcgaccaaggcagcgcgcaagtcggccccggcgaccggcggcgtgaagaagccgcaccgcttccgcccgggcaccgtggcgctccgcgagatccgcaagtaccagaagagcacggagctgctcatccgcaagctccccttccagcgcctggtccgcgagatcgcgcaggacttcaagaccgacctccgcttccagtcctccgccgtcgccgcgctgcaggaggccgcggaggcctacctcgtcggcctcttcgaggacaccaacctctgtgccatccacgctaagcgcgtcaccatcatgcccaaggacatccagctcgcccgccgcatccgcggggagcgcgcttaggcgtttacggttgattgtcactactgtagatgtttaggctatgttctcgccatgttctaggtctgcttcgttcttgttttttttgtttcatcctgtgcgttgatgggtgtcgatgagctatcggtgcctgtctgagagaaatggagtgatctgttggcgccattgttgaacaccatgaagttgcgagctcggacgttataaattcctaccagacataaatatgcatgaacaatacaattaactggagatactggtagactagtacctctactaaaaaaaaaaaaaaaaaagcggccctc

SEQ ID NO: 1527 - DNA, 654 bp, Zea mays
  unsure (1)..(654): unsure at all n locations
  Clone ID: TF_ZmC653_53
ggtaccctccgggtcggccgggacgcgaatcctccaatctgcccttgccgccgactgctcactcctctccggtccgctccactccgaatggcccgcacgaagcagacggcgcgcaagtcgaccggcggcaaggcgccgcggaagcagctggccaccaaggcggcgcgcaagtcggccccggccacgggcggcgtgaagaagccgcaccgcttccgccccggcaccgtcgcgctccgcgagatccgcaagtaccagaagagcacggagctgctcatccgcaagctccccttccagcgcctcgtccgcgagatcgcgcaggacttcaagacggacctgcggttccagtcgtcggcggtggcggcgctgcaggaggccgcggaggcgtacctggtggggctcttcgaggacaccaacctctgcgccatccacgccaagagggtcaccatcatgcccaaggacatccagctcgcccgccgcatcaggggcgagagggcttgagctgtcgcgctgctgttcgtcgttgtaatgtctgaagaagatggtgggctcgtttcatgtcgtgcctatcgtggatgtgtttccctcactgaatggaatgcgactgcccttgtccgaaattaatgaactagatcaggtggcgccctnncnggcgcc

SEQ ID NO: 1528 - DNA, 882 bp, Zea mays
  Clone ID: TF_ZmC653_55
ccggccggggaaaaagttcccggctccccgctccggttacaaaacacccaaccccatacaagctccgaacgcctcgcatcaaaccaactctttcccaaatccaccgccggctcggctcgcccttctccgcgccaagcacccaagctccgatggcccgcacgaagcagacggcgcgcaagtcgacgggcggcaaggcgccccgcaagcagctggccaccaaggcggcgcgcaagtcggcgccggcaaccggtggcgtgaagaagcctcaccgcttccgccccggcaccgtcgcgctccgggagattcgcaagtaccagaagagcacggagctgctcatccgcaagctgcccttccagcgcctcgtccgtgagatcgcgcaggatttcaagaccgacctccgcttccagtcctccgctgtcgccgcgctgcaggaggccgccgaggcctacctcgtggggctcttcgaggacaccaacctctgtgccattcacgccaagcgcgtcaccatcatgcccaaggacatccagctcgcgcgccgcatcaggggcgagagggcctgatctcccgttgtcgtcgtccacgttgttggaccttttctctgtgtctctgcttgtagaatccttgcttctgttcggttccttctgttcgcatgatggtgttcgtagtgttaggagttgcattctctaatctgcttgttcttgcaccggtgcctctgaagcggcgtttccccctatcttaatggaaatggaatgtgcttttggaaaaaccccgagtgaattctaggctctgaacacactttctgggcttatctttatgtggtgggatcaatgtgtgaattttgagacatgtaatttttagttgtcaggtctacacaattgcctc

SEQ ID NO: 1529 - DNA, 785 bp, Zea mays
  Clone ID: TF_ZmC653_56
cattgggacctcgagccggcgggaccgatcctcaatctgcccttgccgccgccgccgccgccgcccgatccaggtctgtagactgctcactcctccggtctgctcggaatggcccgcacgaagcagacggcgcgcaagtcgaccggcggcaaggcgccgcggaagcagctggccaccaaggcggcgcgcaagtcggccccggccacgggcggcgtgaagaagccgcaccgcttccgccccggcaccgtcgcgctccgcgagatccgcaagtaccagaagagcactgagctgctcatccgcaagctccccttccagcgcctggtccgcgagatcgcgcaggacttcaagacggacctgcggttccagtcgtcggcggtggcggcgctgcaggaggccgcggaggcgtacctggtggggctcttcgaggacaccaacctctgcgccatccacgccaagagggtcaccatcatgcccaaggacatccagctcgcccgccgcatcaggggcgagagggcttgagctgtcgcgctgctgttcgtcgttgtaatatttgaagatggcgggttcgtttcatgtcgtgcttatcgtggatgtgttgccctcactgaatggaatgcgactgcccttgtccgaaattaatgaatgcccttgttccttcaaagattttggtgacttgtttaatgggcacagtgtagtcggaggtcgcaggcataccattatgtgacttgtttacatggttcaatggcgtgttgattgcttgcaaaaaaaaaaaaaaaaaagcggcc

SEQ ID NO: 1530 - DNA, 762 bp, Zea mays
  Clone ID: TF_ZmC653_57
tgggtccctcgggccggccggaccggtcagcgcgaagccagagcaccacgccccgtccgaactccgaactccagatcagagcagagcctcttcgacctccctgtccccagccttccccgatggcccgcacgaagcagacggcgcgcaagtcgacgggcggcaaggcgccgcggaagcagctggcgacgaaggcggcgcgcaagtcggcgccggcgacgggcggcgtgaagaagccgcaccgcttccgcccgggcaccgtcgcgcttcgcgagatccgcaagtaccagaagagcacggagctgctgatccgcaagctcccgttccagcgcctggtccgcgagatcgcgcaggacttcaagacggacctccggttccagtcctccgccgtcgccgcgctgcaggaggccgccgaggcctacctggtgggcctcttcgaggacaccaacctctgtgccatccacgccaagcgcgtcaccatcatgcccaaggacatccagctcgcgcgccgcatccgcggcgagcgcgcctaggcggttcggttgcggcgcctgctcgctactgatggaggtgcttagtttagcacgtcatggttgtgttataggtgtgcgttgttgttttcaagaggtagcttcttgctatgtgctgatgttaacggaggattatgattagcagttctgaaaaaaatgtaatggatgtgatctgctctatctacatgttttctgtctttgtcctgaaatcccatggtgttttagcattgatttc

SEQ ID NO: 1531 - DNA, 859 bp, Zea mays
  Clone ID: TF_ZmC653_60
tctgccggaaaaccccgccgcttaaaaacgcacccgaatctgccactccaaaatctcccaaagacgccgtcgccgctcttgttgtttccgatcccaaaccccaaacacgctccaccggcacctccgctcccacaccacaccgatggcccgcacgaagcagacggcgcgcaagtccaccggtggcaaggcgccgcggaagcagctggcgaccaaggcagcgcgcaagtcggccccggcgaccggcggcgtgaagaagccgcaccgcttccgcccgggcaccgtggcgctccgcgagatccgcaagtaccagaagagcacggagctgctcatccgcaagctccccttccagcgcctggtccgcgagatcgcgcaggacttcaagaccgacctccgcttccagtcctccgccgtcgccgcgctgcaggaggccgcggaggcctacctcgtcggcctcttcgaggacaccaacctctgcgccatccacgccaagcgcgtcaccatcatgcccaaggacatccagctcgcccgccgcatccgcggggagcgcgcttaggcgtttacggttgattgtcactactgtagatgtttaggctatgttctcgccatgttctaggtctgcttcgttcttatttgtttttttggtttcatcctgtacgttgatgggtgttgatgagctatcggtgcctgtctgagaaatggagtgatctattggcgccattgttgaacaccatgaagttgcgagctcggacgttataaattcctaccagacataaatatgcatgaacaatacaattaactggagatatactgttagactagtatgtctactacatttgcttatgcttggatgtgcattctc

SEQ ID NO: 1532 - DNA, 756 bp, Zea mays
  Clone ID: TF_ZmC653_61
cctgccgggaaaccccagcgcttaaaaacgcacccgaatctgccactccaaaatctcccaaagacgccgtcgccgctcttgttgtttccgatcccaaaccccaaacacgctccaccggcacctccgctcccacaccacaccgatggcccgcacgaagcagacggcgcgcaagtccaccggaggcaaggcgccgcggaagcagctggcgaccaaggcagcgcgcaagtcggccccggcaaccggcggcgtgaagaagccgcaccgcttccgcccgggcaccgtggcgctccgcgagatccgcaagtaccagaagagcacggagctgctcatccgcaagctccccttccagcgcctggtccgcgagatcgcgcaggactttaagaccgacctccgcttccagtcctccgccgtcgccgcgctgcaggaggccgcggaagcctacctcgtcggcctcttcgaggacaccaacctctgcgccatccacgccaagcgcgtcaccatcatgcccaaggacatccagctcgcccgccgcatccgcggggagcgcgcttaggcgtttacggttgattgtcactactgtaggtgtttaggctatgttctcgccatgttctaggtctgcttcgttcttatttgtttttttggtttcatcctgtacgttgatgggtgttgatgagctatcggtgcctgtctgagaaatggagtgatctattggcgccattgttgaacaccagtaaaaaaaaaaaaaaaaaagcggcc

SEQ ID NO: 1533 - DNA, 693 bp, Zea mays
  Clone ID: TF_ZmC653_62
gggctgcaggaattcggcacgaggctcattcatctccattcgaaacaccctcgcacccacactctcccttcgtccccagcctaaatccccgcaaagatggctcgcacgaagcagacggcgcgcaagtccacgggcggcaaggccccgaggaagcagctggcgaccaaggcggcgcgcaagtcggcccctgcgaccggcggcgtgaagaagccgcaccgcttccgcccgggcaccgtggcgctgcgcgagatccgcaagtaccagaagagcacggagctgctcatccgcaagctgcccttccagcgcctggtccgcgagatcgcgcaggacttcaagaccgacctccgcttccagtcctccgccgtcgccgcgctgcaggaggctgccgaggcctacctcgtcggcctgtttgaggacaccaacctctgcgccatccacgccaagcgcgtcaccatcatgcccaaggacatccagctcgcccgccgcatccgcggggagcgcgcataggcggcccgccggataggccggtggcccgttgcgcagtctcttctcggaagtttgtactagtggtcgggtcgtgtggaaggagtggtgtactgatctgcaatgtctcaaaccatgtcaacctctttgttgtcatcaatggaaatcgctacttatgtgtgagaaaaaaaaaaaaaaaaaaggccccta

SEQ ID NO: 1534 - DNA, 745 bp, Zea mays
  Clone ID: TF_ZmC653_64
gcatcacgcagctttagtccatctctcaaccatccgaccccacctcgccgctcactcccaagccagtccctgccggcagcgatggcccgcacgaagcagacggcgcgcaagtcgacgggcggcaaggcgccgcggaagcagctggcgacgaaggcggcgcgcaagtcggcgccggccacggggggcgtgaagaagccgcaccgcttccgcccgggcaccgtggcgctgcgggagatccgcaagtaccagaagagcacggagctgctgatccggaagctgccgttccagcggctggtgcgggagatcgcgcaggacttcaagacggacctccggttccagtcctccgccgtggccgcgctgcaggaggccgccgaggcctacctcgtgggcctcttcgaggacaccaacctctgcgccatccacgccaagcgcgtcaccatcatgcccaaggacatccagctcgcccgccgcatccggggcgagagggcctgagcaccccccgtctctgctgtgttcccttcgctttctgatttctgtagcgcgaagaactactgtagtaggggaagaactacctcgtgttatattggggttgtgggtaggaaactaggaatgttctgttggtttcgatgcagtgcccccgtgatactgacatccgtgctgcttgttctgttcttcctactacaaatgcgattgttactattatcgaaaaaaaaaaaaaaagaaaaaaaaaaaaaaaaaagcggcc

SEQ ID NO: 1535 - DNA, 738 bp, Zea mays
  Clone ID: TF_ZmC653_65
cggacgcgtgggtcccccagaaaatcaactcctcctcaattccacgctgccaccaactcgccgtcctccgcgccaagcatcaaagctccgatggcccgcacgaagcagacggctcgcaagtcgacgggcggcaaggcgccccgcaagcagctggcgaccaaggcggcgcgcaagtctgcgccggccaccggcggcgtgaagaagccccaccgcttccgccccggcaccgtcgcgctccgggagatccgcaagtaccagaagagcacggagctgctcatccgcaagttgcccttccagcgcctcgtccgtgagatcgcgcaggacttcaagaccgatctccgcttccagtcctccgccgtcgcggcgctgcaggaggccgccgaggcctaccttgtggggctctttgaggacactaacctctgcgccatccacgccaagcgcgtcaccatcatgcccaaggacatccagctcgcgcgccgcatcaggggcgagagggcctgagcgaggcgagctcctctcaccgcaggcggcgtcgttgttgcttcggacctgcttgtaggacttgtgcttctcttggtttcctttctggtggcagaggcatcttggtaccattgtgcttgttcttagaatcttagggatagagagttttcagttgctgggtaacctgattgtttatcttgcattcctgcctctgtaatggttgtctgctgtcttaatggaaattatatttgctttttt

SEQ ID NO: 1536 - DNA, 696 bp, Zea mays
  Clone ID: TF_ZmC653_68
tgggtacctcgaggccggccgggaaaaaaaaaaaaaaaaaaaacgcgaatcctccaatctgtctttgccgccgccgcccgatccaggtctgcagactgctcactccactccgctccgaatggcccgcacgaagcagacggcgcgcaagtcgaccggcggcaaggcgccgcggaagcagctggccaccaaggcggcgcgcaagtcggccccggccacgggcggcgtgaagaagccgcaccgcttccgcccgggcaccgtcgcgctccgcgagatccgcaagtaccagaagagcacggagctgctcatccgcaagctcccgttccagcgcctcgtccgcgagatcgcgcaggacttcaagacggacctgcggttccagtcgtcggcggtggcggcgctgcaggaggccgcggaggcgtacctggtggggctcttcgaggacaccaacctctgcgccatccacgccaagagggtcaccatcatgcccaaggacatccagctcgcccgccgcatcaggggcgagagggcttgagctgtcgcgctgctgttcgttgttgtaatatctgaagaagatggcgggttcgtttcatgtcgttcctatcgtggatgtgttgccctcactgaatggaatgcgactgcccttgttcgaaattaatgattgcccttgttccttgcaaaaaaaaaaaaaaaaaagcggcc

SEQ ID NO: 1537 - DNA, 658 bp, Zea mays
  Clone ID: TF_ZmC653_69
tacaattcaacagagctcgcagccgtattcttttcttgaatcctctctcgctgctccgatggcccgcacgaagcaaacagcaaggaagtcgaccggcggcaaggccccccggaagcagctggctactaaggctgcgcgcaagtcggccccggccaccggcggcgtgaagaagccccaccgcttccgccccggcaccgtcgcgctccgcgagatccgcaagtaccagaagagcactgagctgctcatccgcaagctccccttccagcgcctcgtccgcgagatcgcgcaggacttcaagactgatctgaggttccagtcctccgccgtcgcggcgctgcaggaggccgccgaggcgtacctggtggggctcttcgaggacaccaacctttgcgccatccacgccaagcgcgtcactatcatgcccaaggacatccagctcgcgcggcgcatcaggggcgagagggcttgagcgcccgtcgtgctgctcgtcgttgtagtgttactagaagtagatggtggcattcgtttcgtggcttccttatcctgtaggagtaatgttctagatgtcttggcttcagtgcaatggactgtgattgctcatttctgaaatttatcaatggacttgttcttgcaaaaaaaaaaaaaaaaaaggccccta

SEQ ID NO: 1538 - DNA, 761 bp, Zea mays
  Clone ID: TF_ZmC653_71
cagaaaatcaactcctccccaaatccacgctgccaccaactcgccgtcctccgcgccaagcaccaaagctccgatggcccgcactaaacagacggcgcgcaagtcgacgggcggcaaggcgccccgcaagcagctggcgaccaaggcggcgcgcaagtctgcgccggccaccggcggcgtgaagaagccccaccgcttccgccccggcaccgtcgcgctccgggagatccgcaagtaccagaagagcacggagctgctcatccgcaagttgcccttccagcgcctcgtccgtgagatcgcgcaggacttcaagaccgatctccgcttccagtcctccgccgtcgccgcgctgcaggaggccgccgaggcctacctcgtggggctctttgaggacactaacctctgcgccatccacgccaagcgcgtcaccatcatgcccaaggacatccagctcgcgcgccgcatcaggggagagagggcctgagcgaggcgagctcctctcaccgcaggcggcgtcgttgttgcttcgggcctgcttgtaggacttgtgcttctcttggtttcctttctggtggcagtggcatcttggtaccattgtgcttgttcttagaatcttagggatagagagttgttcagttgctgggtaacctgattgtttatcttgcattcctgcctctgtaatggttgtctgctgtcttaatggaaatgatatttgctttttaaactgagaattaacccacgcgtccggttctagatcgcga

SEQ ID NO: 1539 - DNA, 716 bp, Zea mays
  Clone ID: TF_ZmC653_75
ggccggccgggaaaaaaaaaaaaaaaaaaaaacgcgaatcctccaatctgcccttgccgccgccaccgcaaccgcccgatccaggtccgcagactgctccctcctcctctccgctccgaatggcccgcacgaagcagacggcgcgcaagtcgaccggcggcaaggcgccgcggaagcagctggccaccaaggcggcgcgcaagtcggccccggccacgggcggcgtgaagaagccgcaccgcttccgccccggcaccgtcgcgctccgcgagatccgcaagtaccagaagagcacggagctgctcatccgcaagctccccttccagcgcctcgtccgcgagatcgcacaggacttcaagacggacctgcggttccagtcctcggccgtggcggcgctgcaggaggccgcggaggcgtacctggtggggctcttcgaggacaccaacctctgcgccatccacgccaagagggtcaccatcatgcccaaggacatccagctcgcccgccgcatcaggggcgagagggcttgagctgtcgcgctgctgctgttcgtcgttgtaacgtctgaagtagatgatggtgggtgctttctatgccgtgcctatttggctatttcggacgtgttgtcctcactgaatggaaaatggaatgcgattgctcgtctgaaattaacgaatgactttttacctgacaaaaaaaaaaaaaaaaaagcggcc

SEQ ID NO: 1540 - DNA, 760 bp, Zea mays
  Clone ID: TF_ZmC653_76
cattgggtacctcgaggccggccgggagacacgcgaatcctccaatctgcccttgccgccgccgccgacggatccaggtctgtagactgctcactcctctacgctccgctccgaatggcccgcacgaagcagacggcgcgcaagtcgaccggcggcaaggcgccgcggaagcagctggccaccaaggcggcgcgcaagtcggccccggccacgggcggcgtgaagaagccgcaccgcttccgccccggcaccgtcgcgctccgcgagatccgcaagtaccagaagagcactgagctgctcatccgcaagctccccttccagcgcctggtccgcgagatcgcgcaggacttcaagacggacctgcggttccagtcgtcggcggtggcggcgctgcaggaggccgcggaggcgtacctggtggggctcttcgaggacaccaacctctgcgccatccacgccaagagggtcaccatcatgcccaaggacatccagctcgcccgccgcatcaggggcgagagggcttgagctgtcgcgctgctgttcgtcgttgtaatatttgaagatggcgggttcgtttcatgtcgtgcttatcgtggatgtgttgccctcactgaatggaatgcgactgcccttgtccgaaattaatgaatgcccttgttccttcaaagattttggtgacttgtttaatgggcacagtgagtcggaggtcgcaggcataccattatgtacttgtttacaggttcaaaaaaaaaaaaaaaaa

SEQ ID NO: 1541 - DNA, 765 bp, Zea mays
  Clone ID: TF_ZmC653_78
atcccgtccaccgagtagcagagtcccacgcccctttcgaactccgaaccccagagcagagcagagcctcctcgacctccctgtccccagccttccgcgatggcccgcacgaagcagacggcgcgcaagtcgacgggcggcaaggcgccgcggaagcagctggcgacgaaggcggcgcgcaagtcggcgccggcgacgggcggcgtgaagaagccgcaccgcttccgcccgggcaccgtcgcgctgcgcgagatccgcaagtaccagaagagcacggagttgctgatccgcaagctcccgttccagcgtctggtccgcgagatcgcgcaggacttcaagacggacctccggttccagtcctccgccgtcgccgcgctgcaggaggccgccgaggcctacctggtgggcctcttcgaggacaccaacctctgtgccatccacgccaagcgcgtcaccatcatgcccaaggacatccagctcgcgcgccgcatccgcggcgagcgcgcctaggcggttcggttgcggcgcctgctcgctactgatggaggtgcttagtttagcacgtcatggttgtgttataggtgtgcgttgttgttttcaagaggtagcttcttgctatgtgctgatgttaacggtggattatgattagcagttctgaaaaaaatgtaatggatgtgatctgctctatctacatgttttctgtctttgtcctggaatcccatggtgtttagcattgattttaaaaaaaaaaaaaaaaaagcggcc

SEQ ID NO: 1542 - DNA, 939 bp, Zea mays
  Clone ID: TF_ZmC653_80
cattgggtacctcgaggccggccgggaaaagataaccgacgaaattttgctcttgtttataagtactaccttgactgtcgcttccaaaaaaaaaaaaaaaaaaaagcatcacgcagctttagtcccatctctcaaaccatccgaccccacctcgccgctcactcccaagccagtccctgccggcagcgatggcccgcacgaagcagacggcgcgcaagtcgacgggcggcaaggcgccgcggaagcagctggcgacgaaggcggcgcgcaagtcggcgccggccacggggggcgtgaagaagccgcaccgcttccgcccgggcaccgtggcgctgcgggagatccgcaagtaccagaagagcacggagctgctgatccggaagctgccgttccagcggctggtgcgggagatcgcgcaggacttcaagacggacctccggttccagtcctccgccgtggccgcgctgcaggaggccgccgaggcctacctcgtgggcctcttcgaggacaccaacctctgcgccatccacgccaagcgcgtcaccatcatgcccaaggacatccagctcgcccgccgcatccggggcgagagggcctgagcaccccccgtctctgctgtgttcccttcgctttctgatttctgtagcgcgaagaactactgtagtaggggaagaactacctcgtgttatattggggttgtgggtaggaaactagaaatgttctgttggtttcgatgcagtgcccccgtgatactgacatccgtgctgcttgttctgttcttcctactacaaatgcgattgttactattatcttagcgtttgtttatgcggttatgcttctggaactgaacagtgctacttgttaacgctttgcgttccaacttccaacagaaataaatccgctacactgctgcggaaaaaaaaaaaaaaaaaagcggcc

SEQ ID NO: 1543 - DNA, 799 bp, Zea mays
  Clone ID: TF_ZmC653_81
cattggtacctcgagccggccgggaaaaaattctcaaacgcggcacagagcctcattcatctccattcgaaacaccctcgcacccacactctcccttcgtccccagcctaaatccccgcaacgatggctcgcacgaagcagactgcgcgcaagtcgacgggcggcaaggccccgaggaagcagctggcgaccaaggcggcgcgcaagtcggccccggcgaccggcggcgtgaagaagccgcaccgcttccgccctggcaccgtggcgctgcgcgagatccgcaagtaccagaagagcacggagctgctcatccgcaagctgcccttccagcgcctggtccgcgagatcgcgcaggacttcaagaccgacctccgcttccagtcctccgccgtcgccgcgctgcaggaggctgccgaggcctacctcgtcggcctgtttgaggacaccaacctctgcgccatccacgccaagcgcgtcaccatcatgcccaaggacatccagctcgcccgccgcatccgcggggagcgcgcataggcggcccgccggataggccggtggcccgttgcgcagtctcttctcggaagtttgtactagtggtcgggtcgtgtggaaggagtggtgtactgatctgcaatgtctcaaaccatgtcaacctctttgttgtcatcaatggaaatcgctacttatgtgtgctaatcttcgtgctgcgtttgtttcgtagtaacacaattcgatggattcgtacctgtgaacaatcgattcatatcgtcaccagatgcgaaattggcagtttgtgttc

SEQ ID NO: 1544 - DNA, 767 bp, Zea mays
  Clone ID: TF_ZmC653_83
cattgggtccctcgaggccggccgggaaatctcccaagacgccgtcgccgctcttgttgtttccgatcccaaaccccaaacacgctccaccggcacctccgctcccacaccacaccgatggcccgcacgaagcagacggcgcgcaagtccaccggaggcaaggcgccgcggaagcagctggcgaccaaggcagcgcgcaagtcggccccggcaaccggcggcgtgaagaagccgcaccgcttccgcccgggcaccgtggcgctccgcgagatccgcaagtaccagaagagcacggagctgctcatccgcaagctccccttccagcgcctggtccgcgagatcgcgcaggacttcaagaccgacctccgcttccagtcctccgccgtcgccgcgctgcaggaggccgcggaggcctacctcgtcggcctcttcgaggacaccaacctctgcgccatccacgccaagcgcgtcaccatcatgcccaaggacattcagctcgcccgccgcatccgcggggagcgcgcttaggcgtttacggttgattgtcactactgtagatgtttaggctatgttctcgccatgtcctaggtctgctttgttcttatttgtttttttggtttcatcctgtgcgttgatggttgtcaatgagctatcggtgcctgtctgagagaaatggagtgatctgttggcgccattgttgaacaccatgaagttgcgagctcggacgttataaattcctaccagacataaatatgcatgaacaatac

SEQ ID NO: 1545 - DNA, 855 bp, Zea mays
  Clone ID: TF_ZmC653_84
cggccgggggaaagtcgataccccacgcgaatcctccaatctgcccttgccgccgccgcccgatccaggtctgtagactgctcactcctctccgctccggtccgaatggcccgcacgaagcagacggcgcgcaagtcgaccggcggcaaggcgccgcggaagcagctggccaccaaggcggcgcgcaagtcggccccggccacggggggcgtgaagaagccgcaccgcttccgccccggcaccgtcgcgctccgcgagatccgcaagtaccagaagagcacggagctgctcatccgcaagctccccttccagcgcctggttcgcgagatcgcgcaggacttcaagacggacctgcggttccagtcgtcggcggtggcggcgctgcaggaggccgcggaggcgtacctggtggggctcttcgaggacaccaacctctgcgccatccacgccaagagggtcaccatcatgcccaaggacatccagctcgcccgccgcatcaggggcgagagggcttgagctgtcgcgctgctgttcgtcgttgtaatgtctgaagaggatggtgggttcatttcatgtcgtgcctttcgtggatgtgttgccctctctgaatggaatgcgactgcccttgtccgaaattaatgaatgcccttgttccttcaaagattttggtgacttgtttaatgggcacagtgtagtcgtaggtcgcaggcataccgttatgtgacttgtttacatggttcaatggcgtgttgattgcttgcaatggtttcaggcataccattatgtgaatgctgaagatgaaaatctgtgtgcactattgattaaaaaaaaaaaaaaaaaactcgagagtcttct

SEQ ID NO: 1546 - DNA, 828 bp, Zea mays
  Clone ID: TF_ZmC653_86
attgggtacctcgaggccggccggaaaaaaaaaaaattgacaaccagaaaaataaaaatcttgtacctggatatagcctgacacgagagaactcttccaggagaggcgcggagggcggcgcggctgggcaccggacgacgggcggcgcagccaggcggacgtcaggcggcgcggcagaggagcggtgctgaggaagaatccacagctcgcatccgatttccaatttcaaatccttcgatcgcgcagcgccgcccgccctctcgcagctctctccgatggcccgcacgaagcagacggcgaggaagtcaactggcggcaaggcgccgcggaagcagctggccaccaaggcggcgcgcaagtcggctccggccaccggcggcgtgaagaagccgcacaggttccgccccggcaccgtcgctctccgcgagatccgcaagtaccagaagagcacggagctgctcatccggaagctgcccttccagcggctggtgcgtgagatcgcgcaagacttcaagaccgaccttcggttccagtcctccgctgtcgccgcgctgcaggaggccgccgaggcgtatctggtgggtctctttgaggacaccaacctctgcgccatccacgccaagagggtcaccatcatgcccaaggacatccagctcgcgcgccgcatcaggggcgagagggcctgattgctgctctgtcttcctgtttctgtaatgtctgaactaggcgatggactctatcgcttcttgtcctgcaatcgtgtaccgatgttcttggcaaatcaatttggctgttatgaaaaaaaaaaaaaaaaaaaaaaaagcggcc

SEQ ID NO: 1547 - DNA, 722 bp, Zea mays
  Clone ID: TF_ZmC653_87
ccggccgggaaaaaaaaaaaaaaaaaaaaaaaaaaaaaaaaaaaaaaaaaaaaaccccgcatcccacatcactcatccacagctcgcagccgtattcctgtctcgaatcctctctcgccgctccgatggcccgcacgaagcaaacagcaaggaagtcgaccggcggcaaggccccccggaagcagctggccactaaggctgcgcgcaagtcggccccggccaccggcggcgtgaagaagccccaccgcttccgccccggcactgtcgcgctccgcgagatccgcaagtaccagaagagcactgagctgctcatccgcaagctccccttccagcgcctcgtccgcgagatcgcgcaagacttcaagactgatctgaggttccagtcctccgccgtcgcggcgctgcaggaggccgccgaggcgtacctggtggggctcttcgaggacaccaacctttgcgccatccacgccaagcgcgtcactatcatgcccaaggacatccagctcgcgcggcgcatcaggggcgagagggcttgagcgcccgtcgtgctgctcgtcgttgtagtgttactagaagtagatggtggctttcgtttcgtggcttcgttatcctgtaggagtaatgttctagatgtcttggcttcagtgcaatggactgtgattgctcatttctgaaatttatcaatggacttgttcttgaaaaaaaaaaaaaaaaaagcggcc

SEQ ID NO: 1548 - DNA, 810 bp, Zea mays
  Clone ID: TF_ZmC653_88
tgggtccctcgggccggccggtactgccaatcccccagaaaatcaactcctccccaaatccacgctgccaccaactcgccgtcctccgcgccaagcaccaaagctccgatggcccgcactaaacagacggcgcgcaagtcgacgggcggcaaggcgccccgcaagcagctggcgaccaaggcggcgcgcaagtctgcgccggccaccggcggcgtgaagaagccccaccgcttccgccccggcaccgtcgcgctccgggagatccgcaagtaccagaagagcacggagctgctcatccgcaagttgcccttccagcgcctcgtccgtgagatcgcgcaggacttcaagaccgatctccgcttccagtcctccgccgtcgccgcgctgcaggaggccgccgaggcctaccttgtggggctctttgaggacactaacctctgtgccatccacgccaagcgcgtcaccatcatgcccaaggacatccagctcgcgcgccgtatcaggggcgagagggcctgagcgaggctggctcctctcaccgcaggcggcgtcgttgttgcttcgggcctgcttgtaggacttgtgcttctcttggtttcctttctggtggcagtggcatcttggtaccattgtgcttgttcttagaatcttagggatagagagttgttcagttgctgggtaacctgattgtttatcttgcattcctgcctctgtaatggttgtctgctgtcttaatggaaatgatatttgctttttaaaaaaaaaaaaaaaaaaaaaaaaaaaaaaaaaaaaaaaaaaaaaaaaaaaaaa

SEQ ID NO: 1549 - DNA, 818 bp, Zea mays
  Clone ID: TF_ZmC653_90
cattgggtacctcgaggccggccgggatcactgccaaatcccccagaaaatcaacacctcccaattccacgctgccaccaactcgccgtcctccgcgccaagcaccaaagctccgatggcccgcacgaagcagacggcgcgcaagtcaacgggcggcaaggcgccccgcaagcagctggcgaccaaggcggcgcgcaagtctgcgccggccaccggcggcgtgaagaagccccaccgcttccgccccggcaccgtcgcgctccgggagatccgcaagtaccagaagagcacggagctgctcatccgcaagttgcccttccagcgcctcgtccgtgagatcgcgcaggacttcaagaccgatctccgcttccagtcctccgccgtcgccgcgctgcaggaggccgccgaggcctacctcgtggggctctttgaggacactaacctctgcgccatccacgccaagcgcgtcaccatcatgcccaaggacatccagctcgcgcgccgcatcaggggcgagagggcctgagcgaggcgagctcctctcaccgcaggcgggcgtcgttgttgcttcgggcctgcttgtaggacttgtgcttctcttggtttcctttctggtggcagtggcatcttggtaccattgtgcttgttcttagaatcttagggatagagagttgttcagttgctgggtaacctgattgtttatcttgcattcctgcctctgtaatggttgtctgctgtcttaatggaaatgatatttgctttttaaaaaaaaaaaaaaaaaaaaaaaaaaaaagaaaaaaaaaaaaaaaaaagcggcc

SEQ ID NO: 1550 - DNA, 682 bp, Zea mays
  Clone ID: TF_ZmC653_91
cattgggtacctcgaggccggccgggacacacgcgaatcctcaaatctgcccttgccgccgccactgcccgatccaggtgtgcagactgctccctcctcctctccgctccgaatggcccgcacgaagcagacggcgcgcaagtcgaccggcggcaaggcgccgcggaagcagctggccaccaaggcggcgcgcaagtcggccccggccacgggcggcgtgaagaagccgcaccgcttccgccccggcaccgtcgcgctccgcgagatccgcaagtaccagaagagcacggagctgctcatccgcaagctccccttccagcgcctcgtccgcgagatcgcgcaggacttcaagacggacctgcggttccagtcctcggccgtggcggcgctgcaggaggccgcggaggcgtacctggtggggctcttcgaggacaccaacctctgcgccatccacgccaagagggtcaccatcatgcccaaggacatccagctcgcccgccgcatcaggggcgagagggcttgagctgtcgcgctgctgctgttcgtcgttgtaatgtctgaagtagatggtggtgggtgctttctatgccgtgcctatttggctatttcggacgtgttggttcactgaatggaaaatggaatgccatttctcgtcagaaattaacgatgactttttacctgc

SEQ ID NO: 1551 - DNA, 741 bp, Zea mays
  Clone ID: TF_ZmC653_93
cattgggacctcgagccggccgggacacacgcgaatcctcaaatctgcccttgccgccgccaccgcccgatccaggtctgcagactgctccctcctcctctccgctccgaatggcccgcacgaagcagacggcgcgcaagtcgaccggcggcaaggcgccgcggaagcagctggccaccaaggcggcgcgcaagtcggccccggccacgggcggcgtgaagaagccgcaccgcttccgccccggcaccgtcgcgctccgcgagatccgcaagtaccagaagagcacggagctgctcatccgcaagctccccttccagcgcctcgtccgcgagatcgcgcaggacttcaagacggacctgcggttccagtcctcggccgtggcggcgctgcaggaggccgcggaggcgtacctggtggggctcttcgaggacaccaacctctgcgccatccacgccaagagggtcaccatcatgcccaaggacatccagctcgcccgccgcatcaggggcgagagggcttgagctgtcgcgctgctgctgttcgtcgttgtaatgtctgaagtatatggtggtgggtgctttctatgccgtgcctatttggctatttcggacgtgttgtcctcactgaatggaaaatggaatgcgattgctcgtctgaaattaacgaatgactttttacctgctaaaaaaaaaaaaaaaaaaaaaaaaaaaaaacccaaaaaaaaaaaaaaaaaggccccta

SEQ ID NO: 1552 - DNA, 742 bp, Zea mays
  Clone ID: TF_ZmC653_94
cggagtacccgatccacatactcatccaagctcgcagccgtattcctgtctcgaatcctctctcgccgctccgatggcccgcacgaagcaaacagcaaggaagtcgaccggcggcaaggccccccggaagcagctggccactaaggctgcgcgcaagtcggccccggccaccggcggcgtgaagaagccccaccgcttccgccccggcaccgtcgcgctccgcgagatccgcaagtaccagaagagcactgagctgctcatccgcaagctccccttccagcgcctcgtccgcgagatcgcgcaggacttcaagactgatctgaggttccagtcctccgccgtcgcggcgctgcaggaggccgccgaggcgtacctggtgggtctcttcgaggacaccaacctttgcgccatccacgccaagcgcgtcactatcatgcccaaggacatccagctcgcgcggcgcatcaggggcgagagggcttgagcgcccgtcgtgctgctcgtcgttgtagtgttactagaagtagatggtggctttcgtttcgtggcttccttatcctgtaggagtaatgttctagatgtcttggcttcagtgcaatggactgtgtttgctcatttctgaaatttatcaatggacttgttcttgcaaagatttgtgtttcttacttttgtaagacgtcgagcactgattgtaaatgtactagtaaaacaatttcatttcaaaaaaaaaaaaaaaaaaaaa

SEQ ID NO: 1553 - DNA, 898 bp, Zea mays
  Clone ID: TF_ZmC653_95
attgggtccctcgaggccggccgggaccggccaccgcgaagccagagccccacgccccgtccgaactccgaaccccagaacagagcaaagcctcctcggcctccctgtccccagccttccccgatggcccgcacgaagcagacggcgcgcaagtcgacgggcggcaaggcgccgcggaagcagctggcgacgaaggcggcgcgcaagtcggcgccggcgacgggcggcgtgaagaagccgcaccgcttccgcccgggcaccgtcgcgctgcgcgagatccgcaagtaccagaagagcacggagctgctgatccgcaagctcccgttccagcgcctggtccgcgagatcgcgcaggacttcaagacggacctccggttccagtcctccgccgtcgccgcgctgcaggaggccgccgaggcctacctggtgggcctcttcgaggacaccaacctctgtgccatccacgccaagcgcgtcaccatcatgcccaaggacatccagctcgcgcgccgcatccgcggcgagcgcgcctaggcggttcggttgcggcgcctgctcgctactgatggaggtgcttagtttagcacgtcatggttgtgttataggtgtgcgttgttgttttcaagaggtagcttcttgctatgtgctgatgttaacggtggattatgattagcagttctgaaaaaaatgtaatggatgtgatctgctctatctacatgttttctgtctttgtcctggaatcccatggtgtttagcattgatttcacatgtcttgtttttctctgaatcctgcttgtaatgacatcgacatctgttacacgatctgcttcaatttgtttttaaaaaaaaaaaaaaaaaaaaaaaaaaaaaaaagaaaaaaaaaaaaaaaaaagcggcc

SEQ ID NO: 1554 - DNA, 700 bp, Zea mays
  Clone ID: TF_ZmC653_97
aaaaaaaaaaaaaaattccaacgcggcacagagcctcattcatctccattcgaaacaccctcgcacccacactctcccttcgtccccagcctaaatccccgcaacgatggctcgcacgaagcagacggcgcgcaagtccacgggcggcaaggccccgaggaagcagctggcgaccaaggcggcgcgcaagtcggcccctgcgaccggcggcgtgaagaagccgcaccgcttccgcccgggcaccgtggcgctgcgcgagatccgcaagtaccagaagagcacggagcttctcatccgcaagctgcccttccagcgcctggtccgcgagatcgcgcaggacttcaagaccgacctccgcttccagtcctccgccgtcgccgcgctgcaggaggccgccgaggcctacctcgtcggcctgttcgaggacaccaacctctgcgccatccacgccaagcgcgtcaccatcatgcccaaggacatccagctcgcccgccgcatccgcggggagcgcgcctaggcggccggccggataggccgtggcccgtggcgcaggctcttctcggaagtttgtactagtggtcgggtcgtgtggaaggagtggtgtactgatcagcaatgtctcaaaccatgtcaacctctttgttgtcatcaatggaaatcgccacttatgtgtgttaaaaaaaaaaaaaaaaaagcggcc

SEQ ID NO: 1555 - DNA, 812 bp, Zea mays
  Clone ID: TF_ZmC653_98
cattgggtacctcgaggccgggccgggctcaccggccaccgcgaatccagagccccacgccccgtccgaaccccagagcagagcaaagcctcctcgacctccctgtccccagccttccccgatggcccgcacgaagcagacggcgcgcaagtcgacgggcggcaaggcgccgcggaagcagctggcgacgaaggcggcgcgcaagtcggcgccggcgacgggcggcgtgaagaagccgcaccgcttccgcccgggcaccgtcgcgctgcgcgagatccgcaagtaccagaagagcacggagctgctgatccgcaagctcccgttccagcgcctggtccgcgagatcgcgcaggacttcaagacggacctccgcttccagtcctccgccgtcgccgcgctgcaggaggccgccgaggcctacctggtgggcctcttcgaggacaccaacctctgtgccatccacgccaagcgcgtcaccatcatgcccaaggacatccagctcgcgcgccgcatccgcggcgagcgcgcctaggcggttcggttgcggcgcctgctcgctactgctggaggtgcttagtttagcccgtcatggttgtgttataggtgtgcgttgttttcaagagtaggcttcttgctatgtgctgatgttaacggaggattatgattagcagttctgaaaaaatgcaatggatgtgatctgctctatctacatgttttctgtctttgtcctgaaatcccatggtgtttagcattgatttgacatctgttacacgacctgcttgactgcttcaaaaaaaaaaaaaaaagcgggc

SEQ ID NO: 1556 - DNA, 684 bp, Zea mays
  Clone ID: TF_ZmC653_99
gatcgtggaatataggagcgagcaatccacagctcgcatccgatttccaatttcaaatccttcgatcgcgcagcgccgcccgccctctcgcagctctctccgatggcccgcacgaagcagacggcgaggaagtcaactggcggcaaggcgccgcggaagcagctggccaccaaggcggcgcgcaagtcggctccggccaccggcggcgtgaagaagccgcacaggttccgccccggcaccgtcgctctccgcgagatccgcaagtaccagaagagcacggagctgctcatccggaagctgcccttccagcggctggtgcgtgagatcgcgcaagacttcaagaccgaccttcggttccagtcctccgctgtcgccgcgctgcaggaggccgccgaggcgtatctggtgggtctctttgaggacaccaacctctgcgccatccacgccaagagggtcaccatcatgcccaaggacatccagctcgcgcgccgcatcaggggcgagagggcctgattgctgctctgtcttcctgtttctgtaatgtctgaactaggcgatggactctatcgcttcttgtcctgcaatcgtgtaccgatgttcttggcaaatcaatttggctgttatgaatgtgattcagtgatttgatttaaaaaaaaaaaaaaaaaaaaaaaaaaaaaagcggcc

SEQ ID NO: 1557 - DNA, 709 bp, Zea mays
  Clone ID: TF_ZmC593337_2
ccggccgggacttctcatccaccaattgtcatcgcaaccaagcctttcgacactctcatccatcacagtctttcagactcacatactccctttttaaccacaaacccccccaaaccacaaaccctccaaaatgactggcggcggcaagtctggcggcaaggcctctggttccaagaacgcgcaatcgcgttcctccaaggctggtctcgctttccctgtcggtcgtgtccaccgtctcctccgaaagggcaactacgctcagcgtgtcggtgccggtgctcccgtctacctcgctgccgtcctcgagtacctcgctgctgaaatcctcgagttggctggtaacgctgctcgcgacaacaagaagacccgtatcatcccccgtcatcttcagcttgccatccgaaacgatgaggagctgaacaagcttttgggtcacgtcaccatcgctcagggtggtgttctccccaacatccaccaaaaccttctgcctaagaagacaggcaagactggcaagacctcaagcatggagctgtaatcgggtcatttggttctgtttttccatgcgatggcaggttgtttcggttgtcatgacaaaggggtcacggtttaagggtttacacggttgcttttcatcagtttattcgcgcgcgtcgggttgtacaataatcccccacggctatggtcatgaaataagaatacttctcagatc

SEQ ID NO: 1558 - DNA, 1354 bp, Zea mays
  Clone ID: TF_ZmC20163_2
agagcacggagctgctcatccgcaagctgcccttccaacgcctggtccgcgagatcgggcaagagttcaagaccgacctccgcttccagtcctccgcgtcgccggctgcaagaggggagattgataccattttcgttggagaatcaggttcgcaaatgcgcgactctgcactgagtttaacaaaatgcttagcacaaacagcacaaaagactttcagtgattttgaagaagctgttgaaaaggatgcaacaaagaatattcatactgatggaacagttcatcctttaacaagctatgtgatcaactatgttaagtttttgtttgactaccagtcaactctaaagcagcttttccaggagttcaaggaagatgggacaggttctgagctggcagctgtaacaatgaaaatcatgcaagccttacaaaataatttagaagcaaaagcaaaacaatacaaggatcctgcattgatgcacatatttttgatgaataacattcactatattgtcaaatctgtccgcagatcagaagccaaagatttgttgggtgatgactggattcaaaggcaccgaaggattgtacaacaaaatgccaatcagtatagaaggattgcttgggcgaaggtgttgcaatgcctctctggtcaaggtttgacttcatcaggtggtagtggtcatgtaggaagtgatggtggcaatagcagtggagcttcaagaacagctgtgaaggagagattcaggtctttcaatgtgttgttcgaagagatctaccacaagcaatgtggctggtccgttccagacactgagctgcgcgagtcactaagactcgcggtcgctgaaatcctgttgcctgcctaccgatcattcataaaacgttttgggcctctcattgagaatagcaaagcacctgggaaatacgtgaagcacactcccgagcaactcgagctgctgctaggcaatttattcgaggggaaacaagaacgtgcttgatagtttggtaccgcccgcagcaaggatgtgctgctcttctatgtaaaatacaaaataataaaaataaaaaagatctggaggccctgttagcgttagcattgcttgtgttctccccgtgggagtcaagtatacagctgatgtggcgccaatccttgtttagccgcattattatttgtacagaagaatatatgtgtcagctgtgccttgtgttgatctgatagcaggcgtgttcctggtttctttaatgactggcgacccatctgtagtttttgagatagaaaaatacttccccctcgtcaaaaaaaaaaaaaaaaaaaaaaaaaaaaaaaaaaaaaaaaaaaaaaaaaaaaaaaaaaaaaaaaaaa

SEQ ID NO: 1559 - DNA, 378 bp, Zea mays
  unsure (1)..(378): unsure at all n locations
  Clone ID: TF_LIB3357-001-P1-K1-H12
agcaaccttgcgctcaaacaagaattcacggcctacccaatctattcaagagggagccctattcggataccgacgtcgtgttctaaaggcgcccaaaggcctgaagaagcctgnccgaccgaaacctgcgggggaggagcaccggggggagaaggccctggcggagaagaatcccactgccgagaagcgtgtccctgcgaccaagtccaggtgcaaggaggctggcaagaacaagggctagaagaaggcgaagatgtcggtggagacgtacaagacctacatcttccaggtgctagggcatgcgcacccggatatcggcatctggctcaaggccatgatcatgatgaactccttcatcaacgacatctttgagaatat

SEQ ID NO: 1560 - DNA, 701 bp, Zea mays
  Clone ID: TF_LIB4762-134-Q1-K1-D11
tcgagccggccaggaatatggtcacgtaaaacactagtttactttatattgtagaatatagttttttttaagtcaagagtcaagtttaaaatagaggataacataagtaatagaataaaaaactgctatagacagtttagtggggttcttctttattaaaaagtcaaatatatttattttaaaaaaaaaaaaaaaaaaaaaaaaaaaaaaaaaaaaaaaaaaaaaaaaaaaaaaaaaaaaaaaaaaaataccccgaatcccaaatcattcatccaaagttcgaagccgaattccggtctcaaatcctctctcgccgttccaagggcccgcacaaagaaaacagaaaggaagtcaaccgggggaaaggccccccgaaagaagttggccacaaaggttgggcgaaagtcggccccggccaccggggggggaaaaaagccccaccgtttccgccccggaattgtcgggctccgggaaatccgcaagaaccaaaaaagcactgagttgctcatccgaaagttccccttccagggcctcgtccggaaaatcgcgaaaaacttcaaaactgatcgtgaggttccagttcctccggccgtcgcggggttgaagaaggccgccaaggcgaacctgggggggttcttcaaggacaccaacctttgcgccatccacgccaagggggtcattataatgcccaaggacatcca

SEQ ID NO: 1561 - DNA, 477 bp, Zea mays
  Clone ID: TF_LIB3689-232-Q1-N6-A8
cccacaacagggccataaaatctaaagaggcccattacaacccggccccccggattaatagagcaggcaacctacctcctaggcgggtagggggggggactgggaaaaggacccaaaaaaaaacccttttaaaaaaccccgggaccccccaacccccccagttgctgggaaacttggggacggccttggttccctcgaaaacggggtgcttggcaagccctccggggaggacaaggcccccggaggtctgaatcccccggaacggaagggggggctttttgttgaacccccccagtttgggggcctccccggccagtttttaaaaaatgcctttgataaaggagttcataagggacatggccttggagaatatccccatgtgggggggccccttcttaaacaccttaaaaaaggaaatcttgaaggcctccaccctttttttggccttttttttcccctttttttcccccccctcct

SEQ ID NO: 1562 - DNA, 287 bp, Zea mays
  Clone ID: TF_700346422H1
attcctcccatctcacaagaactcctcagacccgagaagcgcaatgcggacatggacgacaccggcactggagctggagggaaggcgaagaagggagcggccggtcgcaaggtcggcgggccgaggaagaagtcggtgacgaggtccgtgaaggccgagctaccgttccccgtcggccgcatcgggcgctacctcaagaagggccgctacgcgcaggcgtacggcagcggtgcacacgtctaactcgcggacgtcctggagatactcgccgctgaagtcctggagct

SEQ ID NO: 1563 - DNA, 454 bp, Zea mays
  Clone ID: TF_LIB3689-237-Q1-N6-G2
gccccagcggcaaacccaaaatttggaacaaaagggaccaacaacaaaggggtggggggggggagggaaacaagcccttgctagggtacatgacccaattcctacaaaaacaaagcagcgcccacagaaaaaccagcaacatttaactacaacacaaggggaacatcaacccaagaaaagcccacaaagggcgagcgggcaagcctaggaggaggggaacttggggaccgccttggggcccccaaaaacggggtgcttggcgagctccccggggagcaccaggcccacggaggtctggatctcgcgggaggggaaggggggctttttgttgtaacgcgcgaacttgggggcctccccggccaccttttcaaaaatgtcgttgatgaaggagttcatgatggacatggccctggaggaaatgcccatgtccgggtgcacctgcttcaacaccttg

SEQ ID NO: 1564 - DNA, 631 bp, Zea mays
  unsure (1)..(631): unsure at all n locations
  Clone ID: TF_LIB4569-012-Q1-K1-G3
ccgggccctagccaccgcatcgtcgccctcaaattcgttccttccaggcaaggaagaaatcgagcagccaaggagaggagaagatggctcgtacgaagcagaccgcccgcaagtccaccggaggcaaggccccgcgcaagcagctcgccaccaaggcggcgaggaagtctgcgccgacgaccggcggcgtgaagaagccccacaggtaccaggcccgggacggtggctctgcgcgagatccgcaagtaccagaagagcacggagctgctgatccggaagttgcccttccagcgcctggtccgtgagatcgctcaggacttcaagacggatctgcggttccagaagccacgccgtcctgccctcnaaagaagcccgccgaggcctacctcgtcggcctgtttcgaggacaccaacctctgcgccatccacgccaagcgcgtcaccatcatacccaaagacatccagctcgcccgccgcatccgcggcgagcgcgcgttangcgtatctcgcgcccggccccagtggcggcggagggattggaagaaggcaaatttgtaaccttatgcntgtttgttcgctttagacgggcgtgggtgaagaactagtgtaaaaacggctntaaagtctattt

SEQ ID NO: 1565 - DNA, 411 bp, Zea mays
  unsure (1)..(411): unsure at all n locations
  Clone ID: TF_511379
ctcgcaagtccacgggagggaaggctcccaggaagcagcttgcnaccaaggctgcccgtaagtttgcccccaccactggtggagtgaagaagcctcaccgctaccgccctggaacttttgccctccgtaagatccgcaagtatcagaagagcactgagctgctgatcaggaagctgcccttccagaggctcgtaagggaaattgcacaggacttcaaaactaatttgcntttccagagccatgcggtgcttgccctccaggaggctgctgaggcataccttgttggcctgtttaaggacaccaacctgtgcgcatccatgctaagcgtgtnnccatcatgccaaaggaccattcagcttggcaaggnaggttccgcggcgagagggcctaatcgcacctgtaaacaatcgt

SEQ ID NO: 1566 - DNA, 459 bp, Zea mays
  unsure (1)..(459): unsure at all n locations
  Clone ID: TF_LIB3067-008-Q1-K1-H9.R2
tcctgcccgccaaggcatggcgcgcgaggggaaagaggggcccgcaagaagggcaagaagagcgtggagtacctactagatctacatcttcaacgtgctgaagcaggtgcacccggacatcggcatctgctttaaggccatgtccatcatgaactccttcatcaacgacatcttcgagaagctcggcgccgaggccgccaagctcgtgcggtacaacaagaagcccaccatcacctgccgtgagatccatacctccgtgcgcctcgttctccaaggtgagctcgccaagcacgccctcttccagggcaccaagggccgcaccaagttcacctcgttctaagctgcgtgtgctccgcttggaggcttccctcgtatgntcgcgtgtcttgctgcacttaggtgctgctgtgtgtggtctcctccggtagcgactgttatctgatgggacagtgacaatgc

SEQ ID NO: 1567 - DNA, 618 bp, Zea mays
  Clone ID: TF_LIB4665-006-R1-N1-F6
actaccaagattaatattttaaaaaacttcaacaggggtaacctgattcattcagcaattataacaaattctacattggtgcacaaacaacctaacacagccctaaatatgaaaaaatttaacaacgggcgggggggggggccccctaaaaggatgtaaacttggaaaccgccttggccccttcggaaacggggtgcttggcaagctccccggggaggacaaggcccaccgaggtctggatctcccgggaggggatggggggctttttgttgtaacgggcaaacttggctgcctcggggggaagcttctaaaaaatgtcgttgatgaaggagttcatgatggacatggccttggacaaaatgccaatgtccgggggcccctgcttgagcaccttgaaaatgtaaatcttgtacgtttcgacgctttttttcgcctttttttttccctttttttcgccgccctccttgctcggaacgcgcttttccgcccttggttttttttcggccttctcctccgccggttttttctccgggggctttttctcggccttgggcgccatcaggaatcgatcaaatggggcccaaaaaattgggggaaggggcggcttggaaatttgct

SEQ ID NO: 1568 - DNA, 698 bp, Zea mays
  Clone ID: TF_LIB4742-061-R1-K1-F2
tgggtacctcgaggccggcctgggctagtatatcatcgtcgtcctcagattcgttccgttcaggcaaggaagaaatcgagcagtcaaggagaggagaagatggctcgtacgaagcagaccgcccgcaagtccaccggaggcaaggccccgcgcaagcagctcgccaccaaggcggcgaggaagtctgcgccgacgaccggcggcgtgaagaagccccacaggtacaggcccgggacggtggctctgcgcgagatccgcaagtaccataagagcacggagctgctgatccggaagttgcccttccagcgcctggtccgggagatcgctcaggacttcaagacggatctgcggttccagagacacgccgtcctgaccctccaggaagtcgccgaggcctacctcgtcggcctgttcaaggacaccaacctctgcgccatccacgccaagtgcgtcaccatcatgaccaaagacatccagctcgcccgcctgatccgcggcgagagcgcgtaggcgtatctcgcgcccggacccactgtcatcgcagggatggaggaggtgaatttgtaactttatgctgtttgttcgcttttagaccgtgtgttgaacaactagagtataaacggctttagagtctattatgcgcgatagttcgtgtaggtcgcttcctcgcgaagtgatcttgagataacacttattcg

SEQ ID NO: 1569 - DNA, 722 bp, Zea mays
  unsure (1)..(722): unsure at all n locations
  Clone ID: TF_LIB4764-133-Q1-K1-E5
cctcgaggccggccgggagaacgatctcaatctccctagcaatctctagcagcagatcctcgtgcgaagcaaagcgctagcccccttcgtactgtcccgatggcccgcacgaagcagacggcgaggaagtccactggcggcaaggcgccaaggaagcagctggccaccaaggcggcgcgcaagtctgccccggcgaccggcggagtgaagaagccccactgtttccgccccggcaccgtcgcgctccgggagatccgcaagtaccagaagagcacggagctgctgatccgcaagctgccgttccagcgcctggtgcgtgagatcgcccaggacttcaagaccgacctccgcttccgaagctccgccgtcgccgcgctgcaggaggcgtccgaggcctacctcgtcgggctcttcgaggacaccaacctctgcgccattcacgccaagcgcgtcaccatcatgcccaaggacatccagctcgcccgccgtatccgttggggagagggcctaggcgtcgtcccgggggaggtgggaagtagtagtcggccgtttctgtcatcactgtctggctagaaggtgtagagaatgtgccgggttcctgtaagttggggttatcggtcaatcatgaatggaaggttgggtccttccctgctgtaatttaactatgactatgcattggacatggaangttctcggtgaaaaaaaaaaaaaaaaaagcggcc

SEQ ID NO: 1570 - DNA, 804 bp, Zea mays
  Clone ID: TF_ZmC653_36
tcaaaaacccgcatccacagctcgcagccgtattcctgtcttgaatcctctctcgctgctccgatggcccgcacgaagcaaacagcaaggaagtcgaccggcggcaaggccccccggaagcagctggctaaggctgcgcgcaagtcggccccggccaccggcggcgtgaagaagccccaccgcttccgccccggcaccgtcgcgctccgcgagatccgcaagtaccagaagagcactgagctgctcatccgcaagctccccttccagcgcctcgtccgcgagatcgcgcaggacttcaagactgatctgaggttccagtcctccgccgtcgcggcgctgcaggaggccgccgaggcgtacctggtggggctcttcgaggacaccaacctttgcgccatccacgccaagcgcgtcactatcatgcccaaggacatccagctcgcgcggcgcatcaggggcgagagggcttgagcgcccgtcgtgctgctcgtcgttgtagtgttactagaagtagatggtggcattcgtttcgtggcttccttatcctgtaggagtaatgttctagatgtcttggcttcagtgcaatggactgtgattgctcatttctgaaatttatcaatggacttgttcttgcaaagatttgccgtctgttttttacttttggaagacgtcgaacactgattgccgtgcaagcagctgatacgatcccttgtgcaatgttttgatgtaaatgtactagtaaaacgatttgatttcaaataaaaaaaaaaaaaaaaaaggaaaaaaaaaaaaaaaaaagcggcc

SEQ ID NO: 1571 - DNA, 693 bp, Zea mays
  Clone ID: TF_ZmC263912_1
agctccaatctcagagcattccgatccagaccagccgccccccgcatctcgagtagcttccagctcgccggagaggtagcaagcaagatggccggaaggaagggaggcgacaggaagaaggcggtgacccgctccgtgaaggccgggctccagtttcccgtcggccgcatcgggcgctacctcaagaagggccgctacgcccagcgcgtcggctccggcgcccccgtctacctcgccgccgtcctcgagtacctcgccgcagagatgctggagctcgccggcaacgcggccaaggacaacaagaagacccggatcatcccgcgacacctgctgctcgccgtccgcaacgaccaggagctcggaaggctgctcgccggcgtcaccatcgcccacggcggcgtgatccccaacatcaactccgtgctgctcccaaagaagtcccccgccgccgccgagaaggaggccaagtcgcccaagaagaagacctccaccaagtcccccaagaagaaggtcgccgccaaggagtagccgccccatagactacagtcgtgacattgcttaggtccatatcagggagaggatgaggagtttcggttggttgcatcctgtcatcctgtgtgtaattgcctagcccagtaagcgctgtattccatctctaacttatgtccggaatgactaaagatgcaatccttt

SEQ ID NO: 1572 - DNA, 748 bp, Zea mays
  Clone ID: TF_LIB5075-003-R1-XP1-C9
gccggccgggccgggccatcgtcttgatactccacgcccacaacccgctcactcacgccgctccgtccacactcccgtctttttcgactcccacttccaaaaacaacccccaccaaaaaactcattcaaaatgactggcggaaagtccggaggcaaggccagcggctccaagtccagcgcccaatctcgttcatccaaggccggtctcgctttccccgtcggtcgtgtccaccgtctcctccgcaagggcaactacgcccagcgtgtcggtgctggtgctcccgtctacctcgctgccgtccttgagtacctcgctgctgagattctcgagttggccggtaatgctgcccgcgacaacaagaagacccgtatcatcccccgccatctccagctcgccatcaggaacgatgaggagttgaacaagcttctcggacacgttaccatcgcacagggtggtgtcctccccaacattcaccaaaaccttctgcccaagaagactgccaagcctggcaagggtccttcgcaggagctctaagcgcattttgctttcgagtttcttcttcacggcgtggttacttcatgggtctttttcgtctgcaatgataatgggagtcggtctgggttttgggttctcggcttttcacgggatttataccagagctgtatattagctggtcgctttgatgaccacaggctcatgagctgaatcgagcatatcactagaaaaaaaaaaaaaaaaaagccccta

SEQ ID NO: 1573 - DNA, 626 bp, Zea mays
  Clone ID: TF_LIB4766-061-R1-K1-C1
cattgggaccctcgaggccggccggggcctctcccgctacctgaccccgcactcgcgacatcaccaaatcgctcccctcttcccaccagagcaaaggctccctatcggcctgacataacaagccatggcggcgcgcgatgaggccattgcagatgctgtcccgaataaagatatctcccggaccttccaagctggactgcaactaccactcaggaggaatcagcgcacagatcctcaagatcatgaagaaacgcgaacgcatgggacgccgctccccctgtatacctctccgctgacctcgagtacctcgacgcttagggactgcagcttggtgcgaactcagcaaggcataacaaaaatacccgcatcgtgccgcgtatcatccagatcaccacgaccaacaacaagaagctgaccaaattgcttggtgcagccaccatcaccagcggtcgcagtatgcctcaacatcgcaccaggagctcctctccaacaacgctggctcgtccaacgcctccaccgtcgatgaccatcacaactgaagctgaccactgtagaagaggcatccactaccgtcttgtgtcctatgataccacacagatagtcagcatgtctttgagagctcgatg

SEQ ID NO: 1574 - DNA, 394 bp, Zea mays
  unsure (1)..(394): unsure at all n locations
  Clone ID: TF_LIB3076-002-Q1-K1-A4
atcttacgtccccaaatcgaccgagcgaattcaccacagcttctcaccaccgctaccttcgatggcacccaaggcggacaagaagccggcggcgaagaagcctgcagaggaggagcccgcgacagagaaggcggagaaggctccggcggggaagaagcccaaggccgagaagcgcctcccggcgagcaagtccgccggtaaagagggcggcgagggcaagaaggggaaaaagaaagcgaagaagtccgtggagacctacaagatctacaatctcaaagggctgaaacangtgcaccccgacattggcatttcgtgcaaaggcatgtccattatgaacttctttattaacgacattttcgagaaactcgcgggcgaatccggcaagctggcgcgc

SEQ ID NO: 1575 - DNA, 426 bp, Zea mays
  Clone ID: TF_LIB4979-087-A1-K1-C7
gggcggggggggggtactccctaaattgcgcgtgcgatccaactcctgaacactttctcctcggccccgacagggcaagccaacccgaaatacggacatgaactccagcggcaccgaaactagggataaggagaataagggagcgtgcgtagcacaacggcggcgtcacaatgaacaattcggcgtcgaggtccgtgagcgcggcgctccagttccacggcggacgtatcgggagctacttgaagaagggccgctacgcgcagcggggcggaaccggagccccctactacctcgccgctgccatcaaatacctcatcgctgaggttctgcagctcgctgagaatgctggcaggtacaacaggaacactggcatgattgcccgccacgtgcgttctggcgatccgaaatgacgaggagcttgggaag

SEQ ID NO: 1576 - DNA, 458 bp, Zea mays
  Clone ID: TF_LIB3067-019-Q1-K1-C12
ttcccggtcgaccactcgtctcgcccactcgttcgcccactcgttcgctgacgcttttgctgacgcgtgggaaaacacttaagcggataaggcatacaaggaccggaacaagctaagcagctgaagaagccagcagaggaagagctcctgtcactagaaggcaccctactggaagaagcctaaagctgataagctggtcctctctggcaagtccagctgtcaaggagtacgtcaaggtcaagaggggcaagaagaagggcaaaaacagcgtgtagacctacaagatctacatcttcaaggtgctgaatcacgtgcacccagacattggcatctactccaaggtcatatctatcatgaactccttaattaacgatatcttcgagaagctcgatgctgaggccgtcaagctcgcgcgctataacaagaagcctaccatcacactccttgagatccatacc

SEQ ID NO: 1577 - DNA, 286 bp, Zea mays
  Clone ID: TF_LIB3067-056-Q1-K1-F12
gcaatctctaccaccaaatcctgttccgatccaaaccccttgcccctttgtacctgtccggttggcccgaccaaaccaaccggcaagaaattcaattgccggaaagcccccaaggaaccacttgcccacaaagcgcggccccaatgttgcccgggacaccggcagattaaaaaacccaccgttttcgccccggcaccgtctcgctccgggagatacgcaagtaccagaagagcacggagctgctgatccgcaagctgccgttccagcgcctggtgcgtgagatcgc

SEQ ID NO: 1578 - DNA, 550 bp, Zea mays
  unsure (1)..(550): unsure at all n locations
  Clone ID: TF_LIB4732-093-Q1-K1-H8
tcctccacctgccgcctcgtcgacgnngttgagagagagctagaaagcgggagagatgagctcgcatcaaggagactgctcggaagtccgacgggagggaaggctcccaggtaagcatgttgccgccgagggtgcccgtaagtctgcccccaccactggtggagggaagaagcctcaccggtaccgccctggaagtgttgccctccgcgagatccgcaaggatcatagagagacggaggtgttgatcaggaagctgccctgtccgaagcctcccccgggaatttgcagaggacttcagaactgattggcgtttccagaggcatgcgaggatgcccctccagggggtggtgaggcacaccgtggtctgctgtgaggagaacaacgagatgtggcgcatggcctgcgtctggggtgatcatgatggcgaaggacatttatctgaggaaggaggatccgcggacagaatacctaatcgctccgtcagacgtggggacaaagaagatgaagccctgcgggtattgttaatcccctggcgttgtagggacatatg

SEQ ID NO: 1579 - DNA, 746 bp, Zea mays
  Clone ID: TF_LIB4729-031-R1-K1-A12
ggggtaccctcgggttcggccgggttgcacaggctcgcattcgatttcccatgttatatccttcgatcgtacagtgccggccgctctcacgcagctctctgcgatggcgcgcacgaagcagacggcgaggaagtcgaccggctggcaaggcgccgcggaagcagctggccaccaaggcggagcgaaagtggggcccggacaccggctggcgtgaagatgccgcacaggtttcgccccggcaccgtcgcgctccgcgagatccgcacgtaccagaagagcacggagctgctcatgcggaagctgcccttccagcggctgatgcgggagatcgcgcaggacttcaagaccgacctgcggttccagtcctccgccgtcgcctgcgctgcaagaggccgccgaggcgtacctggtgggtctcttcgaggacaccaacctctgcgccatccatgccatgagggtcaccatcatgcctaaggacatacaactcgcgcgccgcgtcaggggcgagagggcctgattgctgctctgtctttctggttctgcagtgtatgaactaggggatggaatctatcgcttcttgtactgcaatcgtgtatctgatgtctctaggcataatcattgttggctgatatgaatgtgactcagtgctttgattcgaaaaaaaaaaaggatggaatgggatcttgcactccatggttgaggtgcctttatcgagggataacagcgcgcttggcgtatcatggtga

SEQ ID NO: 1580 - DNA, 864 bp, Zea mays
  unsure (1)..(864): unsure at all n locations
  Clone ID: TF_LIB4758-088-R1-K1-D11
cattgggaccctcgaggccggccggggtctagtccagctaacgatccgcgcctttcgcgaaacagcccatcacggctcagggcacagccggctcggtccgcaccttctcgcccggcgcgcgccatccgatccatctggtccgcggtcatctgtcagtttgtttgcgcgaaaaaggtgaggaatcctcttgtgtcctggccgttggccgtcgctgcgtcgttccagatttggggaaggaaatccggcaccgagattcgagtcgaaaagatggcgcgtaccaagcagaccgctcgcaagtccactggaggaaaggctcctaggaagcaactcgctacaaaggcagcccggaagtctgcacccacaactggaggagtgaagaagcctcaccgttaccgcccagggactgttgctcttcgtgagatccgcaagtaccagaagagcactgagttgctgattaggaagctgccgtttcagaggcttgtcagggagattgctcaggatttcaaggtaggtgaaagcactgaaacctcacatgcgggaattatgggatatccatggaatggaagaccgatctgcgcttccagagccatgccgtgcttgctctgcaggaggcagcagaggcctacctggttggtctcttcgaagataccaatctgtgcgcgatccatgccaagcgcgtgaccatcatgcccaaggacattcagcttggcaagaaggatccgtggcgagnagggcgtaagtctgtcgacgggaggaagactctgcgctcgttttgtgtgtcgctctctcaccctgtagttttgtgagaaatgatctagtaactgtacttgggctgnttgactgtagccgcagtacatatgcatg

SEQ ID NO: 1581 - DNA, 576 bp, Zea mays
  Clone ID: TF_LIB4829-021-R1-N1-G8
ccggccgggaaactgccaaggttatcttccgttctcataccaacctaaggaattttccgcaggctctcaccctcaagagtcccgacctcccgtagccggcggacagatgcgacccaaggaggagaataagccgtcgcacaagaagcccgctgcgaggaggagcaccgtgacagagaatgtggataaggctccggcgcaagtataagcccatatgcgagaagtgcctcccgttggccatgctaatagtaggcgctgagggcaaaaaggctaaaaataaatgcgaagaaggccttggagacctacatgatcatacatcttcaatgcgctgtagcaggtgcaccccgacatcggtatctcgtccgaggtgatgtccatcatgaactccttcatcaacgacatcttcgagaagctcgcgtgcgagtccgccaagctgtggcgctacaaccagaagaccaccatctcctcccgcgagatccagacctcggtgcgcctcgtcctcctccgtagagctcggcaagcacgtcgtctccgactgcactaaggccgttacgaagttcacctcgtcttaagatcctt

SEQ ID NO: 1582 - DNA, 567 bp, Zea mays
  unsure (1)..(567): unsure at all n locations
  Clone ID: TF_LIB4730-131-A1-K1-E1
attcgtcaaactcgtttcactttctcctcgtccccgacaagccactcgaagccgnnatacggccatggactccaccggcaccagagcagcggggaaggntaagaagagagcggccaggcgcaangtcggcaggccaaggaaagaagtcgtgtcgaggtcccgtggggctgggctccagttccccgtcggccgcatcgggcgctacttgaaagaaggccgctacgcgcagcgtgtcgncaccggcgcccccgtctacctcgccgctgtcctcgaatacctcgccgctgnagttctgganctcgccggtaatgctgcccgggacaacaaaaagctcgcattattccgcgccacgtgcttctggcgatccggaacgacgnagagctcnagaagctgctgggcagcgtgaccatcgctcacggaggtgtgctccccaatatcaaccctggttctgcttcccaananagacggnagagaaggcgtccagtgncgagatgaagggaggcatagtcgcccaagagggcccccaattcccctaagaaggcataaccgactgtccggaagtgatct

SEQ ID NO: 1583 - DNA, 354 bp, Zea mays
  unsure (1)..(354): unsure at all n locations
  Clone ID: TF_700349182H1
tcatcgcgagtctccagctaccgcatcaaatcnacncncatccncgtcgaccccgacaaacncgacccgatggcgctcaaggccgagaagaagccagcggagaagaagccggcggccgaggagaaggcggagaagacgaccgcacgtaagaagcccanttccgagaagcgcttgccggcctcgaagtcctccggcaaagatggcggcgagaatgaagggaagaagaaggccaagaagagcgtggagacctancaaatctacatcttcaaggtcctgaagcangtgcaccccgacatcggcatctcctccaaggccatgtcgatcatgaactccttcatcgacgacatattcgag

SEQ ID NO: 1584 - DNA, 548 bp, Zea mays
  Clone ID: TF_LIB3969-012-Q1-K1-H12
gtcgaccccgcgttcggtcctggctttttccttgcgcccgtttgcctatttctgtctcgatcgaggccgttggctcccatggccgggcaagtaatccctcggcgtaataagccggcggcggaggagcccgggccgttaagcgaccggcgggagagcccaggcggggaagcggttcctcgctgtcaagtccttcggctggtggggggggggggcaaccttggcaagatagtatgggcaagaagagcgtggtgacgttcaggatctacattttcgaggtgctggatcatgtgctcccggtcatcggtgtttcctccaaggccttgtccattatgaactccttcatcaacgacatcttcgagaagctggccggcgaggccgcctagctcgcgcgctttctcttgaagcccaccatcacttcccgcgagatccagaccttcgtgcgcctcgtgctccccggcgagcttgcccagcacgccgtctctgggtggcccaagggcgtcaccaatttcacttgcttctaggcttgcacgcttgccctttgtaggctt

SEQ ID NO: 1585 - DNA, 386 bp, Zea mays
  Clone ID: TF_LIB3088-042-Q1-K1-B9
cggacgcgtggggctcgtacgaagcagacttcccgcatgtccaccggaggcaaggccacggcgcaagcgagctcgccaccaaagctgcgaggaagtcggcgccgacgaccggcggcgtgaagaagccccacaggtacaggtccggcaccgtggcattgcccgagatccggacgtaccacaagagcaccgagctggtcatccggaagttgaccttgcagcgcctggtccttgagatcgctcaggacttcaagacggatcttcgggtccagagccacgccgctctggccctccaggaagacgccgaggcctacatcgtcggtgtgttctaggacaccaacctctgcaccatccacacctagcgcgtgaccatcatgcccaacgacatt

SEQ ID NO: 1586 - DNA, 766 bp, Zea mays
  unsure (1)..(766): unsure at all n locations
  Clone ID: TF_ZmC369_40
gccggcctggtccgggaacatcttcataacccagtcggcaggcgtgacccgatgctctctcgtcgtcggatcgtcgccaccgtctcctccgcgtcgtctacaccgacatggacgaccggcagtatgccggactgaccaaggcaggtttgggcgtgctggccttcaactcgggcctcgccatctacaactcctggggcgacgcgagctccgtcgcgttcgtgctctccgcggactccatcctcgtgctgctcttcctctgcctccgtgagctggagctgcaggggcggccgngggacgtcgtcaggggccatgtccatcatgaactccttcatcaacgacatcttcgagaagctcgccggcgaggccgctaagctcgcccggtacaacaagaagcccaccatcacctcccgcgagatccagacctccgtgcgcctcgtcctcccaggagagctcgccaaacacgccgtctccgagggaaccaaggccgtcaccaagttcaccagcaattgagcagcctgcagcgtccacggatttgttaggtctccccttcttacaagggttcttcgtcgtgtcctctacccctccccctccccgcctatgtatgtgctgtgaaattgttgatgttctcgtcgggtgaacaaaggccagtagctagcttgcctgcttcataaatcgtgccggattgtaatgggcctcttagatttgacgcccctgttttggaatatagttgtatccgtgccaaaaaaaaaaaaaaaaaaggccccta

SEQ ID NO: 1587 - DNA, 852 bp, Zea mays
  Clone ID: TF_ZmC653_45
tagccaccgcatcgtcgccctcaaattcgttccgtccaggcaaggaagaaatcgagcagccaaggagaggagaagatggctcgtacgaagcagaccgcccgcaagtccaccggaggcaaggccccgcgcaagcagctcgccaccaaggttcgtctctacctacccgtaccgatctgctgttccgatcccctcgatggttcccgttgtaagacggcgctgacgcggcggcggttgttgtttcgttgcaggcggcgaggaagtcggcgccgacgaccggcggcgtgaagaagccccacaggtacaggcccggcaccgtggcgctgcgcgagatccgcaagtaccagaagagcacggagctgctcatccggaagttgcccttccagcgcctggtccgtgagatcgctcaggacttcaagacggatctgcggttccagagccacgccgtcctggccctccaggaagccgccgaggcctacctcgtcggtctgttcgaggacaccaacctctgcgccatccacgccaagcgcgtcaccatcatgcccaaagacatccagctcgcccgccgcatccgcggcgagcgcgcgtaggcgtatctcgcgcccggccccagtggcggcggagggatggaggagtgcaatttgtaactttatgctgtttgttcgcttttagacggcgtggcgaagtagtgtaaaaacggctttacaagtctattttgtgtggtagttcgtgtaccgcttcgtcccgaagcgatcttggtaaaagactgatgattcgtgttgccaaacgacacaattcgtattttttttgtgtgccgtgtagaacacggtttgttgttattggaatggttccccg

SEQ ID NO: 1588 - DNA, 603 bp, Zea mays
  Clone ID: TF_LIB4729-138-A1-K1-A10
taccggtcaccgcgaagccagagccccacgccccgtccgaactccgaaccccagaacagagcaaagcctcctcggcctccctgtccccagccttccccgatggcccgcacgaagcagacggcgcgcaagtcgacgggcggcaaggcgccgcggaagcagctggcgacgaaggcggcccgcaagtcggcgccggcgacgggcggcgtgaagaagccgcaccgcttccgcccgggcaccgtcgcgctgcgcgagatccgcaagtaccagaagagcacggagctgctgatccgcaagctcccgttccagcgcctggtccgcgagatcgcgcaggacttcaagacggacctccggttccagtcctccgccgtcgccgcgctgcatgaggccgccgaggcctacctggtgggcctcttccaggacaccaacctctgtgccatccacgccaagcgcgtcaccatcatgccctaggacatccagctcgcgcgccgcatccgcggcgagcgcgcctaggcggctcggttgtggggcctgctcgattctgatgagagggcttagtctcaacccctcatgcgtgatctactcgagtgctctcgatttatcccc

SEQ ID NO: 1589 - DNA, 615 bp, Zea mays
  Clone ID: TF_LIB5116-026-A1-PF1-C11
tcccacctcccagcgaagccacgcacaccacaccagagcacctctccccgtcgccgccgccgcagcagcatccatggcgcccaaggctgccgagaagaagccggcagagaagacccccgcgggcaagaaacccaaggcggagaagaaggtgccggcgtccaaggagggcgggggcgagaagaaggggaagaagaagtccaagaagagcgtggagacgtacaagatctacatcttcaaggtgctgaagcaggtgcacccggacatcgggatctcctccaaggccatgtccatcatgaactccttcatcaacgacatcttcgagaagctggccggcgagtcggccaagctggcgcggtacaacaagaggcccaccatcacgtcccgggagatccagacctccgtccgcctcgtcctccccggcgagctcgccaagcacgccgtctccgagggcaccaaggccgtcaccaagttcacttccgcctgattcggctgatggatcgatgtcaccctgtagtttcctgttcgtgctctgtcctcttgtaacttgtcctggttgtgtgggatcacatctcatgatccggagaaatagtaacagcgcttatttcagttcttgcc

SEQ ID NO: 1590 - DNA, 608 bp, Zea mays
  Clone ID: TF_LIB5116-006-A1-PF1-A2
taatctcagagcattcccatccagcgcaaccgtcgccaacaccactcctcgagagtcctcgccgccggagaagtagcacgcaggatggccggaaggaagggcggcgacaggaagaaggcggtgacccgctccgtgaaggccgggctccagttccccgtcggccgcatcgggcgctacctcaagaagggccgctacgcccagcgcgtcggctccggcgcccccgtctacctcgccgccgtcctcgagcacctcgccgccgaggtcctggagctcgccggcaacgcggccaaggacaacaagaagacccgcatcatcccgcgccacctgctgctcgccgtccgcaacgaccaggagctcggcaggctgctcgccggcgtcaccatcgcccatggcggcgtgatccccaacatcaactccgtgctgctccccaagaagtcccccgccgccgccgataaggaggccaagtcgcccaacaaaaaaacgtccaccaagtccccccaagaagaagacggccgccaccaaggagtaaccgtccccataccctatccggtggtgcttaaatccatttctcatggactcagatgaaaccctgtacgcaatgcctcgct

SEQ ID NO: 1591 - DNA, 696 bp, Zea mays
  Clone ID: TF_ZmC369_31
gggaccctcgaggccggccgggccgggacatcatcgaccgagcgaatccctcgcatcgtattcgcagcctttgctgcatcacaccaccgcgaaaccccagcagccgcatcgatggcgcctaaggcggcgacaagaagggtaagaagaaggcgaagaagtcggtggagacctacaagatctacatcttcaaggtgctgaagcaggtccacccggacatcggcatctcttccaaggccatgtccatcatgaactccttcatcaacgacatcttcgagaagctcgccggcgaggctgccaagcttgcgcgctacaacaagaagcccaccatcacctctcgggagattcaaacctctgtccgccttgtccttcccggcgagctcgccaagcacgcggtctccgagggcaccaaggccgtcactaagttcacatcatcttagatttgaggtagtagctattgggtggcgttggtagctgtgtctcaatttgtctgctactaatagtggtaggagtatccatgtgtagttgggttgcggtaagaattgtgttaaactggcaatatgtttgaagttgctttttatggatgtggaatagttgtgttgcttgttctacgttcggtttctgtctggatgcgattctcttatcttggaactgtcattgttgataatgaactgacaaaaaaaaaaaaaaaaagcggcc

SEQ ID NO: 1592 - DNA, 473 bp, Zea mays
  Clone ID: TF_LIB5116-028-A1-PF1-G10
ttctcaaatcccccattgcgccaaatctctccgcacctcaaaccaacccctgcctcgagccgcaatggacgcctccgccgccggcgccgtcgccaaggcgaagaagtacgtggtggggcgcaagctcggcggtggccccaggaagaaggcggtggcgcggtccgtcaaggccgggctgcagttccccgtcggccgcatcgggcgcttcctcaagaagggccgctacgcgcagcgggtcggcatgggcgcccccgtctacctcgcctccgtcctcgagtacctcgccgccgagcttctcgagctggccgggaacgccgccaaggacaacaagaagtcccgcatcatcccgcgccacctgctgctcgccatccggaacgaccaggagctcggcaagctgctcgccggcgtcaccatcgcgcacggcggcgtgctgcccaacatcaaccccgtgctgctccccaagaagacggcgg

SEQ ID NO: 1593 - DNA, 444 bp, Zea mays
  Clone ID: TF_LIB3608-036-Q1-N6-C6
cggaccggtgaaaatcttctcggtgaagaccaaccttccataagaccacagggccattcttgggcatgacacatcccatccacagatttaaacacgaacattcttcagcacacaaggcaaatgaaaacccttctttttaagcctttttgggggacttggccccctttttgggggacttgggcttcttttttccccccttggccccctttttcgccgcctttttgggcaggaacaccgagtggattttggggaggacccccccctccccgatggggaccccggccaaaaatttcccaagctccttttttttgcggatcgccaagaacacctggggcgggatgatgcccctctttttgttgttttttgccgggttccctgccaactccaaaacctcgggggggagggactccaaaaaagcggcaaggtaaacgggggccccagtgc

SEQ ID NO: 1594 - DNA, 349 bp, Zea mays
  unsure (1)..(349): unsure at all n locations
  Clone ID: TF_LIB3245-084-P1-N1-B7
aaaatcaacacctcccaattccacncgggcaggtactcacggtgcgtggcgcgaagcaccaaanctccnatngcccccacgaagcanaccgcgcgcaagtcaacgggcggcaaggcgccccgcaagcagctgtcgaccaaggcggcacgcaagtctgcgccggccaccggcggcgtgaagaagccccaccgcttccgccccggcaccgtcgcgctccgggagatccgcaagtaccagaagagcacggagctgctcatccgcaagttgcccttccagcgcctcgtccgtgagatcgcgcaggacttcaagaccgatctccgcttccagtcctccgccgtcgccgcgctgc

SEQ ID NO: 1595 - DNA, 678 bp, Zea mays
  Clone ID: TF_LIB4732-057-Q1-K1-D7
agacccagcatccagcaatctcgtccccaaacaagcaacctccgcctccccgattctcgtcgagaggaagcccaatcccgaaaccgtcgccgtattccaatggcgcccaaggccgagaagaagcccgccgccaagaagcctgcggaggaggagccggcggcggagaaggccacggcggggaagaagcccaaggccgagaagcggctccccgcgggcaagtccgcaggcaaggagggtggcgagaagaaggggaagaagaaggcaaagaagtcggtggagacgtacaagatctacatcttcaaggtgctgaagcaggtgcacccggacattggcatctcgtccaaggccatgtccatcatgaactccttcatcaacgacatcttcgagaagcctcgtcctccccggcgagctcgccaagcacgccgtctccgagggcaccaaagccgtcaccaagttcactagctcctaggcgagcgatgcgacgtgcactcgtctcctcttcttgcagtagtaccatagtagtacggttaggtgtgttgccgcggtggtagttgccgctgcgtttgctttctgggctcggttgatgtcttttatgtaagaaagtaactgtattgtgtctgcagtatcttaccatgcatgttttaagtagcatcccataatctataaggaatatgtttt

SEQ ID NO: 1596 - DNA, 392 bp, Zea mays
  unsure (1)..(392): unsure at all n locations
  Clone ID: TF_3341056
caacaggggcatcaaatctaaaaggaccattacaccccggcgggccggatcaacaggggcatcaaatctaaaaggaccattacaccccggcgggccggataaaggacacaccaaaaaacccttctaacaaatccgcgaatcccgcagcgcgctcatttgctggtaaacttggtaacggccttggttccctcgaaaacggcttgcttggcaagctctccgggaaggactaggcccacggaggtctggatctcgcgggacttaatggtgggcttcttgttttaccncgccatcttggcggcctctccggccagcttctcaaaaatttctttaataaaggatttcataatggacatggccttgaaggatatcccaatttcggggtgcacctgctt

SEQ ID NO: 1597 - DNA, 645 bp, Zea mays
  unsure (1)..(645): unsure at all n locations
  Clone ID: TF_LIB4744-035-R1-K1-H5
tctttaatgctccccagcggtccctagcagaagccttccatcctcactcgctcgatggcccgcacgaagcagacggcgaggaagtccaccggcggcaaggcgccgaggaagcatctggcgactaaggcggcccgcaagtctgcccctgcgaccggcggagtgaataagccccaccgcttccgccccggcaccgtcgcgctccgggagatccgcaagcaccagaagagcacggagctgctgatccgcaagctgccgatccagcgcctggtgcgggagatcgcgcaggacttcaagaccgacctacgcttccagagctctgctgtctccgctgctgcaggaggcggctgaggcctaccttgtcgggctcttcgaggacaccaacctctgcgccatccacgccaagcgcgtcaccatcatgcccaaggacatccagcttgcccgccgcatacgcggagagagggcctaagcgtcatattctctgtcatcagcgcccgatcagaagatgtagagatatgctgngttctgtagctagggttactgtcgaatcatcgagtgatggctgttcactgctgtaacttaattatcatgatgcatatgacatgccaatgaactctgatactaaaaaaaaaaaaaaaaagcgggccc

SEQ ID NO: 1598 - DNA, 465 bp, Zea mays
  Clone ID: TF_LIB4758-023-R1-K1-H11
ccctcgggcctgccggaaatcaacatacgtaccgagcgcgactccccttccattctcatttgttcgatcctactgcgtcgcccgcccttcgcagttctctaccagtggcgcgctccagagtacacggtgaggaagtagaccgtgggtatggcgccgcggaagcagctggccaccaaggcggtgcgaaagtcggccccggccaccggtggcatgaacaatccgacagtgttggccctggcaccgtggcgctcctcgagattcgtaagtaccagaagatcacggagctgctcatccggaagctgcctttccagcggctggtgcgggagatcgcgcaggacttcaagaccgtccttcggttccagtcctccgccgttgccgcgctgcaggaggccgacgaggcgtacctggagggtctctttgaggacaccaacctgtgtgccatccatgcctagagggttatcatca

SEQ ID NO: 1599 - DNA, 688 bp, Zea mays
  Clone ID: TF_LIB4979-019-A1-K1-A12
atccgcaatcttcaatctccccagtaatccctaccagaagccttccatcctcgctcgctcgatggaccgcacgaaggagacgaggagcgaagtccaccgcgcggcaaggcgccgagagaagcaataggcgactaaggcggaccgcgagtctgcccctgcgaccgacggaggtaagaaggcccaccgcttccgccccggtaccgtctcgctcagggagatccgcaagtaccagaatagtacagagctgctgatccgccagctggcgttccagcgcctggtgcgggagatacgcgctggacttgcgaagaccgacactacgcttccagagctccgctggtctctgctctgcaggactgcggcctcgtagggctaccttgacggtctctgctaggacaccatacctacttgcgccatccacgcctggcgggtcaccatcatgcccaaggacatccagcttagtcacgtccgcatccgtgggagagagggcctaagcatctcatattctgacatcagaggccgatcagaagatgaagagatgtgcctggaatctgtgatattgagtgactgtggaatacatgccaatagatgactgtgcactgctgtgacttattatcatgatgcatattgaaaagacaatgaacgtatgttatcaaatcgcgaaagaagagctgaagaaggacactgcgtg

SEQ ID NO: 1600 - DNA, 461 bp, Zea mays
  Clone ID: TF_LIB4979-061-R1-K1-G4
catcatagctcgcatccgatttcaatttcaatccttcgatagcgcatcgtcgcccgccctctcggagctctctccgatggcccgtacgaagtagacggtgaggaagtcaactgcgcggaaaggcgccgcggaagcagatgaacacctaggcggcgcgcaagtcctctccgggcaccggcggcgtgaagaagtcgcacaggttccgtcccggaagcgtcgctctccgagagatccgcaagtaccataagagcacggagctgctcatccgtaagatgcccttccagcggctggtgcgtgacatctcgcaagacttcaagaacgacctttggattcagttctactttgtcgccgcgctgcaggaggacgacgatgcgtatctggtgggtctctttgtagaaccaacctctgcggcatccacgccaagagggtcaccatcatggccaaggacattcagctcgcgc

SEQ ID NO: 1601 - DNA, 599 bp, Zea mays
  Clone ID: TF_LIB4729-135-A1-K1-H9
aacgcgaatcctcaatctgcccttgccgccgccaccgcccgatccaggtctgcagactgctccctcctcctctccgctccgaatggcccgcacgaagcagacggcgcgcaagtcgaccggcggcaaggcgccgcggaagcagctggccacgggcggcgtgaagaagccgcaccgcttccgccccggcaccgtcgcgctccgcgagatccgcaagtaccagaagagcacggagctgctcatccgcaagctccccttccagcgcctcgtccgcgagatcgcgcaggacttcaagacggacctgcggttccagtcctcggccgtggcggcgctgcaggaggccgcggaggcgtacctggtggggctcttcgaggacaccaacctctgcgccatccacgccaagagggtcaccatcatgcccaaggacatccagctcgcccgccgcatcaggggcgagagggcttgagctgtcgcgctgctgctgttcgtcgttgtaatgtctgaagtatatgggtggtgggtgctttctatgccgtgcctatttggctatttcggacgtgttgtcctcactgaatggaaaatggaatgcgattgctcgtctg

SEQ ID NO: 1602 - DNA, 674 bp, Zea mays
  Clone ID: TF_LIB4742-005-R1-K1-G10
gaggctcggccgggcaagcgggaaagagtctgaaaccacacagcagtcttcaatctgccgagcaaagcaaagctctagccttccatcctcactcgctcgatggcccgcaccaagcaggacggctaggaagtccaccggcggcatggccccgaggaagcagctggcgactaaagcggcccgcaagtctgcccctgcgaccggcggagtgaagaagccccaccggttccgccccggcaccgtcacgctccgggagatccgcaagcaccagaatagcacggagctgttgatccgtaagctgccgttccagcgcctggtgcgggagatcgcgcatgacttcaagaccgacctacgcttacagagctccgctgtctccgcgctgcaggaggcggctgaggcctaccttgtcgggctcttcgaggacaccaacctctgcgccatacacgccaagcgcgtcaccatcatgcccaaggacatacagcttgcccgccgcatccgtggggagagggcctaagcatcatatattctgtcatcagtgcccgatcagaagatgtagagatgtgctgggttctgtagtttgggttactgtcgaatcatccagtagttgggtgttcactgctgtaacttactatcatgatgcatatgaaatggcaaagaactatggtatcagttcctcg

SEQ ID NO: 1603 - DNA, 508 bp, Zea mays
  unsure (1)..(508): unsure at all n locations
  Clone ID: TF_LIB4665-006-R1-M1-E8
ccacgcgtccgcgacagcaagcgaaaatctcccgatcccctctagtctccgcggcgaagatgtcggggcgcggcaagggcgggaagggcctgggcaagggcggagcgaagcgccaccggaaggggctccgcgacaacatccatgggatcacgaagccggggatccggcggctggcgcgcatgggcggcgtgaatcgcatctccgggctcatctacgaggagacccgcggggtgctcaagatcttcctgggagaacgtgatccgcgacgccgtgacctacaccgagcacgcgcgccgcaagaccgtcacagccgtggagcgggtgtacgcactcaagcgccagggccgcaccctctacggcttcggcggctangctaggcgcggcgcgcgtcgttgtcgtcgctgcgggtctattgtgtttgcgattcgcaaggtgtggctgggtggggaaaatgctgggtactgtgccactanatcaagcatggtgtgcgtgtctgaaaaaatgccaa

SEQ ID NO: 1604 - DNA, 362 bp, Zea mays
  Clone ID: TF_LIB3279-005-P1-K1-B7
cgcatgcgttccaacatctgagcaatctcttgtgcactcagacatgccaatagacgcggcaatacaaccatggactccaccatcacctgcacaggcactaaggcaaagaatgaggcgaacaagcgcacggtcggccgcacagggaagaagtcaaggtagaagtccgtgaaggcgggtgtgcaggtccctgtccagcgcatcgggcgctacatgaagaacgacctgtacacgcagcgttacgcgaacggtgtccgcacctacgtcgccgtttacctcgaatatgtcgtcgattacgttgtcgatctcgttgttgatgctgccagggacaacaagaaggacagcatgattactcgccttatgct

SEQ ID NO: 1605 - DNA, 531 bp, Zea mays
  Clone ID: TF_LIB5026-002-Q1-XP1-E7
gccggccgggctgcgatccaattcacaggctcaccacaccatccagcaagcaaaaattccccaatcctctcgtctccgcggcgaagatgtcggggcgcggcaagggcggcaagggcctgggcaagggcggcgcgaagcgtcaccggaaggtgctgcgcgacaacatccaggggatcacgaagccggcgatccggaggctggcgcggcggggcggcgtgaagcgcatctcggggctcatctacgaggagacccgcggcgtgctcaagatcttcctggagaacgtcatccgcgacgccgccacctacaccgatcacgcgcgccgtaagaccgtaactgtcctggtatccctctaccccgtcggtgggctcccagtcctgcttgaggcttgcgaccggacacctgggcctgttcctcatgctcccctatcggccagattggtttccaggtcaggcccgaggactacttcaagaagtgaatcgcttgagattctatgcatcattcctggcgcttcgttgcgtgcctcgtgtgccc

SEQ ID NO: 1606 - DNA, 466 bp, Zea mays
  Clone ID: TF_ZmC369_105
tcaaggtgctgaagcaggtgcacccggacatcggcatttcctttaaggccatgtccatcatgaactccttcatcaacgactttttgagaagctcgccgccgaggccgccaagctcgcgcggtacaacaagaagcccaccatcacctcccgtgagatccagacctccgtgcgcctcgtcctccccggggagctcgccaagcacgccgtctccgagggcaccaaggccgtcaccaagttcacctcgtcctaggctgcgtggcctccgcttgcaggcttccctcgtatgttcgcgtgtcttgctgtagttaggtgctgctgtgtctggtctcctccggtagcaactgttatctgatggaacagtaacaatgcttattgaatccagctaaaaaaaaaaaaaaaaaaaaaaaaaaaaaaaaaaaaaaaaaaaaaaaaaaaaaaaaaaaaaaaaaaaaaaaaaaaggtccct

SEQ ID NO: 1607 - DNA, 334 bp, Zea mays
  unsure (1)..(334): unsure at all n locations
  Clone ID: TF_LIB3070-004-Q1-N1-E3
ccgcattcgatgggcgccccaagggcccgagaagaaaccctcgcggcgaagaagcccggcggagggaggagcccccgcggccgagaaaggcgcccgcgggtaagaagctcgaaaggcggagaaaagcgggtccccgctggcaagtctcgctgccaaaggaagggcggcgagggccaagaggggcacagaagaagggcaagtaagagctgtggagaacctacaagatctacatcttcaaagtgctgaagcaggtgcacccggacattggcatctnctncaaggccatgtccatcatgaactccttcattaacgatatcttcgagaagctcgctgc

SEQ ID NO: 1608 - DNA, 347 bp, Zea mays
  Clone ID: TF_LIB3357-028-P1-K1-E9
aatacctcctcagacccgtgaagcgcagctgcggccatggacgccaccggcactggagctggagggaaggcgaagaatggagcggccggtcgctaggccggcgggccgatgatgaagtcggtgacgtggtccgtgtaagccgggctccatttccccgtcggccgcatcgggcgctacctcaagtagggccgcttcgcgcatcgcgtcggctgcggtgcccccgtctacctcgcggccgtcctggagtacctctccgctgatgtcctggtgctcgccggcaacgctgccaaggacaacaagaagtcgcgcatcgtcccgcgccacgtgctgctggcgatccgcaacga

SEQ ID NO: 1609 - DNA, 413 bp, Zea mays
  unsure (1)..(413): unsure at all n locations
  Clone ID: TF_LIB84-008-Q1-E1-G3
acaccaccgcgaaaccccagcagccgcatcgatggcgcctaaggcggagaagaagccggctgcgaagaagccagcggaggaggagcccgctgccgcgaaggccccggtggggaataagcccatggcctagaagcgcctctcggcggtcaagtcgtccggcaaagaaagcggcgacaagaagggtaagaagaacgtgaacaagtcggtggagacctacaagatctacatcttcgacgtgctgaagcacgtccacccggacatcggcatctcttccaaggccatgtccatcatgaactccttcatcatcgacatcttcgagaagctcgccggcgacgctgccaagcttgcgcgctacaacaagaagcccagcatcacctctcgggagattcanacctctgtccgccttgtccttc

SEQ ID NO: 1610 - DNA, 416 bp, Zea mays
  Clone ID: TF_LIB3150-052-Q1-N1-B2
tttaatttccccagcaatccctagaaaaagcgggcgatcctcattcgctcgagggcccggacgaagcaaacgcggaggagttcctccggcggcatggtgccgaggaagcatttgccaactaaggcggcccgcatgtctgcccctgcgaccggcggagttaaaaagccccaccgttttagcctcgataccgtcgcgctccgggagatcctgaggtaccaaaagagcccggagctgctgatccgcatgctgccgatccagcgcctgttgcgggagatcgcgcatgacttcaagaccgacctacgctttcagagctccgctgtctccgcgctgcacgaggcggctgaagcctacactggcggtctatacgaggacaccaacctgtgcgtcattcacgccaagcgcgttaccatcatgcc

SEQ ID NO: 1611 - DNA, 480 bp, Zea mays
  Clone ID: TF_LIB4745-005-R1-K1-H3
ccgccgcttccagtcccgcgttcgccgctccatttgatcgaattgccgatggcgcccaaggtccgagaagaagcccgcggagaagaagccgacggaggagaaggccgagaagaagcccagggcggagaagcgcgtgccggtcaaggagggcggcgagaagaaggggaagaagaaggccaagaagagcgtggagacgtacaagatctacatgttgaaggtgctcaagcaggtgcacccggacattggtatctcgcccaaggccatgtacatcatgaactcgttcatcaacgacatgttgcagaagctggctggcgaggccggcaagctggtccggtacaacaagaagccctccatagcctcgcgggagatccagacttgggtgcgcctggaccttcctggcgagcgtcggcaagcacgccgtttccgagggcaccaaggccgtgtccaagggtacttgctgttagatcgccgtcgcacgga

SEQ ID NO: 1612 - DNA, 399 bp, Zea mays
  Clone ID: TF_LIB3227-030-P1-K1-B8
gttccaactcctgagcactttctcctcgtcccagacaagccaatcgaagccgagatacgaccatggactccaccggcaccggagcagggggtaaggggaagaagggagcggccgggcgcaaggtcggcgggccaagggagaagttggtgtcaaggtccgtgaaggccgggctccaggtccccgtcgggcgtattgagcgctacttgaagaagggccggtacgcgcagcgtgtcggcaccggcgcccgcgtctatctagccgatgtactagaataccttgccactgaggttctggagctcgccggtaatgcttccagggacaacaagaagactcggattatttcgcgccacgtgcttctggggatccggaacgacgaggagcttgagaagcttttgggcg

SEQ ID NO: 1613 - DNA, 789 bp, Zea mays
  unsure (1)..(789): unsure at all n locations
  Clone ID: TF_ZmC114_13
ggaggatcctcttgtgtcctggccgttggccgtcgctgcgtcgttccagatttggggaaggaaatccggcaccgagattcgagtcgaaaagatccgcggtatcgctcggccttcaaatacttcggcaacgtcgccggttcaggacatcatttgctagatggcgcgtaccaagcagaccgctcgcaagtccactggaggaaaggctcctaggaagcaactcgctacaaaggcagcccggaagtctgcacccacaactggaggagtgaagaagcctcaccgttaccgcccagggactgttgctcttcgtgagatccgcaagtaccagaagagcactgagttgctgattaggaagctgccgtttcagaggcttgtcagggagattgctcaggatttcaagacggatctgcgcttccagagccatgccgtgcttgctctgcaggaggcagcagaggcctacctggttggtctcttcgaagatacncaatctgtgcgcgatccatgccaagcgcgtgaccatcatgcccaaggacattcagctggcaagaaggatccgtggcgagagggcgtaagtctgtcgacgggaggaaaactctgcgctcgttttgtgtgttgcctctctcaccctgtaagttttgtgagaagagatctagtaactgtacttggnctgtttgactgtagccgcagtagcatatgcatgcgcttactggtgggctgttgggcgtgtctggagtcttttatccatccattctagtatacttaaatatcgtgatattatcaccgggttgctgc

SEQ ID NO: 1614 - DNA, 754 bp, Zea mays
  unsure (1)..(754): unsure at all n locations
  Clone ID: TF_LIB5116-008-A1-PF1-D5
cacccatcccagcccccacctcccctccttccagcaaactcacgcatcccaccaccgaagctcccaaccccacccgaagcggcagccatggcccccaaggcagacaagaagccggccgccgagaacaaggtcgagaaggcggcggagaagacccccgcgggcaagaagcccaaggccgagaagcggctgccggcgggcaagacggcgtccaaggaggccggcggcgagggcaagacccggggccgcaagaagggcagcaaggccaagaagggcgtggagacgtacaagatctacatcttcaaggtgctgaagcaggtgcaccccgacatcggcatctcctccaaggccatgtccatcatgaactccttcatcaacgacatcttcgagaagctcgccggggagtcggccaagctcgcccgctacaacaagaagcccaccatcacctcccgggagatccagacctccgtccgcctcgtcctccccggggagctcgccaagcacgccgtctccgagggcaccaaggccgtcaccaagttcacctcctcctagactgaagatgcgccgcttgttgtgccagatgtggctgtctgatgtatctctgctgttgactctgcttacctgcaagtagaagtagtggtagtagttcgtgtggtagaagattgccaacgctttgttggcttcttggttgtgagaactgaacgtgttgcttttgcaaaatgaaatctatctaaaaaatggttgcggntgtggtaac

SEQ ID NO: 1615 - DNA, 620 bp, Zea mays
  Clone ID: TF_LIB5116-037-A1-PF1-C8
cccccacctccgagccaacacctcctccctcactcccacctccgaagcttcagcggcagccatggcccccaaggcagacaagaagcccgcggccgagaacaaggtcgagaaggcggcggagaagacccccgcgggcaagaagcccaaggccgagaagcggctgccggcgggcaagacggcgtccaaggaggccggcggcgaggggaagacccggggccggaagaagggcagcaaggcgaagaagggcgtggagacgtacaagatctacatcttcaaggtgctgaagcaggtgcaccccgacatcggcatctcctccaaggccatgtccatcatgaactccttcatcaacgacatcttcgagaagctcgccggcgagtccgccaagctcgcccgctacaacaagaagcccaccatcacctcccgggagatccagacctccgtccgcctcgtcctccccggcgagctcgccaagcacgccgtctccgagggcaccaaggctgtcaccaagttcacctcctcctagattgactatgcgtcgcttgttgtgatagatgtagttggctgctgttagtcgctgactctgcttatgtatctgcaagtagtggtagtagtagtcgtct

SEQ ID NO: 1616 - DNA, 662 bp, Zea mays
  Clone ID: TF_LIB5025-058-A1-XP1-A9
gccggccggtcccgggagtaacccgcatcccacatcactcatccacagctcgcagccgtattcctgtctcgaatcctctctcgccgctccgatggcccgcacgaagcaaacagcaaggaagtcgaccggcggcaaggccccccggaagcagctggccactaaggctgcgcgcaagtcggccccggccaccggcggcgtgaagaagccccaccgcttccgccccggcaccgtcgcgctccgcgagatccgcaagtaccagaagagcactgagctgctcatccgcaagctccccttccagcgcctcgtccgcgagatcgcgcaggacttcaagactgatctgaggttccagtcctccgccgtcgcggcgctgcaggaggccgccgaggcgtacctggtggggctcttcgaggacaccaacctttgcgccatccacgccaagcgcgtcactatcatgcccaaggacatccagctcgcgcggcgcatcaggcgagagggcttgagcgcccgtcgtgctgctcgtcgttgtagtgttactagaagtagatggtggcattcgtttcgtggcttccttatcctgtaggagtaatgttctagatgtcttggcttcagtgcaatggactgtgattgctcatttcgaaaaaaaaaaaaaaaaaaggccccta

SEQ ID NO: 1617 - DNA, 632 bp, Zea mays
  Clone ID: TF_ZmC519824_1
accaacgcactcggcaatcagcagtcaagcaatccccactcacatctctccacttcccgattcctttctccagctcgccatggacgcctcagccaccgtagccaccgggaaggggaagaagggcgtggccgggcgcaaggcgggcggccccaggaagaagtccgtgtcgcggtccgtcaaggccgggctccagttccccgtcagccgcatcgggcgcttcctcaagaagggccgctacgcgcagcgcgtcggctccggcgcccccgtctacctcgcggccgtcctcgagtacctcgccgccgagctgctggagctcgcgggcaacgccgccaaggacaacaagaagagccgcatcatcccccgccacctgctgctcgccatcaggaacgacgaggagctcggcaagctgctcgccggcatcaccatcgcgcacggcggcgtgattcccaacatcaacccggtgctgctccccaagaagacggccgagaagtcccccaaggagcccaagtcgcccaagaagaccgccaagtcccccaagaaggcgtagattccttgcttagttaggctgtagctgggatgtatggatgggtgtgtttgaggatacttcagttcgaagtagactgttcttgctt

SEQ ID NO: 1618 - DNA, 1953 bp, Zea mays
  Clone ID: TF_ZmC119_1144
gcacgaggatggtcagataggggtatacaaaggaacacctgctttgatgctcacgggcactgcagcgaggaggtacagccacaagtacaaagcacgattagacaattttttttgaccccattgcaacatttcacaaatttgctctcatcaagcaagagtcgtttagaacctctaaaatttcccccactcgccagtcgcagcagcacctgtagcagtcatggacgccagcggagccggtagcaaggggaagaagggggcggccgggcgcaaggcaggcggccccaggaagaagtcggtgacgcggtccgtcaaggccgggctgcagttccccgtcggccggatcgggcgctacctcaagaagggccggtacgcgcagcgcgtgggcactggcgcccccgtctacctcgccgccgtcctggagtacctcgccgccgaggttctggagttggcagggaacgcggcgaaagacaacaagaagacgcgcatcatcccgcgccacgtgctcctggcgatccgcaacgacgaggagctcgggaagctgctggccggcgtcaccatcgcgcacggcggcgtcctccccaacatccactccgtgctcctgcccaagaaggcggcggagaaggcggccagcggcggcagcaaggagcccaagtcccccaagaagggcgccaagtcccccaagaaggcttagaaagtagggtcttcatttgcgctgtgtgctgtagcatgttcgtgtctagatctgtggatgggatgtgtcctgctctagtatcgtccttgtgtcttattgtatgttcgtcttcatcgagaagatcttcagcagtcagagctccgagttttttttttttttttttttttaaatcaatagagaaacgttataatacagcccaaattgcttcagaacatacaatcgcccaatatgtccaaaacaggtgcggccaagggcgtaccgttttacaggatgcaacaaccaaagccttaagtttgggagtttgggacaagcgtcatcaaccaaggcaactgaacatgagcattggcataccatgggcataaaaatgaaacaatccagagacaattctcagggccagtgaattccaggctgtgatccatgtgataaagcacttgcaaacaatactcaggtaaacaatatgggacgacaaataatcagccaaaatcttcactcagccaatcatagaaggtatgttcccattctctaagcattcctggttgcgatctgagactcagcctctttcttcacgggctcttccttctctgacaagatgagttcgatgtggcacggggaggacatgtaagggttgatgcgcccatgagcgcggtaggtcctgcgccgctgcttctgagcctggttcacttgaatgtgtgacacatagagggtatcgacatcaagaccttttacctcagcattgctctcagcattcttgagaaggtctagaatgaatctagcagatttgacaggccagcgtccctgcccatttgagtgacgagacttagcctgagcggtacgtccaacaccgccacaatacctgcggaacgggatggcctgcttgtgggcaatcacatcctcaaggtaccttttggccttggtgagtgacaacttcctaagggcaaaagctgtctcacgggtgttcttgaagtgaacacgtaggtcacggcccatggccttggttgacttggtggggttggttggctccgtcgaatatttcaccatggctgcagccggcgagttggggggtcctcaaggcggtgttgagatgctcctgcggagggagcgggagccaaggttagagaacgaagcggcggcggtaggagcgcgagaaattgtgtacatgcaactatgcaagccaactactgggcaaaaaccctagcggcttcgttatgggccgagccgctcgagcttggcccacgttcatccaaggaaaaagaacctcgtgc

SEQ ID NO: 1619 - DNA, 629 bp, Zea mays
  Clone ID: TF_LIB4730-068-R1-K1-D9
tgggctaccctaggagcctcgcgcggtacacagcacatcttcaatctccccgagcaaagcaaagctctagccttccatcctcactcgctcgcatggcccgcaccaagcagcacggctaggaagtccaccggcggcaaggccccgaggaagcagctggcgactaaagcggcccgcaagtctgcccctgcgaccggcggagtgaagaagccccaccgcttccgccccagcaccggcgcgctccgggagatccggacgtaccataaaagcacctagctgctgatccgcaagctcccgtcacagccgccggggcgaggagacccgcaggcactccacacccgacctcgcatcaaggcgctcaatgagtccgagagggaccggaagaaggtcaagcaacattaagcacagtggtaacatcggcctcgacgacgtggtcgagatcgccaggaccatgaggaacagggccatggccaaggagttggccggcaccgtcaaggagatcctcggcacctgcgtcagcgtcgggggcaccgtcgacggcaaggaccccaaggacctgcagcaggagattgatgaccgagaggtcgagaccccccccgcttgatactagccatccaggggacttccattgg

SEQ ID NO: 1620 - DNA, 750 bp, Zea mays
  Clone ID: TF_LIB5025-045-A1-XP1-A10
gccggccgggccgggcacgatctccgactccctattaatctctatgacctcattctcgtgggaagcaaagcgcttgccccttctcactgtcccgatggcccgcacgaacctgatacccacgaagtccactgggggcaaagcgacatggaagtagctgtgcaccagggcgtgatgcatgtctgccccggcgacaggcgcaactaaaaagacccacacgattcctacacgctaccaccacgctcctgaagatccgcaaatatcagaagagcacggagctgctgatccgcaagctgccgctccagcgtctgtttccagatatcgtccaagacttcctcagcgaacttcgattccagagctgctgcgtagatgcgctgcaagaagaatcctaggcctacctcaacaccactcttctagggacaccaacctctgctgcattcactacaagagcgtgaccattatgcccccggacatccagctcgcccgccgcatcctgagggcagagggcctacgagactacgggatgcacctcgaagtagtgatcccagattctgtcatcaccgactggctacaacgagtagagatgtcgccgaccctctgtcagcctatattatcggccaaatcatgatgctcactggttcttcacagctgtaattcaagtatgacaatgccatggcaatgaacatctcaattatcttgtcccccatacccactttaaacaaatggcgctatagccaagagcgctctacaata

SEQ ID NO: 1621 - DNA, 459 bp, Zea mays
  unsure (1)..(459): unsure at all n locations
  Clone ID: TF_681794
cagcaatccctagcagaagccttccatcctcactcgctcgatggnccgcacgaagcagacggcgaggaagtccaccggaggcaaggcgccgaggaagcagctggcgactaaggcggcccgcaagtctgnccctgcgaccggcggagtgaagaagccccaccgtttccgccccggcaccgtcgngctccgggagatccgcaagtaccagaagagcacggagctgctgatccgtaagctgtcgttccagngtctggtgcgggagatcgcgcaggnacttcaagaccganctacgcttccagagctctgctntctccgcgctgcaggaggaggttgatgnctacttgtcggnntcttcganganacatcctctntgtcatccacgccaagnggtcacatatgccaagganatccagttgcccgccgtatccnggngagagggctaagcgtntttttcttttt

SEQ ID NO: 1622 - DNA, 217 bp, Zea mays
  Clone ID: TF_LIB4730-067-R1-K1-C4
tggggacgaaagcagcgcgtaagtcttatccctagacgctaggaattaagaagccacaccggtgcggcccggactccgcttcgctgcgggagatccgcatatacaagaatagcaggaagctgctgatccgtaagtctgcgatcgagcgcctggagctccagatcggggaggacttcaagacggacctaagcttccaggcctccgccgtcgccgcgct

SEQ ID NO: 1623 - DNA, 335 bp, Zea mays
  unsure (1)..(335): unsure at all n locations
  Clone ID: TF_LIB3076-046-Q1-K1-H11
accccgcgtccgcccacgcgtgcggcaaccgattgcctatcttcctcttaaccaaagaccgatggcccccagggccgggtggatttccgcggcgaggaagcctntnnaagaagaccccgcggccgagaagacgaccgccgggaagaagcccaaggcggagaagcgggtccccgctggcaagtccgccggcaaggagggcggctagggcaagcgttgcaagaagaagggcaagaagagcgtggagacgtacaagatctacatcttcaaagtgctgaagcaggtgcacccggacatctgcatctcctccaaagccatgttcatcatgaactccttta

SEQ ID NO: 1624 - DNA, 619 bp, Zea mays
  Clone ID: TF_ZmC22376_3
acttccgcccaaatccaccaccgccataccagcgcgtccgcgattccgtcgagtagactgggcgagagagtagtctcggacgagaagaggcgaatatgagttccggcggcggcaggggcaagcccaaggggtccaaggctgtgtcgcggtcgaccaaggccgggctgcagttccccgtcggccgcatcgcgcgctacctcaaggccggcaagtacgccgagcgcgtcggcggtggtgcgcccgtctacctctccgccgtcctcgagtatctcgcggcagaggtaactgcctcctcttcttttccctgccctccatttctctccccccctccctttagcgaatccgtttggatgtttgttgaatctttgcggtacgctcgtaatcgtttgcctgcaggtgttggaactggcgggcaacgcggcgcgcgacaacaagaagaaccgcatcgtgccgcgtcacatccagctcgccgtgcgcaacgacgaggaactcagcaagctgctcggagctgtcaccatcgccgccggaggtgtgttgcccaacattcatcagacgctgctgcccaagaaggccggtgggaagggcaaggccgacatcggttccgcatcccaggagttct

SEQ ID NO: 1625 - DNA, 482 bp, Zea mays
  unsure (1)..(482): unsure at all n locations
  Clone ID: TF_LIB3608-036-Q1-K6-A11
ctctctngtattacgcacctcgggggggggggtgggggccctcgatctcnaagcgcagcagcagcagtcaggcggccatggacgccagcgcagcacgagccggcgggaaggcgaataagggcgcggcctggcgcaaggccggttgtttctattaagaagtcggtgactaggttcttgaggggcgggctgcagttccccgtcngccgcattggtcggtatttgaagaagggccagtacccacagcgcgtttgcacgggcacccccttctacctggccgtcgtcctctagtacctggccccctaggtgctggacctggccggtaacgctgccatagacaacaagaagacccacattatcctaatccacttgcttctggccattctcaactacaagaatctcggtaagctgctggttcgcgttaccattaaccacggcggcgttcttcccaacatcaacccggtgttcttgccctagaatacccc

SEQ ID NO: 1626 - DNA, 454 bp, Zea mays
  Clone ID: TF_jC-zmXLIB3527P006bd04a1
taggccccacgccccgtccgaactccgaaccccagaacagagcaaagcctcctcggcctccctgtccccagccttccccgatggcccgcacgaagcagacggcgcgcaagtcagacgggcggcaaggcgccgcggaagcagctggcgacgaaggcggcgcgcaagtcggcgccggcgacgggcggcgtgaagaagccgcaccgcttccgcccgggcaccgtcgcgctgcgcgagatccgcaagtaccagaagagcacggagttgctgatccgcaagctcccgttccagcgtctggtccgcgagatcgcgcaggacttcaagacggacctccgggtccaggcctccggcgtggccgcgctggaagaggccgccgaggcctacctggtgggcctcttcgaggacaccaaactttgtgccattcacgccaagcgcgtgaccattatgcccaaggaca

SEQ ID NO: 1627 - DNA, 822 bp, Zea mays
  Clone ID: TF_ZmC369_118
gccggcccgggaacaaacagcgaaacacatctcctcgcatttcttcccatccgaccccccccttcgcaacccaaaccccaactcgccccgcatcgatggcgcccaaggccgagaagaagcccgcggcgaagaagccggcggaggaggagcccgcggccgagaaggcgcccgccgggaagaagccgaaggcggagaagcgggtccccgctggcaagtccgctgccaaggagggcggcgagggcaagaggggcaagaagaagggcaagaagagcgtggagacctacaagatctacatcttcaaggtgctgaagcaggtgcacccggacattggcatctcctccaaggccatgtcgatcatgaactccttcattaacgatatcttcgagaagctcgctgctgaggccgccaagctcgcgcgctataacaagaagcctaccatcacctcccgtgagatccagacctccgtgcgcctcgtccttcccggggagctcgccaagcacgccgtctccgagggcaccaaggccgtcaccaagttcacctcggcctaggctgcgcggccgccgcttgcaggattctctcctgtgttcacgtctcttgctgtagttaggtgctgctgcctgctggcttctatgtatgttatctatctgtctgtagcaactgtgttatctgataggaccgtaatggtgcttatttaacccagctatatgtttctatgtgaatcatctctctatcggttgttgagtacctttatattgtgatgttgatgtgaatgtgatttataaaatgcgtcagtttctacggtaaggttagctgctggccatc

SEQ ID NO: 1628 - DNA, 1025 bp, Zea mays
  Clone ID: TF_ZmC369_145
ttcccgggaacacatctcctcgcatttcttcccatccgatccccccttcgcaaccaaaaccccaactcgccccgcatcgatggcgcccaaggccgagaagaaacccgcggcgaagaagccggcggaggaggagcccgcggccgagaaggcgcccgccgggaagaagccgaaggcggagaagcgggtccccgctggcaagtccgctgccaaggaaggcggcgagggcaagaggggcaagaagaagggcaagaagagcgtggagacctacaagatctacatcttcaaggtgctgaagcaggtgcacccggacattggcatctcctccaaggccatgtccatcatgaactccttcattaacgatatcttcgagaagctcgctgctgaggccgccaagctcgcgcgctataacaagaagcctaccatcacctcccgtgagatccagacctccgtgcgcctcgtccttcccggggagctcgccaagcacgccgtctccgagggcaccaaggccgtcaccaagttcacctcggcctaggctgcgcggccgccgcttgcaggattctctcctgtgttcacgtctcttgctgtagttaggtgctgctgcctgctggcttctatgtatgttatctatctgtctgtagcaactgtgttatctgataggaccgtaatggtgcttattcaacccagctatatgtttctatgtgaatcatctctctatcggttgttgagtacctttatattgtgatgaagatgtgaatgtgatttataaaatgcgtcagtttctacggtaaggttagctgctggccatcaaggtccttgctaggtgtcaggtgcatacatcgttggattggaatgtagtcttgttctgattcagtttgattgtaatatgatgttttgtttgcacattgatctgtgaacaactgaactttgaaggtcactaacgtgttgctgatagaacccatggctgaaacaaatgtttttccagcagtaaaaaaaaaaacaaaaaaaaaaaaaaaaaagcccctagg

SEQ ID NO: 1629 - DNA, 709 bp, Zea mays
  Clone ID: TF_ZmC369_41
tagcgccagccaagccccagcgctcgtcacctccaatcaacaaattcccaatccgccgcttcccatcccgcgttcgccgctccatttgatcgaattcccgatggcgcccaaggccgagaagaagcccgcggagaagaagccgacggaggagaaggccgagaagaagcccagggcggagaagcgcgtgccgggcaaggagggcggcgagaagaaggggaagaagaaggccaagaagagcgtcgagacgtacaagatctacatcttcaaggtgctcaagcaggtgcacccggacattggtatctcgtccaaggccatgtccatcatgaactccttcatcaacgacatcttcgagaagctggctgccgaggccgccaagctcgcccgctacaacaagaagcccaccataacctcccgggagatccagacttcggtgcgcctcgtccttcctggggagctcgccaagcacgccgtctccgagggcaccaaggccgtcaccaagttcacctcggcctaggctgcgcggccgccgcttgcaggattctctcctgtgttcacgtctcttgctgtagttaggtgctgctgcctgctggcttctatgtatgttatctatctgtctgtagcaactgtgttatctgataggaccgtaatggtgcttattcaacccagctatatgtttctatgcgaaaaaaaaaaaaaaaaaaggccccta

SEQ ID NO: 1630 - DNA, 541 bp, Zea mays
  Clone ID: TF_LIB4073-021-Q6-N1-F8
aagcagggaagctagctattagtctttgttcccgaggagaacatcaacgatttctgagcacatacatagggggagggaggaggagaggacacaacgaagaaccctcctagaaagggagacctaacaaatccgtggacgctgcaggtcgctcagttgctggtgaacttggtgacggccttggttccctcggagacggcgtgcttggcgagctctccggggaggacgaggcgcacggaggtttggatctcgcgggaggtgatggtgggcttcttgttgtaccgcgcgagcttggcggcctcgccggcgagcttctcgaagatgtcattgatgaaggagttcatgatggacatggccttggaggagatgccgatgtcggggtgcacctgcttcagcaccttgaagatgtagattttgtaagtctccacgctcttcttggccttcttcttccccttcttctcgccgccctccttaccggaggacttggaggcgggcaggcgcttctcggccttgggcttcttttctggaggcgccttctccgcct

SEQ ID NO: 1631 - DNA, 634 bp, Zea mays
  Clone ID: TF_ZmC519532_1
aatttcccccaccttcgagcgaagccgcgcacagcacaccagagcacctctccccgttgcagcagcagcagcagcatccatggcgcccaaggctgccgagaagaagccggtggagaagacccccgcgggcaagaagcccaaggcggagaagaaggtgccggcgtccaaggagggcggcgagaagaaggggaagaagaagtccaagaagagcgtagagacgtacaagatctacatcttcaaggtgctgaagcaggtgcacccggacatcgggatctcctccaaggccatgtccatcatgaactccttcatcaacgacatcttcgagaagctcgccggcgagtccgccaagctggcgcggtacaacaagaagcccaccatcacatcccgggagatccagacctccgtccgcctcgtcctccccggcgagctcgccaagcacgccgtctccgagggcaccaaggctgtcaccaagttcacctccgcctaatttggcacgtcgtccgtgtgtcttctctggtggatggatcgatgtcaccctgtagtttcctgttcggactctgtcctcttgtaacttgtgctggttgtgtgggatcatatttcatgatccggagaaatagtaatttcagttcttgat

SEQ ID NO: 1632 - DNA, 657 bp, Zea mays
  Clone ID: TF_LIB5116-031-A1-PF1-E3
aacaactcagagcatcccgatccagcgcaaccgccgcaaacaccacacctcgagagtcctcgtcgccggagaagtagtagcaagcaagatggccggcaggaagggcggcgacaggaagaaggccgtgacccgctccgtgaaggccgggctccagttccccgtcggccgcatcgggcgctacctcaagaagggccgctacgcccagcgcgtcggctccggcgcccccgtctacctcgccgccgtcctcgagtacctcgccgcagaggtcctggagctcgccggcaacgcggccaaggacaacaagaagacccgaatcatcccgcgccaccttcttctcgccgtccgcaacgaccaggagctcggcaggctgctcgccggcgtcaccatcgcccacggcggcgtgatccccaacatcaactccgtgctgctccccaagaagtcccccgccgccgccgagaaggaggccaagtcgcccaagaagaagaaggccgccaagtcccccaagaagaaggtcgccgccaaggagtagccgccaccatagcctagcctgcgccgaggaaccgtgtcgtgttgcctaattagttggatcttgtatgtagtgcctggtctcgagttgcaaggtgtagcgtagtggccctttcatcagatctcgatgag

SEQ ID NO: 1633 - DNA, 552 bp, Zea mays
  Clone ID: TF_LIB5116-048-A2-PF1-D4
acttcgctcagagcattccgatctagcaccgtcgccgcaaacaccacacctcgagagtcctcgtcgccggagaagtagtagcaagcaagatggccggaaggaagggcggcgacaggaagaaggcggtgaccaggtccgtgaaggccgggctccagttccccgtcggccgcatcgggcgctacctcaagaagggccgctacgcccagcgcgtcggctccggcgcccccgtctacctcgccgccgtcctcgagtacctcgccgccgaggtgctggagcttgccggcaacgcggccaaggacaacaagaagacccgcatcatcccgcgccacctgctgctcgccgtccgcaacgaccaggagctcggcaggctgcttgccggcgtcaccatcgcccacggcggcgtcatccccaacatcaactccgtgctgctgcccaagaagtcccccgccgccgccgagaaggaggccaagtcgcccaagaagaagacctccaccaagtcccccaagaagaaggtcgccgccaaggagtagaattccccatagcatagccatt

SEQ ID NO: 1634 - DNA, 324 bp, Zea mays
  Clone ID: TF_LIB3205-078-P1-N1-H9
cgggacaaatcggcctacacgaactaccatacaaaataaacttgtaaagccgtttaaacactactatattcccgcgccgtctaaaagcgaacaaacagtataaagttacaaattgcactcttacattccttcgccgacactggggccggacgcgaaatacgcctacacgcgctcgccacggatgcggagggcgagctgtatatctttggccatgaaggtgacccgctttgcgtggatggcccaaaagtaggtttcctctaacacgccgacaaaataagccattacagctttctggaaggccaaaactgcattggttttgaaacc

SEQ ID NO: 1635 - DNA, 401 bp, Zea mays
  Clone ID: TF_ZmC1045423_1
gttcgttgggcggtgctggtttttcgctcgtcgactgcggctcttcctcgggcagcggaagcggcgcggcggtcggagaagtggcctaaaacttcggcgttgggtgaaagaatatggcccgaaccaagcagactgctcgtaagtccaccggtgggaaagccccccgcaaacagctggccacgaaagccgccaggaaaagcgctccctctaccggcggggtgaagaagcctcatcgctacaggcccgggaccgtggcgcttcgagagattcgtcgttatcagatgtcgaccgagctgctcatccggaagctgcccttccagaggttggtgagggagatcgcgcaggatttcataaccgacctgaggtttcagagcgcagccatcggtgcgctgcaggaggct

SEQ ID NO: 1636 - DNA, 531 bp, Zea mays
  Clone ID: TF_LIB4729-119-A1-K1-A4
aaacacagcgaacacatctcctcgcatttcttcccatccgatccccccttcgcaaccaaaaccccaactcgccccgcatcgatggcgcccaaggccgagaagaaacccgcggcgaagaagccggcggaggaggagcccgcggccgagaaggcgcccgccgggaagaagccgaaggcggagaagcgggtccccgctggcaagtccgctgccaaggaaggcggcgagggcaagaggggcaagaagaagggcaagaagagcgtggagacctacaagatctacatcttcaaggtgctgaagcaggtgcacccggacattggcatctcctccaaggccatgtccatcatgaactccttcattaacgatatcttcgagaagctcgctgctgaggccgccgcttgcaggattctctcctgtgttcacgtctcttgctgtagttaggtgctgctgcctgctggcttctatgtatgttatctatctgtctgtagcaactgtgttatctgataggaccgtaatggtgcttattcaacccag

SEQ ID NO: 1637 - DNA, 801 bp, Zea mays
  unsure (1)..(801): unsure at all n locations
  Clone ID: TF_LIB4729-002-R1-K1-A4
accgaaaccttaaatctncccgcaatccctatcagaagccttccatcctcactcgctcgatggcccgcacgaagcagacggngaggaagnccaccggcggcaaggcgccgaggaagcagntggcgactaaggcggnccgcaagtctgcccctgcgaccggnggagntaagaagccccaccgcttccgccccggcaccgtcgcgctccgggagatccgcaagtaccagaagagcacggagctgctgatccgcaagctgccgnnccagcgcctggagcgggagatcgcgcaggacttcaagaccgacctacgctnncagagctccgctgtctccgacctgcaggaggcggntgaggcctaccttagnaggactactaaaggacaccaacctctgngccatccacnccaagcgcgctaccatcatgcccaaggacatgcagcttgcccgccgcattcgcggggagagggcctaagcgtaatattcctcctgccactagngcccgatcagaagatgtagagaatcgccnggggctctgaaaattgggattacaggcaaatcacanggatagaagggtggtcactgctgcaagttaacgataaaaaagaaaaaggaaataagaaaagagccccggnnnnaagaaaaaaaaaaaaaaaaacaggacattaaaaaaaaaaaacaaaaaatcacattaaaaaaagaanaaacaagaccccaaaaagaaaaacaaancacaaaaaaaggnnnncnagnnnaaaaaaaaaaaancnaacacacaccaaacngacaaaaaaaaccaacnaac

SEQ ID NO: 1638 - DNA, 429 bp, Zea mays
  unsure (1)..(429): unsure at all n locations
  Clone ID: TF_LIB3245-603-P1-K1-D6
caaatcctcctagcgaattcaccacagcttctcaccaccgctaccttcgatggcacccaaggcggacaagaagccggcggcgaagaagcctgcagaggagcccgcgacagagaaggcggagaaggctccggcggtgaagaagcccaaggccgagaagcgcctcccggcgggcaagtccgccggtaaggagggcggcgagggcaagaaggggaaaaagaaagcgaagaagtccgtggagacctacaagatctacatcttcaaggtgctgaagcaggtgcaccccgacatcggcatctcgtncaaggccatgtccatcatgaactccttcatcaacgacatcttcgagaagctcgcggccgagtccgccaagctggcgcgctataacaagtagcccaccgtcacctgccgcgagatccagacctcggtgcg

SEQ ID NO: 1639 - DNA, 634 bp, Zea mays
  unsure (1)..(634): unsure at all n locations
  Clone ID: TF_LIB4729-064-R1-K1-E10
acacagaatcttcaatctcccgagcaaagcaaagctctagccttccatcctcactcgctcgatggcccgcaccaagcagacggctaggaagtccaccggcggcaaggccccgaggaagcagctggcgactaaagcggcccgcaagtctgcccctgcgaccggcggagtgaagaagccccaccgcttccgccccggcaccgtcgcgctccgggagatccgcaagtaccagaagagcacggagctgctgatccgcaagctgccgttccagcgcctggtgcgggagatcgcgcaggacttcaagaccgacctacgcttccagagctccgctgtctccgcgctgcaggaggcggctgangcctaccttgtcgggctcttcgaggacaccaacctctgcgccatccacgccaagcgccgtaccatcatgcccaaggacatccagcttgcccgccgcatccgtggggagagggcctaagcatcatatattctgtcatcagtgcccgatcagaagatgtagaagaggtgctgggttctggtagttgggttactgtcgaatcatcgagtagttgggtggttcactgcttgtacttagtatcatggtgcataatgaaatggcaatgaacctatgtatcacggg

SEQ ID NO: 1640 - DNA, 333 bp, Zea mays
  Clone ID: TF_LIB4979-058-R1-K1-G4
tcactcgcaattccgcattcgttccaactcctgagcactttctcctcgtccccgacaagccaatcgaagccgagatacggccatggactccaccggcaccggagcagggggtaaggggaagaagggagcggccgggcgcaaggtcggcgggccaaggaagaagtcggtgtcgaggtccgtgaaggccgggctccagttccccgtctgccgcatcgggcgctatttgaagaatggccgctacgtgcagcgtgtttgcatctgctcccgcgtctacctcaccgctgtcctcgtctccctcgtgtgtgggatcgtcaagccccacgtttttttttt

SEQ ID NO: 1641 - DNA, 430 bp, Zea mays
  Clone ID: TF_LIB4719-018-Q1-K1-H12
cgggagcaagccgcatccgcaccacgcagccgtactcccgtgctcgaaaccactctcgccgctccgaggcccgcacgaagcacacagcaaggaagtcgaccggcggcaaggccccccgcaagcagctgggcactaaggctgcgcgcaagtcgcccccggccaccggcggcgcgaagaagccccagcgcttccgccccgccaccgtcgcgctccgcgagatccgcaagtaccaaaagagcactgagctgatcatccccaagctcccattccagcgcctcgcccgccagatcgcgcaagacttcaagactgacccgagcctccagtcctccgccgacgcggcacaggaggaggccgcccaggcataccatggaggggcctgtgagaggacaccaacctatgcgccatccacgccaagcgagtcactatcagg

SEQ ID NO: 1642 - DNA, 365 bp, Zea mays
  Clone ID: TF_LIB3180-038-P2-M2-C6
ttcgaattacgattcccaatccagaaaaccttaccagccttttgaaaactcagagagggacccgatggcacccaaggcggagaagaagccgccggctaagaatcccgcagaggaggagcccgcggccccggcggagaaggcccccgctgggaagaagccgaaggcggagaagcggctcccggcgggaaaatcctccggcaaggaaggcggtgttgacaagaaggggcggaagatggccacgaagagcgtggagacgtacaagatctacattttcaaggtgctgaacctggtgtacccggacatgggcatctcctccaaggccatgtccatcatgaactccttcatcaacgacatctttgagaagc

SEQ ID NO: 1643 - DNA, 309 bp, Zea mays
  Clone ID: TF_ZmC369_57
ccgcggaggccgccaagctcgcccggtacaacaagaagcccaccatcacctcccgcgagatccagacctccgtccgcctcgtcctccccttcgagctcgccaagcacgccgtctcggagggtaccaaggccgtcaccaagttcacctcgtcttagcccccttgtagtaggcgtcgttgttgtctgcttctcaagcaagcactgtgatgtgccgcttctcatggtagtagtggtggttggctggtgtgtgtaagtggtgcagtggcttttgcctgtgttatgaatttagtcatggtggtaatgcattgct

SEQ ID NO: 1644 - DNA, 568 bp, Zea mays
  unsure (1)..(568): unsure at all n locations
  Clone ID: TF_LIB3608-022-Q1-K6-D10
tcgtcctgctttccttgcaccgttgcgttcccctcccacccagaccgtggcgcccaaggcctganaagaagcccgcggcgaagaaccggcggaggaggagcccgcggcgtgagaagacgacctgccgggtaagtaagcccaaggcggagaagcggatccccgctggcaagtccgccgggaaggagggcggcgagggcaagcgtggcaagaagaagggcaagaagagcgtggagacgtacaagatctacatcttcaagtgctgaagcaggtgcacccggacatcggcattttctccaaggccatgtccatcatgaactccttcatcaacgacatctttgagaagctggccggcgaggccgtcaagctcgcgcgctacaacaagaagtctactattacctaccgtgagatccagacctacgtgcgccttgtgctacccggtgagctcgccaagcacgccgtttttgagggtacctaagtcgtcaccaagttcacctgctttctaggcttggacgctcgccctttgttggcttttcttgtgttgatgttcgccttgtgttgtaatttagat

SEQ ID NO: 1645 - DNA, 615 bp, Zea mays
  Clone ID: TF_ZmC275904_1
aattcggcatgaggcacatctcctcgcatttcttcccatccgatccccccttcgcaaccaaaaccccaactcgccccgcatcgatggcgcccaaggccgagaagaaacccgcggcgaagaagccggcggaggaggagcccgcggccgagaaggcgcccgccgggaagaagccgaaggcggagaagcgggtccccgctggcaagtccgctgccaaggaaggcggcgagggcaagaggggcaagaagaagggcaagaagagcgtggagacctacaagatctacatcttcaaggtgctgaagcaggtgcacccggacattggcatctcctccaaggccatgtccatcatgaactccttcattaacgatatcttcgagaagctcgctgctgaggccgccaagctcgcgcgctataacaagaagcctaccatcacctgccgtgagatccagacctccgtgcgcctcgttcttaccggggagctcggcaagcacgccgttttcgagggcaccaaggtcggggccaagtgcaccctggggctaagctgggcggacggcggttgggggattgtgtgctggggtgcgggctgtgggtggggcctcgcgctggtgggtggtgggg

SEQ ID NO: 1646 - DNA, 674 bp, Zea mays
  unsure (1)..(674): unsure at all n locations
  Clone ID: TF_LIB4667-010-Q1-K1-D4
gaccctcgaggttgccggacccgaatcttaatctcccagcaatccctagcagaagccttccatcctcactcgctcgatggcccgcacgaagcagacggcgaggaagtccaccggcggcaaggcgccgaggaagcagctggcgactaaggcggcccgcaagtctgcccctgcgaccggcggagttaagaagccccaccgcttccgccccggcaccgtcgcgctccgggagatccgcaagtaccagaagagcacggagctgctgatccgcaagctgccgttccagcgcctggtgcgggagatcgcgcaggacttcaagaccgacctacgcttccagagctccgctgtctccgcgctgcaggaggcggctgaggcctaccttgtcgggctcttcgaggacaccaacctctgcgccatccacgccaagcgcgtcaccatcatgcccaaggacatccagcttgcccgccgcatccgcggnggagagggcctaagcgttatattctctgtcatcagtgcccgatcagaagatgtagagatgtgctgggttctgtagtttgggttactggcgaatcatcgagtagtgggttggtcactgttggaacttaattatcatgatgcatatgaaatgggcatgagctttggttttacttaaaaaagaaaaaaaaagggggccctcg

SEQ ID NO: 1647 - DNA, 627 bp, Zea mays
  unsure (1)..(627): unsure at all n locations
  Clone ID: TF_LIB4979-095-A1-K1-A11
aacctgcaatcttcaatctccccagcaatccctagcagaagccttccatcctcactcgctcgatggcccgcacgaagcagacggcgaggaagtccaccggcggcaaggcgccgaggaagcagttggcgactaaggcggcccgcaagtctgcccctgcgaccggcggagttaagaagccccaccgcttccgccccggtaccgtcgcgctccgggagatccgcaagtaccagaagagcacagagctgctgatccgcaagctgccgttccagcgcctggtgcgggagatcgcgcaggacttcaagaccgacctacgcttccagagctccgctgtctccgcgctgcaggaggcggctgaggcctaccttgtcggtctcttcgaggacaccaacctctgcgccatccacgccaagcgcgtcaccatcatgcccaaggacatccagcttgcccgccgcatccgtggnggagagggcctaagcatcgtatattctgtcatcagtgcccgaccagaagatgtagagatgtgctgngnnntctgtagttgggttactgtcgaatcatcaggtagntgggtgttcactgctgtaacttattatcatgatgcatatngaatggcaatgaactatgtta

SEQ ID NO: 1648 - DNA, 809 bp, Zea mays
  Clone ID: TF_LIB4762-141-Q1-K1-F10
ttgggtacctcgaggccggccggggcgaatgtcgcagtccccgcccgccctcccgacatcgacgccttcctccctcgcgtgccatgccccgttctcccgacatcgacgtcgggtccctgcctcgtctggtcctctcggtgtgggaaggaaccaaaccgagacggaggcagagtacgacgcctgccttccctcttccgccgagcgcccgctgcgtcattcttgtccctcctcttcatcttcatcggccaaccgattgccactgactccggccatcggcgactgtccctcgcgcatccctcctcctcgtgatgcccgctcccccaaggacctgtgcctgcggcagcgggaggagatcaggacgctcaaatatgtcgtcctgttcctgcacgtggagccggagccagagttcgaccgccgccttcggggcgatatttccatgctcaccgaccagatccagtgcctcacgcaggagctcgccgcccaggttaaggccgagaagcactcggcaaggtcgtgctttgacgaggatggatactgctcttcccctaggacgtcggggtttaacgaggataccgctttctctctggtgtgttcgattactccaccatctcactctcacagcaaaacgattggcatgtcgatacgctgtttccaaaacgattggcccccgtgtacctctccgccgttctcgagtatcgcaccgccgaggtgttggagctggccgggaacgctgctcgtgacaacaagaaccgtatcgtgctgcgccacatccagctggtggtgcggaacgacgaggagctgagggttcg

SEQ ID NO: 1649 - DNA, 326 bp, Zea mays
  Clone ID: TF_LIB3150-112-P2-K1-C2
gggggagggggcagatcacatccattgcattttttcagaaccgctaatcataatcctccggtaacatcagcccatagcaagaagccttcttttgaaaacaacccacaccttttacacaaccatgacgggcttaactaaacacctccagcagtagggagcaggccccgaaaccgaacccccttaggcccctccccccggattccgcccccaagctggatttccttgggcattatggtgacccccttggcgtggatggcacaaaggttggggtcctcgaaaaggcccaccaggtaggccttgggggccttctgcaacgcggttaccgg

SEQ ID NO: 1650 - DNA, 580 bp, Zea mays
  Clone ID: TF_LIB4742-062-R1-K1-G12
attgggtacctcgaggccggccgggaactccatacatttatctgataccctactgcctgtaataacccctactcgtagtcttgtagattcatgatggggagccgatggcatcccatgcgcgcaagaagtcatctgacgttgacgccgcagaggagcagcccgacgccccatggtacaaggcccctgctcgcactaagccaaacgctgactagcatttccttgcccgaaaatccttcgcgaagccaaggcgatagttcaccaacaacggtcgataacaaggcccacaagagcgtgacagaaaacaatatctacatcttcaagtggccacaaactggtgcacccagacatcaccatcacctccactgccatgaccattatgaactcatccgtcaacgacatcactgagaaacttgccggagaggggcgcaagttctcccgctaaagcaagaagaccaccatcaccaaccgacagatccatacctcgggccgtctcgtgccacccggctatatccacaagcacaccgtgtcgtaggagaccaatgccgtcaccaagttaagctagatctaatctcctttatag

SEQ ID NO: 1651 - DNA, 516 bp, Zea mays
  Clone ID: TF_LIB4762-004-R1-K1-A11
gccgggttggactgaagggtgctccctggaggtcccagttccatctcgtctccaaacccgaactccaagtcgccccgcatcgatggcccccaaggccgacaagaagcccgcggcgaacaagccggcggaggaggagcccgctgccgagaaggcgccggccgggaagaagcccaaggcggagaagcgtgtcccagcaggcaagtccgccggcaaggagggcggcgagggaaagaggggccggaagaagggcaagaagagcgtggagacctacaagatctacatcttcaaggtgctgaagcaggtgcacccggacatcggcatctgctctaaggccatgtccatcatgaactccttcatcaacgacatcttcgagaagctcgccgtcgatgccgtcgagctcgcgcggtacaacaagaagcccaccatcacctcccgtgagatccagacctccgttcgcctcctgctccccgggtagctcgtcaagcacgccgtcctccggggcacccaggccgtcac

SEQ ID NO: 1652 - DNA, 770 bp, Zea mays
  Clone ID: TF_ZmC653_44
ccgggtcaccggccaccgcgaagccagagccccacgccccgtccgaactccgaaccccagaacagagcaaagcctcctcggcctccctgtccccagccttccccgatggcccgcacgaagcagacggcgcgcaagtcgacgggcggcaaggcgccgcggaagcagctggcgacgaaggcggcgcgcaagtcggcgcgctgcgcgagatccgcaagtaccagaagagcacggagttgctgatccgcaagctcccgttccagcgtctggtccgcgagatcgcgcaggacttcaagacggacctccggttccagtcctccgccgtcgccgcgctgcaggaggccgccgaggcctacctggtgggcctcttcgaggacaccaacctctgtgccatccacgccaagcgcgtcaccatcatgcccaaggacatccagctcgcgcgccgcatccgcggcgagcgcgcctaggcggttcggttgcggcgcctgctcgctactgatggaggtgcttagtttagcacgtcatggttgtgttataggtgtgcgttgttgttttcaagaggtagcttcttgctatgtgctgatgttaacggaggattatgattagcagttctgaaaaaaatgtaatggatgtgatctgctctatctacatgttttctgtctttgtcctggaatcccatggtgtttagcattgatttcacatgtcttgtttttctctgaatcctgcttgtaatgacatcgacatctgttacacgatctgcttcaatttgtttt

SEQ ID NO: 1653 - DNA, 553 bp, Zea mays
  Clone ID: TF_LIB4730-129-A1-K1-H11
cctcgagccggccgggaacacttcaacactctcctctaatttctttccattcgatccccccttcgcaatcaaaaccccatctcgtcccttatctatggcgcccatagccgagaaaaagcccgcgccgaacaagacgaaggaggaggatgccgcgctgcgataatgcgcccgccgggaacaacccgaacgcggataaccgtttccccgctgttaagtccgctgccaaggagggcggtgcggatgagaggatgaagatcaaggtgaagaagatcgtggagacctgacatatctacatcttctgggtgctgaagcaagagcacccgtacattggcatctcctccaaggccatgtcgatcatgaactccttcattaacgatatcttcgagaagctcgctgctgaggcagccaagctcgcgcgctataacaagaagcccaccatcacatcccgtgagatccagacctccgtacgcctcgtccttcccggggagctcgccaagcacgccgtctccgagggcaccaaggccgtcaccaagttcacctcggcctaggctgc

SEQ ID NO: 1654 - DNA, 689 bp, Zea mays
  unsure (1)..(689): unsure at all n locations
  Clone ID: TF_LIB4762-046-R1-K1-H9
cgggcttgctcgctgcgccgccgcctccgaatcgtcccttcgtccccacgagcaaccgagtgtccgccggcgttgagatgttggtttatgaggatctcctatctggcaacgagctagtgaggagttgattacccagcagncacgtaaggcaccccctgctaccggcggagttaagaagccccaccgcttccgccccggtaccgtcgcgctccggggggggggggagtaccagaagagcacagagctgctgatccgcaagctgccgttccagcgcctggtgcgggagatcgcgcaggacttcaagaccgacctacgcttccagagctccgctgtctccgcgctgcaggaggcggctgaggcctaccttgtcggtctcttcgaggacaccaacctctgcgccatccacgccaagcgcgtcaccatcatgcccaaggacatccagcttgcccgccgcatccgtggggagagggcctaagcatcgtatattctgtcatcagtgcccgatcagaagatgtagagatgtgctgggttctgtagtttgggttactgtcgaatcatcgagtagttggttgttcactgctgtaacttattatcatgatgcatatgaaatggcaatgaactatgttatcagttcttgaatttcaaaaccaataaaggacggggcacccacccacaaaaaaggcggccct

SEQ ID NO: 1655 - DNA, 283 bp, Zea mays
  Clone ID: TF_LIB4730-069-R1-K1-H10
ctcattcacaggtcgcagccgtatttctgtctcgtatcctctggtggcggtggcggggcccgaacaaagcaaacagcaaggaggtcgaccggcggcaaggccccccggaagcagctggccactaaggctgcgcgcaagtcggacccggccaccggcggcgtgaagaagccccaccgattccgccccggcaccgttgtgctcggggaggggcggaagtaccataagagcactgagctgatcattcgtaagataatgttgcagcgcctcgtacgcgagatcgcgc

SEQ ID NO: 1656 - DNA, 596 bp, Zea mays
  Clone ID: TF_LIB4729-123-A1-K1-D9
acagaacgatctcaatctccctagcaatctctagcagcagatcctcgtgcgaagcaaagcgctagcccccttcgtactgtcccgatggcccgcacgaagcagacggcgaggaagtccactggcggcaaggcgccaaggaagcagctggccaccaaggcggcgcgcaagtctgccccggcgaccggcggagtgaagaagccccaccgtttccgccccggcaccgtcgcgctccgggagatccgcaagtaccagaagagcacggagctgctgatccgcaagctgccgttccagcgcctggtgcgtgagatcgcccaggacaccaacctctgcgccattcacgccaagcgcgtcaccatcatgcccaaggacatccagctcgcccgccgtatccgtggggagagggcctaggcgtcgtcccggtggaggtggaagtagtagtcgccgtttctgtcatcactgtctggctagaaggtgtagagatgtgccgggttctgtagtttgggttatcggtcaaatcatgatgtagttgggtcttccctgctgtaatttaactatgactatgcaatggcaatgaagttctcggttatcagttcctg

SEQ ID NO: 1657 - DNA, 594 bp, Zea mays
  Clone ID: TF_700379678_FLI
gccactcgaagccgagatacggccatggactccaccggcaccggagcagcggggaagggaaagaagggagcggccgggcgcaaggtcggcgggccaaggaagaagtcggtgtcgaggtccgtgaaggctgggctccagttccccgtctacctcgccgctgtcctcgaatacctcgccgctgaggttctggagctcgccggtaatgctgccagggacaacaagaagactcgcattattccgcgccacgtgcttctggcgatccggaacgacgaggagctcgggaagctgctgggcggcgtgaccatcgctcacggaggtgtgctccccaatatcaaccctgttctgctgcccaagaagacggcggagaaggcgtccagtggcgggagcaaggaggcaaagtcgcccaagaaggccgccaagtcccctaagaaggcatagactgactgtccggagtgatctgatgtttagcagtaccttgttaccagtatgcggtgatgcgtaggctgcagatgggacgaatgtgcttgtatgtgtatgtgtcctgctgcaagttgtcctttgctatttagaatggaagaagaaatgccttgtttc

SEQ ID NO: 1658 - DNA, 1919 bp, Zea mays
  unsure (1)..(1919): unsure at all n locations
  Clone ID: TF_ZmC38430_1
cgatgtcccccttgtgacaagccttctaggcagcaattttggtggatgtaggcatcacgccgccggccgcgatcgtcacagtgccagaagcttgctcagctcctcgtcgttccgcaccgccagctgaatgtggcgcggcacgatccggttcttcttgttgtcccgagcagcgttcccggccagctccagcacctcggcggcgaggtactcgaggacggcggagaggtacacgggagccccggcgcctacgcgctccgcgtacttgccggccttgaggtaccgcgcgatgcggccgacggggaactggagcccagccttggaagaccgcgacacagacttggtcgctggcttcgccttcccacggccgctgcctccggtggaactcatgctgcttcgctttgagggtgtggaaacttcggaactcttcgaggttggggcgcggtggagaatggaggagttttttttttttcattttctgaaatggaactcaaaggaacttcccggtcataaatacgacagatcaaaaaagtattattgtgagtccaactacaaggaaatataaaattcagagcacccaaatccaaaactttatgcccatttaccgcacaggctgctggttgtaatgactcttctctttcttcttggccgccgcaagccttgcgctccttgctgtggcctcggcagcggcgattttggcaccggtgtccgtctctttgctcgatctcttcttcttcattgaagccatcttcttcaaacgctccttcacgtccacagcagtggtatcttcttcatcaggtcctgcactggcagtctcctctgacccctcggctgcttcttgtgtttcttttcttccctcctttgaactcttgtccttctttttcttcttcttggaggtcttgctctctgaggggacagtagcatcttcctttttctctgcatcaccagcttggttggcaccttccttctcagcatcctgtgcagcgctggttgagttcccagaaagtcccagctcagccaatactgcatcaagttctgctagttccctctttttcaactcctttttagacagctgcctttctgtatctttgggtggcgcagccagggcttcaactgttttgacagcaagttcggctggggcatcttccacttcatgctcagctccatcatcaaggtcctcgtcatcaaggtcctcgtcgtcactctcaacgtcctcctgaagggcggcgcggacagcatcctcgacgtcctcctcctcctccttggcgggctcggcggcggcggcggcggcccatacggggcgcggcggcgcggtggtggcgaagtagtcgtcgtcgtcgtcgtcctcgacgtctgcccaggacttggtggtgagcggcgcgggagcccagaagacatccttctgcggcggctcctgctgctgctgcgcggcccccgcgccgtgcttcttcctggaggacggcccggccgccctgcccttgtcgcccttcttcttcttcttgagggactcgagcgccgcgaacacgttgccggtgttgagcttcacctcctccgccgccgctcctccccgcctcccccctcccaccatgctccccgaccgccgcggtgggaccccggcgaggctagccgagcgaaccacggacccgaatctgaatctgccccgcccgccgatctgcggggacgagtcggcgcgggagggtcctcgccgcctggggaccgaacttggattgggatttggggtagggatggaccgatggaggcgcggttgctagggttttgagatgggtggagccgtggagggtggagactggagacgcgtgccgcggccctcccctgtccggcgtttgtttaagcagcggcgcaacgcagatacgactacgagagagaggcacaggcacggtggtctactggtctgctnnnnn

SEQ ID NO: 1659 - DNA, 743 bp, Zea mays
  unsure (1)..(743): unsure at all n locations
  Clone ID: TF_LIB4980-056-A1-K1-D5
tcctacatgggctaaaaactatggcacttaaagctgaaaagaagcccactggaggaaaggctcccgctaagagcatcgaaaagaaggccaagtctggtgatgccaagaagagaaaggctagccgtaaggaaacctactcttcctacatctacaaggtcttgaagcaagtccaccctgatactggtatctccaacaaggccatgtccatccttaactctttcgtcaacgatatctttgagcgtattgctggtgaagcttccaagctcgctgcttacaacaagcgttccaccatctcatctcgcgagattcaaaccgctgttcgtctcattcttcctggtgaattggccaagcacgccgtctctgaaggtactaaggctgtcaccaagtacaccagctccaaataaatgaattctggctgggctgaaatggggttgcagaatttgtgtgaacttggcttcaaaaaaagaaaaatatccatcttgcaactctttttttttcactttgttgcgcgcatacaacttattttgcacgcctttcagtttcacccaatctcattcacaagaaattcatccatgttttgtcagtctcgtttacaaacaactgacaatttgggcaacgcactatttatcccttcaactcgtttcatctgtacagactccccttttttctttaccgctgtttgtttctttaataacaattcctatatcatctgtnaaaaaaaaaaaaaaaagggccctagggcc

SEQ ID NO: 1660 - DNA, 648 bp, Zea mays
  Clone ID: TF_LIB5116-035-A1-PF1-G12
atctcccattcatccctcacaatctgtccgactccggccatctctccggcaaccaccgtatccgcgcgtccacccttcgtagcgacgagaagatgagttctgccggcagcgggaggggcaagggcaaggcggtgtccaagaccgtctcgcggtcttccaaggccggcctccagttccccgtcggccgcatcgccaggtacctcaagatcggcaagtacgcccagcgcgtcggtgccggcgcccctgtctacctctccgccgtcctcgagtacctcgccgctgaggtcctggagctcgccggcaatgctgcgcgcgacaacaagaagacccggatcgtgccgcgccacatccagctggcggtccgcaacgatgaggagctgagccggcttctgggcgcggtcaccatcgccgccggtggtgtgctgcccaacatccacaccacgctgctccccaagaaggtcggcaagggcaagggcgacatcggctccgcgtcccaggagttctagaacctcgcagatcaaactagaactaatctaacaacgttctgggtcaatctggttcttgttattattcatcgtgatatgtcaacgtgaaaacatcttattgatgtctatgatgcggaatgaatggtgaaaacatgtttttact

SEQ ID NO: 1661 - DNA, 347 bp, Zea mays
  Clone ID: TF_LIB3076-042-Q1-K1-H11
gcgaacgcattcctgccatctcccaagacctcctcagactttagaatcgcatctgcgtccatgggcgccgggggcactggaactggagggaaggcgaataagggagcggccggtcgcaaggcctgcgggccgatgaagaagtcggtgacgaggtccgtgaaggccgggctccagttccccgtcggccgcatcgggcgctacctcaagaagggccgctacgcgcagcgctttcttcagcggtgcccctcgctacctcgcggcctgcctggagtacctcgccactgatgtcctggagctcgccggcaacgctgccaaggacaacaagaagacgcgcatcgtcccgcgcc

SEQ ID NO: 1662 - DNA, 594 bp, Zea mays
  unsure (1)..(594): unsure at all n locations
  Clone ID: TF_LIB4766-069-R1-K1-B4
ccggccgggaacgcanttcccgacttgantcaactgctgagacnctcccctcgagcgcgacagccaatcgaagccgactatacggtcatggactccaccggtaccgtatcagggggtaaggctaagaaagcagctcccgcgcgctaggtcggcggaccaaggaagaagtctcttgcccaggtgcgagaaggacgggctccagatccccgccggccgacatcgggcgctacttgaataatgggctctaccctcaccgaggcggcaccggagcccccgaatacctcgccgctgccctccaatacctcggccctgaagttctggagctccctggtcatgctgccagggacaaccagaacactcccattattccaccccacgggcttctggcgatccggaaccacgactagcttgggaagctgctgggcagcgtgaccatcgctcacggtgtagtgctccccaatatcaaccctgatctgctgtccaacaacaccgggttcacgaggccagagtgtggagtaaggagcgacagtccccccaaaaggtcgcccagtcccccaagaatgcatagactgactgactggagtgatctgatgc

SEQ ID NO: 1663 - DNA, 694 bp, Zea mays
  Clone ID: TF_ZmC119_1386
ctcgaggccggccgggatcacaattcactccactcatcttttctcgtttagaacctctaaaatttcccccactcgccagtcgcagcagcacctgtagcagccatggacgccagcggagccggtagcaaggggaagaagggggcggccgggcgcaaggcaggcggccccaggaagaagtcggtgacgcggtccgtcaaggccgggctgcagttccccgtcggccggatcgggcgctacctcaagaagggccggtacgcgcagcgcgtgggcactggcgcccccgtctacctcgccgccgttctggagtacctcgccgccgaggttctggagttggcagggaacgcggcgaaagacaacaagaagacgcgcatcatcccgcgccacgtgctcctgcccaagaaggcggcggagaaggcggccagcggcggcagcaaggagcccaagtcccccaagaagggcgccaagtcccccaagaaggcttagaaagtagggtcttcatttgcgctgtgtgctgtagcatgttcgtgtctagatctgtggatgggatgtgtcatgctctagtatcgtccttgtgtcttattgtatgttcgtcttcatcgagaagatcttcagcagtcagagctcgttgtgtactaatgttcccccatgttctgtttctcgttctgattctgcaattcgtcatattgttgaattt

SEQ ID NO: 1664 - DNA, 728 bp, Zea mays
  Clone ID: TF_LIB4764-084-R1-K1-F2
cgattgggtacctcgaggccggccggaagaaaagcctccattcccgagtctccagccaaccgcatccagtccacccccatccccctcgaccccgacaaacccgacccgatggcgcccaaggccgagaagaagccagcggagaagaagccggcggccgaggagaaggcggagaagacgaccgcaggtaagaagcccaagtccgagaagcgcctgccggcctcgaagtcctccggcaaggagggcggcgagaagaaggggaagaagaaggccaagaagagcgtggagacctacaaaatctacatcttcaaggtcctgaagcaggtgcaccccgatatcgattgttgtttatctttaaaaaaaatcggcatctcctccaaggccatgtccatcatgaactccttcatcaacgacatattcgagaagctcgccggcgaggccgccaagctcgcgcggtacaacaagaagcccaccatcacctcccgcgagatccagacctccgtgcgcctcgtcctcccaggagagctcgccaaacatgccgtctccgagggaaccaaggccgtcaccaagttcaccagcaattgagcagcctgcagcgtccacggatttgttaggtctccccttcttacaagggttcttcgtcgtgtcctctacccctccccggctatgtatgtgctgtgaaatcgttgatgttctcgtcgggtgaacaaaggccagtagctagcttgcct

SEQ ID NO: 1665 - DNA, 696 bp, Zea mays
  unsure (1)..(696): unsure at all n locations
  Clone ID: TF_LIB4730-012-R1-K1-D8
cccgtccgcatcgcccctcatctccctcgaccccgaaatccccgacccgatggcgcccaaggccgagatgatgccagcggagatgaagccggcggccgaggagaaggcggagaagacgaccgcagggaagaagcccaaggccgagaagcggctgcccgcgtccaagtcctccggcaaggagggcggcgagaagaaggggaagaagaaggccaagaagagcgtggagacctacaagatctacatcttcaaggtgctgaagcaggtgcaccccgacatcggcatatcctccaaggccatgtccatcatgaactccttcatcaacgacatcttcgagaagctggccggcgaggcagccaagctggcgcggtacaacaagaagcccaccatcacgtcccgcgagatccagacctccgtgcgcctagtcctccccggagagctcgccaagcacgccgtctccgagggaaaccaaggccgtcaccaagttcaccagcaactgagcgcgctgcgggatccgcgggatctgttagaaggggttcttttgcttgtgtccttttcccccaagtaccctaacccgcctagtagcttagcttgccttgctctattaaatccggcgcgcccggattgtnaatgggtcctctttagattttgatgccccctgctgtggaatataaagnttgnaatctctcccgctttgcc

SEQ ID NO: 1666 - DNA, 648 bp, Zea mays
  Clone ID: TF_LIB5116-009-A1-PF1-B11
accttacaacaaagcgcccaagcaatcaacaacctccgaagcagcctcccctccccacccccaccccgcagcaatggctcgcacgaagcagacggcgaggaagtcgaccggcgggaaggcgccgaggaagcagctggcgaccaaggcggcgcgcaagtcggccccggccactggcggggtgaagaagccccaccgcttccgccccggcaccgtcgcgctccgtgagatccgcaagtaccagaagagcacggagctgctgatccgcaagctgccgttccagcgcctggtgcgggagatcgcgcaggacttcaagaccgacctccgcttccagagctccgttgtttccgcgctgcaggaggccgccgagtcgtacctcgtcgggctcttcgaggacaccaacctctgcgccatccacgccaagcgcgtcaccatcatgcccaaggacatccagctcgcccgccgcatccgcggggagagggcctaggtagcggtagccgcgtgcgtgcgttatcagagagtcctactgtgatgttccggtttcagagcttggtggtgtagcttaacatgttcctgtccgctctcatcgttgtcttgccatatgtagctcctcgctgcgatgaattatcaatgaagagtgcagttatcact

SEQ ID NO: 1667 - DNA, 621 bp, Zea mays
  Clone ID: TF_LIB5116-022-A1-PF1-A12
tccgatccagcaccgtcgccgcaaacaccacacctcgagagccctcttcgccggtgaagtagcaagcaagatggctggaaggaagggaggcgacaggaagaaggcggtgacccgctccgtcaaggccgggctccagttccccgtcggccgcatcgggcgctacctcaagaagggccgctacgcgcagcgcgtcggctccggcgcccccgtctacctcgccgccgtcctcgagtacctcgccgccgaggtcctggagcttgccggcaacgctgccaaggacaacaagaagacccgcatcatcccgcgccaccttctgctcgccgtccgcaacgaccaggagctcggcaggctgctcgccggcgtcaccatcgcgcacggtggcgtgatccccaacatcaactccgtgctgctccccaagaagtcccccgccgctgcagagaaggaggccaagtcgcccaagaagaagaccaccaccaagtcccccaagaagaaggtcgccgccaaggagtagccgcccctagcttagctgactcttagttccatatcagggagaagatgaggagacttttggttgattggatcctgtatgtaaatgctagtctgtagtggctcattcattag

SEQ ID NO: 1668 - DNA, 1015 bp, Zea mays
  Clone ID: TF_ZmC22376_1
cgaccgactctcggcaacggatatctcggctctcgcatcgatgaagaacgtagcaaaatgcgatacttggtgtgaattgcagaatcccgcgaaccatcgagtttttgaacgcaagttgcgcccgaagccttctgccggagggtcccgcggcccgggccgggccgggatcccacttccgcccaaatccaccaccgccataccagcgtgtccgcgattccgtcgagtagactgggcgagagagtagtctcggacgagaagaggcgaatatgagttccggcggcggcaggggcaagcccaaggggtccaaggctgtgtcgcggtcgaccaaggccgggctgcagttccccgtcggccgcatcgcgcgctacctcaaggccggcaagtacgccgagcgcgtcggcggtggtgcgcccgtctacctctccgccgtcctcgagtatctcgcggcagaggtgttggaactggcgggcaacgcggcgcgcgacaacaagaagaaccgcatcgtgccgcgtcacatccagctcgccgtgcgcaacgacgaggaactcagcaagctgctcggagctgtcaccatcgccgccggaggtgtgttgcccaacattcatcagacgctgctgcccaagaaggccggtgggaagggcaaggccgacatcggttccgcatcccaggagttctaagcggccgcggcggcggttgcaggtttctctgacttgttcgaactggagctccaacatgcatgaagtccccccgtcgctcaagtttcgtcgattagtagtgttagggtgttttctatctttggttaggtttaggttgtctgatggatggtttatcagacgaaagtttggtgatcgagggcttcctgtatgtatcaatcaatcttgctggaatggaacaaatcgttggttgcagtaaaaaaaaaaaaaaaaaaagcaccaaaaaaaaaaaaaaaggcccctaactgctattttgtttttaccagttgaagttgctactgattgtgatctgtggatgcttg

SEQ ID NO: 1669 - DNA, 366 bp, Zea mays
  Clone ID: TF_LIB5025-017-B1-XP1-E3
gccggccgggctcagaagagacggcgcatcccacatcactcatccactgttcgcagccgcattcctgtctcgtatcctctctcgccgatccgatggtctgcacaaagcaaacagcaaggaagacgaccggcggcaaggccccccggaagcagatgcccactaaggctgcgcgcaagacggccccggacaccggcggcgcgaagaagccccaccgcttccgccccggcaccgtcgcgctccgcgagatccgcaagcaccacaagagcactgtaccgctcatccgcactctccccttacagcgcctccaagagatcacgcacgactcccagactgacctgatgttttttttttttcttacctcccccc

SEQ ID NO: 1670 - DNA, 464 bp, Zea mays
  Clone ID: TF_LIB4732-132-Q1-K1-G10
gaatcctccaatctgcccttgccgccgccgcccgatccaggtctgtagactgctcactcctctccgctccggtccgaatggcccgcacgaagcagacggcgcgcaagtcgaccggcggcaaggcgccgcggaagcagctggccaccaaggcggcgcgcaagtcggccccggccacggggggcgtgaagaagccgcaccgcttccgccccggcaccgtcgcgctccgcgagatccgcaagtaccagaagagcacggagctgctcatccgcaagctccccttccagcgcctggttcgcgagatcgcgtacgacttcaagacggacctgcggccccagcatcccaagaatgccatcatatcttgcgtcattcttaaggagcagcggagccctccttctgacaatctctattgtattgcttcctatctgctccctgctgcctgatcccaacacatactacgctcttgt

SEQ ID NO: 1671 - DNA, 3665 bp, Zea mays
  unsure (1)..(3665): unsure at all n locations
  Clone ID: TF_ZmC5819_4
ccacgcgtccggcaaacccaccgcttccaccatcgccacccgtcaccccttgctcccatagtcccctcccataccatgcccgacctccacccgccggagcaccaagtcgccggtcaccgcgcctccgccagcaagctgggcccgctcatcgacggctccggcctcttctacaagccgctccaggccggcgaccgtggggagcacgaggtcgccttctatgaggcgttctccgcccacgccgccgtcccggcccgcatccgagacaccttcttcccccggttccacggcacgcgactcctccccaccgaggcgcagcccggggagccgcatcctcacctcgtcctcgacgacctcctcgcggggtttgaggcgccctgcgtcgcagacatcaagatcggtgccatcacgtgaccacgagcgttctgctcggattccgcgtctccggcgtccgagtcgtcggccccgagggcgccgtgnnnnnnnnnnnnnnnnnnnnnnngaaggctatggacattgtcggcgtccgccgcgtgctccggcgctacgtgtcatccgcttgccgacgaggggatggactgcgcgctcgcggcggcggtgtacggaggaaaaggtggagtcttgtcacagctgcgcgagctcaaggcgtggttcgaggggcagactctgttccacttctactattttttgattcttctgggctatgatgctggggcagtcgcagcatgtgggggtggggatggggtaacagcgaagctggtggactttgcccatgtggccgagggtgatggggtgattgaccacaacttcctgggcgggctctgctagctgatcaagtttgtttctgacattgttccagagactcctcagacgcagcctttgggtccttcttaagagataaacctgacacttttgattcggttccgaaagaatcacatttttgcgcgcctacagaaagcagcagtgaggatgaagatgacagtagtgaggaaagttcggatgatgagnnnnnnnnnnnnnnnnnnnnnnnnnctccaaaagtatcagaaaatattggatctgaggatgaatcttctgaagacaagagtgataaagacagtgaagagcctcaggcatgccatcatttaacacctcaggcatgccatcannnnngtttcacaactnnnnnnnnnnnnnnnnnnnnnnnnntatgcaggcagtatgagggacacacatagtttactgaaactcccttacacagacacatacacaccgtgttcactgaaacattcagatttcactaaactgcaacttctccaaacaaacactatctgcggctcggtcaagtaacgagcctcggctcggctcgctcctctagcgagcctnnnnngtcggctcggttcggcgagccaacgagcctgaccataagcatgaaatcagtctccaaaatataatataaagtctcnnnnntaatttaagtgacacgtnnnnnnnnnnnnnnnnnnnnnnnnnnnnnnnnnnnnnnnnnnnnnnnnnnnnnnntannnnnnnnnnnnnnnnnnnnnnnnnnnnnnnnnnnnntannnnnnnnnnnnnnnnnnnnnnnnnnnnnnnnnnnnnnnnttgttgtttgagccagctcgcgagctgaactggctcgctctggctcgctcttttattgagccagnnnnnnctctgctcgagcttgttctaagcacagtttctggatcggaggagcatccccgcctaggtctctgcagccatggttcgcggatcgctcggcaagcttgcatnnnnnnnnnnnnnnnnnnnnnnnagatggcagcaccagcagctccgccgcctcaacatccacgagtaccagggcgcggagttgatgggtaaatacgggatcaacgtgcccnnnnnnnnnnnnnnnnnnnnnnnncatgaggtcaaggacgccttgaagaacatgttccccagcgagaaagagatagttgttaaaagtcaaatccttgctggtggccgagggctgggaactttcaaaagcggactgcaaggtggtgtccatattgttaaggctgaggaagctgaattgattgcaagtaaaatgttaggccagattctgataacgaaacaaactggtccagagggaaagattgtgagcaaggtctacttgtgtgagaaactatctcttactaatgagatgtactttgccatcacccttgataggaaaactgctggtccgctcattattgcttgcagcaagggaggaaaacactatagttgacctcaatgttcaaaggatggccagggctacatcatcttgttgttgacgggttccgtgtgttcaatcgccgagcagaaagccaggaacagaacttaggcgttggcgattggcatctccctcccctaagccatggccaccgggcggcccgtacgactcgtgctggatnnnnnnnnnnnnnnnnnnnnnnnnnnnnnnngggnnnnnnnnnnnnnnnnnnnnnnnnnnggggtagaggagctgttgcggcggttgcgctactccaacctgaatgtggcaatctgctatgcagagggcatgccaactaatgagatgctctacttatctacattattattacatccctctgaagttgtatcttcagaagttcacattgacagtatttgcttcctcttgccatacttacccatcatggcccatggggtgtctatcttatcatgccatcttcaaagaatggcatcatgttaacnnnnntgaatgagaaatcagtcatttctaatggaaagtcaggctttcttgaaaaggtcgcaagctcacacttgtttggctctatagcacttcttgcgaaaagtgggaatctttctctaactgaattaatgttagaatggagccaaacaagtttatgnnnnnatgcgacttcaagagttgacaaaggtttaagttctgagctccagaatcagaattggagagttctttctgtagctaatgaatgtagcatagaggttcctgtgttttaaatgttcaaaggcttcagcagttgcttctcaccttggctactctaataaaaagggaactatgtgactcatctgttctggtgattggatatataatgaaaatattctgtgaggaagacttcgcaaggagatgtggttctgtcacttatgtgactgttgccgtgtatggagacgaggacaagccagcgcttataatgtttacagagatgtggttctgtgactgttgtcgtgtactcaggctttatttcaacaggatttaaatatgagatgtagagtgattgatgtacatcacttcactaatcatgaaatctgtagaaggcgaaactactagccatatatgatatgcataatccgtgtggtaaacattatcaatatcacacaaattatttctaatgggttttgcattagaagcccaaggaaaaaaaaaaaaaaaaaaaaaaaaagtccgccgcgtaaggagggcggcgagggcaagaaggggaaaaagaaagcgaagaagtccgtggagacctacaagatctacatcttcaaggtgctgaagcaggtgcaccccgacatcggcatctcgtccaaggccatgtccatcatgaacttcttcatcaacgacatcttttagaagctcgcggtcgaatcccccgagctggcgcgctataacaagaagcccaacggcaccttctgcgagatcc

SEQ ID NO: 1672 - DNA, 311 bp, Zea mays
  Clone ID: TF_LIB3227-021-P1-K1-F11
ctgcccttgccgccgccactgcccgatccaggtgtgcagactgctccttcctcgtgtccgttccgaatgcccgcacaaagcaaacggcgcgcaagtcgaccggcggaagggccccgggaaagcagttgcccacaagggcggcgcgcaagtgggcccggcccacgggcggggtgaagaacccgcaccgtttccgcccgggcaccgtcgcgctccgggagatccgaaagtcccagaagagcacggagctgttaatccgaaagttcccctccaagcgctttgtccgagagatcgcgcaggactaaaagacggac

SEQ ID NO: 1673 - DNA, 464 bp, Zea mays
  unsure (1)..(464): unsure at all n locations
  Clone ID: TF_LIB4730-068-R1-K1-A11
taccctcggctctccggnaacaacgcgaacacatctcctcgatttctttccatccgatccccccttcgcaaccagagaccccaactcgccccgcatcgatggcgcccaaggccgagaagaagcccgcggcgaagaagccggcggaggaggagcccgcggccgagaaggcgcccgccgggaagaagccgaaggcggagaagcgggtccccgctggcaagtccgctgccaaggagggcggggcgggcaagaggggcaagaagaagggcaagaagagcgtggagacctacaagatctacatcttcaaggtgctgaagcaggtgcacccggacattggcatctcctccaaggccatgtcgatcatgaactccttcattaacgatatcttcgagaggctcggtgctgaggcagccaagctcgcgcgctataacaagaagcccaccatttcattccgggagatccagacc

SEQ ID NO: 1674 - DNA, 633 bp, Zea mays
  unsure (1)..(633): unsure at all n locations
  Clone ID: TF_LIB4730-066-R1-K1-H6
acaccgcaatcttcaatctgcccagcatgccctagcgtaaaccttccatcctcactcgctcgatggcccgcacgaagcatacggtcgaggaagtccaccggcggccaggcgccgaggaagcagctggcgactacaggcggcccgcatgtctgcaccgtgcgaccgacggagtgaataagccccaccgcttccgccccggcaccgtcccgctccgagagatccgcaagtaccataagagcacggagctgctgatccgcaagctgccgctccagcgcctggtgcgggagatcgcgcaggacttcaaggccgacctacgcttccagagctctgctgtctccgcgctgcaagaggcggctgaggcctaccttgtcgggctcttcgaggacaccaacctctgcgccatccacgccagcgcgtcaccatcatgcccaaggacatccagcttgcccgccgcatccgcggggagagggcctaagcgtcatattttctgtcatcagtgcccgatcagaagatgtagagatatgctgggttctgtagtttgggttatcggtcaaatcatgatgtagttgggtcttccctgctgtaatctaactatgactatgcaatggcaatgaagttctcggntatcaggac

SEQ ID NO: 1675 - DNA, 614 bp, Zea mays
  Clone ID: TF_ZmC369_36
atatctcctcgcattttccttgggaccgattgcctatccccctcccaaccaaagaccgatggcgcccaaggccgagatgaagcccgtggcgaagaatccggtggaggaggagcccgcggccgagaagaccaccgccggtaagaagcccctgcggacaagctgatccccattatcaagtccgccggcatggacggctacgagggcaaccgtggcaagaagaagggcaagaagagcgtggagacgtacaaaatctacatcgttgaaggtcgctacaagcaggtgcacccggacatctgcatctcctccaatgccatgtccatcataaactcattgatcaacgacatcttcgagaagctgtccggagaagccggcaagctggcgcgctacaacaagaagcccaccatcacctcccgcgagatccagacctacgtgcgcctcgtgctccccggagagctcgccaagcacgccgtctctgagggcaccaaggccgacaccaagttcacctcctgctaggcttgcacgctcgacctttgtaggactttcttgagtagatgttcgccttgtgtcgtagttatgatgtgctagtttgtctgacgacgctgctctgcttctgt

SEQ ID NO: 1676 - DNA, 435 bp, Zea mays
  Clone ID: TF_LIB4730-084-R1-K1-A8
attcgcttccatctcctgagcactttctcctcctccccgacaagtcaatcgaagtcgagatacggacatggactccaccggcaccggagcagggggtaatgggaagaaggcagcggccgggcgcaaggtctctgggccaaggaagaagtccgtgtcaaggtccgtaacgggccggctccagttccccgtcggccgcatcgggcgctacttgaataagggcctctacgcgcagcgtgtcgacaccttcgcccccttctacctcgtcgctgtcctcgaatacctcgccgctgaggttctggagttcgctggtaatgctgccagggacaacaagaacactcgcattattccgcgccacgtgcttctggcgatccgcaacgacgatgagcttgtgaacctgctgggctgggtgaccatcgctcacggcggtgtgctccc

SEQ ID NO: 1677 - DNA, 654 bp, Zea mays
  Clone ID: TF_LIB4742-028-R1-K1-F6
cattgggtacctcgaggccggccgggaatcacacactcgactctcctctctcgatccgcaggctttgctagctctactccacccctctcgatctcgaattgtagcagtagctttcaggcggtcatggacgcgagcgcatccggagccggcgggaaggcgaagaagggcgcggccgggcgcaagggcggagtgccgaggaagaagtctgtgacgaggtccgtcaaggccgggctgcagtttcccgtcggacgcatcgggcggtacctgaagaagggccggtacgcgcagcgtgtcggcacgggcgcccccgtctacctggacgccggcctcgagtacctggtcgccgatgtgctggagctgggcgtcaacgctgccatggacaacaagaagacccgcatcatcccgcgccacgtgctccttgtcatccgcaactgcgaggagctcgttaagctgctgttcggcgtcgccatcgcccacggctggcgtcctccccaacattaacccggtgctcctgtgcaagaagaccgcgtagaatgtgccgggctaggaggacaagtcgccctagaatgccggcaagtcccccaagaaggcatacaggtgcgcctttaccgctgtgatgttgaatgctcgcgttcagtagatctttacgactgt

SEQ ID NO: 1678 - DNA, 674 bp, Zea mays
  unsure (1)..(674): unsure at all n locations
  Clone ID: TF_LIB4974-072-Q1-K1-H4
cattgggactctcgaggccggccgggccgggttatcacagtcttcaatctctgcaggaattactagaagaagacttgcatcctcacttgatcgatgtcttgcaccaagcatacggccaggaagtccacctctcgcctcaggcgccttaggaagcatatgtagactaaggcggcccgcagagtctgtccctgcgaccggcggagttaagaagccccaccgcttccgccccggtaccgtcgcgctccgggagatccgcaagtaccagaagagcacagagctgctgatccgcaagctgccgttccagcgcctggtgcggtagatcgcgcaggacttcaagaccgacctacgcttccagagctccgctgtctccgcgctgcaggaggcggctgaggcctaccttgtcggtctcttcgaggacaccaacctctgcgccatccacgccaagagcgtcaccatcatgcccaaggacatccagcttgtccgccgcatccgtgtggagagggcctaagcatcgtatattctgtcatcagtgcccgatcagaagatgtagagatgtgctgngttctgtactttgngttactgtcgaatcatcgagtacttggttgttcactgctgtcacttattatcatgatgcatatgaaatggcaatgaactatgttatcaggtcttgaaaa

SEQ ID NO: 1679 - DNA, 637 bp, Zea mays
  unsure (1)..(637): unsure at all n locations
  Clone ID: TF_LIB5027-055-Q1-XP1-F12
ttcgggaaaaggnaaaaaaaaaaaaaaaaaataacaaaaaaaaaaaaaaaaaaaaaaaaaaaaaaaaaaaaaaaaattaccggcgaacccatctcctcgcatttcttcccatccgatccccccttcgaaaccaaaaccccaactccccccgaatcgatggcgcccaaggccgaaaaaaaacccgcggcgaaaaacccgggggaggaggagcccgcggccgaaaaggcgcccgccgggaaaaagccgaagggggaaaagggggcccccgttggaaagtccgctgccaaggaagggggggggggcaaaaggggcaaaaaaaagggcaaaaaaaggggggaaacctacaaaatctactttttcaaggggctgaagcaggggcacccggactttggaatctcctccaaggccatgtccatcatgaactccttcattaacgatatcttcaaaaagttcgttgctgaggccgccaagttcgcgcgctataacaaaaagcctaccatcacctcccgggagatccaaacctccgggcgcctcgtccttcccggggagctcgccaagcacgccgtttccgagggcaccaaggccgtcaccaagttcacctcggcctaggttgcgcggccgccgcttgcaggattct

SEQ ID NO: 1680 - DNA, 802 bp, Zea mays
  Clone ID: TF_ZmC119_1450
gtccccgacaagccactcgaagccgagatacggccatggactccaccggcaccggagcagcggggaagggaaagaagggagcggccgggcgcaaggtcggcgggccaaggaagaagtcggtgtcgaggtccgtgaaggctgggctccagttccccgtcggccgcatcgggcgctacttgaagaagggccgctacgcgcagcgtgtcggcaccggcgcccccgtctacctcgccgctgtcctcgaatacctcgccgctgaggtactgcaatttgagcccagttctttgtttgtactgatttggcgacggagtattaattcttgcgtcccgattcgttttgcttccttgtttgaccaggttctggagctcgccggtaatgctgccagggacaacaagaagactcgcattattccgcgccacgtgcttctggcgatccggaacgacgaggagcttgggaagctgttgggcggcgtgaccatcgctcacggcggtgtgctccccaatatcaaccctgttctgctgcccaagaagacggcggagaaggcgtccagtggcgggagcaaggaggcaaagtcgcccaagaaggccgccaagtcccctaagaaggcatagactgactgtccggagtgatctgatgtttagcagtaccttgttaccagtatgcggtgatgcgtaggctgcagatgggacgaatgtgcttgtatgtgtatgtgtcctgctgcaagttgtcctttgctatttagaatggaagaagaaatgccttgtttctctgaggttgcaatgtcttttccctaatttcattt

SEQ ID NO: 1681 - DNA, 603 bp, Zea mays
  Clone ID: TF_LIB4826-069-R1-N2-F1
actcctatgggcgattgggaccctcgaggccggccaggaaggcggcgaggaagtctgcgccgacgaccagcggcgtgaagaagccccacaggtacaggcccgggacggtggcgctgcgcgagatccgcaagtaccagaagagcacggagctgctgatccggaagttgcccttccagcgcctggtccgtgagatcgctcaggacttcaagacggatctgcggttccagagccacgccgtcctggccctccaggaagccgccgaggcctacctcgtcggcctgttcgaggacaccaacctctgcgccatccacgccaagcgcgtcaccatcatgcccaaagacatccagctcgcccgccgcatccgcggcgagcgcgcgtaggcgtatctcgcgcccggccccagtggcggcggagggatggaggagggcaatttgtaaccttatgctgtttgttcgcttttagacggcgtggtgaagaactagtgtaaaaacggctttaaagtctattttgtgcggtagttcgtgtaggccgcttcgtcccgaagcgatcttggtaaaagacttattcgtgttgccaaagaaaaaaaaaaaaaaaaaagcggcc

SEQ ID NO: 1682 - DNA, 730 bp, Zea mays
  unsure (1)..(730): unsure at all n locations
  Clone ID: TF_LIB4829-002-R1-N1-C2
ccggccgggatcacacacccacacttcagccttccacccccacaacaacaaccatcatcaacaacttcatccacatcttcacaagaatcatcaacaatggctcgcactaagcagaccgcccgaaagtccactggtggcaaggcccctcgcaagcagctcgcttccaaggctgcccgcaagtccgccccctctaccggaggtgtcaagaagcctcaccgctacaagcccggtaccgtcgctctccgtgagatccgtcgctaccagaagtccactgagcttctcatccgaaagctccccttccagcgtctcgtccgtgagattgctcaggacttcaagtctgatctccgattccagtcctccgccatcggtgctctccaggagtctgtcgagtcttacctcgtctccctcttcgaggacaccaacctgtgcgccatccacgccaagcgtgttaccatccagtccaaggatatccagctcgcccgccgccttcgtggtgagcgcaactaagcgaatggctttgggaggataacgaattttttgctttgacacgagggatatcatggttaggggataatcaaggcgttcatgaggaacaatgttttatacactcaggcttgtacattaagtggcaagcaagttagctgcctttagcaatcgaccaacggtctttgatcatcatcaaaaaaaaaaaaaaaaaaaaaacanaaaaaaaaaaaaaaaccccgcggcc

SEQ ID NO: 1683 - DNA, 926 bp, Zea mays
  unsure (1)..(926): unsure at all n locations
  Clone ID: TF_ZmC369_138
tgggaccctcgaggccggccgggacagccaaggaaatcttccgttctcaaaccaacctaggcaattcgccgcagcctctcaccctcgcgagtcccgacctcccgcagccgccgcacagatggcacccaaggcggagaagaagccggcggccaagaagcccgcggaggaggagcccgcgacagagaaggtggagaaggctccggcggggaagaagcccaaggccgagaagcgcctcccggcgggcaagtccaaggagggcggcgagggcaagaaggggaaaaagaaggcgaagaagtccgtggagacctacaagatctacatcttcaaggtgctgaagcaggtgcaccccgacatcggcatctcgtccaaggccatgtccatcatgaactccttcatcaacgacatcttcgagaagctcgcggccgagtccgccaagctggcgcgctacaacaagaagcccaccatcacctcccgcgagatccagacctcggtgcgcctcgtcctccccggcgagctcgccaagcacgccgtctccgagggcactaaggccgttacgaagttcacctcgtcttaggatccttgtaatggtcatgtgggcgtcggcggtaggcgtggctcagtttatgtgatactgctagcgatggatgatgatgatctgcgtgtaattgaattaaagaattgtgctgatctttctacaacactgttccacatcactcgttgcccgccagtgagccgccaattacatgtgcaaatctacatcaactttctgaaagaagctagttacttgaaaaaaaaaaaaaaaaaaaaaaaaaaaaaaaaaaaaaaaaaaaaaaaaaaaaaaaaaaaaaaaaaaaaaaaaaaaaaaaaaaaaaaaaaaaaaaaaaaaaaaaaaaaaaaaaaaaaannaaggggggggccgttttaaa

SEQ ID NO: 1684 - DNA, 763 bp, Zea mays
  Clone ID: TF_ZmC369_153
cattgggtacctcgaggccggccgggaaaaaaaaaacagccaaggaaatcttccgttctcaaaccaacctaggcaattcgccgcagcctctcaccctcgcgagtcccgacctcccgcagccgccgcacagatggcacccaaggcggagaagaagccggcggccaagaagcccgcggaggaggagcccgcgacagagaaggtggagaaggctccggcggggaagaagcccaaggccgagaagcgcctcccggcgggcaagtccaaggagggcggcgagggcaagaaggggaaaaagaaggcgaagaagtccgtggagacctacaagatctacatcttcaaggtgctgaagcaggtgcaccccgacatcggcatctcgtccaaggccatgtccatcatgaactccttcatcaacgacatcttcgagaagctcgcggccgagtccgccaagctggcgcgctacaacaagaagcccaccatcacctcccgcgagatccagacctcggtgcgcctcgtcctccccggcgagctcgccaagcacgccgtctccgagggcactaaggccgttacgaagttcacctcgtcttaggatccttgtaatggtcatgtgggcgtcggcggtaggcgtggctcagtttatgtgatactgctagcgatggatgatgatgatctgcgtgtaattgaattaaagaattgtgctgatctttctacaaaaaaaaaaaaaaaaaaaaaaaaaaaaaaagtactctgcgttgttaccactgct

SEQ ID NO: 1685 - DNA, 303 bp, Zea mays
  Clone ID: TF_LIB3180-008-P2-M1-A11
tcgcaactcttttccaaatccaccggcgggtcggctcgcccatcttggggccaagcaccgaatcttcgatggcccgcacgaagcagacggcgcgcaagtcgaccggcggcaaggcgccccgcaagcagctggccaccaaggcggcgcgcaagtcggcgccggcaaccggtggcgtgaagaagccttaccggtttcgccccggcaccgttgcgctccgggagattcgcaagtaccagaagagcacggagctgctcattcgcaagctgtccttccagcgccttgttcgtgagatcgcgcaggatt

SEQ ID NO: 1686 - DNA, 476 bp, Zea mays
  Clone ID: TF_LIB3587-200-Q1-N6-H6
ggggttgaaaaatttaaaaaaaattggcttggttgggatttaaacccactcaatctcactcaatcttttttgattggaagctaacccgattagacccaaccaggttaacaaccggcctttttggggggggggcctaagatcactggtcaacattcaaataacccttgcaatacctttcccccctggcttaattcataacacaggcaaaagcccctggcccacttacacacaccagccaacccccacttctggcatgagaagcggcccatgacaatgcttgcttgaaaagcaaacaacaacgacccctacaacaaggggggtaaaaccaggggaacttggggaccgccttggtaccctcccaaaccgggtgcttggcgagctcccccgggaggaccaggcggaccgaggtcttgatctcgcgggaggggatggggggcttcttgttgtaccgggcgagcttggggggcttcgcgggg

SEQ ID NO: 1687 - DNA, 609 bp, Zea mays
  Clone ID: TF_LIB3606-025-Q6-K6-A3
acattgccagttgaggaatcataattcatataatgagcttgtagcacaaaagctggtggacatgaagaacagccaggttactataacggtcaatggcgatgaaattcatatgtttcaggagattggccatcttcgtctaaagctgactgccaacaggtcaaaccaacctgttgaggatcatctgtcaaggcgtcaactatatcctctgcattctcaatggatgcagcaagatgcaacggagttaaaccaccagggccaggaaagtttgggaggaaggggtaaaccttggaattatcaaggcatagtacaacaaactgtacaagcaaatgcaccattctcctactctttcttcggacgcgtgggcccgcggcgtgctcaagatctttctcgagaacgtcatccgcgacgccgtcacctacacggagcacgcccggcgcaagaccgtcacagccatggacgtcgtctacgcgctcaagcgccagggccgcaccctttacggcttcggcggctagggcgctaggctaggccatgctcgacccgccccccactctccgctctggcgtcgtcattggttccttgacccctgtgcggggtcggtcggtggtgcta

SEQ ID NO: 1688 - DNA, 328 bp, Zea mays
  Clone ID: TF_LIB5116-067-A1-PF1-C4
ctcattctccaacaccagagcgtcgcagcagccagatccgcagccagcccagctccgatggcccgcaccaagcagactgcccgcaagtccaccggcggcaaggcgccgaggaagcagctggcgaccaaggcggcccgcaagtccgccccggccaccggcggcgtcaagaagccgcaccgcttccgcccgggaaccgtcgccctccgggagatccgcaagtaccagaagagcacggagctgctcatccgcaagctccccttccagcgcctcgtccgggagatcgcccaggacttcaagacggacctccgcttccagtcctccgccgtct

SEQ ID NO: 1689 - DNA, 862 bp, Zea mays
  Clone ID: TF_ZmC653_101
cccagcgtccgcaatctccctagcagcagatcctcgtgcaacgcaaagcgctagccttcctactgtcccgatggcccgcacgaagcagacggcgaggaagtccactggcggcaaggcgccaaggaagcagctggccaccaaggcggcgcgcaagtctgccccggcgaccggcggagtgaagaagccccaccgtttccgccccggcaccgtcgcgctccgggagatccgcaagtaccagaagagcacggagctgctgatccgcaagctgccgttccagcgcctggtgcgtgagatcgcccaggacttcaagaccgaccttcgcttccagagctccgccgtcgccgcgctgcaggaggcgtccgaggcctacctcgtcggtctcttcgaggacaccaacctctgcgccattcacgccaagcgcgtcaccatcatgcccaaggacatccagctcgcccgccgtatccgtgtggagagggcctaggcgtcgtggcggtggaggtcgaagtagtagtcgcagtttctgtcatcaccgtctggctagaaggtgtagagatgtgccgggttctggagtttgggttatcggtcgaatcatgatgtagttggttcttcacagctgtaatttaactatgacgatgccatggcaatgaagttctcagctatgagttcccgaaaaaaaaaaaaaaaaaaaaaaaaaaaaaaaaaaaaaaaaaaaaaaaaaaaaaaaaaaaaaaaaaaaaaaaaaaaaaaaaaaaagaaagaacaaaaaaaaaaaaaaaaaaataaaaaaacaggggggggccccctttataaaggtacccaattttactcacccgggggtttgcaaaattaaaacctttttttt

SEQ ID NO: 1690 - DNA, 640 bp, Zea mays
  unsure (1)..(640): unsure at all n locations
  Clone ID: TF_LIB4979-020-A1-K1-G12
tttcgtaaaaatcctccgttacttttcagtcgtatcagtgcgatttatctatcggctacctcactacgctatgcagtccgagaacaatactnagagaaggatatatgcatgagcgacccaaggcaggagaactaagcgccgcgaaataggtggaggaggaggaggcctcgcagaagctgctccggaggtcaacggccccgtggtgaagatcccccaggaggacaagcggctacctgtggccatctccggcggcgacgagggcgacgacaagaaaggtacgaagaaagtgaagaatagcgtgtagacctacaagatctacgtcttctaggtcctgaagcatgcgcacccacgacatcgacatctcctccaaggtcatgtacatcatgaactccttcatcaacgacgtctgcgagaggatcgccggggaggacgtgaagctcgcccgcgacaagatcaaaaccaccatcacgctcccgcgagatcatgacctccgtccgcctctacctccccggagagctcgacaagcacgccgtctcggagggtaccaaggacgtcaccaagctcacctcggcttaaccgccttgcaataggcatcgttgttgtctgcttctcaagcaagcactgcgatgagccgcttctc

SEQ ID NO: 1691 - DNA, 259 bp, Zea mays
  Clone ID: TF_LIB3156-011-Q1-K1-C2
acggggcgacccacgcgtacggccgagagagtcagagccggcgcccctgtttatctcgctgccgtgctcgagtaaatagctgatggggttcttgagctggacaacaatgccgtacgtgacaacaagaagacccgcatagatccgcgcctcatacaaatagccgaccgaatcgacaaacagatgttccgattgctgggcacggtgaccatcactagcggcggtgtaatgcccaacattcataacctttcgctcccttaga

SEQ ID NO: 1692 - DNA, 631 bp, Zea mays
  unsure (1)..(631): unsure at all n locations
  Clone ID: TF_LIB4766-065-R1-K1-G3
gccggccgggnatcactttctcagtcggtcactgctcgcagtaaacacctcgaagtcgcccccggtctcgaacacagtaccgagtaaagcgtctaatggcctcccgaatgcgtctcgatcacatccgacagtcatcagattggcagcaccaaggtaggagcaaaaagcccgtcggatgaagacagcccagtggcagcgtaggagacctcgcggaccagacgaaggctggacgaaggtttccggacaggcatagaagccgaaggaggggaaacgcctccccgcggcatagtccggtgccggtgagggcaaaaagggcaagaagaaatccgagaagagcgtggagacctacaagatctacgtcttctatgtgctctagctggtgcaccccgacatccgcatctcgtccaacgccatgtccatcatgaatttctgcatcaacgagcatctatccagatatctctccgccgagggcgccaagttcgcccgctacaactagaagcccatcatcacctaccgtgagatgcagacctccggacgcctcgtcctacccggcaagctcgccaagctcgccgctctctgaaggtacaaaggcggtcaccaagttcacttcgtctcatattggttgccttcc

SEQ ID NO: 1693 - DNA, 820 bp, Zea mays
  Clone ID: TF_ZmC683013_1
ccggccgggaacttccatctcacaacagcatcttctcgcccttcagcaacttgaccaacgcacgagttcttactcaaccgaagcaatcaaccactcaacttttttcaccaactctctcaaatctttcgaaatggctcccaaggctgctgacaagaagcccgcctccaaggctcccgctactgcctccaaggctcctgagaagaaggatgccggcaagaagactgccgcttctggtgacaagaagaagcgctccaagacccgcaaggagacctactctttttacatttacaaggtcctcaagcaggtccaccccgacactggtatctccaaccgtgccatgtccatcctgaactcttttgtcaacgacattttcgagcgcgtcgcttttgaggcttccaagcttgccgcctacaacaagaagtcccccattttttcccgagagatccagacctctgtccgtttcatcctgcccggtgagcttgccaagcaccccgtttttgagggtaccaaggccgtcaccaagtatttttcctcgacgaaataagtgctttgatggcttgatttgttttgggcatttggtttttcacgcgtggcatcagggtgtcatgagtttgaggtttcacggggatccagccctgttttgggggcctcataatgcgttacggatggttttgttttatttcctgggggcaaggttttcacacacgggcaacggggttcgcggttgtacaataaacatcgagaatagggtttcgatcaaatgaattcgtgcccataaaaaaaaaaaaaaaaaaaaaaaaaaaaaaaaaaaaaaaaaaaa

SEQ ID NO: 1694 - DNA, 671 bp, Zea mays
  unsure (1)..(671): unsure at all n locations
  Clone ID: TF_LIB4729-038-R1-K1-D2
gggtaccctcgggttcggccgggaacaccagaagcaagaaaactagaaaaggctcctccggaccgcaacgcccctcatctccctcgaccccgacatccccgacccgatggcgcccaaggcggagaagaagccagcggagaagaagccggcggccgaggagaaggcggagaagacgaccgcagggaagaagcccaaggccgagaagcggctgcccgcgtccaagtcctccggcaaggagggcggcgagaagaaggggaagaagaaggccaagaagagcgtggagacctacaagatctacatcttcaaggtgctgaagcaggtgcaccccgacatcgacatatcctccaaggccatgtccatcatgaactccttcatcaacgacatctttgagaagctggccggcgaggccgccaagctggcgcggtacaacaagaagcccaccatcacgtcccgcgagatccagacctccgtgcgcctagtcctccccggagagctcgccaagcacgccgtctccgagggaaccaaggccgtcaccaagttcaccagcaactgancgcgctgcgggatccgcggatctgttagaagggttctttgctgtgtncttttcccnagtccccacccttaccgcctagtagctagcttgcctgctctattaaatcggcgcgccggga

SEQ ID NO: 1695 - DNA, 463 bp, Zea mays
  unsure (1)..(463): unsure at all n locations
  Clone ID: TF_LIB4827-059-R1-N1-E1
ccggccggncaagaaagcctccattcccgagtctactgccaaccgcatccagtccacccccatcaccctcgaccccgacaacctcgacccgatggcgcccaaggccgagaagaagccagcggagaagaagccggcggccgaggagaagcggagaagacgaccgcagtaaaagccagtcgagaacgctgccgcctcgaagtcctccggcaaggagggcggcgagaagaaggggaagaagaaggccaagaagagcgtggagacctacaaaatctacatcnnttcaggtcctgaagcaggtgcaccccgacatcggcatctcctccaaggccatgtccatcatgaactccttcatcaacgacatcttcagnaagctcgcccggcgaggccgctaagctcgcccggtacaacaagaagcccaccatcacctcccgcgagatccagacctccgtgcgcctcgtcctcc

SEQ ID NO: 1696 - DNA, 466 bp, Zea mays
  Clone ID: TF_LIB4979-020-A1-K1-E4
attcccctctcccgcgacccggaccccgtctcccggcatctaccaaatccctctcgcctcatccccaccagagcatagccgccctatcgacctggcgtgacaactgatggcgggacgcggcaaggctattggcgctggcgccgcacaagaaggcgacgtcgaggagctccaagggtgggctgcaatttcccggcggcaggatcgctcggttcctccaggacggctagcacgcccagcgcgtggacgccggcgccctctgtctagcctctcctgtgccctcgagcacctcgccgctgagagctctctggagcttgctgctaacgcaacgagacataacaagaagacccgcatcgtgctgcgtcacatccagatcgccgcgcgcaacgacgaggacctgcaccaagctgcttggaggagccaccatcgcgagcggcggcgttatgcccaacatccaccagcacctcct

SEQ ID NO: 1697 - DNA, 409 bp, Zea mays
  unsure (1)..(409): unsure at all n locations
  Clone ID: TF_LIB143-037-Q1-E1-H1
aggcgaaacatctctcaaacgatacgaaacggcctcgccgctcagtctcacgctaatccccgccggcaccgatcgcccgcactaagcagacagcgcgcacgtcgacgggcggcaatgcgccgcagacgcatctggcgaccaacgcggcgcgcaagatggacccggccactcggggcttgaagaatccgcaccgcttcctcccgggcaacgtggcgctgcgggagatccccacgtattagacgagcactgacctgctgatacggaagctgccgttccagctgctggtgcaggagatcacgcangacttcaacacggacatccggttccaatcctcagccgtggccacgctgcaggatgccacccaggcctagctcgtgagcctcttcgaggacaccgacctctgctccat

SEQ ID NO: 1698 - DNA, 434 bp, Zea mays
  unsure (1)..(434): unsure at all n locations
  Clone ID: TF_LIB3150-035-Q1-N1-E2
aaatttacccaagccttttgttcctaaccatcttttaccacaaattcgtgggccaaagcaaaccgctggccttctaactgccccgatggcccgaacgaaccaaacggcaaggaagtccactgccggcaaggcccctaggaagcagctggccacgaatgcggctcgcaagtctgccccggctaccggcggagtgaagaagccccaccgtttccgccccggcaccgtcgcgctccgggagatccgcangtaccagaagagcacggagctgctgatccgcaagctgccgttccagcgcctggtgcgtgagatcgcccaggatttcaagaccgaccttcgcttccagagctccgccgtcgccgcgctgcaagaggcgtccgaggcctaccttgtcgggctcttcgaggacaccaacctctgcgccattcacgccaagc

SEQ ID NO: 1699 - DNA, 831 bp, Zea mays
  Clone ID: TF_ZmC653_52
ctagccaccgcatcgtcgccctcaaattcgttccgtccaggcaaggaagaaatcgagcagccaaggagaggagaagatggctcgtacgaagcagaccgcccgcaagtccaccggaggcaaggccccgcgcaagcagctcgccaccaaggttcgtctctacctacccgtaccgatctgctgttccgatcccctcgatggttcccgttgtaagacggcgctgacgcggcggcggttgttgttttgttgcaggcggcgaggaagtcggcgccgacgaccggcggcgtgaagaagccccacaggtacaggcccgggacggtggcgctgcgcgagatccgcaagtaccagaagagcacggagctgctgatccggaagttgcccttccagcgcctggtccgtgagatcgctcaggacttcaagacggatctgcggttccagagccacgccgtcctggccctccaggaagccgccgaggcctacctcgtcggcctgttcgaggacaccaacctctgcgccatccacgcaaagcgcgtcaccatcatgcccaaagacatccagctcgcccgccgcatccgcggcgagcgcgcgtaggcgtatctcgcgcccggccccagtggcggcggagggatggaggagtgcaatttgtaactttatgctgtttgttcgcttttagacggcgcggcgaagaagtagtgtaaaaacggctttacaagtctattttgtgcggtagttcgtgtaggccgcttcgtcccgaagcgatcttggtaaaagactgatcattcgtgttgccaaacgacacaattcgtattcaaaaaaaaaaaaaaaaaagcggcc

SEQ ID NO: 1700 - DNA, 1037 bp, Zea mays
  Clone ID: TF_ZmC653_74
cattgggtacctcgaggccggccggggctattcgtgtcctggcatccgcagagagcttgttccgtccaggcaaccaaaaagcaagttgccccgccgcgcagaggaagaagagagcagaggaggatggctcgtacgaagcagaccgcccgcaagtccacgggaggcaaggccccccgcaagcagctcgccaccaaggtccgtccgtctgcccttctctacccgtttcggatccgctgttctgttctctagggttcccttctgagacgcgccggcggttgtgctgtggttgcaggcggcgaggaagtcggcgccgacgaccggcggcgtgaagaagccccacaggtacaggcccggaaccgtggcgctgcgcgagatccgcaagtaccagaagagcacggagctgctgatccgcaagctgcccttccagcgcctggtgcgcgagatcgcgcaggacttcaagacagacctccggttccagagccacgccgtgctggcgctccaggaggccgccgaggcctacctcgtcggtctcttcgaggacaccaacctctgcgccatccacgctaagcgcgtcaccatcatgcccaaggacatccagctcgcccgccgcatccgtggcgagcgcgcgtagccatcatctccggggatctgatgaatgtctagttaccaaacaaataggctgtattagcgtcgttgttctgtattcgttattttggattcggttgcagtgaaaaacagctttactaatcttatttgtgatctctggtggttgcttcgcttctaagcgatcatctgtggtgcaaaattcgtgctggttattttgttatggccccgtgtttggtctggcggcctggtccatctcaagtgcccgacggaagttgtcgtgcagcatcatgtgggttttactgcgtcacagctcacgaccatccttctcttccgagatgctaatagttggccgtctatttcactgagataatattaatagttcgacgctgttgctggctgtctaataaaaaaaaaaaaaaaaaaaaccgatt

SEQ ID NO: 1701 - DNA, 652 bp, Zea mays
  Clone ID: TF_LIB4974-072-Q1-K1-C5
gggtccctcgaggccggccgggccggtatcactcgaattccgattcgtttaactcctgagcactttctcctcgtccccgacaagccaatcgaagccgagatacggtcatggactccaccggcaccggagcagggggtaagggtaagaagggagcgtcctggtgctaggtcggcgggtcaaggaagaagtcggtgtctaggtccgtgaaggccgggctccagttccccgtcggacgcatcgggcgctacttgaagaagggtcgctacgcgcagcgtgtcggcatcggcggccccgtctacctcgtcgctgtcctcgaatacctcgtcgctgaggttctggaggtcgctggtaatgttgccagggacaacaagaacactcgcattattccgcgccacgtgcttctggcgatccggaacgacgaggagcttgtgaagctgctgtgtggcgtgaccatctctcacggaggtgtgctccccaatatcaaccctgttctgctggccaagaatacggctgtgagaaggcgtgcagtgtgcgtagcaaggaggctatagtcgcccaagaaggccgtcttgtccccctagaaggtatagactgactggtctggagctgatctgatgattatcaggaccttgatatcagtatgcggagatgc

SEQ ID NO: 1702 - DNA, 613 bp, Zea mays
  Clone ID: TF_LIB5116-014-A1-PF1-C11
gcacccgatctccttacagaaccaccaccacccgcgccgatggcccgcacaaagcagacggcgcgcaagtccaccggcggcaaggcgccgaggaagcagctggcgaccaaggcggcccgcaagtccgcgccggccaccggcggcgtcaagaagccccaccgtttccgccccggcaccgtcgccctccgcgagatccgcaagtaccagaagagcacggagctgctcatccgcaagctccccttccagcgcctcgtccgggagatcgcgcaggacttcaagaccgacctccgcttccagagctccgccgtctccgcgctgcaggaggccgccgaggcgtacctggtgggcatgttcgaggacaccaacctgtgcgccatccacgccaagcgcgtcaccatcatgcccaaggacatacagctcgcccgccgcatccgcagggagcgcgcctagatttggggtcgccggtaatactgggcagtatctgttcttgtcctgtgattcgaatgtgtgttgagtgcctctgtttgttggtgttgatatgatgtgtcgtctgttcctatggatcgtgatgttcgaatgaaatggcaatggaagttcagttatcatgtgatgc

SEQ ID NO: 1703 - DNA, 759 bp, Zea mays
  unsure (1)..(759): unsure at all n locations
  Clone ID: TF_LIB4760-007-R1-M1-F1
ggccgcttttttttttttttttttatttacaactatattccaaaataggggcgtcaaatctaagaggcccattacaatccggcacgatttatgaagcaggcaagctagctactggcctttgttcacccgacgagaacatcaacgatttcacagcacatacataggcggggaggggtagaggacacgacgaagaaccctgtaagaaggggagacctaacaaatccgtggacgctgcaggctgctcaattgctggtgaacttggtgacggccttggttccctcggagacggcatgtttggcgagctctcctgggaggacgaggcgcacggaggtctggatctcgcgggaggtgatggtgggcttcttgttgtaccgcgcgagcttggcggcctcgccggcgagcttctcgaatatgtcgttgatgaaggagttcatgatggacatggccttggaggagatgccgatgtcggggtgcacctgcttcaggaccttgaagatgtagattttgtaggtctccacgctcttcttggccttcttcctccccttcttctcgccgccctccttgccggaggacttcgaggccggcaggcgcttctcggacttgggcttcttacctgcggtcgtcttctccgccttctcctcggccgccggcttcttctccgctggcttcttctcggccttgggcgccatcggntcgggtttngtcgggtcgagggataagggggggttgactggnatgcggttggctggaactcgggat

SEQ ID NO: 1704 - DNA, 678 bp, Zea mays
  Clone ID: TF_473604
agaaaatctgagcggtattgatggcgcccaaggcggagaagaagccggcggcgaagaaggtggcggaggaggagccctcggagaaggcggctccggcggagaaggcccccgcggggaagaagcccaaggcggagaagcggctacctgcgggcaagtccgccggcaaggagggcggggacaagaagggtaggaagaaggcgaagaagagcgtggagacctacaagatctacatcttcaaggtcctgaagcaggttcaccccgacatcggcatctcctccaaggccatgtccatcatgaactccttcatcaacgacatcttcgagaagctcgccgcggaggccgccaagctcgcccggtacaacaagaagcccaccatcacctcccgcgagatccagacctccgtccgcctcgtcctccccggcgagctcgccaagcacgccgtctcggagggtaccaaggccgtcaccaagttcacctcgtcttagccgccttgttgtaggcgtcgttgttgtctgcttctcaagcaagcactgtctagtgccgcttctctaggcgatgatggtggttggctggtgtgtgtaagtggtgcagtggcttttgcctgtgttatgaatttagtcatggtggtaatgtattgctatggttatttgaatgttgatcagtgagcttatgtccgcc

SEQ ID NO: 1705 - DNA, 856 bp, Zea mays
  unsure (1)..(856): unsure at all n locations
  Clone ID: TF_ZmC369_130
ttggggtaccactcgggcctgccgggatcgcagaaatcctccgcaacttcacagcgtatcatcgttttccatcgctcctactcctatcatccagaaaatctgagcggtattgatggcgcccaaggcggagaagaagccggcggcgaagaaggtggcggaggaggagccctcggagaaggcggctccggcggagaaggcccccgcggggaagaagcccaaggcggagaagcggctacctgcgggcaagtccgccggcaaggagggcggcgacaagaagggtaggaagaaggcgaagaagagcgtggagacctacaagatctacatcttcaaggtcctgaagcaggtgcaccccgacatcggcatctcctccaaggccatgtccatcatgaactccttcatcaacgacatcttcgagaagctcgccgcggaggccgccaagctcgcccggtacaacaagaagcccaccatcacctcccgcgagatccagacctccgtccgcctcgtcctccccggcgagctcgccaagcacgccgtctcggagggtaccaaggccgtcaccaagttcacctcgtcttagccgccttgtagtaggcgtcgttgttgtctgcttctcaagcaagcactgtgatgtgccgcttctcatggtagtagtggtggttggctggtgtgtgtaagtggtgcagtggcttttgcctgtgttatgaatttagtcatggtggtaatgcattgctatggttatttgaatgttgatcagtggtcttatgtccgcctaccatgtatatcagttggtaccctgnntagatgtgtgggtctactagcaacagctncatctgatacgttctttaagccacaccct

SEQ ID NO: 1706 - DNA, 1031 bp, Zea mays
  Clone ID: TF_ZmC369_143
cggatctacctggacggggtcgacgggggatcagaagcctatggcctggccgtggctcgcattgcacatggtgggtgcgctggcttaccatctccccaagtgggagagtggacgtcataatttgtggtagagggggtacgcgttcgcgcggcccctgcttcatcgcagaaatcctccgcaacttcacagcgtatcatcgttttccatcgctcctactcctatcatccagaaaatctgagcggtattgatggcgcccaaggcggagaagaagccggcggcgaagaaggtggcggaggaggagccctcggagaaggcggctccggcggagaaggcccccgcggggaagaagcccaaggcggagaagcggctacctgcgggcaagtccgccggcaaggagggcggcgacaagaagggtaggaagaaggcgaagaagagcgtggagacctacaagatctacatcttcaaggtcctgaagcaggtgcaccccgacatcggcatctcctccaaggccatgtccatcatgaactccttcatcaacgacatcttcgagaagctcgccgcggaggccgccaagctcgcccggtacaacaagaagcccaccatcacctcccgcgagatccagacctccgtccgcctcgtcctccccggcgagctcgccaagcacgccgtctcggagggtaccaaggccgtcaccaagttcacctcgtcttagccgccttgttgtaggcgtcgttgttgtctgcttctcaagcaagcactgtcatgtgccgcttctcatggcagtagtggtggttggctggtgtgtgtaagtggtgcagtggcttttgcctgtgttatgaatttagtcatggtggtaatgtattgctatggttatttgaatgttgatcagtgatcttatgtccgcctaccatatatgtcagttgttaatcttgttaggtcttattcggttagctttcaatctatatagattgagtgagattgagtgagtttaaatctcaaacaagtcaaattttttttaaatttttcaatcc

SEQ ID NO: 1707 - DNA, 741 bp, Zea mays
  Clone ID: TF_ZmC369_52
atcgcagaaatcctccgcaacttcacagcgtatcatcgttttccatcgctcctactcctagcatccagaaaatctgagaggtattgatggcgcccaaggcggagaagaagccggcggccaagaaggtggcggaggaggagccctcggagaaggcggctccggcggagaaggcccccgcggggaagaaggccaaggcggagaagcggctacctgcgggcaagtccgccggcaaggagggcggcgacaagaaggggaggaagaaggcgaagaagagcgtggagacctacaagatctacatcttcaaggtcctgaagcaggtgcaccccgacatcggcatctcctccaaggccatgtccatcatgaactccttcatcaacgacatcttcgagaagctcgccgcggaggccgccaagctcgcccggtacaacaagaagcccaccatcacctcccgcgagatccagacctccgtccgcctcgtcctccccggcgagctcgccaagcacgccgtctcggagggtaccaaggccgtcaccaagttcacctcgtcttagccgccttgttgtaggcgtcgttgttgtctgcttctcaagcaagcactgtcatgtgccgcttctcatggcagtagtggtggttggctggtgtgtgtaagtggtgcagtggcttttgcctgtgttatgaatttagtcatggtggtaatgtattgctatggttatttaaaaaaaaaaaaaaaaaaggccccta

SEQ ID NO: 1708 - DNA, 338 bp, Zea mays
  unsure (1)..(338): unsure at all n locations
  Clone ID: TF_LIB4729-002-R1-K1-F1
caaccactctttcccaatccaccgccggcttggttcgcccatcttcgcgccaagcaccgaatctccgatggcccgcacgaagcagacggcgcgcaagtcgacgggcggcaaggcgccccgcaagcagctggccaccaaggcggcgcgcaagtcggcgccggcaaccggtggcgtgaagaagcctcaccgcttccgccccggcaccgtcgcgctccgggagattcgcaagtaccagaagagcacggagctgctcatccgcaagctgccctttccagncgcccttcgtcccgntggggatcggcgcagggattttccaaggacccgaaccttcccgcttt

SEQ ID NO: 1709 - DNA, 488 bp, Zea mays
  Clone ID: TF_LIB3595-030-Q1-N6-E12
agcaacctacagagaacaaggcatttcttcttgcattttaaatagcaaagggcagcttgcaacagggcacatacacacacaagcacatttcgcccatctacggcctacgcataaccgcatactggtatcagagggcctgctaaacatcagatcactccagacagcacagcctacgccttattgggggacttggcggtcttattgggcgactttgcctccttggtccccacactgaacccctgctcccccggcttgttgggcactacaacatggtcggtattggggagcacacccgcgggagcgatagacacgccgtccaacaagtatgcaagctccttatccttgacgatcacgcagaagcacctggctcgtgataatgcgagtcttctggtggctcctgggaagacaccggcgagctcaacaacctcaccacgcaggtattcaacaacagggggaaggcaaaccggggccccagctcccacacgctg

SEQ ID NO: 1710 - DNA, 327 bp, Zea mays
  unsure (1)..(327): unsure at all n locations
  Clone ID: TF_LIB4668-005-R1-K1-C12
cgcaccttcatctccccagcatccctattctgagccttccatcctcagtcgctcggtggcccgcacgaagcagacggtgaggaagtccaccggcggcaaggcgccgaggaagcagctggcgactaaggcggcccgcatgtctgcccctgcgaccggcggcgttaagaagccccaccgcttccgccccggcaccgtcgcgctccgggggaggcgctcgccccngacgagctcggggctgctgatccgctcgctgccgttcccgcgcctggtgcggggggtcgcgctgggctttttgaccgccctccgcttcccccgcgccgcgggctc

SEQ ID NO: 1711 - DNA, 608 bp, Zea mays
  Clone ID: TF_LIB4979-055-R1-K1-B6
attattcaaaaccgccctctgtctgcaactccagcacagtttatcttcgtttgcgctttctcccctcttccgcaacatacttctcatgtcactcttccggattccctctgctctttacctaaaaaaaggaaccatgcgggcgaaaggtaaggggatcgagtcagaagccgccgacaaggtcacggccaggagctctcaggctgccctccagttccccgtggcaataatcgacaaattcctcatacccgcaaagtatgccgagagagtcccccccgtacctcctgtctacctccctgacgtgctcgagtatcttgctgctgatggtcttgagttgtgcggcaatgcggcacgagactccaataatacccggatcgtaccttgtcacatccagctcggcgtacgcaattacgaagatgtctcccgcttggtgcatacggtcgaccatcggtagtgccgaagatatgccctgcatccatagaccttttgctcccgaagaaaggcgtccactgtagcgaccaaggtgcgaatgtcgaccaggactaacgccttgactacgccaggtgatacctccagtatgctgacggatctgcatgtgtctgtgtactacg

SEQ ID NO: 1712 - DNA, 437 bp, Zea mays
  unsure (1)..(437): unsure at all n locations
  Clone ID: TF_LIB3357-037-P1-K1-D9
tatnctcgtattttacttgcaaccgattgcctatccctctaccaacccaagaccgatggcgccggaggccgagaagaagcccgcggcgaataagccggcggaggacgagcccgcggtggataagactaccgccgggaagaagcccaaggcggcgaagcgggtccccgcgggcaagtccgccggcaaggagggcggcgagggcaagcgtggcatgaagaatggcaagatgagcgtggagacgtacaagatctacatcttcaaggtgctgaagcaggtgcacccggacatcggcatctcctccaaggccatgtccatcatgaactccttcatcaacgacatcttcaagaagctggccggcgaggccgtcaagctcgcgcgctacaacaagaagcccaccatcacgttccgcgagatccagaccttcgtgcgcctcgtgc

SEQ ID NO: 1713 - DNA, 593 bp, Zea mays
  unsure (1)..(593): unsure at all n locations
  Clone ID: TF_ZmC653_25
aacccgcatcccacacactcatccacagctcgcagccgtattcctgtctcgtatcctctctcgccgctccgatggcccgcacgaagcaaacagcaaggaagtcgaccggcggcaaggccccccggaagcagctggccactaaggctgcgcgcaagtcggccccggccaccggcggcgtgaagaagccccaccgcttccgccccggcaccgtcgcgctccgcgagatccgcaagtaccagaagagcactgagctgctcatccgcaagctccccttccagcgcctcgtccgcgagatcgcgcaggacttcaagactgatctgaggttccagtcctccgccgtcgcggcgctgcaggaggccgccgaggcgtacctggtggggctcttcgaggacaccaacctttgcgcccgtcgtgctgctcgttgttgtagtgttactagaagtagatggtggcattcgtttcgtggcttccttatcctgtaggagtaatgttctagatgtcttggcttcagtgcaatggactgtgattgctcatttctgaaatttatcaatgaacttgttctgaaaaaaaaaaaaaaaaaaggggnncttgag

SEQ ID NO: 1714 - DNA, 474 bp, Zea mays
  unsure (1)..(474): unsure at all n locations
  Clone ID: TF_LIB3608-043-Q1-K6-H7
ttcgagcatcggcgcgcagtcccgggggggggggcgcggggaacagctggcgaccaaggcggcgcgcaagtcggcccctgcgaccggcggcgtgaagaagccgnaccgtttccgcccgggcaccgtggcgctgcgcgagatccgcatgttccagaagagcacggagctgctgggggggggggggcccttccagcgcctggtccgcgagatcgcgcaggacttcaagaccgacctccgtttncagtcctccgccgtcgccgcgctgcaggaggctgccgaggcctacctcgtcggcctgtttgaggacaccaacctntgggccatccacgcctagcgcgtgaccctcttgcccaaggacatgcagttcggccgccgtatccgcggggagcgcgcataggctgtccgccggataggccggtggtcctttgcgcagtctcttctctgaagcttgtacttgtggtcggggtccgtgtg

SEQ ID NO: 1715 - DNA, 296 bp, Zea mays
  Clone ID: TF_LIB3227-027-P1-K1-C8
cttaaaaactgattggcgttaacagagacatgcggtgcttgcactagaggagggtgttgatgcataccttgttggcctgcatgaggacaccaacctgtgcgccatgcatgctaatcgtgtgaccatcatgcctaatgacattcacctggaaaggaggatccgacgtgagagggcctaatatccacctcaaacatagggacaaatacatgaagatctggggttattgataatacggggccattgtaaggtcatatgagtagggtacggttggagcatcgcaagattcatgctatgat

SEQ ID NO: 1716 - DNA, 397 bp, Zea mays
  Clone ID: TF_LIB3960-003-Q1-K6-F5
cttgtactgggaacgccggagtagcatcctggccgtgagcggagcaggcggtaaggccaataaggcgctgtggcgcgcaaggccgaccgggccgacgaataataggtgtctcggtcctgcagggccgggctgcagttccccgtcagccgcgtaagggcggtacctcaaaaaggccgttacgcgcatggtgtacgcacagctgcccccgtctacctctgcttcgaactggagtacttacaggtcgaggcgttctagcttgcctgcaacgcgtaaaggaacatcaagaagacacgcatcatcccgcgccacgtgctcatctccatccgaaacgaacaggagctaaagaagctgctgaccggtgtcaccatgctccacagcggcctactctccaacattc

SEQ ID NO: 1717 - DNA, 612 bp, Zea mays
  Clone ID: TF_LIB4746-094-R1-K1-H9
cattgggtacctcgaagccggccgggaatcacactttctgccttcctccaacactcggcagagatatacgcttaatgttaagccccgggcaggatcactcacgcaagcgcagagagatgccatctgagtcgaacaccactcgcgtcttaggcccgctcctatccctagctgcggacatggcgacctccgagcaactctggaccgaagtctgcccccaccactgctggagtgaacaagcttcaccgctaccgccctggaactgttgccctccgtgagatccgcaagtatcacaagagcactgagctgctgatcaggaagctgcccttccagaggctcgtcaagggaaattgcacaggtacttcaaaactgatttgctgtttccagagccatgcggtgcttgacctccaggaggctgctgaagcataccttgttggcctgtttgaggacaccaacctgtgcgccatccatgctaagcgtgtgaccatcatgccaaaggacattcagctggcaaggaggatccgcggcgagagggcctaatcgccacctcaaacatcgtgacaaaaacatgaaggcctggggttattgttaatctggtgccattgtaaggacata

SEQ ID NO: 1718 - DNA, 710 bp, Zea mays
  Clone ID: TF_LIB4766-118-A1-K1-D8
tacctcgaagccggccgggcataatctctcatacacatcactcgtcaacagctctcagacgaattcgtgcatcgaatcctctatcgccgcacccatgtcccgcacaaagcgcaaccgatgaagacgaaccggcgcgaggccccccgcaaccacctgggcactaacgctgcgcgcaagccggacccgcgccccgtcggcgcgaagaagccccaccgcttccgacccttcactgtcgcgctccgcgagatccgcaaggaccacaacaggagtgacatgatcatcttcaagctacccttcaagcgtctcgatggcgagattctaaagaactgtcaagatatgatctgagggcccagccactctctttcgtagaagaagctacaggaggccgtcgaagaggacctggagggactcttctacgtacaccagccttagtctcatacacgccacgattgtcactatcatgaccaaggacatccacatagcgcgccggatctggatagagaggcatagagcgcccgtggtgcagctctgcttggtagtggtactacaagtatatggggggtatcgttacctgactccgtgatcctggatgagaaattgctctagatgccttgacttcagtgcgatggactgcgatagctcttttgtgaagtcatcaatggactagttcttgcagaaaaacgattgaataaaagaaaaaagcggcccct

SEQ ID NO: 1719 - DNA, 337 bp, Zea mays
  Clone ID: TF_LIB3279-005-P1-K1-D5
gcggctggcagacattcaagtcgttcgataggaagaagggcagccaaggccctggacaggatgtttcggaccaagcagaccgaccgtaagtccaccggaggcaaggccccgcgcacgcagctcgccaccaaggcggcgaggaagtcggcgccaacgaccggcggcgtgaagaagccccacaggtacaggcccggcaccgtggcgctgcgcgagatccgcaagtaccagaagagcacggagctgctcatccggaagttgcccttccagcgcctggtccgtgagatcgctcaggacttcaagacggatctgcggttccagagccacgccgtcctggccc

SEQ ID NO: 1720 - DNA, 895 bp, Zea mays
  Clone ID: TF_ZmC119_1366
agacgaacatacaataagacacaaggacgatactagagcaggacacatcccatccacagatctagacacgaacatgctacagcacacagcgcaaatgaagaccctactttctaagccttcttgggcaggagcacggagtggatgttggggaggacgccgccgtgcgttatggtgacgccggccagcagcttcccgagctcctcgtcgttgcggatcgccaggagcacgtggcgcgggatgatgcgcgtcttcttgttgtctttcgccgcgttccctgccaactccagcctcgtgccgaattcggcacgaggagaactagtctcgagtttttttttttttttttttttaattaatataatataaataagtatcattcaatatatcataaataagcattgtcaaataacgcatacataagtgtactctaaatctaaactaaaatacaattgtttgcactaatgttaagcctaactttatatgaattcaagtctccacacttttgcggccaccaaatttgaattacattctatgttttcttggacaacaaataggagaaaactagacatagcatgcaaaaagctccaagcagcacgtcgataacctcgaagttgcccttgtgcttctcccagttcttgatcaaggatgtgaagagcaaatcttctggtaactttaactacgctgacaaatataatcaaacataccacaaattcatttcagacttttacatagtttttttaacagacttggtaaattttgaaggatgtattgaatgtatattattcttaaaatttagtcaaacaaattggtggtgcataactcaaagttaataactcatgcaaccaactcaatttgtgtataacaaaactatattaatacctacttacttgtaaaactt

SEQ ID NO: 1721 - DNA, 426 bp, Zea mays
  unsure (1)..(426): unsure at all n locations
  Clone ID: TF_LIB3357-026-P1-K1-B7
agtttctccttccactgctttgaccggtgattcgacttaccacaaactatccggttgtaccggacgaactagacaagggcgcaacacgaccggctgcaaggtgtcccgcaagcaggtggtcaccaaagctgcgcgcaagtcacgagccggcgaccggtggcgttaataattctcaccccttccgccccggcaccgtcgcgctccgggagattcgcaagtaccagaagagcacggagctgctcatccgcaagctgcccttccagcgcctcgtccgtgagatcgcgcaggatttcaagaccgacctccgcttccagtcctccgctgtcgccgcgctgcangaggccgccgaggcctacctcgtggggctcttcgaggacaccaacctctgcgccatccacgccaagcgcgtcaccatcatgcccaaag

SEQ ID NO: 1722 - DNA, 519 bp, Zea mays
  Clone ID: TF_LIB4071-010-Q6-K1-F11
ccccgcgtccgctcgtctgctcgcatttgcctcccaatccatccccgcctgcaaacccgaactccaagtcgccccgcatcgatggcgcccaaggccgagaagaagcccgcggcgaagaagccggcggaggaggagcccgctgccgagaaggcgccggccgggaagaagcccaaggcggagaagcgtgtcccagcaggcaagtccgccggcatggagggcggtgagggaaagaggggctcggaagaagggcaagaagagcgtggagacctacaagatctacatcttcaaggtgctgaagcatgtgcacccggacatcggcatctcctctaaggccatgtccatcatgaactccttcatcaacgacatcttcgagaagctcgccgtcgaggccgtcaagctcgcgcggtacaacatgaagcccaccatcacctcccgtgagatccatacctccgtgcgcctagtcctacctggggagctcgccaagcacgccgtctcctagggcaccaaggccgtcaccaa

SEQ ID NO: 1723 - DNA, 729 bp, Zea mays
  unsure (1)..(729): unsure at all n locations
  Clone ID: TF_LIB4729-048-R1-K1-C1
atcccaaattctaacccaagaacaaaaatggccaccgccaccactgaagccgaagtccgtgagtccctcggcacgaagttcggtcgcctcaaggaacaggcgaaagacatggcctccaggcaccccgtcgctggagccgcggccgtcatcgctgtcagcgccgtgggcgcctacttcttgtggcccgtggcagccccggccgtggccatgatgaaggcgcctggatccggcggtgtgctcgtctcccgcgcggcgtttctcgcgaagaaggagctgtacttcaagctcttgcgcaccgggggcgttgcggcggcggtcgccgctttggcgtagctgcgcatgcagtagtggtacatgctgttcgtgaacgagcggcgggccggacgtttcaggttgtatgttgaccaagtggttattagtactttcctttcgttggtgttgagtctcgactatcaactcgcaattccgcattcgttccaactcctgagcactttctcctcgtcccagacaagccaatcgaagccgagatacgaccatggactccaccggcaccggagcagggggtaagggggaagaagggagcggccgggcgcaaggtcggcgggccaaggaagaagtcggtgtcgaggtccgtgaaggccggtctncagttccccgtcggccgcatcgggcgctacttgaagaagggccgctacgcgcagcgtgtcggcaccggcgcccccgtctacc

SEQ ID NO: 1724 - DNA, 689 bp, Zea mays
  Clone ID: TF_LIB4976-005-R1-K1-E12
aatagagaatacatactcctcttatttcttcccatccgatccccccttacaaaccaaaaccccaactcgccccgcatcaatggagtgcatggccgagaagaaagccgcggcgaacaagccgccggaggatgagcccgcggacgagaaggggcccgtcgtcaagatcccgaaggtggagaatggggaccccgctggcaaggccgctgtccaggaatgcgtcgagggcatgagttgcaagaagaatgtcagaatagcgtggagatctacaagatctacatcttcgaggtgtctgaagcaggtgcacccggacattggcacctcctccaaggccatgtccatcatgaactccttcattaacgatatcttcgagaagctcgctgctgaggccgtcaagctcgcgcgctataacaagaagtctaccatcacctcccgtgagatccagacctccgtgcgcctcgtccttcccggggagctcggcaagcacgccgtctccgaggggaccaagggcgtcaccaagttcacctcggcctatgctgctcggccgccgcttgcaggattctctcctgagttcacgtctcttgctgtagatatgtgctgctgcctgctgggcttctatggatgctatctatctggctgtagcaactgtagtatctgataggacccgtatgaagcttattcacccagctata

SEQ ID NO: 1725 - DNA, 448 bp, Zea mays
  unsure (1)..(448): unsure at all n locations
  Clone ID: TF_3341036
ttttttttctagaaacttcgacaggggtaactgattcattcagcaattatttttttttctagaaacttcgacaggggtaactgattcattcagcaattatgaattaaacaggatcgtagcaacgtgcggcggcaccctaagaggatgtaaacttggtaaccgccttggtcccttcggatacggcgtgcttggcgagctcgccggggaagacgaagcgcaccgaggtctggatctcccgggaggtgatggtgggcttcttgttgtancgggcgaacttggcggcctcggcggcaaacttctcgaaaatgtcgttgatgaaggagttcatgatggacatggccttggacgaaatgccaatgtccgggtgcacctgcttgagcaccttgaaaatgtagatcttgtacgtctcgacactcttcttcgccttcttctttcccttcttctcgcc

SEQ ID NO: 1726 - DNA, 589 bp, Zea mays
  Clone ID: TF_LIB4979-103-B1-K1-A5
atcccattttccgtgtcctcgtccgtgccgtaccagatctctatcattctcggatcgtcactcgctccaccacacacctgtaggcatggactccagcgcagacattatcaaggagacagaagggtgtggccgcggcgcaaggcatgcgcccccaggaacaactcggtgacgcagttccgtcaaggacgggctgcagttccccgacagccggatcgggcgctacctgaagaaagaccggtacgcgcagcgcgtgggcactggcgcccccgtctacctcgccgccgtcctggagtacctcgccgccgaggttctggagttggcagggaacgcggcgaaagacaacaagaagacgcgcatcatcccgcgccacgtgctcctggcgatccgcaacgacgaggagctcgggaagctgctggcaggcgtcaccatcgcgcacggcggcgtcctccccaacatccactccgtgctcctgcccaagaaggcggcggagaacgcggccagcgccggtagcaaggagcccaagtcccccaagaagggcgccaagtcccccaagaaggcttacaaagtagggacttcatttgcactgtgt

SEQ ID NO: 1727 - DNA, 422 bp, Zea mays
  unsure (1)..(422): unsure at all n locations
  Clone ID: TF_LIB4669-003-Q2-K1-C9
gtaccccttgtggtcacggccgggcctcacacaagnatctcattctccctagcagcatatcctcgtgcaacgcaaagcgctagccttcctactgtcccgatggcccgcacgaagcagacggcgaggaagtccactggcggcaaggcgccaaggaagcagctggccaccaaggcggcgcgcaagtctgccccggcgaccggcggagtgaagaagccccaccgtttccgccccggcaccgtcgcgctccggggagatccgcaagtaccagaagagcacggagctgctgatccgcaagctgccgttccagcgcctgtgcggagatcgccagacttcagacgacttcgcttcagagctccccgtcgccgcgctgcaggaagcgtccgaggcctacctcggtcgggtctctttcgaaggacacccaa

SEQ ID NO: 1728 - DNA, 498 bp, Zea mays
  Clone ID: TF_ZmC653_31
ggcacgaggaatctccctagcaatctctagcagcagatcctcgtgcgaagcaaagcgctagcccccttcgtactgtcccgatggcccgcacgaagcagacggcgaggaagtccactggcggcaaggcgccaaggaagcagctggccaccaaggcggcgcgcaagtctgccccggcgaccggcggagtgaagaagccccaccgtttccgccccggcaccgtcgcgctccgggagatccgcaagtaccagaagagcacggagctgctgatccgcaagctgccgttccagcgcgtcaccatcatgcccaaggacatccagctcgcccgccgtatccgtggggagagggcctaggcgtcgtcccggtggaggtggaagtagtagtcgccgtttctgtcatcactgtctggctagaaggtgtagagatgtgccgggttctgtagtttgggttatcggtcaaatcatgatgtagttgggtcttccctgctgtaatttaactatg

SEQ ID NO: 1729 - DNA, 531 bp, Zea mays
  Clone ID: TF_LIB3637-196-Q1-K6-G12
cttcgttcccagcacagaccaatcgaaagccgtaaatacgaaccatggtactaccaccggacaccggtagcaggggcgtaaggggaaataaggagcggccgggcgcaaggtcggcgggccaaggaagagtcggtgtcgaggtccgtgaaggccggtctccatttccccgtcggccgctcgggcgctacttgaacaaggccgctacgcgcagcgtgtcggcaccggcgcccccgtactacctcgccgctgtcctcgaaaccttgccgctgaggttctggagctcgccggtaatgctgccagggcacaacaagtaagactcgcattattccgcgccacgtgcttctggcgatccggaacgacgaggagcttgggaagctgttgggcggcgtgaccatcgctcacggaggtgtgctccccaatatcaaccctgttctgctgcccaagaagaggcggagaatgcgtccagtggcgggagcaaggaggcaaagtcgcccaataagccgccaagtcccctaagaagcatagactgac

SEQ ID NO: 1730 - DNA, 413 bp, Zea mays
  Clone ID: TF_uC-zmflB73006d03b1
cgccctattccaatggcgcggggtttttttaagaagcccgccgtcttttcccctgcggaggaggagccggcggggataatgcccggcggggaagaagcccaaggctgagaagcggttcccgcgggcaagtccgcaagcacagaaggcggcgagaagaacgggatgaagaaggcaaagaagtcggtggagacgtacaagatctacatgttcaaggagctgaagcaggtgcacccggacattggcatctggtccaaggccatgtgcatcatgaactcctccatgaacgacatctttgagaagctggcggccgatgcggacaagctggcgcggtacatcaagaagcctaccattacgttccgcgagatccataccttcattggcctcgtcctccccggtgagctcgccaagcaccc

SEQ ID NO: 1731 - DNA, 620 bp, Zea mays
  Clone ID: TF_ZmC653_42
cctcgaggcggcgggcgcctcgcatcaaccactctttcccaatccaccgccggctcggctcgcccatcttcgcgccaagcaccgaatctccgatggcccgcacgaagcagacggcgcgcaagtcgacgggcggcaaggcgccccgcaagcagctggccaccaaggcggcgcgcaagtcggcgccggcaaccggtggcgtgaagaagcctcaccgcttccgccccggcaccgtcgcgctccgggagattcgcaagtaccagaagagcacggagctgctcatccgcaagctgcccttccagcgcctcgtccgtgagatcgcgcaggatttcaagaccaacctctgcgccatccacgccaagcgcgtcaccatcatgcccaaggacatccagctcgcgcgccgcatcaggggcgagagggcttgatctcccgttgtcgtcgtccacgttgttgggcctttcctctgtgtctctgcttgtagaatccttgcttctgttcggttccttctgttcgcatgatggtgttcgtagtgttaggagttgcattttctaatctgcttgttcttgcaccggtgcctctgaagtggcgtttccctctatcttaatggaaatggaatgtgcttt

SEQ ID NO: 1732 - DNA, 702 bp, Zea mays
  unsure (1)..(702): unsure at all n locations
  Clone ID: TF_LIB4732-125-Q1-K1-D7
gaaaaaanatannaaaaaaaaaaaaaaaaaaaaaaaaaaaaaaaaaaaaaaaaaaaaaaaaaaaaaaaaaaaaaaaacccccccccgctcaccggggtttggttttctcccctcttctgcaccacttctcgctccggattccggattccctctgctctttccctaacgaaggtagccatgggggggaaaggtaaggcgatcggttcaggcgccgccaaaaaggccacgtccagaagctccaaggttggcctccagttccccggggaaaggatcgccaggttcctcaaggccggaaagtatgccaagagagtcggcgccggcgcccctgtctacctcgttgccgggctcgagaatcttgctgctgaggttcttgagctggccggaaatgcggcacgtgacaacaaaaaaacccgaatcgaaccgcgccacatccagttcgccgtccgaaacgacaaaaagctctcccgcttgctgggcacggggaccatcgctagggggggggaaaggcccaacatccataaccttttgctcccaaaaaaggccgggggcggcagcgccaaggttgcggttggtgacaaaaactaagtccttgactacgcctgggggcacctccaggatgctgccgaatcaacatgtgtctgtgtagaacgttaggtgttcgttgaaactggggtatggtgggttgctgaaacactgctaaac

SEQ ID NO: 1733 - DNA, 570 bp, Zea mays
  Clone ID: TF_LIB5024-002-A1-K1-D11
taggggccttttttttttttttttttcttttttttttttttttttattagaaaacttcaacaggggtaactgattcattcagcaattataacaaattctacattgttgcacgaacaacctagcacagtcctaaatatgagaaaatttagcaacgtgcggcggcggcggcaccctaagaggatgtaaacttggtaaccgccttggtcccttcggagacggcgtgcttggcgagctcgccggggaggacgaggcgcaccgaggtctggatctcccgggaggtgatggtgggcttcttgttgtagcgggcgagcttggctgcctcggcggcgagcttctcgaagatgtcgttgatgaaggagttcatgatggacatggccttggacgagatgccaatgtccgggtgcacctgcttgagcaccttgaagatgtagatcttgtacgtctcgacgctcttcttcgccttcttctttcccttcttctcgccgccctccttgctcggaacgcgcttctccgcccttggtttcttctcggccttctcctccgccggcttcttctccgcgggcttcttct

SEQ ID NO: 1734 - DNA, 690 bp, Zea mays
  Clone ID: TF_ZmC369_129
ccggccgggactagtcgaaagctacgagcactcgccgccactcaccagcaaattcccaagccgccccttcccccatctctttcgcgccccatttgatcgattcctgatggcgcccaaggccgagaagaagcccgcggagaagaagccggcggaggagaaggccgagaagaagccaagggcggagaagcgcgtgccgagcaaggagggcggcgagaagaagggaaagaagaaggcgaagaagagcgtcgagacgtacaagatctacatcttcaaggtgctcaagcaggtgcacccggacattggcatctcgtccaaggccatgtccatcatgaactccttcatcaacgacatcttcgagaagctcgccgccgaggcagccaagctcgcccgctacaacaagaagcccaccatcacctcccgggagatccagacctcggtgcgcctcgtcctccccggcgagctcgccaagcacgccgtctccgaagggaccaaggcggttaccaagtttacatcctcttagggtgccgccgccgccgcacgttgctaaattttctcatatttaggactgtgctaggttgttcgtgcaacaatgtagaatttgttataattgctgaatgaatcagttacccctgttgaagttttctaatatattaatcttgctaggaaaaaaaaaaaaaaaaaaggccccta

SEQ ID NO: 1735 - DNA, 668 bp, Zea mays
  Clone ID: TF_ZmC369_46
gccggccgggtccgactagtcgaaagctacgagcactcgccgccactcaccagcaaattcccaagccgccccttcccccatctctttcgcgccccatttgatcgattcctgatggcgcccaaggccgagaagaagcccgcggagaagaagccggcggaggagaaggccgagaagaagccaagggcggagaagcgcgtgccgagcaaggagggcggcgagaagaagggaaagaagaaggcgaagaagagcgtcgagacgtacaagatctacatcttcaaggtgctcaagcaggtgcacccggacattggcatctcgtccaaggccatgtccatcatgaactccttcatcaacgacatcttcgagaagctcgccgccgaggcagccaagctcgcccgctacaacaagaagcccaccatcacctcccgggagatccagacctcggtgcgcctcgtcctccccggcgagctcgccaagcacgccgtctccgaagggaccaaggcggttaccaagtttacatcctcttagggtgccgccgccgccgcacgttgctaaattttctcatatttaggactgtgctaggttgttcgtgcaacaatgtagaatttgttataattgctgaatgaatcagttacccctgttgcaaaaaaaaaaaaaaaaaaaggccccta

SEQ ID NO: 1736 - DNA, 654 bp, Zea mays
  Clone ID: TF_ZmC369_75
atagtcgaaagctacgagcgctcgccgccactcacccgcaaattcccaagccgccccttcccccatctctttcgcgacccatttgatcgattcctgatggcgcccaaggccgagaagaagcccgcggagaagaagccggcggaggagaaggccgagaagaagccaagggcggagaagcgcgtgccgagcaaggagggcggcgagaagaagggaaagaagaaggcgaagaagagcgttgagacgtacaagatctacatctttaaggtgctcaagcaggtgcacccggacattggcatctcgtccaaggccatgtccatcatgaactccttcatcaacgacatcttcgagaagctcgccgccgaggcagccaagctcgcccgctacaacaagaagcccaccatcacctcccgggagatccagacctcggtgcgcctcgtcctccccggcgagctcgccaagcacgccgtctccgaagggaccaaggcggttaccaagtttacatcctcttagggtgccgccgccgccgcacgttgctaaattttctcatatttaggactgtgctaggttgttcgtgcaacaatgtagaatttgttataattgctgaatgaatcagttacccctgttgaagttttctaatatattaatcttgctagc

SEQ ID NO: 1737 - DNA, 721 bp, Zea mays
  Clone ID: TF_ZmC653_54
ccggccgcggctattcgtgtcctggcatccgcagagagcttgttccgtccaggcaaccaaaaagcaagttgccccgccgcgcagaggaagaagagagcagaggaggatggctcgtacgaagcagaccgcccgcaagtccacgggaggcaaggccccccgcaagcagctcgccaccaaggcggcgaggaagtcggcgccgacgaccggcggcgtgaagaagccccacaggtacaggcccggaaccgtggcgctgcgcgagatccgcaagtaccagaagagcacggagctgctgatccgcaagctgcccttccagcgcctggtgcgcgagatcgcgcaggacttcaagacagacctccggttccagagccacgccgtgctggcgctccaggaggccgccgaggcctacctcgtcggtctcttcgaggacaccaccctctgcgccatccacgctaagcgcgtcaccatcatgcccaaggacatccagctcgcccgccgcatccgtggcgagcgcgcgtagccatcatctccggggatctgatgaatgtctagttaccaaacaaataggctgtattagcgtcgttgttctgtattcgttattttggattcggttgcagtgaaaaacagctttactaatctgaaaaaaaaaaaaaaaaaaaaaaaaaaaaaaaaaaaaaaaaaaaaaaaaaaaaaaaaaaaaaaaaaaaaaaaaaaaaaaataatg

SEQ ID NO: 1738 - DNA, 792 bp, Zea mays
  Clone ID: TF_LIB4756-019-Q1-K1-F11
ccggccgggatcgtcttgatactccacgcccacaacccgctcactcacgccgctccgtccacactcccgtctttttcgactcccacttccaaaaacaacccccaccaaaaaactcattcaaaatgactggcggaaagtccggaggcaaggccagcggctccaagtccagcgcccaatcgtaagtagccactgattgcatgctttgcagctttttgcctttacctgggctgcgcgcctcgtgctctctggtgttgcaacttgtttgcttttgacgcgtcttttgtctcaattgacgcgtcttttttcgcatctcttcaatattacatcatttgctaacagcaattccagtcgttcatccaaggccggtctcgctttccccgtcggtcgtgtccaccgtctcctccgcaagggcaactacgcccagcgtgtcggtgctggtgctcccgtctacctcgctgccgtccttgagtacctcgctgctgagattctcgagttggccggtaatgctgcccgcgacaacaagaagacccgtatcatcccccgccatctccagctcgccatcaggaacgatgaggagttgaacaagcttctcggacacgttaccatcgcacagggtggtgtcctccccaacattcaccaaaaccttctgcccaagaagactgccaagcctggcaagggtccttcgcaggagctctaagcgcattttgctttcgagtttcttcttcacggcgtggttacttcatgggtctttttcgtctgcaatgataatgggagtcggtctgggttttgggt

SEQ ID NO: 1739 - DNA, 303 bp, Zea mays
  Clone ID: TF_700071688H1
caactcctcgccaaatccacgctgctattaactcgccgtcgtccgcgccaagcagcaaagctccgatggtccgcactaaacagacggcgcgcaagtcgacgggcggcaaggcgtcgcgcaagcagctggcgaccaaggcggcgcgcaagtctgcgtcggcgagcggcggcgcgaagaatccgcaccgcttccgccgcgtgcacgtcgtgctcctggagatatgcaagtaatagaagaccatggagctgctgatgcgtaacttggacttccagcttctcgctcgtgacatcgctcaggacttca

SEQ ID NO: 1740 - DNA, 393 bp, Zea mays
  Clone ID: TF_jC-zmX700553022b1
gagctcactagtctgttgccgccctttttttttttttttttatggggggtttttttaaaaaaagggggggggatccacaaataaccaactagctggatgcaataagcctcgttactgacccatgaaataacaaatgctaccgggggagaccaaacacagcagcccctaactacagaaggacacccaaacatacaagggaagcctgcaagcgggggcctcccagcctaggacgaggggaacttggggacggccttggccccctcggaaaccgcgtgcttgacaagctcccccgggaggaccaggcccacggaggtctggatctcaccgtaggggatggtgggctttttgttgtaccgcgcgagcttggtggccttggcggcaagcttctcgaaa

SEQ ID NO: 1741 - DNA, 314 bp, Zea mays
  Clone ID: TF_LIB3062-034-Q1-K1-D11
gcgcagagcctgattcatctccattcgaaacaccctatcacccacactctcacttcgtccgcagcctgaatcctcgtaacgatggctcgcacgaagcatactgcgcgcaagtccacgggcggcaaggcccctatgaagcagctgtcgaccaaggcggcgcgcaagtcagcccctgcgaccgtcgtgctaaagaatcctgaccgtttccgtccgcgcaccgtggcgctgctctagatccgcaagtaccacaatagcactgagcttctcatccgcaagctgtcctttcagcgcctggtccgcgagatcgcgcagga

SEQ ID NO: 1742 - DNA, 242 bp, Zea mays
  Clone ID: TF_LIB3067-001-Q1-K1-A4
gtacgaagcagactcgtccgcaagtccactcggaggcaaggccccgcgcaagcagctcgccacgaaggcggcgaggaagtctgcgccgactaccggcggcgtgaagaagccccacaggtacaggcccgtgacggttgctctgcgcgagatccggatgtaccagtatagctcggatctgctgattcggatgttttacttcatgctttttgttcgtaagatttctcttgacttgtagtcggttg

SEQ ID NO: 1743 - DNA, 408 bp, Zea mays
  Clone ID: TF_LIB3587-230-Q1-K6-H6
cccattcctcgcgcggcgaccacccgattcgaagcgtgcggagagaccgaagaagcgggagagatggctcgtaccaagcagactgctcgcaagtccacgggagggaaggctcccaggaagcagcttgccaccaaggctgcccgttagtctgcccccaccactggtggagtgaagaagcctgaccgttaccgtcctgaaactgttgccctccgtgagatccgtaagtattataagagcactgtgctgctgatcaggaagctgtccttccagaggctagcaagggaaatcggacaggacttcaaagctgatgtgagtattcagagccatgcggagctagcccttcaagaggctgatgaagcataccttgttagactgtataatgacaccaacctgggcagcgtcgcatgc

SEQ ID NO: 1744 - DNA, 599 bp, Zea mays
  Clone ID: TF_LIB4766-040-R1-K1-F3
cctcgaggccggccgggccaagtccaagaccttcccaaaaaatccctcattttcttcgaggcgaggagagcgtgaaagacagggcaccggcagcgacgacgtcggggcgcggcaagggcggcaaaggtctgggcaagggcggagcaaagcgccaccgtaaggtgctccgtgacaacatccagggcatcaccaagcccgcgatccgtaggctggctcggaggggcggcgtgaagcgcatttcggggcttatctacgaggagacccgcggcgtcctcaagatcttcctcgagaacgtcatccgcgacgccgtcacctacaccgagcacgcacgccgcaagaccgtcaccgccatggacgtcgtctacgcgctcaagcgccagggccgaaccctctacggcttcggaggctaggctggatgcctcttctccttgctatcgtggatgcctgtttgttgttagggttacttcgtttagtttcttgtctgtgacgtgttggactattgttagtagtattcttgaagttgtgtttcgaatgtaatccaatcttatcgttcgagaattgaaatgattcctgagaaaaaaaaaaaaaaaaaagcggcc

SEQ ID NO: 1745 - DNA, 2480 bp, Zea mays
  Clone ID: TF_ZmC697_106
gctggtgccggactgacggttagagatggcccacccctcctccgccgccgccgtatcctccacggcgcccgctgcaaaccctagttatggcgcccgcgaggaaggaggcgcccgctctccgccgtctccgtctccgtctccgtctcagagggggcgggccaaggtggtgatcgttatgggcgccacgggcgccggcaagtcgcggctggccgtcgacctcgcggcccacttcgccggcgtcgaggtggtcagcgccgactccatgcagctctaccgcggcctcgacgtcctcaccaacaaggctcccctccacgagcagaacggtgttcctcatcatctacttagcgtgattgatccctctgtcgagttcacttgccgtgatttccgcgaccgtgccctgccgattatacaggaaatagtggaccgcggtggcctccctgtggttgtcggcggcacaaacttctacatccaggctctcgttagcccattcctcttggatgatatggcagaagaaatgcagggctgtactctgagagatcacatagatgatggtataggccttaccgatgaagatgaaggcaatgggtttgaacgcttgaaggagatcgatcctgtggctgcgcagaggatccatccaaacgaccatagaaaaatcaaacgctacctcgagttgtatgcaaccacgggtgccctacccagcgatctgttccaaggagaggccgctaagtataaacttgctgggaattcctggtcatcatgtcagaacagaaatggggtcggcctagtaactccagactctactgctgtttcctgtgggtagatgctgatcttcaagtcctggacagttatgtcaacaaaagggtcgattgcatgatggatggtggtctgctggacgaagtatgcagcatatatgatgcggatgctgtctatacccaggggctgcggcaggccattggggttcgtgagtttgatgagtttttcagagcatatttagccagaaaagaatctggtgagggttcctgtgcaagcctgttaggtatgcatgacgatcagcttaagagcttgttggacgaatttttttcccagctgaaggcaaacactcgcagactagttcgacgtcaaagacggagattgcataggctgagtaaagattttgggtggaacttgcatcgtgttgacgcaacggaagcattcttctgtgccactgacgactcatggcaaaagaaagttgtcgaaccatgtgtggatgtcgtaagaaggttcttgtcggacgattccactgttttgccaagcacaagcgcaagtgacccctcttcaagagagctgtggacgcaatatgtgtgcgaggcctgcgacaaccgggtgctgcgaggtgcgcacgagtgggagcagcacaggcaagggcgaggccaccggaagcgagtgcagcgcctgaagcggaagagcctgaggccatggccatcgctgctgccccaagaccgcagctgatggtaactttttcacagcagaaccggcgaggagtgggacggggacgttgacgtggacatggtcgtctcgtcccacccaaaaaagcgtgccagcatgacagcgacatgctttcccaatcccgaattcccggcacgtcgacggggggaatacctccatgccttttagcagctgaagaagcaggcaccaaagaactgcttgtcaaaagtattgtaccacacgtacgacgggtctagaagccacagaaacgtagtgtggaagtggatagatacatgaacaatggcccatctttctatactgctaaagtttagcatatgctaaggaggtgtttaagattaaaaaaaaaaaaaaaaaaaaaaaaaaaaaaaccctcagcactagtctcctcttcgcacgagcgcaacaccatccacccaccagttcgaagcggaggcgaccggcaacctgcggcggagatgtcaggcaggggcaagggcggcaaggggctcgggaagggcggcgcgaagcgtcaccggaaggtgctgcgcgacaacatccaggggatcacgaagccggcgatccggaggctggcgaggaggggtggcgtgaagcgcatctccgggctgatctacgaggagacccgcggcgtgctcaagatctttctcgagaatgtcatccgcgacgctgtgacctacacggagcacgcccgtcgcaaaaccgtcaccgctatggacgtcgtgtacgccctcaaacgccagggccgcactctctatggcttcggcggctaggttaggtgtgggtaattgcctgtccaggtgtctcggatctgtggtactagtttggctgccttcctgtgttcgtattgtagtagttgtggtagctggttgctttgtcgtcctgtagtcgtgcttctttgggtctgtaagaaccgctggttcgatgggattggattggacggtgaagtaggaatgttggcatgttagacttttctctaaaaaaaaaaaaaaaaagcggcc

SEQ ID NO: 1746 - DNA, 2218 bp, Zea mays
  Clone ID: TF_ZmC697_131
gccggcctgggttgcgattcacccaagtccaagcaccttcccaaaaaaatcccccattttcttcgaggcgaggagagcgtgaaagacagggcaccggcagcgacgatgtcggggcgcggcaagggcggcaaaggtctgggcaagggcggagcaaagcgccaccgtaaggtgctccgtgacaacatccagggcatcaccaagcccgcgatccgtaggctggctcggaggggcggcgtgaagcgcatttcggggcttatctacgaggagacccgcggcgtcctcaagatcttcctcgagaacgtcatccgcgacgccgtcacctacaccgagcacgcacgccgcaagactgttaccgccatggacgtcgtctacgcgctcaagcgccagggccgaaccctctacggcttcggaggctaggctggatgcctcttctccttgctgtcgtggatgcctgtttgttgttagggttacttcgtttagttccttgtctgtgacgtgttggactattgttagtagtattcttgaagttgtgtttcgaatgtaatccaatcttatcgttcgagaattgaaatgattcctgggcaacattttgcaggcaaaaaaaaaaaaaaaaaacgtctgagagcaaaccagacgaaacaaaccctcctgggctgcttccccttttcgatccccatggcgcaggacgacatcccggagtcctccgcctccggatcccccacctcctccgccccggcggctcgcctcaacgccgccgcgcccgagtttaccccccgatccgccgcccagcaccacggcaacaacgcccatcgccgcggcccgcaccaccaccatcagccgcaccaccacccccactaccaccctcaccagcactaccagccgcggcaccagcaccatcaggcccaggccgaggatgaggggagcgccgccgcgacggcggaggatagggagggccccgctggtgcggtgcaggcgcagcaccggctgcccgaacccgaggcccgcaagctcgtcaagcaggttgaattttacttcagcgatatcaatttggccacaactgaacatctgatgaagttcatcgctaaggatccagatggatttgtgccaatttctgtagttgcatcttttaggaagatccgagagatagtttatgatagatccttgttggttgctgcattacgcacgtcatctgagctggttgtttcagaggatgggaaacatgttaaacgcttacagccctttaatgccgaagaagttcagtctcgtattgttgttgctgaaaatttacctgaggatcaaaagcatcagactctgatgaagattttctcagctgttgggaatgtgaaatctatacgtacctgttatccacaagatatttctccagcagcagccaacagaacatcaaggattgagatgatttttgctaataagcttcattcttttgtggagtattcagctgttgaagatgctgaaaaagcagttgctgaattcggtggtgggggaaactggagagaggggattagagttcgttcactgcttggatgtctgaaacatgggttaggtcaaggaagaaaagtggggatgaggagtatgctgcagatgaagatggccctgacacaactgatcatccacgagactttggaacagatgttaccgcccaaatctcagaaacacatttcgatcaccaggccgaagatggcacccatgacaagggtggaatgaggcagcaggggagagggagaggccgtggaggtagaggcagaggccgtggtcagcattatggccacaacagccgagatggccaccatcctattggcactcccccgtcggagcatccagctgtgccgaagccgcccccgggcccccgcatgccggatggcacaaaagggttcaccatgggccgagggaagccgctcagcattaccattgatgctgctgctaaccctaccaccacggatgctgcttagtcgcagcgtctatgctggtaccggcctattgccctgatcatcagtcttttccaaaccgattgcagtggtcatttactcatgttctaaaccgtttactgtggcgtgttggttcattttgtctgggatttaaaaggaaaggagatggctggtactatgatacatgcgtgtatactaacacccgaagtttagacatgtggacatgtactgtgatatgtagctcttaaattagaaagatgcatacttttgatgag

SEQ ID NO: 1747 - DNA, 1094 bp, Zea mays
  Clone ID: TF_ZmC697_152
agactgatgatcagggcaataggcgggtaccagcatagacgctgcgactaagcagcatccgtggtggtagggttagcagcagcatcaatggtaatgctgagcggcttccctcggcccatggtgaacccttttgtgccatccggcatgcgggggcccgggggcggcttcggcacagctggatgctccgacgggggagtgccaataggatggtggccatctcggctgttgtggccataatgctgaccacggcctctgcctctacctccacggcctctccctctcccctgctgcctcattccacccttgtcatgggtgccatcttcggcctggtgatcgaaatgtgtttctgagatttgggcggtaacatctgttccaaagtctcgtggatgatcagttgtgtcagggccatcttcatctgcagcatactcctcatccccaccttttcttccttgacctaacccatgtttcagacatccaagcggacgcgtgggcggacgcgtgggcggacgcgtgggcggacgcgtgggcgcgtagctctcggtttcggcgatgtcggggcgcggcaagggcggcaaggggctgggcaagggcggcgccaagcgccaccgcaaggtgctgcgcgacaacatccagggcatcaccaagccggcgatccgtaggctggctcggaggggcggcgtcaagcgcatttctgggctcatctacgaggagacccgcggcgtgctcaagatcttcctcgagaacgtcatccgcgacgccgtcacctacaccgagcacgctcgccgcaagaccgtcaccgccatggatgtcgtctacgcgctcaagcgccagggccgcacgctctacggcttcggcggctaggccgcctccccttctgatgctttgatatgacggccgtggtcggttgtgtgtctagttggccggtctactgtagtttgttctgtatcttcgtttcgaggtgttccagtttctagcccatttggtgtaatattttcacagctattatcaatggaaagccctcggttctatccccaaaaaaaaaaaaaaaaaaaaaaaaaaaaaaaaaaaggaaaaaaaaaaaaaaaaaagcggcc

SEQ ID NO: 1748 - DNA, 980 bp, Zea mays
  unsure (1)..(980): unsure at all n locations
  Clone ID: TF_ZmC697_154
cattgggtacctcgaggccggccgggatcgcacaaatcctcttcctcgagttctcctcaaccaaattcaaagtcacagcggcgaaactctcggcgatgtctggccgcggcaagggcgggaagggtctgggcaagggcggcgccaagcgccaccgcaaggtgctgcgtgacaacatccagggcatcaccaagccggcgatccgcaggttggcgaggaggggcggcgtcaagcgcatctccgggctcatctacgaggagacccgcggcgtgctcaagatcttcctcgagaacgtcatccgcgacgccgtcacctacaccgagcacgcccgccgcaagactgtgaccgccatggacgttgtctacgctctcaagcgccagggccgcaccctctacggtttcggcggttaggtcgcccctctcccggtggcgaattacgtggtggcggtggcggtcgtgttgtgttcttggtctagttagtctgtgttgtctttatcggtgctgttttctgtggtggttgtactgcatcgttctagtttctagtccatgtgctgtaatatctcgctgctgtaatcaatggaatgtcctcgtttcaagccccaaaaaaaaaaaaaaaaaaaaaaaaatccactcgccctcccacacagaaaaccctagccgccgccaccgaagcggcctcccaggtaagcaggagcgtccaccccgccgccgtcatgaagcgcaatccccgcgtcacgagctcccgccggaagtgccgcaaggcgcactttacggccccgtcctccgtccgccgcgttctcatgtccgccgggctgtcgacggagctccgccacaagtacaacgtgcgctccatcccgatccgcaaggaccacnaggtgcaggtcgtgcgcggcacctacaaaggccgcgaggggaagggggggcaggtctaccgccgccgctgggtcatccacctcgagcggntcacccccnataaggtgaacg

SEQ ID NO: 1749 - DNA, 1366 bp, Zea mays
  Clone ID: TF_ZmC697_155
ggccgcttttttttttttttttttcggctgcaaaacgttgcccaggaatcatttcaattatcgaacgataagattggattacattcgaaacaacttcaagaatactactaacaatagtccaacacgtcacagacaaggaactaaacgaaataaccctaacaacaaacaggcatccacgacagcaaggagaagaggcatccagcctagcctccgaagccgtagagggttcggccctggcgcttgagcgcgtagacgacgtccatggcggtaacagtcttgcggcgtgcgtgctcggtgtaggtgacggcgtcgcggatgacgttctcgaggaagatcttgaggacgccgcgggtctcctcgtagataagccccgaaatgcgcttcacgccgcccctccgagccagcctacggatcgcgggcttggtgatgccctggatgttgtcacggagcaccttacggtggcgctttgctccgcccttgcccagacctttgccgcccttgccgcgccccgacatcgtcgctgccggtgccctgtctttcacgctctcctcgcctcgaagaaaatgggggatttttttgactagttctagatcgcgagcggccgctcgcgatctagaactagttcaaatctcacaatcttcttgtagcacaccactgtcttcgtccaactcggcggcgatgtctgggcgcggcaagggcggcaaggggctgggcaagggcggcgcgaaacgccaccgtaaggttctccgcgacaacatccagggtatcacgaagccggcaatccggaggctggcgaggaggggcggcgtgaagcgtatctccgggcttatctacgaggaaacccgcggcgtgctcaagatcttcctcgagaatgtcatccgcgacgcggtcacctacaccgagcacgctcgccgcaagaccgtcaccgccatggatgttgtgtacgccctcaagcgccagggccgcactctgtacgggttcggtggttgagcgcatctcttccctcgtctgcagcggctgccggtggcgtttcctcagttccctctgccttgcttggcttgatgtagagagttatcagattaaaatatctctgatgtgcttcgttattgggtggaatcatgtgtcccagcagtgctgggaaatcaagatcaagatgtatctttctttgcagtaatgaaatgttaaaatcgagatcaagatgtatctttctttgcagtaaagaaactttgctattgcgcccactgttaggctaatcacaatggaggtttcatgaggtgtttcatgtattaattagcctgctatattagctattttgatgatgtgtcatatcatttaaaaaaaaaaaaaactcgaggggggggccggt

SEQ ID NO: 1750 - DNA, 1440 bp, Zea mays
  Clone ID: TF_ZmC697_159
ggccgcttttttttttttttttttacaagcagattctccacaaaatccaaccatatgtgtgctttggcataatttaatatcatcgacatgtttttaacaaaatcctctccaagatccataccaagcacgaagccttcatggaaatagcaaaacagagataccttaaagggtttcaggtacaagaaattgacaactagatcagacactatgagggacgcccgacgtctagaagcggagtttggtaaagaaccacctgttcttgccggtcttgaacctctcctcgaggcgcgccttggcggccttgcaggcttcgaccttcttgtcccgggtggagagcgcgtcgggcccgcccgatgcgacgtccttaaagtcgacgtcgagggtgtagcgggtgggcatgaggtgcgtgaagttgacgagcttgatgaagcacttgacgcgggacttcttggccgtcttcttggcggagtccttgcggatcaccttcttggggtacttggcgaggcccgcgacgaggcagtgcccgtagggacgatcacgggtgccctcctcgaaaacgcgcacgatcacggccttccggccggcgaaccggccctggaggaggataacggccttgccgggcttgaggaacttcaccatctttgctctttggacggtggtagcgatgctgcgccgccggcccacgcgtccgcccacgcgtccgcccacgcgtccgacccaatctcccctacaccagaaaaattcccagttctttggtccgcgtcagagaggcggcggcgatgtctgggcgcggcaagggcggcaagggtctgggcaagggcggcgcgaagcgccaccggaaggtgctccgcgacaacatccagggcatcaccaagccggcgatccggaggctggctaggaggggtggcgtgaagcgcatctcggggctcatctacgaggagacccgcggcgtgctcaagatctttctcgagaacgtcatccgcgacgccgtcacctacaccgagcacgcgcgccgcaagaccgtgaccgccatggacgtcgtctacgcgctcaagcgccagggacgcaccctctacggcttcggaggctaggctaggcgcctcttcatagtcggggactggttaggggacatgtctctgtgtgatgctttctgtggtattattgctgcaatagccgtgtaatccatcgcttctgcaatgaagcgctcggaagcatgctacgtatgttgtgtctgtgggtgattgtatttctggtagtaacagtgattgttcctgaattttggataatacaagctcattcgcagtagtttctgttgtaatcctgtcttatcgtttgagaggagtattgctttgggcagcctttgctgtgcatttttatgcattaggataaaaaaatttggtcgacttacgaaaaatttgcgcagcagacatgcgctagatc

SEQ ID NO: 1751 - DNA, 755 bp, Zea mays
  Clone ID: TF_ZmC697_92
cattgggtacctcgaggccggccgggggatgcgatcataccagcactaaagcaccggatcccatcagaactccgaagttaagcgtgcttgggcgagagtagtactaggatgggtgacctcctgggaagtcctcgtgttgcattccccaagtccaagcaccttcccaaaaaaatcccccattttcttcgaggcgaggagagcgtgaaagacagggcaccggcagcgacgatgtcggggcgcggcaagggcggcaaaggtctgggcaagggcggagcaaagcgccaccgtaaggtgctccgtgacaacatccagggcatcaccaagcccgcgatccgtaggctggctcggaggggcggcgtgaagcgcatttcggggcttatctacgaggagacccgcggcgtcctcaagatcttcctcgagaacgtcatccgcgacgccgtcacctacaccgagcacgcacgccgcaagaccgtcaccgccatggacgtcgtctacgcgctcaagcgccagggccgaaccctctacggcttcggaggctaggctggatgcctcttctccttgctatcgtggatgcctgtttgttgttagggttacttcgtttagtttcttgtctgtgacgtgttggactattgttagtagtattcttgaagttgtgtttcgaatgtaatccaatcttatcgttcgagaattgaaatgattcctgggcaacatttttttccaaaaaaaaaaaaaaaaaaaaaaaaaaaaaagcggcc

SEQ ID NO: 1752 - DNA, 722 bp, Zea mays
  Clone ID: TF_LIB4826-120-R1-N1-A9
ccggccgggatacacagcttggaactctcttcatgtctcaaacgatcttaaccccccctcagcggtcactccagatccaatcctcgatgggaaatgtggaccgcacgaaagaaattgcacgccagtcaacgggaggcaaagcgccacgaacacagctggcaaccaaggcagcgcgcaaagcacacccggccacgcgcggcctagaagaagccacatcgagttacacccgcgccaccggggaccctgtgagcagatccgcaagtaccagaaaagcacggagctgcttatccgaaaactgccggtccagcgcctggtgcggcagatcgaacacgacttcaagacggacctccggttccagtcctccgccgaggccgcgctgcacgaggccgccgaagactacctcgtgggcctcttcgaggacaccaaactctgcgacatccacgccaatgagcgacaccatcatgcccaatgacatccggctcgcccgccgcatacggggtgagaggaactgagcaccccctcgccgctgctgcgagtccatcgcttccagatatctgtggagcgaagaactactgcacgacgctaagaactactgcgagctatattcgcctgtgagagtaggaagagcaacaatgctctgatgattacaatgcagtgcccccgcgatactgacatccgtgctgcttgttctggacttcgaactacgaatgcgattgttacta

SEQ ID NO: 1753 - DNA, 390 bp, Zea mays
  Clone ID: TF_LIB3067-019-Q1-K1-C10
aaaaaaaataaaaaaaaaaaaataaaaataaaaattaaaggccggaactccagctggtccagggttgatggcgcctaaagtcgacatgatacccatggcatagaatccgctagatgaggagcccgcggcctagaatgcacacgtcgtgaataagacaacgcggagaatcggatcccaaatggcatgtccgctgacaaggatgtcgccaagggcaatatgggcaagaagaacgtcaagaagagcgtgtagacctaaaagatctacattttcagggtgctgaaccaggtcctgccggacattgttatgtcctccaaggccatgtggatcatgaactcttacattaacgatttctacgagaagttcgctcctgaggccgccaagttttcgcgc

SEQ ID NO: 1754 - DNA, 540 bp, Zea mays
  Clone ID: TF_ZmC369_45
gcattctcgaattccgattctcaatccagcaaaccctaccagccttttgcaaactcagagagggacccgatggcacccaaggcggagaagaagccggcggcgaagaagcccgcagaggaggagcccgcggccccggcggagaaggcccccgctgggaagaagccgaaggcggagaagcggctcccggcgggaaaatccgccggcaaggaaggcggtgttgacaagaaggggcggaagaaggccaagaagagcgtggagacgtacaagatctacatcttcaaggtgctgaagcaggtgcacccggacatcggcatctcctccaaggccatgtccatcatgaactcattcatcaacgacatcttcgagaagctcgccaagcacgccgtctcggagggcaccaaggccgtcaccaagttcacctcgtcctaagctcctttctagtaggtccttaagcgccgtggcgccttttgactgtatggaatgtttgtcatctgaaagttgatctgagcagtgcaatatataattctggcatactattct

SEQ ID NO: 1755 - DNA, 709 bp, Zea mays
  Clone ID: TF_ZmC697_138
gcggggacctcagcactagtctcctcttcgcacgagcgcaacaccatccacccaccagttcgaagcggaggcgaccggcaacctgcggcgcgaagcgtcaccggaaggtgctgcgcgacaacatccaggggatcacgaagccggcgatccggaggctggcgaggaggggtggcgtgaagcgcatctccgggctgatctacgaggagacccgcggcgtgctcaagatctttctcgagaatgtcatccgcgacgctgtgacctacacggagcacgcccgtcgcaaaaccgtcaccgctatggacgtcgtgtacgccctcaaacgccagggccgcactctctatggcttcggcggctaggttaggtgtgggtaattgcctgtccaggtgtctcggatctgtggtactagtttggctgccttcctgtgttcgtattgtagtagttgtggtagctggttgctttgtcgtcctgtagtcgtgcttctttgggtctgtaagaaccgctggttcgatgggattggattggacggtgaagtaggaatgttggcatgttagacttttctccaacgtagcgttgcctctaatttgatctctcaatttattttcaattggggtgcactgtaattcttcctgtctaattcaaatcccctttctgaaattttgtgacctcccaagttttggacccctcgattgttcgaacgagtttttgaatt

SEQ ID NO: 1756 - DNA, 668 bp, Zea mays
  Clone ID: TF_LIB4730-067-R1-K1-E10
ttacatgctccccggcaatccactcaccacgaagccttcacatcctcactgcaggtcgataggcccgcacgaaatgcagacggcggaggaacgctccacgcggcgggcaagcgcgcacaaggtaagcgagctgccgactaaagcggccagcaagtctgctccctgcgaccggcggagtgaagaagcgccaccgcttccgccccggctccgctcgcgctccgggagatccgcaagtaccataagagcacggagctgctgatccgcaagctgccgttccagcgcctggtgcgcgagatcgcgcaggacttcaagaccgacctacgcttccagagctctgctgtatccgcgctgcaggaggcggctgaggcctaccttgacgggctcttcgaggacaccaacctctgcgccatccacgccaagcgcgtcaccatcatgcccaaggacatccagcttgcccgccgcatccgcggggagagggcctaagcgtcatattttctgtcatcagtgcccgatcagaagatgtagagatatgctgcgttctgtagtttgggttactggcgaatcatcgagtgttggctgttcactgctgtaacttaattatcatgatgcatatgaaatggcaatgaactctgttatcaagttcttggaagaaaagatgaaaaaagagg

SEQ ID NO: 1757 - DNA, 693 bp, Zea mays
  Clone ID: TF_LIB5117-054-A1-PF1-C10
aaagctccagattccgaacagcaccgccgctgacgcatctcgagtagtttccagttcgccggagaaggagcaagatggccggaaggaagggcggcgacaggaagaaggcggtgacccgctccgtaaaggccgggctccagttccccgtcggccgcatcgggcgctacctcaagaagggccgctacgcccagcgcgtcggctccggcgcccccgtctacctcgccgccgtcctcgagtacctcgccgccgaggtcctggagcttgcaggcaacgctgccaaggacaacaagaagacgcgcatcatcccgcgccacctgctgctcgccgtccgcaacgaccaggagctcggcaggctgctcgctggcgtgaccatcgcccacggtggcgtgatccccaacatcaactctgtgctgctccccaagaagtccgccgcagccgagaaggaggccaagtcgcccaagaagaaggccgccaccaagtcccccaagaagaaggccgccgccaccaaggagtaggcgccccatagcctagttccataatcagcgagaagatgacgagcctttttttttttgcgggattggatcgtgtatgtaattgcctagtctgtagtggctcgttcattaccttgatgagcaagccattaaggggctgtgttttgtacctgattaatgtcgagaatggctaaatcctttg

SEQ ID NO: 1758 - DNA, 708 bp, Zea mays
  Clone ID: TF_LIB5117-054-A1-PF1-C1
acatttctccacccctctcccaagtctcaatttcaatattgaactccctgctcctcccgtcgctcgatcgccatgtcctcctccacggggagcttggaccacgcagggttcacgttcacgccgccgccgttcatcacgtccttcaccgagcttctgtcggggtccggcgccggcgacgcggagcggtcgccgagggggttcaaccgagggggccgggccggggcgcccaagttcaagtccgcgcagccgcccagcctgcccatctcgtcgcccttctcctgcttctccgtccctgcaggtctcagccctgccgagctgctcgactcccccgttctcctcaactactctcacatcttggcgtctccgactaccggtgcgatccctgcgcagaggtgcgactggcaggcgagcgccgatctgaacacctttcagcaggatgagctcggcctctctggcttctcctttcacgcagtcaagtccaacgccacggtcaacgctcaagcaaactgcttacctttattcaaggagcagcaggagcaacaacaagaagaagtggttcaagtgagcaacaagagcagcagcagcagcggcaacaacaagcaggttgaggacggatacaattggaggaagtacgggcagaagcaagttaaggggagcgagaacccgcggagctactacaagtgcacctacaacaattgctccatgaag

SEQ ID NO: 1759 - DNA, 552 bp, Zea mays
  unsure (1)..(552): unsure at all n locations
  Clone ID: TF_ZmC22376_4
cnnggccgggaaaaagaataaaaaaaaaaaaaaaaaaaaaaaaaaaaaaaaatccaccaccgccataccagcgcgacagcgattccgtcgagttagaccaagcgagagagtagtctcagacgagaagaggtgaatatgagttccggcggcggcaggggcaagcccaaggggtccaaggctgtgtcgcggtcgaccaaggctgggctgcagttccccgtcggccgcatcgcgcgctacctcaaggccggcaagtacgccgagcgcgtcggcggtggtgcgcccgtctacctctccgccgtcctcgagtatctcgcggcagaggtgttggaactggcgggcaacgcggcgcgcgacaacaagaagagccgcatcgtgccgcgtcacatccagctcgccgtgcgcaacgacgaggaactcagcaagctgctcggagctgtcaccatcgccgccggaggtgtgttgcccaacattcatcagacgctgctgcccaagaaggccggtgggaagggcaaggccgacatcggttccgcatcccaggagttctaagcggcc

SEQ ID NO: 1760 - DNA, 346 bp, Zea mays
  unsure (1)..(346): unsure at all n locations
  Clone ID: TF_LIB3354-002-P1-K1-E3
ggtggaacacgcgttcggaaatacttccgccaggcaagttttaaattttgcaccctatgataggatcaatatggctcgtacgaagcagaccttccgcaagtccaccggaggcaaggccccgcgcaagcagctcgccaccaaggcggcgaggaagttggcgccgacnaccggcggcgtgaataancctcacaggtacaggccacgtacggtggcgcttntcgagatccgcaggtaccagaatagcatggagtttgtgattcggaagttgctcttccagcgcctggttcannngatcgctcaggactttaagacggatctgcggttccagagccacgcccgcctggcc

SEQ ID NO: 1761 - DNA, 573 bp, Zea mays
  Clone ID: TF_LIB4979-083-A1-K1-F1
actccacgatctctatctccctagcaatctctatcaccagatcctcgtgcgaaacaaagcgctagcccccttcgtactgtcccgatggtccgcactaagcacacgaggaggaagtctactgagcggcaatgcccctatgaagcagctggccaccaaggttgagcgcaagtctgccccggcgtggtgggagagaagaagccccaccgcttccgccccgtcaccgtcgcgctccgggagatccgcaagtaccataagagcacggagctgctgatccgcaagctgccgttccagcgcctgtgcgcgtgagatcgcccagtgacttcgagaccgacctccgcttccagagctccgacgacgacgcgctgcatgaggcgtccgaggtctacctcgtcgcgttcttcgaggacactaacctctgcgccattcacgccaagcgcgtcaccatcatgcccaaggacatccagctcgcccgccgtatacgtggggagagggtctatgcgtcgtcccgagggaggtgctagtagtagtgaccgtttctgtcatcactgcctgaatataacgagtagagatgtg

SEQ ID NO: 1762 - DNA, 485 bp, Zea mays
  unsure (1)..(485): unsure at all n locations
  Clone ID: TF_LIB3279-193-Q1-K6-C9
cccaanccaagccggccccaaacccgaaccccaaggcgccccggaacggaggggcccaaggccgagaagaagcccgcggcgaagaagccggcggaggaggagcccgccgccgagaaggcgccggccgggaagaagcccaaggcggagaagcgcggcccagggggcggaggcgccggcaaggagggcggcgagggaaagaggggccggaagaagggcaagaagagcgcggagacccacaagagcnacaccnncaaggggcngaagcaggggcacccggacancggcagcnccncnaaggccagggccancangaacnccnncancaacgacancnncgagaagcacgccgccgaggccgccaagcacgcgcggnacaacaagaagcccaccancaccncccgngagagccagaccnccgngcgccncgnccnccccggggagcgcgccaagcacgccgncnccgagggcaccaaggccgncaccaa

SEQ ID NO: 1763 - DNA, 473 bp, Zea mays
  unsure (1)..(473): unsure at all n locations
  Clone ID: TF_LIB3279-194-Q1-K6-E12
ggccagacaagccaancgaagccgaggaacgaccanggacnccaccggcaccggagcaggggggaaggggaagaagggagcggccgggcgcaagggcggcgggccaaggaagaagncggngncgagggccgngaaggccggncgggggggggggggggccgcancgggcgccacnngaagaagggccgcnacgcgcagcgngncggcaccggcgcccccgncnaccncgccgcngnccnncgaaaccncgccgcngaggggcnggagcncgccggnaaggcngccagggacaacaagaagacncgcannannccgcgccacgngcnncnggcganccggaacgacgaggagcnngggaagcngnngggcggcgngaccancgcncacggcggngggcnccccaanancaacccngnncngcngcccaagaagacggcggagaaggcgnccagnggcgggagcaaggaggcaaa

SEQ ID NO: 1764 - DNA, 366 bp, Zea mays
  unsure (1)..(366): unsure at all n locations
  Clone ID: TF_LIB4732-100-Q1-K1-G11
actcgagccggcgggagccacgtatcttcgtcccaaatcgaccgagcgaatcaccacagcttctcaccaccgctaccttcgatggcacccaaggcggacaagaagccggcggcgaagaagcctgcagaggaggagcccgcgacagagaaggcggagaaggctccggcggggaagaagcccaaggccgagaagcgcctcccggcgggcaagtccgccggtaaggagggcggcgagggcaagaaggggaaaaagaaagcgaagaagnccgnggagacctacaagacctacatcttcaaggcgctgaagcaggcgcaccccgacatcgtcatttcgtccatggccatgtccctcctgaactccttcatc

SEQ ID NO: 1765 - DNA, 644 bp, Zea mays
  Clone ID: TF_LIB4762-008-R1-K1-B11
ccggccgggctttaaggtattagagatagaactatttggtattgatctatcgaggctgcagcttgtctgtaaacacaactttccagcttgtataatggatcaacggatcacctgataaaaaaaaaaaaaaaaaaaaaaaaaaaaaaaaaaacaacaccaagaagcaagaaaactaaaaaaggctcctcccgaccgaaacgcccctaatctccctcgaccccgacatccccgacccgatggcgcccaaggcggaaaaaaagccagcggaaaaaaagccggcggccgaggaaaaggcggaaaaaacaaccgcagggaaaaagcccaaggccgaaaagcggctgcccgcgtccaagtcctccggcaaggagggcggcgagaagaaggggaagaagaaggccaagaagagcgtggagacctacaagatctacatcttcaaggtgctgaagcaggtgcaccccgacatcggcatatcctccaaggccatgtccataatgaactccttaataaacgacatctttgagaagctggccggcgaggccgccaagctggccgcggtacaacaagaagcccaccatcacgtcccggcgagatccagacctccgtgcgcctagtcctccccggagagctcgcaagcacgccgtctc

SEQ ID NO: 1766 - DNA, 455 bp, Zea mays
  unsure (1)..(455): unsure at all n locations
  Clone ID: TF_jC-zmX700085305d1
gctcggattngctcccaatccatcccgcctccttttccgtattccaagncgccccgcatcgatggcgcgcgaggcctttaagaagcccgcggcgaacaaccccgcggaggaggagcccgctgtcgaaaaggcgccggccgggaagaagcccaaggcggagaagcgtgtcccaccaggcaagtccgtcggcaaggagggcggcgagggaaagaggggccggaagaagggcaagaagagcgtggagacctacaagatctacatcttcaaggtgctgaagcaggtgcacccggacatcggcatctcctctaaggccatgtccatcatgaactccttcatcaacgacatcttcgagaagctcgccgcctaagccgccaagctctcccggtacaacaagaagcccaccatcaccttccgtgagatccagacctccgggcgcttcgttctccccggggagc

SEQ ID NO: 1767 - DNA, 986 bp, Zea mays
  Clone ID: TF_ZmC1773_3
cactcctatgggcgattgggttcattgggtacctcgaggccggccgggatccacactcgactctcctctctcgcatccgcagcctctcgagctctactccatcccctcgatctcgaagcgcagcagcagcagtcaggcggccatggacgccagcgcagccggagccggcgggaaggcgaagaagggcgcggccgggcgcaaggccggcgggccgaggaagaagtcggtgacgaggtccgtcaaggccgggctgcagttccccgtcggccgcatcgggcggtacctgaagaagggccggtacgcgcagcgcgtcggcacgggcgcccccgtctacctggccgccgtcctcgagtacctggccgccgaggtgctggagctggccggcaacgctgccaaggacaacaagaagacccgcatcatcccgcgccacgtgctcctggccatccgcaacgacgaggagctcggcaagctgctgtccggcgtcaccatcgcccacggcggcgtcctccccaacatcaacccggtgctcctgcccaagaagaccgctgagaaggcggcggccaaggaggccaagtcgcccaagaaggccgccaagtcccccaagaaggcatagaggggcgcctttaccgctgtgatgttgaatgctcgtgttcagtagatctttacgtctgtagtgtcgtcgttgttattggaactggttagtagatctgtgcattgtggttgaaacgtgattccctgatttcagaaatctaatttgcaatttgggtgcacaaaaaaaaaaaaaaaaaagcagacagtactaaaaaaaaaaaaaaaaaaaaggttttgcgggcccctttccccctgtgatgttgaatgctcgtgttcagtagatcctttacgtctgaagggtcgtcgttgttattggaactggttagtagatctgtgcattgtggttgaaacgtgattcccctttttccagaaatctaatttgcaatttgggggcc

SEQ ID NO: 1768 - DNA, 243 bp, Zea mays
  Clone ID: TF_700432838H1
gtaatcctggagtacttcactgacgaggttttggagctggccgggaacgctcgcacggttctgaaagtagacgcgtatcacacctcgccacctaccgatggccattcgcggagacgaggagctggacacccacatcacgggaaccatcgcaggtggaggcgtcatcccgcacatccaaacgtccctgatcaacacgtcctccaaggcgtgttgcatagggaatgcccattgttagtttacaat

SEQ ID NO: 1769 - DNA, 447 bp, Zea mays
  unsure (1)..(447): unsure at all n locations
  Clone ID: TF_LIB4979-119-Q1-K1-H1
atcacgatctcaatctcccctagcatctctagcagcagatcctcgtgcgaagcaaagcgctagcccccttcgtactgtcccgatggcccgcacgaagcagacggcgaggaagtccactggcggcaaggcgccaaggaagcagctggccaccaaggcggcgcgcaagtctgccccggcgaccggcggagtgaagaagccccaccgtttccgccccggcaccgccgcgcttcgggagcactcctccgnagctgaggatactgttgactacgtcatgatcaccgacgcagataagtaagggatgatgtactccagaggtgggtgttctgattgaacctactatggcacacagagggatcggactggcctttatgcctgctgccgatagatacaaacttacactcagaatgcctgccttcattattatggagaggaggatcatattgaagg

SEQ ID NO: 1770 - DNA, 427 bp, Zea mays
  Clone ID: TF_LIB3150-038-Q1-N1-C5
cttctcccaatctcccctacaccagaacaagtggcagttctttggtccgcgtcagagaggccgcccccatgtctgggcgcggcaagggcgccaagggtctgggcaagggcggcgcgaaccgccacctgaaggtgctccgcgacaacatccaacgcatcaccaatcccccgatccggacgctggctaggaggggtggcgtaaagcgcatctcgggcctcatctcccaagagacccacggcgtgctcactatctttctcgagaacaccatcctcaactccatcacctacaccgagcacgctcgccgcaagaccgccaccgccatgtacgtcgtatacgcgcttaaccgccagggacccaccctctacagattcagaggctaggctaggcgcctcttatactctgagactgcctaggggacatgtctctg

SEQ ID NO: 1771 - DNA, 381 bp, Zea mays
  Clone ID: TF_LIB4730-061-R1-K1-B3
gaactagggtaaccatgcatgctccctttccttccaatccataccaggctccaagcctgaagtcctagaatcgctccttatgaatggagacctaaggccgataagagctccgcgctgaataagccggtggaggatgagctcgagtcctaaaaggcgccgaacgacaagaagccctacgctgataattgttttccatctggcacgtacagccgcaaggagggcggtgagggaaagaggggccaaagaaaggactggaacagcgtggatacttacaagatctacattctaaaggcgctgaagcaagcgcacctgtgcattgggattagctacaaggccatgtccatcatgaactccttcatgaacgacatgttcgagaagctc

SEQ ID NO: 1772 - DNA, 518 bp, Zea mays
  Clone ID: TF_LIB4730-079-R1-K1-D6
tgggacctcgaggcggcgggaagattttcaaagaggcgctagcaatctctatctttacatactcgttcgatgacaagggttagccttcctactgtgccgatggcccgcagctagcagacggaagaggaactccagtggcggttgggtgccaaggaacgagctggccactaatgaggcggacaagtgtgccccggggactgatcggatgaaaaatgctcaccgtttccgccccggaaccgatgctgtcggggagatccgcaagtaccaaaaaaatacggatgtgcttatccgtaagctgccgttccaacacctggtgcatgtgatcgatcagtacttcaagaccgaacgtcgtttccagagtttcgccgaagtcgcgctgcaagaggggtacgagggctacctggtcatgctctaccaggacaactacctctgcgccattcactgcaagcgcgtcaccatcatgcacaaagacctccagatcgcccgccgcatccatggtgagaaggtctaagcgttga

SEQ ID NO: 1773 - DNA, 416 bp, Zea mays
  Clone ID: TF_LIB3357-020-P1-K1-H12
ccacgcgagcgatgcgcaccaactcgctgagcacatttctctcttactcccaaacaagccaatcgaagccaggatacgagcatggactgcaccggcaccggagcaaggggtaaggggaagaaaggagcggacgggcgcaaaggtcgcgggccaaagaagaaatcggtgtcgaggtccgtgaaggccggtctccaattccccgtcggccgcatcgggcgctacttgaagaagggccgctacgcgcagcgtgtcggcaccggcgcccccgtttacctcgccgctgtcctcgaatacctcgccgttgaggttctggagctcgccgggaatgctgccagggacaacaagaaaactcgaattattccggcccacgtgcttttggcgatccggaacaaccaggatttggaaagttgttgggc

SEQ ID NO: 1774 - DNA, 704 bp, Zea mays
  Clone ID: TF_ZmC651026_1
ccggccgggacttttccggcctcccattcctcgcgcggcgaccacccaatttcgaagcgcgcgtagagaccgaacaagcgggagagatggctcgtaccaagcagactgctcgcaagtccacggtagggaaggctcccaggaagcagcttgccaccaaggatgcccgtaagtctgcccccaccactggaggagtgaaaaagcctcaccgctaccgccctggaactgttgccctccgtgagatccgcaagtatcagaatagcactgagctgctgatcaagaagctgcccttccagaggctcgtcaggtaaattgcacaggacttcaaaactgatttgcgtttccagagccatgcggagcttgccctccaggaggctgctgaggcataccttgatggcctgtttgaggacaccaacctgtgcgccatccatgctaagcgcgtgaccatcatgtcaaaggacattcaactgtcaaggcagatccgcggctagagggactaatcgccacctcagacatcgcgacaaaaacatgaagacctggggctattgttaatctggagccattgtaggacatatgaccagggcttgttttgaggatcgcaagattctcttctggtactgctgctgctacctatgatgaagtcattgctaggctcgaatacatcagcctactatgcgctgacagcctggactagcagtgctatgtgc

SEQ ID NO: 1775 - DNA, 517 bp, Zea mays
  Clone ID: TF_jC-zmX700206249a1
attcggctcgagatcactcatccacagcttttttccgtattcctgtctcgaatcctctctggccgctccgatggcccgcacgaagcaaacagcaaggaagtcgaccggcggcaaggccccccggaagcagctggccactaaggctgcgcgcaagtcggccccggccaccggcggagtgaagaagccccaccgtttccgccccgtcactgtcgcgctccgcgagatccgcaagtaccagaagagcactgagctgctcatccgcaagctccccttccagcgcctcgtccgcgagatcgcgcaagacttcaagactgatctgaggttccagtcctccgccgtcgcggcgctgcaggaggccgccgaggcgtacctggtggggctcttagaggacaccaacctttgcgccatccacgccaagcgcgtcactatcatgcccaaggacatccagctcgcgcggggcatcaagggcgagagggcttgagccgcccgcgagctgctcgtcggtgtagagttacta

SEQ ID NO: 1776 - DNA, 837 bp, Zea mays
  Clone ID: TF_ZmC114_23
gccggccgggctgcaatcaatagccagttctaatctcaggtttggggggaaaaggcctcgcgggtcgcaaaccgctctctgttgatttgggatttgggaggcgctcgaggtaaaccatagtttagtgacccatggctcgtactaagcaaactgctcgcaagtccactggagggaaggctcctaggaagcaacttgccaccaaggctgcccgtaagtctgcacccacaactgggggagtaaagaagcctcatcgttaccgccctggaactgtagctcttcgtgaaatccgcaagtatcagaagagcactgacctgctcataaggaagcttccgttccaaaggcttgtcagggagattgcccaggatttcaagactgatcttcgtttccagagccatgcggtgcttgcgctgcaggaggctgcggaggcgtacctggtgggtctattcgaggacactaatctgtgcgccatccatgccaagcgcgtgaccatcatgcccaaggacattcagctggctaggaggatccgtggtgaaagggcctagattctctgtttactgctactgggagtggctccgtagtatggtttgcatctgttcgatgcttgctttttgtggaagttacatttgtgggtgttcgaattcgtaatattcatccgtagtggacgagtggtaggaagttctgcaatctgactatgttttaaaatttataattgttgtcaattagtgttggtgttggtttcgcccatcaacggatcaaccttattggttatctgaacgacgaattgatatgttaactcgtgaacttcgttatcaaaaaaaaaaaaaaaaaaggccccta

SEQ ID NO: 1777 - DNA, 774 bp, Zea mays
  Clone ID: TF_ZmC114_31
tgggtccctcgaggccggccgggaaaaaatcaatagccagttctaatctcaggtttggggggaaaaggcctcgcgggtcgcaaaccgctctctgttgatttgggatttgggaggcgctcgagttttcaggtaaaccatagtttagtgaccaatggctcgtactaagcaaactgctcgcaagtccactggagggaaggctcctaggaagcaacttgccaccaaggctgctcgtaagtctgcacccacaactgggggagtaaagaagcctcatcgttaccgccctggaactgttgctcttcgtgaaatccgcaagtatcagaagagcactgacctgctcataaggaagcttccgttccagaggcttgtcagggagattgcccaggatttcaagactgatcttcgtttccagagccatgcggtgcttgcgctgcaggaggctgcggaggcgtacctggtgggtctattcgaggacactaatctgtgcgccatccatgccaagcgcgtgaccatcatgcccaaggacattcagctggctaggaggatccgtggtgaaagggcctagattctctgtttacggctactgggagtggctccgtagtatggtttgcatctgttcgatgcttgcttttgtggaagtttacatttgtgggtgttcgaattcgtaatattcatccgtagtggacaagtggtaggaagtgctccaatctgactatgttttaaaatttataattgatgtcaattagtgttggtgctggtttcgcccatcaacggatc

SEQ ID NO: 1778 - DNA, 830 bp, Zea mays
  unsure (1)..(830): unsure at all n locations
  Clone ID: TF_ZmC114_33
gggcaattgggtttctcgagcgncggccgggatcaatagccagttctaatctcaggttgggggaaataggcctcgcgggtcgcaaaccgctctctgctgatttgggatttgggaggcgctcgagttttcaggtaaaccatagtttagtgacccatggctcgtactaagcaaactgctcgcaagtccactggagggaaggctcctaggaagcaacttgccaccaaggctgcccgtaagtctgcacccacaactgggggagtaaagaagcctcatcgttaccgccctggaactgttgctcttcgtgaaatccgcaagtatcagaagagcactgacctgctcataaggaagcttccgttccaaaggcttgtcagggagattgcccaggatttcaagactgatcttcgtttccagagccatgcggtgcttgcgctgcaggaggctgcggaggcgtacctggtgggtctattcgaggacactaatctgtgcgccattcatgccaagcgcgtcaccatcatgcccaaggacattcagctggctaggaggatccgtggtgaaagggcctagattctctatttactgctactggggtggctccgtagtgtatggtttgcatctgttcgatgcttgcttttgtgaaagtttacgtttgtgggtgttcgaatttgtaatattcatccgtagtggacaagtggtaggaagtgccgcaatctgactatgttttcaaatttataattgctgtcgattagtgttggtgctggttttgctcatcaacggattaactaaccttattggttatctgaacgacgaatttgatatgttaactcgggatc

SEQ ID NO: 1779 - DNA, 1434 bp, Zea mays
  Clone ID: TF_ZmC114_36
cccaccctcccttgtatttccagctcggccaaagctgtatataacttgcctacagccagctgagctccccatcgatcctgtcctgtccagcaagggagacctggactggaggaggaggacctacctacccggcctccagctctctcgtctcttcctcctcctcctcgaagctccgatccgatcccccaatgtctgacagcagtccagctcccggcgcctactactccggccctcccgccgcgccgccgcccgagtctaagcccgttgacggcggccaggtcaacgccgatgttcctggctactactcctccgtccctgctgcgaaatctggcgccggcggccagggcagctccgctgctcctaaggaatcgggcttcttcgccagctgttgtgggtgcttctctggcggcgaaaccgcgagatagatagattcagtgttggaccgaggaccatggatggatggatggaacatgcatgcccagtgattgtttgcgccgatgaaagttcaatttgtccggatttattttctctgaaatagtatatgttttttttctccatcggtgagccggtgatcttgtcaatttgtacaataatcattatatgcaaccaactgtgctttaatttgcctcaggtttggggggaaaaggcctcgcgggtcgcaaaccgctctctgttgatttgggatttgggaggcgctcgagttttcaggtaaaccatagtttagtgacccatggctcgtactaagcaaactgctcgcaagtccactggagggaaggctcctaggaagcaacttgccaccaaggctgcccgtaagtctgcacccacaactgggggagtaaagaagcctcatcgttaccgccctggaactgttgctcttcgtgaaatccgcaagtatcagaagagcactgacctgctcataaggaagcttccgttccaaaggcttgtcagggagattgcccaggatttcaagactgatcttcgtttccagagccatgcggtgcttgcgctgcaggaggctgcggaggcgtacctggtgggtctattcgaggacactaatctgtgcgccatccatgccaagcgcgtgaccatcatgcccaaggacattcagctggctaggaggatccgtggtgaaagggcctagattctctgtttactgctactgggagtggctccgtagtatggtttgcatctgttcgatgcttgctttttgtggaagttacatttgtgggtgttcgaattcgtaatattcatccgtagtggacgagtggtaggaagttctgcaatctgactatgttttaaaatttataattgttgtcaattagtgttggtgttggtttcgcccatcaacggatcaaccttattggttatctgaacgacgaattgatatgttaactcgtgaacttcgttatatttaggcagaaaaaaaactcgtgc

SEQ ID NO: 1780 - DNA, 1169 bp, Zea mays
  Clone ID: TF_ZmC114_39
ccggccggtcgaacgactctcggcaacggatatctcggctctcgcatcgatgaagaacgtagcaaaatgcgatacctggtgtgaattgcagaatcccgcgaaccatcgagtttttgaacgcaagttgcgcccgaagccttctggcggagggcacgtctgcctgggcgtcacgccaaaagacactcccaacacccccccgcggggcgagggacgtggcgtctggccccccgcgccgcacggcgaggtgggccgaagcaggggctgccggcgaaccgcgccgggcgcagcacgtggtgaaaaaaaaaaaaaaatcaatagccagttctaatctcaggtttggggggaaaaggcctcgcgggtcgcaaaccgctctctgttgatttgggatttgggaggcgctcgagttttcaggtaaaccatagtttagtgacccatggctcgtactaagcaaactgctcgcaagtccactggagggaaggctcctaggaagcaacttgccaccaaggctgcccgtaagtctgcacccacaactgggggagtaaagaagcctcatcgttaccgccctggaactgttgctcttcgtgaaatccgcaagtatcagaagagcactgacctgctcataaggaagcttccgttccaaaggcttgtcagggagattgcccaggatttcaagactgatcttcgtttccagagccatgcggtgcttgcgctgcaggaggctgcggaggcgtacctggtgggtctattcgaggacactaatctgtgcgccatccatgccaagcgcgtgaccatcatgcccaaggacattcagctggctaggaggatccgtggtgaaagggcctagattctctgtttactgctactgggagtggctccgtagtatggtttgcatctgttcgatgcttgctttttgtggaagttacatttgtgggtgttcgaattcgtaatattcatccgtagtggacgagtggtaggaagttctgcaatctgactatgttttaaaatttataattgttgtcaattagtgttggtgttggtttcgcccatcaacggatcaaccttattggttatctgaacgacgaattgatatgttaactcgtgaacttcgttatatttaggcagcatcggttacattgttttgtccggaaaaaaaaaaaaaaaagccccta

SEQ ID NO: 1781 - DNA, 791 bp, Zea mays
  Clone ID: TF_ZmC369_103
ccggccgggacccagcagcaagcaatctcgtccccaaacaagcaaccaccgcctccccgatctcgtcgagaggaagcccaatcccgaaaccgccgccctattccaatggcgcccaaggccgagaagaagcccgccgccaagaagcctgcggaggaggagccggcggcggagaaggccacggcggggaagaagcccaaggccgagaagcggctccccgcgggcaagtccgcaggcaaggagggtggcgagaagaaggggaagaagaaggcaaagaagtcggtggagacgtacaagatctacatctttaaggtgctgaagcaggtgcacccggacattggcatctcgtccaaggccatgtccatcatgaactccttcatcaacgacatcttcgagaagctggcggcggaggcggccaagctggcgcggtacaacaagaagcctaccattacgtcccgcgagatccagacctccgtccgcctcgtcctccccggcgagctcgccaagcacgccgtctccgagggcaccaaagccgtcaccaagttcactagctcctaggcgagcgatgcgacgtgcactcgtctcctcttcttgcagtagtgcaatagtagtacggttaggtgtgttgccgtggtggtagttgccgctgtgtttgctttctgggctgggctcggttgatgtgttttatgtaagaaagtaactgtattgtgtctgcagtaccttaccatgcatgttttaagtagcatcccataatctataaggaatatgttttatgtaaaaaaaaaaaaccaaaa

SEQ ID NO: 1782 - DNA, 812 bp, Zea mays
  Clone ID: TF_ZmC369_104
ccggccgggatagaaggccggcaaaaaaaaacccagcaacaagcaatctcgtccccaaacaagcaaccaccgcctccccgatctcgtcgagaggaagccccatcccgaaaccgccgccgtattccaatggcgcccaaggccgagaagaagcccgccgccaagaagcctgccgaggaggagccggcggcggagaaggccacggcggggaagaagcccaaggctgagaagcggctccccgcgggcaagtccgcaggcaaggagggtggcgagaagaaggggaagaagaaggcaaagaagtcggtggagacgtacaagatctacatcttcaaggtgctgaagcaggtgcacccggacattggcatctcgtccaaggccatgtccatcatgaactccttcatcaacgacatcttcgagaagctggcggcggaggcggccaagctggcgcggtacaacaagaagcctacgatcacgtcccgcgagatccagacctccgtccgcctcgtcctccccggcgagctcgccaagcacgccgtctccgagggcaccaaagccgtcaccaagttcaccagctcctaggcgagcgatgcgacgtgcactcgtctcctcttcttgcagtactacaatagtagtacggttaggtgtgttgccgcggtggtagttgccgctgcgtttgctttctgggctcggttgatgtcttttatgtaagaaagtaactgtattgtgtctgcagtaccttaccatgcatgttttaagtagcatcccataatctataaggaatatgttttaataaaaaaaaaaaaaaaaaaaaaaaa

SEQ ID NO: 1783 - DNA, 825 bp, Zea mays
  Clone ID: TF_ZmC369_111
cctcgagggccggcggctggggcccattaatcaatcgaaaacccagcaacaagcaacctcgtccccaaacaagcaaccaccgcctccccgatctcgtcgagaggaagccccatcccgaaaccgccgccgtattccaatggcgcccaaggccgagaagaagcccgccgccaagaagcctgcggaggaggagccggcggcggagaaggccccggcggggaagaagcccaaggccgagaagcggctccctgcgggcaagtccgcgggcaaggagggtggcgagaagaaggggaagaagaaggcgaagaagtcggtggagacgtacaagatctacatcttcaaggtgctgaagcaggtgcacccggatattggcatctcgtccaaggccatgtccatcatgaactccttcatcaacgacatcttcgagaagctggcggcggaggcggccaagctggcgcggtacaacaagaagcctaccattacgtcccgcgagatccagacctccgtccgcctcgtcctccccggcgagctcgccaagcacgccgtctccgagggcaccaaagccgtcaccaagttcactagctcctaggcgagcgatgcgacgtgcactcgtctcctcttcttgcagtagtaccatagtagtacggttaggtgtgttgccgcggtggtagttgccgctgcgtttgctttctgggctcggttgatgtcttttatgtaagaaagtaactgtattgtgtctgcagtatcttaccatgcatgttttaagtagcatcccataatctataaggaatatgttttaatatgttctccaaaaaaaaaaaaaaaaaa

SEQ ID NO: 1784 - DNA, 810 bp, Zea mays
  Clone ID: TF_ZmC369_115
attgggtacctcgaggccggccgggacccagcaacaagcaacctcgtccccaaacaagcaaccaccgcctccccgatctcgtcgagaggaagcccaatcccgaaaccgccgccctattccaatggcgcccaaggccgagaagaagcccgccgccaagaagcctgcggaggaggagccggcggcggagaaggccacggcggggaagaagcccaaggctgagaagcggctccccgcgggcaagtccgcaggcaaggagggtggcgagaagaaggggaagaagaaggcaaagaagtcggtggagacgtacaagatctacatcttcaaggtgctgaagcaggtgcacccggacattggcatctcgtccaaggccatgtccatcatgaactccttcatcaacgacatcttcgagaagctggcggcggaggcggccaagctggcgcggtacaacaagaagcctaccattacgtcccgcgagatccagacctccgttcgcctcgtcctccccggcgagctcgccaagcacgccgtctccgagggcaccaaagccgtcaccaagttcaccagctcctaggcgagcgatgcgacgtgcactcgtctcctcttcttgcaggagtacaatagtagtacggttaggtgtgttgccgcggtggtagttgccgctgcgtttgctttctgggctcggttgatgtcttttatgtaagaaagtaactgtattgtgtctgcagtaccttaccgtgcatgttttaagtagcatcccataatctataaggccccgtttgtttcgttaaaaaaaaaaaaaaaaaagcggcc

SEQ ID NO: 1785 - DNA, 759 bp, Zea mays
  Clone ID: TF_ZmC369_83
acccagcaacaagcaatcctcgtccccaaacaagcaaccaccgcctccccgatctcgtcgagaggaagcccaatcccgaaaccgtcgccgtattccaatggcgcccaaggccgagaagaagcccgccgccaagaagcctgcggaggaggagccggcggcggagaaggccacggcggggaagaagcccaaggccgagaagcggctccccgcgggcaagtccgcaggcaaggagggtggcgagaagaaggggaagaagaaggcaaagaagtcggtggagacgtacaagatctacatcttcaaggtgctgaagcaggtgcacccggacattggcatctcgtccaaggccatgtccatcatgaactccttcatcaacgacatcttcgagaagctggcggcggaggcggccaagctggcgcggtacaacaagaagcctaccatcacgtcccgcgagatccagacctccgtccgcctcgtcctccccggcgagctcgccaagcacgccgtctccgagggcaccaaagccgtcaccaagttcaccagctcctaggcgagcgatgcgacgtgcactcgtctcctcttcttgcagtagtaccatagtagtacggttaggtgtgttgccgcggtggtagttgccgctgtgtttgctttctgggctcggttgatgtcttttatgtaagaaagtaactgtattgtgtctgcagtaccttaccatgcatgttttaagtagcatcccataatctataaggaatatgttttaac

SEQ ID NO: 1786 - DNA, 976 bp, Zea mays
  Clone ID: TF_ZmC369_98
atgtctgggcccccatccaccacgtcagcgatccgcatcgcatccgtcgtccggaacggccgaaccccgtcgaactcctccacgtcagcgatccgcgtcgcatatccacccacaaatggcgtccaacctcccgcactctataaagtggcgcccccagcagccttctttcgcacccagcagcaagcaatctcgtccccaaacaagcaaccaccgcctccccgatctcgtcgagaggaagcccaatcccgaaaccgccgccctattccaatggcgcccaaggccgagaagaagcccgccgccaagaagcctgcggaggaggagccggcggcggagaaggccacggcggggaagaagcccaaggccgagaagcggctccccgcgggcaagtccgcaggcaaggagggtggcgagaagaaggggaagaagaaggcaaagaagtcggtggagacgtacaagatctacatcttcaaggtgctgaagcaggtgcacccggacattggcatctcgtccaaggccatgtccatcatgaactccttcatcaacgacatcttcgagaagctggcggcggaggcggccaagctggcgcggtacaacaagaagcctaccattacgtcccgcgagatccagacctccgtccgcctcgtccttcccggcgagctcgccaagcacgccgtctccgagggcaccaaagccgtcaccaagttcactagctcctaggcgagcgatgcgacgtgcactcgtctccttcttgcagtagtacaatagtagtacggttaggtgtgttgccgcggtggtagttgccgctgcgtttgttttctgggctcggttgatgtcttttatgtaagaaagtaactgtattgtgtctgcagtaccttaccatgcatgttttaagtagcatcccttaatctataaggaatatgttttaatatgttcaaaaaaaaaaaaaaaaagggcggccgctcgcgatctagaacta

SEQ ID NO: 1787 - DNA, 364 bp, Zea mays
  Clone ID: TF_LIB3279-044-P1-K1-D9
gcctcattcatctccattccaaacactcttatattttcactctgccttcgcggcgaggcgatatcgatggagtgagggcgatcacgaagagcaccgcgcgcaagtccacgtggcaggtaaggtcccgaggaagcagctggcaaccaatgcggtgcgcaagtcgtcccctgctgaccggtggcgtgaagaagccgcaccggttccgcccgggcaccgaggcgctgcacgagatcctcaagtaccagaagagcacggagcttctcattcgcaagctgcccttccaacgcctggtccgcgagatcgcgcaggacttcaagaccgacctccgttttcagtccttcgtcgtcgcctgtgctgaaggagg

SEQ ID NO: 1788 - DNA, 383 bp, Zea mays
  unsure (1)..(383): unsure at all n locations
  Clone ID: TF_LIB4729-111-A1-K1-C1
agagncccacgncccgtccgaactccgaaccncataacagagtaaagcctcctcggcctccctgtccccagccttccccgatggcccgcacgaagtagacggcgcgcaagtcgacgggcggnaaggcgccgcggaagnagctggngaccaaggtggcgcgcaagtccgcgccggcgccgggcggcgtgaagaaaccgcaccgcttccgcccgggcaccgtcgtgctgcgcgagatccgcaagtactagaagagctcggagttgctgtatccgcaagctcccgtcccagcgtccggtccgtgagatcgcgcaggacttccagatgaacctccggatccaaattcttcgccgtcgccgcgctcgatgaggccgatgaggcccacc

SEQ ID NO: 1789 - DNA, 454 bp, Zea mays
  Clone ID: TF_LIB4976-058-A1-K1-A12
tgttcacaatcgttcaagcgcaagctgcctcttcctcgtcgtccggtcgtgagaagggatggcgggccgtggcaaggctatcggcgctggcgccgcgaagaaggcaacgtcgaggagctccaaggccggactccagttccccgtcggcaggattgccaggttcctcaaggcgggcaagtacgcggagcgcgtcggcgccggcgcccccgtgtacctcgccgccgtcctcgagtacctcgcggctgaggttctcgaacttgtggggaactcggcgcgggagaccttgtcgtcttccccaagggcatgagctgcacctgggacgtcgccgaggtcgtcgacaagcactacaacttcgagtagccgccgccgccgactagccctgcggcgctcgatgtagacttgctgtgctcttgtactctgaaccaccgtgtaataaagctccggattagggtac

SEQ ID NO: 1790 - DNA, 396 bp, Zea mays
  Clone ID: TF_LIB3227-021-P1-K1-F10
ctcaactacgaaggtcccttttttttctcggtctggaagcgccgcagtcgctgacatggacgtgagcgtagcatgcagaaaggcgaagaaaggcgcggtcagtcgcaaggccggctggccgacgaagaagtcggtgtcgcggtcctacagggccgggctgcaattccccgttagtcgcgtctggcggtacctgaaaaagggccggtacgcgcagcgtgtacgcacgggtgcgcccgtctacctcgtcgacgttctggagtacctagcggacgaggtgcttgtgctcgacggctactcggcaagggacaacatgaagacgcgcatgataccgcgccacgtgctgctggtgatccgaaacgacgaggagctcagtaagctgctggccggcgtcaccat

SEQ ID NO: 1791 - DNA, 450 bp, Zea mays
  Clone ID: TF_LIB3088-031-Q1-K1-E9
acgagtctccctagcaatctctagcatcagatcctcgtgcaaagcaaagcgctagcgtatctagtgtccccatggcccggacgaagcatacagcgatgaagtccactggcggcaaggcgcctaggaagcagctggccacgaaggcagctcgcaagtctgccccggctaccgactgagtgaagaagccccaccgttttcgccccggcaccgtatcgctacgggagatccgcaagtaccagaagagcactgagctgctgatccgcaagctgccgttccagcacctggtgcgtgagatcgcccatgattccaagaccgaccttcgctttcagagcttcggcgtcgcctctctgcatgacgcatgctatgcctaccttgtccatctcttcgaggacaccaacacttgcgccattcacgccaagcccgttaccatcatgcccaaagacattcatc

SEQ ID NO: 1792 - DNA, 542 bp, Zea mays
  unsure (1)..(542): unsure at all n locations
  Clone ID: TF_LIB3354-104-Q6-K6-B1
cccgtttcgacccagcgtnctggcatccgcngagagctggggccgnccaggcnnccaaaaagcagnngccccgccgcgcagaggaagaagagagcagaggagggaggcncgnncgaagcagaccgcccgcaagnccacgggaggcaaggccccccgncagcagctcgccaccttgcggcgaggaagtcggcgccggcgaccggcggcgtgaagaagccccacaggtacaggcccggaaccgtggcgctgcgcgagatccgcangtnccagaagagcacggagctgctgatccgcangctgcccttccagcgcctggtgcgcgagatcgcgcaggacttcaagacagacctccggttccagagccacgccgtgctggcgctccaggaggccgccgaggcctacctcgtcggtctcttcggggacaccttcctctgcgccatccacgcttagcgcgtcaccatcatgcccaaggacatccagctcgcccgccgcttccgtggcgagcgcgcgttgctcttctctccggggatctgttgaatgtc

SEQ ID NO: 1793 - DNA, 786 bp, Zea mays
  Clone ID: TF_ZmC369_120
cattgggtacctcgagccggccgggaaagaacagccaacatatctcctcgcattttccttgcaaccgattgcctatccccctcccaacccaagaccgatggcgcccaaggccgagaagaagcccgcggcgaagaagccggcggaggaggagcccgcggcggagaagacgaccgccgggaagaagcccaaggcggagaagcgggtccccgcgggcaagtccgccggcaaggagggcggcgagggcaagcgtggcaagaagaagggcaagaagagcgtggagacgtacaagatctacatcttcaaggtgctgaagcaggtgcacccggacatcggcatctcgtccaaggccatgtccatcatgaactccttcatcaacgacatcttcgagaagctggccggcgaggccgccaagctcgcgcgctacaacaagaagcccaccatcacgtcccgcgagatccagacctccgtgcgcctcgtgctccccggcgagctcgccaagcacgccgtctctgagggcaccaaggccgtcaccaagttcacctcctcctaggcttgcacgctcgccctttgtaggcatctcttgtgttgatgttccccttgttgtagttatatgttgctggtttctctgtcggcgctgctcgtaactgcgtcatgtaaccctgcaaggacttgtttatttgtgaatcatcaacactttgttgttgatcactcatgttccaaaatctgagtttgacgctcgagcatgcctcatttgttcattctaaaaaaaaaaaaaaaaaagcggcc

SEQ ID NO: 1794 - DNA, 800 bp, Zea mays
  Clone ID: TF_ZmC369_124
aaattccagcaacagccaacatatctcctcgcattttccttgcaaccgattgcctatccccctcccaaccaaagaccgatggcgcccaaggccgagaagaagcccgcggcgaagaagccggtggaggaggagcccgcggccgagaagacgaccgccgggaagaagcccaaggcggagaagcgggtccccgctggcaagtccgccggcaaggagggcggcgagggcaagcgtggcaagaagaagggcaagaagagcgtggagacgtacaagatctacatcttcaaggtgctgaagcaggtgcacccggacatcggcatctcctccaaggccatgtccatcatgaactccttcatcaacgacatcttcgagaagctggccggcgaggccgccaagctcgcgcgctacaacaagaagcccaccatcacctcccgcgagatccagacctccgtgcgcctcgtgctccccggcgagctcgccaagcacgccgtctctgagggcaccaaggccgtcaccaagttcacctcctcctaggcttgcacgctcgccctttgtaggcttctcttgtgttgatgttcgccttgtgttgtagttagatgttgctggtttctctgtcggcgctgctctgcttctgtaggaactgcgtcatgtaacccagcaaggacttgtttatttgtgaatcatcaacactttgttgttgatcacttatgttccaaattctgagtttgacgctggagcatgcctcatttgttgctggaatttgagttggtggtttgcataaacagatgaaatttatttcggtt

SEQ ID NO: 1795 - DNA, 741 bp, Zea mays
  Clone ID: TF_ZmC369_132
aattcggcacgagggaccgatggcgcccaaggccgagaagaagcccgcggcgaagaagccggcggaggaggagcccgcggccgagaagacgaccgccgggaagaagcccaaggcggagaagcgggtccccgcgggcaagtccgccggcaaggagggcggcgagggcaagcgtggcaagaagaagggcaagaagagcgtggagacgtacaagatctacatcttcaaggtgctgaagcaggtgcacccggacatcggcatctcctccaaggccatgtccatcatgaactccttcatcaacgacatcttcgagaagctggccggcgaggccgccaagctcgcgcgctacaacaagaagcccaccatcacctcccgcgagatccagacctccgtgcgcctcgtgctccccggcgagctcgccaagcacgccgtctctgagggcaccaaggccgtcaccaagttcacctcctcctaggcttgcacgctcgccctttgtaggcttctcttgtgttgatgttcgccttgtgttgtagttagatgttgctggtttctctgtcggcgctgctctgcttctgtaggaactgcgtcatgtaacctagcaaggacttgtttatttgtgaatcatcaacactttgttgttgatcacttatgttccaaattctgagtttgacgctggagcatgcctcatttgttgctggaatttgagctggtggtttgcataaacagatgaaatttatttcggtt

SEQ ID NO: 1796 - DNA, 775 bp, Zea mays
  Clone ID: TF_ZmC369_32
cctcgaggccggccgggagcaacagtcaacatatctcctcgcattttccttgcaaccgattgcctatccccctcccaacccaagaccgatggcgcccaaggccgagaagaagcccgcggcgaagaagccggcggaggaggagcccgcggcggagaagacgaccgccgggaagaagcccaaggcggagaagcgggtccccgctggcaagtccgccggcaaggagggcggcgagggcaagcgtggcaagaagaagggcaagaagagcgtggagacgtacaagatctacatcttcaaggtgctgaagcaggtgcacccggacatcggcatctcctccaaggccatgtccatcatgaactccttcatcaacgacatcttcgagaagctggccggcgaggccgccaagctcgcgcgctacaacaagaagcccaccatcacgtcccgcgagatccagacctccgtgcgcctcgtgctcccgggcgagctcgccaagcacgccgtctctgagggcaccaaggccgtcaccaagttcacctcctcctaggcttgcacgctcgccctttgtaggcttctcttgcgttgatgttcccattgtgttgtagttagatgttgctggtttctctctgtcggcgctgctcgtaactgcgtcatgtaaaccagcaaggacttgtttatttgtgaatcatcaacactttgttgttgatcacttatgttccaaattctgagtttgacgctcgagcatgcctcatttgcagctaaaaaaaaaaaaaaaaagcgg

SEQ ID NO: 1797 - DNA, 709 bp, Zea mays
  Clone ID: TF_ZmC369_71
agccacatatctcctcgcattttccttgcaaccgattgcctatccccctcccaacccaagaccgatggcgcccaaggccgagaagaagcccgcggcgaagaagccggtggaggaggagcccgcggcggagaagacgaccgccgggaagaagcccaaggcggagaagcgggtccccgcgggcaagtccgccggcaaggagggcggcgagggcaagcgtggcaagaagaagggcaagaagagcgtggagacgtacaagatctacatcttcaaggtgctgaagcaggtgcacccggacatcggcatctcctccaaggccatgtccattatgaactccttcatcaacgacatcttcgagaagctggccggcgaggccgccaagctcgcgcgctacaacaaaaagcccaccatcacgtcccgcgagatccagacctccgtgcgcctcgtgctccccggcgagctcgccaagcacgccgtctctgagggcaccaaggccgtcaccaagttcacctcctcctaggcttgcacgctcgccctttgtaggcttctcttgtgttgatgttcccccttgtgttgtagttagatgttgctggtttctctctgtcggcgctgctcgtaactgcgtcatgtaaccctgcaaggacttgtttatttgtgaatcaccacccctttgttgttgatcccttatgttccaaattttgagtttgccgct

SEQ ID NO: 1798 - DNA, 750 bp, Zea mays
  Clone ID: TF_ZmC369_81
gaggccggccgggaaaacgaaagcttacgtccccaaatcgaccaagcgaattcaccacagcttctcaccaccgataccttcgatggcacccaaggcggacaagaagccggcggcgaagaagtccgcagaggaggagcccgcgacagagaaggcggagaaggccccggcggggaagaagcccaaggccgagaagcgcctcccggcgggcaagtccgccggcaaggagggaggcgagggcaagaaggggaaaaagaaggctaagaagtccgtggagacctacaagatctacatcttcaaggtgctgaagcaggtgcaccctgacatcggcatctcgtccaaggccatgtccatcatgaactccttcatcaacgacatcttcgagaagctcgcggccgagtccgccaagctggcgcgctataacaagaagcccaccgtcacctcccgcgagatccagacctcggtgcgcctcgtcctcccaggcgagcttgccaagcacgccgtctccgagggcaccaaggccgtcaccaagttcacctcttcgtaggttcatagtactaggctgggtggtgttggtagacgtggctcaatttatctggtaggggcagtcatggatgatatgatctgcgtctatttgagctgttaagactgatgaacattgttccacgtcacgttgtgtttgatgggcattgttccagatcacgttgttaagactgcagaactgtgcctgacatggaacaagtatggtactcg

SEQ ID NO: 1799 - DNA, 826 bp, Zea mays
  Clone ID: TF_ZmC369_85
gggaccctcgaggccggccgggccgggatcgaaatcttccgtctccaatcctcctagcgaattcaccacagcttctcaccaccgctaccttcgatggcacccaaggcggacaagaagccggcggcgaagaagcctgcagaggaggagcccgcgacagagaaggcggagaaggctccggcggggaagaagcccaaggccgagaagcgcctcccggcgggcaagtccgccggtaaggagggcggcgagggcaagaaggggaaaaagaaagcgaagaagtccgtggagacctacaagatctacatcttcaaggtgctgaagcaggtgcaccccgacatcggcatctcgtccaaggccatgtccatcatgaactccttcatcaacgacatcttcgagaagctcgcggccgagtccgccaagctggcgcgctataacaagaagcccaccgtcacctcccgcgagatccagacctcggtgcgcctcgtcctcccaggcgagcttgccaagcacgccgtctccgagggcaccaaggccgtcaccaagttcacctcttcgtaggttcatagtactaggctgggtggtgttggtagacgtggctcaatttatctggtaggggcagtcatggatgatatgatctgcgtctatttgagctgttaagactgatgaacattgttccacgtcacgttgtgtttgatgggcattgttccagatcacgttgttaagactgcagaactgtgcctgacatggaacaagtatggtacttgaaatttctgtgagtgcattgaaacccgaaacctgcagtccttgaaaaaaaaaacccgaaaacact

SEQ ID NO: 1800 - DNA, 749 bp, Zea mays
  Clone ID: TF_ZmC369_30
agaccacctaggcaattcgccgcagcctctcaccctcgcgagtcccgacctcccgcagccgccgcacagatggcacccaaggcggagaagaagccggcggccaagaagcccgcggaggaggagcccgcgacagagaaggtggagaaggctccggcggggaagaagcccaaggccgagaagcgcctcccggcgggcaagtccaaggagggcggcgagggcaagaaggggaaaaagaaggcgaagaagtccgtggagacctacaagatctacatcttcaaggtgctgaagcaggtgcacccggacattggcatctcctccaaggccatgtccatcatgaactccttcattaacgatatcttcgagaagctcgctgctgaggccgccaagctcgcgcgctataacaagaagcctaccatcacctcccgtgagatccagacctccgtgcgcctcgtccttcccggggagctcgccaagcacgccgtctccgagggcaccaaggccgtcaccaagttcacctcggcctaggctgcgcggccgccgcttgcaggattctctcctgtgttcacgtctcttgctgtagttaggtgctgctgcctgctggcttctatgtatgttatctatctgtctgtagcaactgtgttatctgataggaccgtaatggtgcttattcaacccagctatatgtttctatgtgaatcatctctctatcggttgttgagtaagaaaaaaaaaaaaaaaaaaggccccta

SEQ ID NO: 1801 - DNA, 322 bp, Zea mays
  unsure (1)..(322): unsure at all n locations
  Clone ID: TF_700381601H1
gagctgctcatccggaagctgcccttccagaggttggtgagggagatcgcgcaggatttcaaaaccgacctgaggtttcagagcgcaccatcggtgcgctgcaggaggctagcgaacgtagcctggtgggtctgttcgaagataccaacctgtgtgccatccacgctaagagagtcaccatcatgcccaaagacatccagttggctcgccggatacggggagagagagcttaagtgaaggcagttnttatggcgttttgtagtaaattctgtaaaatactttggtttaatttgtgactttttttgtaagaattgtttataat

SEQ ID NO: 1802 - DNA, 399 bp, Zea mays
  Clone ID: TF_LIB3357-024-P1-K1-C11
ctaaaatattcattacgcccgcctgcgtatagggatcttaacggaagaccgatggcgcccatgggcgggacgaactccgccaataacacgccccttgaggacgagcccgccgtcgcgtagactaccgccggcaagaagcccaaggcgcagaatgctatcccggatggcaagtccgacgccatggatgacggtgagggcaagcgtggcttgaagaaagtcacgattagcgtggagacgtacacgatctacatcttataagcgctgaatctggtgctcccgtacatcagtatctcctccaaggccatgtccatcatgaactccttcatcatcaacatgttctagaagctggtcagcgaggccatcaagctcgcgcgctacaacaagtagcccaccatcacc

SEQ ID NO: 1803 - DNA, 1095 bp, Zea mays
  Clone ID: TF_ZmC6067_4
attgggtacctcgaggccggccgggtttttccggcctctcttcctcgcgcggcgaccacccgattcgaagcgtgcggagagaccgaagaagcgggagagatggctcgtaccaagcagactgctcgcaagtccacgggagggaaggctcccaggaagcagcttgccaccaaggctgcccgtaagtctgcccccaccactggtggagtgaagaagcctcaccgctaccgccctggaactgttgccctccatgagatccgcaagtatcagaagagcactgagctgctgatcaggaagctgcccttccagaggctcgtcagggaaattgcacaggacttcaaaactgatttgcgtttccagagccatgcggtgcttgccctccaggaggctgctgaggcataccttgttggcctgtttgaactctctgactcagctacgatctgaaagaaacccgccaccagctctcgtccttccttctctccaatccaaccgcaatcctttcagcttcagcttcttctgctccttctctcgtgaggaggcgtggtgagagactgcgactgcgcgatggaggcgtcgtcgtcggcgttggcgctcgtggccgccgtgctcctcctctcctccccgctcgctgcgtcagatttctgcgtgtgccgttcggaccagccgacggcggtgctgcagaaggcgatcgacttcgcgtgcggcccgcagggcggcgccgactgcacgcccatcctgcagggcggcgggtgctacagcccggacaccgccgccgcgcactgctcctgggccgccaacacctactaccagaacaacaaggccaggggcgccacctgcgacttcggcggcgcagccaccgtctccaccaccgacccgagtttctccgggtgcactttcgcttccagtgccaccagcgccggtgctgggactggaaccgggacggcgggcagcactactaccggcctgggacccacgggcaacgcctttgacgccgccgccgccgccgcgccgggcctgctccccagcgccgcgtccctcggcctcgcactcgccgacctctccttcctaacctagccctgccgcgccattaacggcagc

SEQ ID NO: 1804 - DNA, 442 bp, Zea mays
  Clone ID: TF_LIB3153-005-Q1-K1-F11
aatctgcccttgccgccgccactgcccgatccacgtgtgcagactgctccctcctcctatgcgctcctaatgcacagcacgaagcagacctcgcgcaagtcgaccggcatcaacgcgccgcgcaagcagttggccaccaaggcggcgcgcaagtcgtacccggtcacgggcggcgtgaacaagccgcaccgcttccgccccgtcaccgtcgcgctccgcgagatccgcaagtaccagaagagcacagatctgctcatccgcatgcatccctaccagcgcctcgttcgagagatcgcgcaggacttcaagacggacctgcggttacagtcctctgccgcggcggctctacaggacgcctctgatgcatacctggtggcgctcttcgaggacaccaacctctgcgccattcacgccaagagggtcaccatcatgcccaaagaca

SEQ ID NO: 1805 - DNA, 464 bp, Zea mays
  Clone ID: TF_jC-zmX700431125a1
attcggctcgtggcccatggacgagaagaattcagcggagaagaagccggctggcgtggagaaggcggttaagacgaccgcaggtcagaagcccaagtgcgagaagcgcctggcggcctcaaagtcctcctgtaaggagggcggctagaagacggggtagacgaaggccaagaagagcgtggagacctacaaaatgtacatattcaaggtgctgaagcaggtgcaccccgacatcggcatctcttgcatggccatgttcatcaggaacttcttgatcaacgacatctaccagaagctgggcggcgaggtcgtcaagctggcgcggttcatcaagaagcccaccatcacctcccgcgagatccagacctccgtgcgcctcgtactcccaggagagctcgccaaacacgccgtcttcgagggaaccaagggcgtcaccaagtccaccagccattgagcagactgca

SEQ ID NO: 1806 - DNA, 375 bp, Zea mays
  unsure (1)..(375): unsure at all n locations
  Clone ID: TF_LIB3069-017-Q1-K1-H6
ggagggtggcgagaagaagggtaagaagaatgcaaagaagtcggtggagacgtgcaagatgcgacatctttaaggtgctgaagcaggtgcacccggacattggcatctcgtccaaggccatgtccatcatgaactccttcatcaacgacatcttcgagaagctggcggcggaggcggccaagctggcgcggtacaacaagaagcctaccattacgtcccgcgagatccagaccttcgtccggctcgtcctccccggcgagctcgccaagcacgccgtctccgagggcaccaaagccgtcaccaagttcactagcttctacgcgagcgatgcgacgtgcactcgtctnctcttcttgcagtagtgcaatagtagta

SEQ ID NO: 1807 - DNA, 473 bp, Zea mays
  unsure (1)..(473): unsure at all n locations
  Clone ID: TF_LIB3076-059-P1-K6-E11
ctcctcgcttttccttgcaccggtggggttccccctcccaccaaanccntggcgcccaaggccgnanagnaagcccgcggcngaanaaccggtggaggaggagcccgcgngccgtaaaagacgaccgccgggaagaacccaagcggagaagcgggtccccgctggcaagtccgccggcaagggagggcggcgagggcaagcgtggcaagaagaagggcaagaagagcgtggagacgtacaagatctacatcttcaaggtgctgaagcaggtgcacccggacatcggcatctcctccaaggccatgtccatcatgaactccttcatcaacgacatcttcgagaagctggccggcgaggccgccaagctcgcgcgctacaacaagaagcccaccatcacctgccgcgagatccagacctncgtgcgcctcgtgctccccggcgagctcgccaagcacgccgtctctggaggcacc

SEQ ID NO: 1808 - DNA, 334 bp, Zea mays
  Clone ID: TF_LIB3088-027-Q1-K1-A6
acggttatacatcgccatctaaaactagagacgtttattacaaagccatcaatacctaaccgatgagcaatttgatatgcgagcgtgctcacaaccaccaagggctacaagaactcacctgagaagacaccaactaacgagaactccgttaatagggcaacacccaacaattttataccctgcaagggagacccacataagaacgcaacgaaaaacgctaacaacagcgttgctacttacaagatctacatcttcaaggagctcaagcatgtgcactcatacataagcatctcgaccaaggccatgtgcatcatgaactccttcatcaacgaca

SEQ ID NO: 1809 - DNA, 346 bp, Zea mays
  unsure (1)..(346): unsure at all n locations
  Clone ID: TF_LIB3604-002-P1-N6-F12
aaggctgggtacacgttcagcaacccggtttttaagatgttgaatgggtgggtaaaagactccagacccgacaaccgccaaaagtatgcgcgggggggggggggggctccntcaaacaggccaagggcaggttactaggttattttttcacaaaacttacagggggaggggggggtacccccaaaacgagcgcaaaggtcttcctcccgttgtcagactcacgccctttcgccacggatccttcttgccaggtgaatgtccttgggcctggtggtcacccccttggcctgggtcgcgcacagattggtatcttcaaagtgccccaccaggggggcccttgttggct

SEQ ID NO: 1810 - DNA, 404 bp, Zea mays
  Clone ID: TF_LIB3076-005-Q1-K1-D5
attttcattcctcctctatccattcacctatcggcaattcattggccgtaattccacatcgcgcccactgccaaaaccaagccctcacccaacaaacccaccttggagaacgcccataagaagcccactgccgaaaaactcatgccgcgcaaggaggtcggcgagaagaacgggaacacgaacgccatgaagagcgtcacgacctacaagatctacatattcaacgcgctcaatcaggtgcacccggacattggtatctcgtccaatgccatgtccatcatgaactccttcatcaactacatcttcgagaagctggctgtcgatgccggcaatctcgcccgctacaacaagaagcccaccataaccttcctggagatccagacttttgtgcgcctcgtacttcc

SEQ ID NO: 1811 - DNA, 392 bp, Zea mays
  Clone ID: TF_LIB3067-001-Q1-K1-E7
caaatgctcctagcgaattcaccacagcttctcaccaccgctaccttcgatggcacccaaggcggacaagaagccggcggcgaagaagcctgcagaggagcccgcgacagacaaggcggagaaggctccggcggggaagaagcccaaggccgagaagcgcctcccggcgggcaagtccgacggtaaggagggcggcgagggcaagaaggggaaaaagaaagcgaagaagtccggggagacctacttgatctacagcttcaaggtgctgcagtatgtgcacccctacatcgggatatcgtccaaggccatgtgcattatgaactcctgctcatcgactgtctcctagaagctcgcgtccttatccgtcaagctggcgcgctatatcaagaagc

SEQ ID NO: 1812 - DNA, 456 bp, Zea mays
  Clone ID: TF_LIB4742-054-R1-K1-C10
cattggtacctcgagccggcggggatcgtttcctcaattcgttccgtccaggcaaggaagaaatcgagcagccaaggagaggtgaagatggttcgtactaagcagaccgcccggaagtccaccggaggcaaggctccgcgtaagctgctcgccaccaaggcggtgaggaagtcggcgccgactaccggcggcgtgaacaagccccacaggtactggcccgggacggtggtcgctgcgctagatccgcaagtaccacaagagcacggagctgctgatccggaagttgtccttccagagcctggtccttgagatcgctcaggacttcaagacggatctgaggttccatagccacgccgtcctggtcctccaggaagccgccgaggtctacctcttccgcctgttccaggacaccaacctctgcgccatccacgcaaagcgcgtcaccatcctggccaa

SEQ ID NO: 1813 - DNA, 450 bp, Zea mays
  unsure (1)..(450): unsure at all n locations
  Clone ID: TF_LIB3137-005-Q1-K1-G10
ccctaaccctaatctcccctcccttctccgatggcccgcaccaagcagacggctcgcaagggcaccggcggcaaggccccccggaagcaactggcaaccaaggcggcccgcaaatccgcccctgccacaggcggcgtgaagaagccccatcgcttccgccccggcactgtggctctccgtgagatccggaagtaccagaagagcaccgagttgctgatccgcaagctccccttccagcgccttgtccgtgagattgctcaggatttcaaggcccgatctccgcttccagagctctgcctgtgtcggcgctgcaggaggcngtcggaggcctacttggtggnnnctgntcgaggataccaacctctgcgcgattcacgcaagagggtgactatcatcncgaaggacatccagctggccaggagatcccgggcgagagggcttgacatgtct

SEQ ID NO: 1814 - DNA, 819 bp, Zea mays
  Clone ID: TF_ZmC119_1294
ttgggtacctcgaggccggccgggactcgcattccgattcgttccactcctgagcactttctcctcgtccccgacaagccaatcgaagccgagatacggccatggactccaccggcaccggagcagggggtaaggggaagaagggagcggccgggcgcaaggtcggcgggccaaggaagaagtcggtgtcgaggtccgtgaaggccgggctccagttccccgtcggccgcatcgggcgctacttgaagaagggccgctacgcgcagcgtgtcggcaccggcgcccccgtctacctcgccgctgtcctcgaatacctcgccgctgaggtactgcaatttgagcccagttctttgtttgtactgatttggcgacggagtattaattcttgcgtcccgattcgttttgcttccttgtttgaccaggttctggagctcgccggtaatgctgccagggacaacaagaagactcgcattattccgcgccacgtgcttctggcgatccggaacgacgaggagcttgggaagctgttgggcggcgtgactatcgctcacggcggtgtgctccccaatatcaaccctgttctgctgcccaagaagacggcggagaaggcgtccagtgtggggagcaaggaggcaaagtcgcccaagaaggccgccaagtcccccaagaaggcatagactgactgtctggagtgatctgatgtttagcaggaccttgataccagtatgcggtgatgcgtaggctgtagatgggtcgaatgtgcttgtgtgtgtatgtgccctgctgcaagttgccctttgctatttaaaatggaagaag

SEQ ID NO: 1815 - DNA, 580 bp, Zea mays
  unsure (1)..(580): unsure at all n locations
  Clone ID: TF_LIB4757-029-Q1-K1-B8
ccggccgggacccccacatcacanntacgccatggcccgcaccaagcagaccgcacgcaagtccaccggaggcaaggcgccccgcaagcagctcgccaccaaggcggcgcgcaagtcggcacccgctgccggtggtgtcaagaagccccaccgctacaagcccggtaccgtcgcgctgcgcgagatccgtcgctaccagaagtcgacggagctcctcatccgcaagctgcccttccagcgtctcgtccgtgagatcgcccaggacttcaagacggacctgcgcttccagtcgagcgccatcggcgcgctccaggaggccagcgaggcctacctcgtcggtctgttcgaggacaccaacctggctgccatccacgccaagcgtgtcacgatccagcccaaggacatcgcccttgcgcgccgtctccgcggcgagcgctcgtaagcacgtcgccaccatggccgcgtcctagcgctcctcgcctcccctgcctcgcctgcgccgtccatttacctccctcttgtacaattaccccttgatgcgatctccttgccgtgtaaaaaaaaaaaaaaaaaagcggcc

SEQ ID NO: 1816 - DNA, 306 bp, Zea mays
  Clone ID: TF_LIB3069-011-Q1-K1-F6
cccaccatcacctcccgcagagatccagacttccgtgcgcctcgtgctcaccggcgagctcggcaagcacgccgtctctgagggcaccaaggcctgcaccaatttcacctcctcctatgcttgcacgctcgaccttgcaagctcttctggtgctgatgttcacactgagttgaagttagatgtcgctggtttctctgtcagagctgctctatttctgtaggaactccttaatgtaacccaccagggcctggttaattgggaattattaacactttggtggtgatcacttatggttcaaattcttaa

SEQ ID NO: 1817 - DNA, 442 bp, Zea mays
  unsure (1)..(442): unsure at all n locations
  Clone ID: TF_LIB3607-002-P1-K6-A11
ccgggncgacccagcgnccgggctgggaagggagggaaaggcgggcttgccgcgaacccacggcggccaagnccgccgagagaggacaaggggaagaaggccccaancncacgcnccncccgcgccggcccccagnncccngnnggacgnanccaccgncagcngaagcagaggacccaggcaaanggncgaggggagcggaccgcanccnncnacnccgcngccaaccaggagnacccgaccgccgaggnncnggagccggcngggaangccagcaaggancngaaggngaagcgnancaccccncgccannngcagcnagccanncggggagacgaggagcnggacacccncancaagggcaccancgcaggcggaggggncaacccgcacaaacacaagncccngancaacaagncccccaaggagagaagaccagggg

SEQ ID NO: 1818 - DNA, 516 bp, Zea mays
  Clone ID: TF_LIB4730-068-R1-K1-G3
ggtaccctcgggctggccggaaaaaaaacaccgcatcttacatctccccagcaattcctagcaggaagcctcccatcctcactcgctcgcatggcccgtacgaagcagaacggcgaggaagcccaccggaggccaagtgcgccgaggaagcaactggcgactaaggcggaccgcaagtctggccctgcgaccggcggcagggaagaagccccaccggtttcgccccgataccggcgcgctgcgggagatccacaagtaccactagagcacggagctggtgatccggaagttgccgcttcaacgcctggtgcgggagatcgcgcaggacttaaagaccgtcctacactaccagagctctgctgctttcgcgctggagcaggcggatgaaggctaccttgctgggctcttggaggacacgaaactatgcgccattcacgccaaggacaggaccatcatgcccaagggcatccatgttgtccgacgcattcgggtaaggagtgcctaagcggggccctc

SEQ ID NO: 1819 - DNA, 545 bp, Zea mays
  Clone ID: TF_LIB4740-049-R1-K1-B11
gtaccctccgaggctggccaaaaaaaaaaaatcgaggacctcgtcgcgctccgcggcttcctcaactccgaccagacgctcttctctgacaacaccaggacccgtcgcgtcgtcgagcggctcagcaaggaccaggacgccttcttcagggccttcatcgaggggatgataaagatgggggagctccaaaaccccaggaaaggggagatacggcgcaactgtcgcgttgctaacaacgcgccgaggcaaccaaggacggcgatggcgtccgtacagacgacatctgagctccgccgaggacgggagatcgcgcaagacttcaagaccgacctacgcttccagagctcctgtgtctccgcgctgcaagaggcgggtgaggcctaccttggcgggctctgtgaggacaccaacctgtgtgccatccacgccaagcgcgtcaccatcatgccgaaggacatccagcttgcccgccgcatccgtgaggagagggcctaagcattatatattctcgcatgagtgcccgatcagaagatgcacagatgggc

SEQ ID NO: 1820 - DNA, 441 bp, Zea mays
  Clone ID: TF_LIB4764-128-Q1-K1-C12
acttgattcccgtatagctgcactgaacgcacctccaccgcgtgccaagcgccaccgctaaatgctaccgcgaactcatggggtcgcttggcccccccctcctcgccggcgaccagggctgcccgcaactggtgcccggccaccggcatcgcgaagaagccccaccgcttccgccccgggaccgtgccgctccgcgagatccgcaagtaccagaagagcaccgagctgctcatccgcaagctccccttccagcgcctcgtccgcgagatcgcgcaggacttcaagactgatctgaggttccagatcctctctccgtccgcgccgctccaagaggccgccaagaagcacctgacggacgccttcgaggacaccaacatttgcccaatcccccgccagcgcgacaccatcatgcccacggaccctccaccccgcgcggcgcat

SEQ ID NO: 1821 - DNA, 554 bp, Zea mays
  unsure (1)..(554): unsure at all n locations
  Clone ID: TF_LIB3635-001-P1-K6-F5
gcgtccggtcagtcacagctcacagcaaacaccgcggagccgcccccgctcccaacccgaccggcaagcgcaagccccccaccgcggatcaatccgcagcatcgatggcgcccanaggcggagaaaaagccggcggcgaagaagcccgcggaggaggagcccgcgaccgagaagcggagaagctccggcagggaagaagccgaagcggagaaacgcctccccgcgggcaagtccggcgccggcgagggcaagaagggcaagaagaaagccaagaagagcgtggagacctacaagatctacatcttcaaggtgctcaagcaggtgcaccccgacatcggcatctcgtccaaggccatgtccatcatgaattccttcatcaacgacatcttcgagaagctcgccgcggaggccgccaagctcgcccgctacaacaagaagcccaccatcaccttccgcgagatccagacctccgtccgcctcgtcctacccggcgagctcgccaagcacgccgtctcttgaagcacaaagggggtcaccaagttcacttttgtttt

SEQ ID NO: 1822 - DNA, 639 bp, Zea mays
  Clone ID: TF_LIB4975-069-A1-K1-G5
acttttccggcctcccattcctcgcgcggcgaccacccgattcgaagcgtgcggagagaccgaagaagcgggagagatggctcgtaccaagcagactgctcgcaagtccacgggagggaaggctcccaggaagcagcttgccaccaaggctgcccgtaagtctgcccccaccactggtggagtgaagaagcctcaccgctaccgccctggaactgttgccctccgtgagatccgcaagtatcagaagagcactgagctgctgatcaggaagctgcccttccagaggctcgtcagggaaattgcacaggacttcaaaactgatttgcgttttcagaatcatgcggtgcttggcctccaggaaggtggtgagggataacttggtgggctggttgaagacaccaacctggggggcatccatggtaagcgtgtggacatcatggccaaagacattccgctggcaaggaagaatcccggcgagaagggctaatcggcacctccaacattgtgagaaaaacatggaagcctgggggtattggtaatccggtggccttggaaagacatatataaaagggttggtttgtggatcgcaaggttctcctctggtaacggtggtggtaaccttggtgggggtattggtaa

SEQ ID NO: 1823 - DNA, 590 bp, Zea mays
  unsure (1)..(590): unsure at all n locations
  Clone ID: TF_LIB4977-056-Q1-K1-D5
cgaagagacggcgaggaagtccgcgggggcaaggcgccgaggaagagttggcgactaaggcggccccgcagtctggccctgggagcggcggagttaagaangccccccggcttcggcccggtaccgtcgcggctcgggagatccgcaagtacccgaagagcgcagagctgctgatccgcaagctgccgttccagcgcctggtgcgggagatcgcgcaggacttcaagaccgacctacgcttccgnagctccgctgtctccccgctgcaggaggcggctgaggcctaccttggcggtctcttcgaggacaccaacctctgcgccatccacgccaagcgcgtcaccatcatggccaaggacatccagcttgcccgccgcatgccgtgtggagagggcctaagcatcgtatattctgtcatcagtgcccgatcagaagatgtagagatgtgctgggttctgtagtttgggttactgtcgaatctcgagnnaggtggtggtcactgctggaacttattatcatggtgcatatgagatgggcatgaactatgttatccgtaccaaaaaaaaaaaaaaaaaagggcccctagggcc

SEQ ID NO: 1824 - DNA, 693 bp, Zea mays
  unsure (1)..(693): unsure at all n locations
  Clone ID: TF_LIB4756-072-R1-K1-D4
cattgggtccctcgaggccggccgggactattcttgcctcgcattcctctagtgcatgaccccctattcgaagagcgcgccgagaccgaagaagcggtagagatggctcgtaccaagaatactgctcacaggtccactggagtgaatgctcgcatgaagcatcttgccaccaaggctgcccgatggtctgcccccaccactggagtactgaagaatgctcaccgctaccgccctgtaactgctgcactccgtgagatccgcaagtaccagaagagcactgagctgctgatcaggaagctgcccttccagaggctcgttagggaaattgcacaggacttcaagactgatttgcgtttccagagccatgcggtgcttgctctccaggaggctgctgaggcataccttgttggcctgtttgaggacaccaacctgtgcgccatccattctaagcgtgtgaccatcatgcccaaggacattcagctggcaaggaggatccgcggcgagagggcctaatcgccacctcaaacatcgtgacaaaaaatgaagtcctgnggttattgttaatctggtgccattgtaaggacatatgagtagggtttgatttgtggatcgcaagtttctcttctgctactgntgctgctacctttgctggggntattgctanggntgaatacttaagttaactatgcgctg

SEQ ID NO: 1825 - DNA, 625 bp, Zea mays
  Clone ID: TF_LIB4185-051-R1-L1-H7
aattcggcacgagggtttgttccgtccaggcaaccaaaatagcgttgccccgccgcgcagaggaataagagagcacaggaggatggctcgtacgaagcacaccgtccgtaggtccacgggaggcaaggccccccgcaagcagctcgccaccaatgcggcgaggaagtccgcgccgacgaccggcggcgtgaagaagccccacaggtacaggcccggaaccgtggcgctgcgcgagatccgcaagtaccacaagagcacggagctgctgatccgcaagctgcccttccagcgcctggtgcgcgagatctcgcaagacttcaagacagacctccggttccagagccacgccgtgctggcgctccaagaggccgccgatgcctacctcgtcggcctctttgatgacaccaacctctgcgccatccacgccaagcgcgtcaccatcatgcccaaggacatgcagctcgcccgccgtctccgtggcgatcgcgcgtagccatcatctgcgatgatctgatgaatgtctgcttaccatacaaatcggccgcattagcgtcgctgttctgtcttccctattttggattgcgttgccgggaaaaacagctttactgttctgaacgtgaacccc

SEQ ID NO: 1826 - DNA, 650 bp, Zea mays
  unsure (1)..(650): unsure at all n locations
  Clone ID: TF_ZmC519599_1
nacaagtcagagcattccaaatccgaacagcaccgccgctcccgcatctcgagtagtttccagttcgccggagaaggagaaagatggccggaaggaagggcggcgacaggaagaaggcggtgacccgctccgtcaaggccgggctccagttccccgtcggccgcatcgggcgctacctgaagaagggccgctacgcacagcgcgtcggctccggcgcccccgtctacctcgccgccgtcctcgagtacctcgccgccgaggtcctggagcttgcaggcaacgctgccaaggacaacaagaagacgcgcatcatcccgcgccacctgcttcttgccgtccgcaacgaccaggagctcggcaggctgctcgccggcgtgaccatcgcccacggcggcgtgatccccaacatcaactccgtgctgctccccaagaagtccgccgccgccgagaaggaggccaagtcgcccaagaagaaggccgccaccaagtcccccaagaagaaggccgccgccgccaaggagtaggcgccccatagcctagctccacaatcagggagaagatgacgagacttttgattttttttgcgggattgggtcttgtaattgcctagtctgtagtggctctttcattacctcgatgagcaagccatt

SEQ ID NO: 1827 - DNA, 529 bp, Zea mays
  Clone ID: TF_LIB4766-063-R1-K1-D1
ccggccgggaatttgtttctgaacgcgttcctcccgtctcccctgatctcctcagaccccagaagcgcctctgcggtcatggacgccaccgccactggagctggaggtaatgcgaataagggagcggtcggtcgcaaggccggctgggccgtaggaacgacctcaggggacccatgtctcgtgcaatgcctaacttccagttccccgtcggccgcatcgaccgctacctcgagatgggccgctacccgcagcacgtcagcagcgctgtccccggctacctcgcgtgcctcctgtatcacctcgccgctgaggtcctggagctccccggtaacgctgccaaggactacgagaagacacgcatcgtctcgcgccacgtgctgctggcgatccatgaccacgaagatctcggctagttgctgaccgccctgaccgtcgcccacggcggatgtgctgcccaacatcaggccggtcctgctgctcaagaagactgcggtaagagcgtccagctcacgggattcaggatgccaag

SEQ ID NO: 1828 - DNA, 380 bp, Zea mays
  Clone ID: TF_LIB143-070-P1-N6-A2
cagatcttaacagagtgaagtggacgcaacatcatatcgtccatcactacccctaccagatgaatcgagccgcgtataccaacaccacccaggctaggactatcagcctagaaaagaagtgaacttggtaacggccttggtgccctaggagaccgcgtgctcggcaagcttatacatgaggacgaggctcacccaggtctggatctcgtgggaggtgacggcggggtcatggttatagtgcgctagcttgtcagactcatccgcgagctgctcgaagatgtcttcgatgaacgagttcatgatggccataggcttggacgagatgccgatgtgagggagcacctggtgcagcaccttgtagatgtagagcttgtcaggct

SEQ ID NO: 1829 - DNA, 339 bp, Zea mays
  Clone ID: TF_jC-zmX3059015Q1K1C08b1
gcgcgcttccgcggacgcgtggccaacctccccagcaatccctagcagaagccttccatcctcactcgctcgatggcccgcacgaagcagacggcgaggaagtccaccggcggtaaggcgcctaggaagcagctggcgactaaggcggcccgcaagtctgcccctgcgaccggcggagtgaataagccccaccgttttcgccccggcaccgttgcgctccgggagatccgcaagtaccacaagagcacggagctgctgatccgcaagcttgccgttccagctcctggtgcgggtagatcgcgcaggacttctagaccgacctactcttacagagctttg

SEQ ID NO: 1830 - DNA, 313 bp, Zea mays
  Clone ID: TF_jC-zmX3059040Q1K1E07b2
ctcgtttattgcgccaccagagccatgcggtgcgggctctccaggaggctgctgaggcataccaagctggcctgcatgaggacaccaacctgagcgccatccatgctaagcgcgtgaccatcatgccgaaggacatgcagctggtaaggaggatccgcggcgagagggcctaatcgacacctcaaacagcgggacaaaaaaatgaagtccaggggtaattgaaaatctggcgccattgcaaggacataagagaagggtccgaaatgtggatcgcaaaacaaaagagagcaaaacccccagaaaaaaacagggg

SEQ ID NO: 1831 - DNA, 446 bp, Zea mays
  unsure (1)..(446): unsure at all n locations
  Clone ID: TF_LIB4668-003-R1-K1-B11
gccgggtttttccggcctcccattcctcgcgcggcgaccacccgattcgaagcgtgcggagagaccgaagaagcgggagagatggctcgtaccaagcagactgctcgcaagtccacgggagggaaggctcccaggaagcagcttgccaccaaggctgcccgtaagtctgcccccaccactggtggagtgaagaagcctcaccgctaccgccctggaactggggcactccgtgagatccgcangtgccagaagagcactgagctgctgatcaggangctgcccttccagaggctcgttggggaaattgcgcaggacttcgagactgatttgcgtttccggagccgtgcggtgcttgctcttcgggaggctggtggggcgtgccttggtgggctgtttgtggacgccgtcctgcgcgccgtgcgtgctcggcgcgtgcccttcttgcc

SEQ ID NO: 1832 - DNA, 479 bp, Zea mays
  Clone ID: TF_LIB4730-046-R1-K1-C4
tgggtccctcgggccgccggaaaaacgaaagctacgtccccaaatcgaccagcgaattaccacagcttctcaccaccgataccttcgatggcacccaaggcggacaagaagccggcggcgaagaagtccgcagaggaggagcccgcgacagagaaggcggagaaggccccggcggggaagaagcccaaggccgagaagcgcctcccggcgggcaagtccgccggcaaggagggaggcgagggcaagaaggggaaaaagaaggctaagaagtccgtggagacctacaagatctacatcttcaaggtgctgaagcaggtgcaccctgacatcggcatctcgtccaaggccatgtccatcatgaactccttcatcaacgacatcttcgagaagctcgcggccgagtccgccaagctggcgcgctataacaagaagcccaccgtcacctctccggagatccagacctcggtgcgccttgttct

SEQ ID NO: 1833 - DNA, 444 bp, Zea mays
  Clone ID: TF_LIB3059-015-Q1-K1-G3
ctcctctctcgcattccgaaccttttgagcctttaattcatccccttgaacttcaaacgggaccaccaccaatcaggcggccttggcccccaccgcaccaggaaccggcgggaaggcgaaaaaagggcgcgggcgggcgcaagggccgcgggccgaggaagaaagtcgtgacgaggtccgtcaaagccgggctgcagttccccgtcggccgcatcgggcggtatctgaagaagggccggtacgcgcaacgcgtccgcacgggcgcccccgtctacctggcgcgcgtcctcgagtacctggcccgcgaggtgctggagcctggccgcaacgctgccaaggacaacaagaagacccgcatcatcccgcgccacgtgctcctggccatccgcaacgacgaggagctcggcaagctgctgtccggcgtcaccatcgcccacggcggcg

SEQ ID NO: 1834 - DNA, 750 bp, Zea mays
  unsure (1)..(750): unsure at all n locations
  Clone ID: TF_LIB5072-097-A1-XP1-A11
cctcggtttccccccattcctgaattatttccttcatccatccaactgcatcctaaaaacttttcttaacctcataacagagacatggccagaactaagcaaaccgcccgtaagtccacgggaggcaaagcgccccgaaagcaactggcagccaaggccgctcgcaagtctgctcccgctacaggtggcgtcaagaaaccccaccgatacaaacccggtaccgtcgctcttcgtgagattcgacgataccagaaatcgactgagcttcttattcgtaaacttccgttccaacgtctcgttcgagaaatcgcacaagacttcaagactgatcttcgatttcagtcctctgctatcggcgcattgcaagagtcagccgaggcctacctcgtgtcattgttcgaagataccaatcttgccgccattcatgctaagcgtgtgacgattcaacccaaggacattcaacttgctcgtcgtcttcgtggtgaacggtcatgatctatcgtgaggtcgacctgcgccattatgtcaacggaggatctcaattttcaattttgtttatttcgttatccaaccgtcgagatattcgcaaagttgttgttgcgcccatcgccttccctacccccttgttgtttcttgtgttccccactaggcgtaccaccactgtatcatcaatctgtctgcctctgcgtttatgcagcagactattctccaaaattatctccggttcacnattggattcgnttgagatat

SEQ ID NO: 1835 - DNA, 538 bp, Zea mays
  Clone ID: TF_LIB3608-014-Q1-K6-F3
tccgcccagcgtccggttccgtccaggcaagggaagaaatcgagcagccaaggagaggagaagaggctcgtacgaagcagaccgcccgcaagtccaccggaggcaaggccccgcgcaagcagctcgccaccaaggcggcgaggaagtctgcgccgacgaccggcggcgtgaagaagccccacaggtacaggcccgggacggtggctctgcgcgagatccgcaagtaccagaagagcacggagctgctgatccggaagttgcccttccagcgcctggtccgtgagatcgctcaggacttcaagacggatctgcggttccagagccacgccgtcctggccctccaggaagccgccgaggcctacctcgtcggcctgttcgaggacaccaacctctgcgccatccacgccaagcgcgtaaccatcatgcccaaagacatccagctcgcccgccgcatccgctgcgagcgcacgtaagcgtatcttgcgcccggccccaatgcggcggaaggatggaggaaggcaatttgtaaccttaatgc

SEQ ID NO: 1836 - DNA, 631 bp, Zea mays
  unsure (1)..(631): unsure at all n locations
  Clone ID: TF_LIB4732-063-Q1-K1-B4
aaccgcttcgtcatncgcccagcaatccctagcatacccttccatcctcactcgctcgatggcccgcacgaagcagacggcgaggaagtccaccggcggcaaggcgccgaggaagcagctggcgactaaggcggcccgcaagtctgcccctgcgaccggcggagtgaagaagccccaccgcttccgccccggcaccgtcgcgctccgggagatccgcaagtaccagaagagcacggagctgctgatccgcaagctgccgttccagcgcctggtgcgggagatcgcgcaggacttcaagaccgacctacgcttccagagctctgctgtctccgcgctgcatgaggcggctgaggcctaccttgtcgggctcttctaggacaccaacctctgcgccatccacgccaagcgcgtcaccatcatgcccaaggacatccagcttgcccgccgcatccgcggcgagagggcctaagcgtcatattttctgtcatcagtgcccgatcagaagatgcagagatatgctgggttctgtagtttgggttactgtcgaatcatcgagtgatggctgttcactgctgtaacttaattatcatgatgcatatgaaatggcaatgaactctgttatcagttctcg

SEQ ID NO: 1837 - DNA, 667 bp, Zea mays
  Clone ID: TF_ZmC369_64
caagcaaccaccgcctccccgatctcgtcgagaggaagccccatcccgaaaccgccgccgtattccaatggcgcccaaggccgagaagaagcccgccgccaagaagcctgcggaggaggagccggcggcggagaaggccccggcggggaagaagcccaaggccgagaagcggctccctgcgggcaagtccgcgggcaaggagggtggcgagaagaaggggaagaagaaggcgaagaagtcggtggagacgtacaagatctacatcttcaaggtgctgaagcaggtgcacccggatattggcatctcgtccaaggccatgtccatcatgaactccttcatcaacgacatcttcgagaagctggcggcggaggcggccaagctggcgcggtacaacaaaaagcctaccattacgtcccgcgagatccagacctccgtccgcctcgtcctccccggggagctcgccaagcaccccgtttccaagggcaccaaagccgtccccaagttcactagctcctaggcgagcgatgcgacgtgccctcgtctccttcttgcagtagtccaatagtagtccggttaggtgtgttcccccggtggtagttgcccctgcgtttgttttttgggctcggttgatgtcttttatgtaaaaaagtaactgtattgtgtctgc

SEQ ID NO: 1838 - DNA, 867 bp, Zea mays
  Clone ID: TF_ZmC76846_1
gattcccggtcgagcacgcgtccggacacctcgagccggccgggaaacctctcggtgcgttccgattccaaacccaaatcaccgctccctccaaatcccattccctccgcccagaccagctcgcgaaatggacggcggcggcgcgaaggcgaagaaggcggctgctgggcgaaagctaggcggcggcgggccgaagaggaagccggtgtcgcggtcagttaaggccgggctccagttccccgtgggccgcatcggacggtacctgaagaaagggcggtacgcgcagcgcgtgggcacgggcgctcccgtgttcctggccgccgtcctcgagtacctcgccgctgaggtcctggagctggctggcaacgcggcgcgcgacaacaagaaaacccgcatcatcccgcgccacctcctcctcgccatccgcaacgacgaggagctcggcaagctgctgggtggggtcaccatcgcgcacggcggtgtgctgcccaacattaaccccgtcctcctccccaagaaggccgccgagagggccgagaaggccgctgccgctggccccaagtcccccaagaaggccgccgccaagtcgcctaagaagtagtgactcgtcttgctctcactcatcccgttctgagatcagcttgtgtttgtggtcgtggacgccttttaccattttgcaagtgtgtgtagcgatgcgtcgtctgaactataatgtgctacgattgacctaagttctagtttaattcctagctctagtggtgcttggtgatgggtccccatggaagtttaatgggaacaagaggaagtgtcttgctttctttgatgcttaaccatgcttcttagcattccgcaagtttgatctccatc

SEQ ID NO: 1839 - DNA, 242 bp, Zea mays
  Clone ID: TF_LIB3116-025-P1-K1-F8
ggcccccggaaggcagttggccaccaaggcggtaaggaagtcggcgccaacaaccggcggggggaaaaagcccaacaggtccaggcccggaccaggggcgttgcccaggatccgaaggtcccaaaaaagcacggggttcttgatccgaaggttgcctttcaagggcctggtgcgcaagatcgcccaggatttaaaaacagacttccggttccagagccacgccgggctggcgttcccagagg

SEQ ID NO: 1840 - DNA, 656 bp, Zea mays
  Clone ID: TF_LIB4766-128-A1-K1-G6
gggaccctcgaggccggccgggggccatagacagcgaccgagcgattccctcgtatctgcattcgcatgcctttgctgcatccaccaccgcgtaaccccacgcagccgcatcgatggcgcctaaggtggagaagaagccggatgcgaagaagacggcggaggaggagaccgctgtcgcgaagggcccggtggggaagaaggccatggccgacaagaggctcccggtggacaactccgccgggaaagaaggcgtcgacaagaagggtatcaagaaggatgaagaagcccgtggacacctacaagatctacatcttcaagggggtgaagcaggaccacccggacatctgtatgtcttgcaagggcatgttcatcatgcactccttcgtcaacgacatcttctagaagctcgccggcgaggctgccaagcttgcgcgctacagcaagaagcccgccatcacctctcgggagattcgaacctctgtccgccttgtgcttcccggcgagctcatcatgcacgcgttgtccgagggcaccaaggacgtcactaagtgccatcatcgtagatttgaggcatgatctattgggaggcgttggcatctgcgactcaatttgtctgctactaatactggtgctagtatccatgaggaattgggttg

SEQ ID NO: 1841 - DNA, 484 bp, Zea mays
  Clone ID: TF_jC-zmXLIB3527P004ah01a1
aaccaactctttcccaaatccacctgacggctcggctcgcccatcttagcgccaagcaccgaatctgcgatggcccgcacgaagcatacggcgcgcaagttgacgggcggcaaggctgccccgcaagcagctggccaccaaggcggcgcgcaagtcggcgccgacaaccggtggcgtgaagaagcctcaccgtttccgccccggcaccgacgcgctccgagagattcgcaagtaccagaagagcacggagctgctcatgcgcaagctgcccttgcagcgcctggtccgtgagatcgcgcaggatttcaagaccgacctccgcttacagtcctccgctgtcgccgagctgtaggaggccaccgaggcctacctagtggggctcttagaggacaccaacctctgagccatccacgccaagcgcgtcaccattatgcccaaggacatccagctcgcgcgccgcatcatgggcgagagggcttgatct

SEQ ID NO: 1842 - DNA, 798 bp, Zea mays
  Clone ID: TF_ZmC369_122
cattggtacctcgagccggccgggaaagccacatatctcctcgcattttccttgcaaccgattgcctatccccctcccaacccaagaccgatggcgcccaaggccgagaagaagcccgcggcgaagaagccggcggaggaggagcccgcggcggagaagacgaccgccgggaagaagcccaaggcggagaagcgggtccccgcgggcaagtccgccggcaaggagggcggcgagggcaagcgtggcaagaagaagggcaagaagagcgtggagacgtacaagatctacatcttcaaggtgctgaagcaggtgcacccggacatcggcatctcctccaaggccatgtccatcatgaactccttcatcaacgacatcttcgagaagctggccggcgaggccgccaagctcgcgcgctacaacaagaagcccaccatcacgtcccgcgagatccagacctccgtgcgcctcgtgctccccggcgagctcgccaagcacgccgtctctgagggcaccaaggccgtcaccaagttcacctcctcctaggctgcgcgtgcacgctcgccctttgtaggcttctcttgtgttgatgttccccttgtgttgtagttagatgttgctggtttctctgtcggcgctgctctgcttctgtaggaactgcgtcatgtaacccagcaaggacttgtttatttgtgaatcatcaacactttgttgttgatcacttatgttccaaattctgagtttgacgctggagcatgcctcatttgttgctggaatttgagctggtgggtttgcttaccc

SEQ ID NO: 1843 - DNA, 668 bp, Zea mays
  Clone ID: TF_LIB5116-005-A1-PF1-A4
gaacacccgccgcgaaatcccaaatcaccaaccaaatcccctcctcccgcgtcccgacgagcaccagccgccggacatggacgcctcagccaccggagccggagcgaagtccaagaagggcgcggcggggcgcaaggccggcggccccaggaagaagtcggtgacgcggtccgtcaaggccgggctccagttccccgtcggccgcatcgggcgctacctcaagaatggccggtacgcgaagcgcgtaggcacgggcgcccccgtctacctcgccgtcgtcctcgagtacctggccgccgagctgctggagctcgccgggaacgccgccaaggacaacaaggagtcccgcatcgttcccaggcacctgctgctcgccgtgaggaacgaccaggagctcgggaggctgctggccggcgtgaccatcgcgcacggcggcgtgctgcccaacatcaacccggtgctgctccccaagaagacggcggagaaggagcccaagtcgcccaagaaggctgccaagtcccccaagaaggccgaaaagaaggcttagacagagacgcgcatcgatcgattagcttgtcgtgctctgtagaactaatggtgtagatgtagatctgtgcttccaagaaaaaccaattcagaaatctctcttcgattggcttagccgctgt

SEQ ID NO: 1844 - DNA, 312 bp, Zea mays
  Clone ID: TF_LIB3205-002-P1-N1-B12
gggggggggatacaactatttttcacaacaagggccttaaatttaaaaggaccatttcaatccggcgcgccgggtttataaagcagggaagctagcttcttagccggtagggtgggggactggggaaaggacacagcaaagaacccttctaacaaatccgcggatcccgcaacgcgctcaattgctggtgaacttggtgacggccttggttccctcggagacggcgtgcttggcgagcttttcggggaggactaggcccacggaggtctggatcttccgggacgtgatggtgggctttttgttgtaccgcgc

SEQ ID NO: 1845 - DNA, 684 bp, Zea mays
  Clone ID: TF_LIB4742-007-R1-K1-H9
ggtaccctcgggttcggccgggtaccagcagtcttgattctaccggggggaggagctctagcctgtccatcactcactcgctcgagggcccgaaccaagcagacggctaggaagaccaccggcggaaaggtccggaggaagcaagtggggagtaaagcgagccgcaagtctgcccctgcgactcggcggagggaagaaaccccaccgcttccgccccgggaccggcacgctccgaggagatccgcaagaaccagaagagcacggaactgctgatccgcaagctgccgtgccagcagcctggtgcgggagatcgcgcaggacttcaagaccgacctacgcttccagagctccgctgtctccgcgctgcaggaggcggctgaggcctaccttgtcggactctacgaggacaccaacctctgcgccatccacgccaagcgcgtcaccatcatgcccaaggacatccagcttgcccgccacatccgtggagagagggcctaagcatcatatattctgtcatcagtgcccgatcagaagatgtagagatgtgctgggttctgtagtttgggttactgtcgaatcatcgagtagttggttgttcactgctgtaacttagtatcatgatgcatatgaaatggcaatgaactatgttatcagttctgcaaaaaaaaaaaaaaaaaagcggcc

SEQ ID NO: 1846 - DNA, 565 bp, Zea mays
  Clone ID: TF_LIB4979-048-R1-K1-A12
cttctgagcactttctcctcgtccccgagcaggcaatcgaagccgagatacggccatggactccaccggcaccggagcagggggtaaggggaagaagggagcggccgggcggaagggcggcgggccaaggaagaagtcggtggcgaggtccgtgaaggccgggctccagttccccggcggccgcatcgggcgctacttgaagaagggccgctacgcgcagcgtggcggcaccggcgcccccggctacctcgccggtggcctcgaatacctcgccgctgaggttctggagctcgctggtagtggtgccagggacaacaagaagactcgcattattccgcgccacgggcttctggcgatccggaacgacgaggagcttgggaagcctgctgggcggcgtgaccatcggtcacggcggtggggtccccaatatcaaccctggtctgctggccaagaagacggcggagaaggcgcccagtgtggggacgaaggaggcaaagtcccccacgaaggccgccaagtcccccacgaaggatagactgactgcctggagggatctgatggttag

SEQ ID NO: 1847 - DNA, 564 bp, Zea mays
  unsure (1)..(564): unsure at all n locations
  Clone ID: TF_LIB5024-012-R1-XP1-D8
gcggccgcttcgaggcccggcccgggctcgcggaaaaaaaaaaaaaaaaaaaaaaaaaaacccacttccgcccaaatccaccaccgccataccagcgtgtccgcgattccgtcgagtagactgggcgagagagtagtctcggacgagaagaggcgaatatgagttccggcggcggcaggggcaagcccaaggggtccaaggctgtgtcgcggtcgaccaaggccgggctgcagttccccgtcggccgcatcgcgcgctacctcaaggccggcaagtacgccgagcgcgtcggcggtggtgcgcccgtctacctctccgccgtcctcgagtatctcgcggcagaggtgttggaactggcgggcaacgcggcgcgcgacaacaagaagaaccgcatcgtgccgcgtcacatccagctcgccgtgcgcaacgacgaggaactcagcaagcttgctcggagctgtcaccatcgcncgccggaggtgtgttgcccaacattcatcagacgctgctgcccaagaaggccgggtgggaagggcaaggccgacatcggttccgcatcccagg

SEQ ID NO: 1848 - DNA, 813 bp, Zea mays
  Clone ID: TF_ZmC653_59
ggccgggaaaccccagcgcttaaaaacgcacccgaacccgccactccgaaatctccaaggacatccagcccaaacacggtcaaacacgctccagcctccacccgcacctccgctcccacaccgatggcccgcacgaagcagacggcgcgcaagtccaccggtggcaaggcgccgcggaagcagctggcgaccaaggcagcgcgcaagtcggccccggcgaccggcggcgtgaagaagccgcaccgcttccgcccgggcaccgtggcgctccgcgagatccgcaagtaccagaagagcacggagctgctcatccgcaagttccccttccagcgcctggtccgcgagatcgcgcaggactttaagaccgacctccgcttccagtcctccgccgtcgccgcgctgcaggaggccgcggaagcctacctcgtcggcctcttcgaggacaccaacctctgcgccatccacgccaagcgcgtcaccatcatgcccaaggacatccagctcgcccgccgcatccgcggggagcgcgcttaggcgtttacggttgattgtcactactgtaggtgtttaggctatgttctcgccatgttctaggtctgcttcgttcttatttgtttttttggtttcatcctgtacgttgatgggtgttgatgagctatcggtgcctgtctgagaaatggagtgatctattggcgccattgttgaacaccatgaagttgcgagctcggacgttataaattcctaccagacataaatatgcatgaacaataccattaactggagatatactgttagactagtatgtctactacg

SEQ ID NO: 1849 - DNA, 664 bp, Zea mays
  Clone ID: TF_ZmC369_53
gaaatctcccgtccccaaatcgaccgagcgaattcaccacagcctcaccgtcccgaatccgcaccaccgatggcacccaaggcggagaagaagccggcggcgaagaagcccgcggaggaggagcccgcgaccgagaaggcggagaaggccccggcggggaagaagcccaaggccgagaagcggctccccgcgggcaagtccgccggcaaggagggcggcgagggcaagaaggggaagaagaaggcgaagaagtccgtggagacctacaagatctacatcttcaaggtgctcaagcaggtgcacccggacatcggcatctcgtccaaggccatgtccatcatgaactccttcatcaacgacatcttcgagaagcttgcggccgagtccgccaagctggcgcgctacaacaagaagcccaccatcacctcccgcgagatccagacctcggtgcgcctcgtcctccccggcgagctcgccaagcacgccgtctccgagggcaccaaggctgtcaccaagttcacctcttcttaggttcgtagtagtgatggctgggtggtgctggtagacatggctcggtttatctggtagggcaagcgatggatgttggtgatgatgatctgcgtgtaattgtgttgttaagaattgtgaaacactgttccacatc

SEQ ID NO: 1850 - DNA, 535 bp, Zea mays
  unsure (1)..(535): unsure at all n locations
  Clone ID: TF_LIB4828-008-R1-N1-F5
nnccggccggggagccaccgcatcgtcgccctcaaattcgttccgtccaggcataggaagaaatcgagcagccaaggagaggagaagatggcctcgtacgaagcagaccgctccgcaagtccaccggaggcaaggccccgcgcatgcagctcgcctaccaaggcggcgaggaagtcggcgccgacgaccggcggcgtgaagaagccccacaggtacaggcccgggacggtggcgctgcgcgagatccgcaagtaccagatgagcacggagctgctgatccggaagttgcccttccagcgcctggtccgcgagatcgctcactacttcaagactgatttgagtttccagagccacgccgtgctgggcctgcaggaagcctgcgagcactccctccagttactgcgctggggcatccagatccagggcatgcagttgctcggcatggccatcatggccccgtcatccagcttggcctactgatcacaaccggacttggccgtgtcctatctggcgccctgcgtggctgtgatctact

SEQ ID NO: 1851 - DNA, 654 bp, Zea mays
  Clone ID: TF_LIB5025-027-A1-XP1-C5
ctgtgcggcgctcgaggcggccgtttccgaaatggaacagtgaaccgtcttctcgcatttcttcccatccgatccccccttctctatcgaaaccgccagctcgccccgcatcgatggtgaccaaggtcgagaagaaatccgcggtgaatataacggcgaaggaggagcccgcggccgagaaggcgcccgccgggaagaattcgaaggcggataatcgggtccccgctggcaagtccgctgtcaaggaaggcgtctaggttatgaggggcaagaagaagggtatgaatgagtgtggagacctacaagatctacatcttcaaggtgctgaagcatgtgcacccggacattggcatctcctcccaggccatgtccatcatgaactccttcattatcgatatcttcgagaagctcgctgctgatgacggcaagctcgtgcgctataacaagaaacctaccatcacctcacgtgagatacagacctccgtgcgcctcgtccttcccggggagctcgccgagcacgccgtctccgatggcacctgggccgactgcgagttcacctcggactatgctgcgcggtcgccgcttgtaggattctctcctgtgttcacgtatcttgctgcatttaggtgctgctgcctgctggcttctatgcat

SEQ ID NO: 1852 - DNA, 664 bp, Zea mays
  Clone ID: TF_LIB4979-037-A1-K1-F8
cggattccgatctcaatctccctagcaatctctatgagtagatcctcgtgcgaagcaaagcgctagcccccttcgtactgtcccgatggcccgcacgaagcagacggcgaggaagtccactggcggcaaggcgccaaggaagcagctggccaccaaggcggcgcgcaagtctgccccggcgaccggcggagtgaagaagccccaccgtttccgccccgggaccgtcgcgctccgggagatccgcaagtaccagaagagcacggagctgctgatccgcaagctgccgttccagcgcctggtgcgtgagatcgcccaggacttcaagaccgacctccgcttccagagctccgccgtcgccgcgctgcaagaggcgtccgaggcctacctcgtcgggctcttcgaggacaccatcatgcccaaggacatccagctcgcccgccgtatccgtggggagagggcctatgcgtcatcccggtggaggtggaagtagtagtggacgtttctgtcatcactgtctggctagaaggtgtagagatgtgccgggttctgtagtttgggttatcggtcaaatcatgatgtagatgggtctaccctgctgtaatttaactatgactatgcaatggcaatgaagttctcggttatcagctcccgaagaaaaatgaat

SEQ ID NO: 1853 - DNA, 677 bp, Zea mays
  Clone ID: TF_LIB4729-095-Q1-K1-E3
aacaacgatctcagtctccctagcaatctctagcagcagatcctcgtgcgaagcaaagcgctagacttcctactgtaccgatggcccgcacgaagcagacggcgaggaagtccactggcggcaaggcgccaaggaagcagactggccacgaacgatgcgctgcaagtctcgccccgcgcgaccggcgtgagtgaagaagccccaccgcttccgccccggtaccgtcgcgctccgggagatccgcaagtaccagaagagcacggagctgctgatccgcaagctgccgttccagcgcctggtgcgtgagatcgcccaggacttcaagaccgaccttcgcttccagagctccgacgtcgccgcgctgcaggaggtgtccgaggactacctcgtcgggctcttcgaggacaccaacctgtgcgccattcacgccaagcgcgtcaccatcatgcccaaggacatccagctcgcccgccgcatccgtggggagagggcctaggcgtcatcgcggtggtggtggaagttgtagtcgccgattctgtcatcactgtctggctagaaagcgtagagatggatatgtagcttgggatatctgtcgaatcatgatggagctgcgacttcactgctgcaatttaactatgactatgcaatggcaatggagttccctgttatcagttccc

SEQ ID NO: 1854 - DNA, 917 bp, Zea mays
  Clone ID: TF_ZmC2139_5
ttgggaccctcgaagccggccgggagtaaaagcacgtagtgtagtggtttgtcttggtttgctagcactttattaggtggtggttcgattcccatgtataaactttattcttttaaaaaaaaaaaaaaaaaaaaaaaaaaaaaaaaaaaaaaaactgattacaaacccgtcctctgtccgtcctaccaccaccgctcacctcggtttggttttctcccctcttccgcacccgcttctcgctccggattccggattccctctgctctttccctaacgaaggtagccatggcggggagaggtaaggcgatcggctcaggcgccgccaagaaggccacgtccaggagctccaaggctggcctccagttccctgtgggaaggatcgccaggttcctcaaggccggcaagtatgccgagagagtcggcgccggcgcccctgtctacctcgctgccgtgctcgagtatcttgctgctgaggttcttgagctggccggcaatgcggcacgtgacaacaagaagacccgcatcgtaccgcgccacatccagctcgccgtccgcaacgacgaagagctctcccgcttgctgggcacggtgaccatcgctagcggtggtgtaatgcccaacatccataacctgctgctcccgaagaaggccggcggcggcagcgccaaggctgcggctggtgacgaggactaagtccttgactacgcctctggtggcacttccaggatgctgccgtatcaacatgtgtctgtgtagtacgttaggttttcgttgtagttgggtatgtgggttgctgtaacactgctaaactaagttattcttgtgcttgctaaggattaagttctgtatttgttgctataaaaggtgcatcctttgaatgactggttcactaaaaaaaaaaaaaaaaaaggccccta

SEQ ID NO: 1855 - DNA, 431 bp, Zea mays
  Clone ID: TF_LIB4762-070-Q1-K1-F9
gtaccctcgggctgccggatacattacagcgcttagttgtgcgcccacagccaaattttctctccttaatcgcgggtaagctgcactgtgtgctgttcgcccgcaggagccggtagccaaggcggataagggggcggctggagagcttggctgcgcgtgcctcagcaagaacctgctgttgcggagcgaatggccgttctggagataaccctcgcccggatacctccttaggttgcgcagggggggcccgcacaccgcgagggcaccgccgcccccgtctatctcgccgccgtgcttgagtacctcgccgccgaggtgctggagctggccgggaacgcggcgaatgacaacaagaagacgcgcatcgtcccgcgacacttgctcccggcgattcgtaacgacgttgggctctggtggctgctgtctggcgt

SEQ ID NO: 1856 - DNA, 343 bp, Zea mays
  Clone ID: TF_LIB3078-052-Q1-K1-H1
cggacgcgtgcgcgcaggcactcacgatcaggttctgaagccgccccttacgacataggtgtggagccccatttgatcgagtgctgatggcgcccaagggcgagaagaagcccgcggagaagaagccggcggtggagaagggctataagaagccaacggcggtgaaacgcgtgtcgagctaggtgggcggcgagaagaagggaaagtagatggcgaagaagatcgtggagacgtacaagatctacatgattaaggtgctcaagcatgtgcacccggtcattggcatcttgatcaatgccatgtccatcatgaactgcttcatcaacgacatcttctagaagct

SEQ ID NO: 1857 - DNA, 483 bp, Zea mays
  Clone ID: TF_LIB3279-229-Q6-N6-F2
aaagcttaaacgcccttccattttttttaaaacgatcaaataaacgggggtccgccccaaagttgcatagcccaaaaaccttagccgttttcacattggaatcaacgatcttggggaaccaagaagaggggctttgggcattcccaaacacatggggctctaaaagacaggcggactaacggggggctaaacctaggaaacaagacgggggcgaaggccttttttccagggggcagcttaagttgtcatcgtcatcgacgggggaagccttggacaacccaccctttttggggaggaggggctgggggatgttgggcataacccccccgctcgcgatgggggcaccaccaagcagctgggtcagctcctcgtcgttgcccacggggagctggatgtgacccggcacaatgcgggtctttttgttatccctcgctgggttcccagcaagctccaggacctgttgaagcatcgcataaaaacaaa

SEQ ID NO: 1858 - DNA, 599 bp, Zea mays
  unsure (1)..(599): unsure at all n locations
  Clone ID: TF_LIB3592-076-Q1-N6-E11
atgcacgcgctacgctaatcttggnatcctctnatagcggccccgccctcttttttttgtgttttttttttttttttnttttttttttttttttttttttttttttttttttttttttttttttttttttttttaaggggccggggacccaatacaggtacttttttacctaaaagaacattaaccgggcccaaaaaacaaacgcggggggggctaccaccgggggaacccacctaaccggcctacttttggcctactgcaagaaggggacgagggcccctcgcatcgctcgcctaggagctagggaacttggggacgggtttggggccctcggaaaccgggtgcttggggagctcccccggaaggaccaggcggaccgaggtcttgatctcccgggacctaatggggggctttttgttgtaccccgccagtttggccccctccgccgcccggtttttaaaaatttcgttggtgaaggagttcatgatggacatggccttggaccaaatgccaatgtccgggggcacctggttcagcaccctgaaaattaaatcttggacgtttccaccgacttctttgccttttttttcccctttttt

SEQ ID NO: 1859 - DNA, 384 bp, Zea mays
  unsure (1)..(384): unsure at all n locations
  Clone ID: TF_LIB5027-004-R1-XP1-C1
atccccctcgactttcaacttccaaggcccctttttttttctcgatctggaagcgccgcagtagcagctatggacgtgagcggagcaggcggtaaggcgaagaagggcgcggcggggcgcaaggccggcgggccgacgaagaagtcggtgtcgcggggctccagggccgggctgtagttgcccgtcagacgcgtcgggcggtacctaaaaaagggccggtacgcgcagcgtgtaggcacgggtgcccccgtatacttcgccgccgtcctggagtatgtcgcggncgaggtgctcgagctcgccggcaacgcgggaagggacaacaagaagacgcgnatcatcgcgcgacacgtgctcctcggcatccgcaacgacgaggagctc

SEQ ID NO: 1860 - DNA, 443 bp, Zea mays
  Clone ID: TF_uC-zmroteosinte067a12a1
cgtccttttttttttttttttttagaactggtaacagagctcagttgccatttcatatgcatcatgataattaagttacagcagtgagatgattcgacagtaacccaaactacagaacccagcacatctctacatcttctgatcgggcactgatgacagaatatatgatgcttaggccctctccccacggatgcggcgggcaagctggatgtccttgggcatgatggtgacgcgcttggcgtggatggcgcagaggttggtgtcctcgaagagaccgacaaggtaggcctcagccgccttctgcagcgcggagacagcggagctctggaagcgtgggtcggtcttgaagtcctgcgcgatctcccgcaccaggcgctggaacggcagcttgcggatcagcagatccgtgctcttctggtacttgcggatctcccgagcgcgac

SEQ ID NO: 1861 - DNA, 472 bp, Zea mays
  Clone ID: TF_ZmC103364_1
acggttctagatcgcgagcgccgccctttttttttttttttttaaagcttcaagtacccatcagggactaatattaacatgaagttcaaaccaacatccatcacaaaccaactacccttaactggcactaagtttttagggttcaagaaaagaaagcatctaacagaccaaacataacacactagcagatggagtcccagtagcacaatcaggccctttcacccctgatccggcgagccagctgaatgtctttaggcatgatggtcacacgcttagcatggatggcacacaagtttgtgtcctcaaacagacccacaaggtaagcctctgctgcctcctgaagtgcaaggactgcatggctctggaatcgcacatctgtcttgaaatcctgagcaatttccctgacaagcctctgaaatggcagcttccttatgagaagctctgtgctcttctggtacttcctgatttcacg

SEQ ID NO: 1862 - DNA, 388 bp, Zea mays
  Clone ID: TF_uC-zmflteosinte076b05a1
ccttattctttgttaacttaggcgacagtctaggagccggtgaggattcagagagctaggagagctccccggagagcacgaggcgcacggaagtcaggatctcgcgggaagagaaggagggcttcttgatagaccgcgcgagcttggcgggctcagaggcgagcttctcgaagatgtcgttgatgaaagagttcatgatggacatggccttagaggagatgccgatgtccgggtgcacctgcttcagcaccttgaagacgtagatcttgtagggctccacgctgttattgcccttattccggcccctctagccctggccgccctgtttgccggaggactagcccagtgggacacgcttcttcgacttgggcttgttcccgggcggcgc

SEQ ID NO: 1863 - DNA, 812 bp, Zea mays
  Clone ID: TF_ZmC369_147
ttccaaaaaaaaaaaaaaaaaaaaaaagccaacatatctcctcgcatttccttgcaaccgattgccttcccccctcccaacccaagaccgatggcgcccaaggccgagaagaagcccgcggcgaagaagccggcggaggaggagcccgcggcggagaagacgaccgccgggaagaagcccaaggcggagaagcggatccccgctggcaagtccgccggcaaggagggcggcgagggcaagcgtggcaagaagaagggcaagaagagcgtggagacgtacaagatctacatcttcaaggtgctgaagcaggtgcacccggacatcggcatctcctccaaggccatgtccatcatgaactccttcatcaacgacatcttcgagaagctggccggcgaggccgccaagctcgcgcgctacaacaagaagcccaccatcacgtcccgcgagatccagacctccgtgcgcctcgtgctccccggcgagctcgccaagcacgccgtctctgagggcaccaaggccgtcaccaagttcacctcctcctaggcttgcacgctcgccctttgtaggcttctcttgtgttgatgttcgccttgtgttgtagttagatgttgctggtttctctgtcggcgctgctctgcttctgtaggaactgcgtcatgtaacctagcaaggacttgtttatttgtgaatcatcaacactttgttgttgatcacttatgttccaaattctgagtttgacgctggagcatgcctcatttgttgctggaatttgagttggtggtttgcataaacagatgaaatttatttcggtt

SEQ ID NO: 1864 - DNA, 685 bp, Zea mays
  Clone ID: TF_LIB5116-065-A1-PF1-F11
agcattccgatacagcgcaaccgccgccaacaccactcctagcgagtcctcgccgccggagaagcagcaagaagatggccggaaggaagggtggcgacaggaagaaggcggtgacccgctccgtgaaggctgggctccagttccccgtcggccgcatcgggcgctacctcaagaagggccgctacgcccagcgcgtcggctccggcgcccccgtctacctcgccgccgtcctcgagtacctcgccgccggggtcctggagcttgccggcaacgcggccaaggacaacaagaagacccgcatcatcccgcgccacctgctgctggccgtccgcaacgaccaggagctcggcaggctgctggccggcgtcaccatcgcccacggcggcgtgatccccaacatcaactccgtgctgctccccaagaagtccgccgccgccgccgagaagggggccaagtcgcccaagaagaagacctccactaagtcccccaagaagaagaccgcggccaccaaagagtagcaggccccatagcttagccagtgttgcttagatccatttctcatggactaagatgagatcctgtatgtaatgcctgctagtctgtagtgcccgtcagatttgacgagcaaggttgacattgtgatatcagtgagaatggctaaagatgcaatcatttcaatctctgc

SEQ ID NO: 1865 - DNA, 364 bp, Zea mays
  Clone ID: TF_LIB36-021-Q1-E1-G2
aattctctatactgagtcgtattaatgcgtccgccattcgcgagtctccagccaacggcatccagtccactcccatccccctcgaacccgacaaacccgacccgattgcgcccaatggcgataagaagccagcgcgagaagaagccggcggccgaagataatgcggagaagacgaccgcaggttataagcccaagtctgagaagcgcctgccggcctctaagtcctccggcaaggatggcggcgagaagaatgggaagaagaaagccaagaagagcgtgtagacctacaaaatctacatcttcaaggtcctgaagcatgtgcaccccgacattcggatctcctccaagggcatttcaatcatga

SEQ ID NO: 1866 - DNA, 354 bp, Zea mays
  Clone ID: TF_LIB3069-049-Q1-K1-E1
gtcgaccacccgtccggaccgagcgaattgaccacagcttctcaccttcgctattttcgatggcacccaaggcggacgggaagcgggctgctaataaggcggcagaggatgagcccgcgacagagaaggcggataatgctccggcggggaagaagcccaaggccgagaagcgcctcccggcgggcaagttctccggtaaggagggcggctagggcaagaaggggaaaaagaaagcgaagaagtccgtggagacctacaagatctacatctttaaggtgctgaagcacgtgcaccccgacatcggtatcttgttcaagggcatgttcatcatgaactccttcatcaacgacattt

SEQ ID NO: 1867 - DNA, 610 bp, Zea mays
  unsure (1)..(610): unsure at all n locations
  Clone ID: TF_LIB3606-017-Q6-K6-A3
tcctcgtccccgccaagccaatcgcaagccgnanaatacggccatggnactccaccggcaccggagcaggggtaagggaagaaggagcggccgggcgcaggtcggcgggccaaggaagaagtcggtgtcgaggtccgtgaaggccgggctccagttccccgtcggccgcatcgggcgctacttgaagaaggccgctacgcgcagcgtgtcggcaccggcgcccccgtctacctcgccgctgtcctcgaatacctcgccgctgaggttctggagctcgccggtaatgctgccagggacaacaagaagactcgcattattcctctttacgtgcttctggcgatccggaacgacgaggagcttgggaagctgttgggcggcgtgactatcgctcacggcggtgtgctccccaatatcaaccctgttctgctgcccaagaagacggcggagaaggcgtccagtgtggggagcaaggaggcaaagtcgcccaagaaggccgccaagtcccccaagaagcatagactgactgtctggagtgatctgatgtttagcaagaccttgataccagtatgcggggatgcgttagctgtagatggggtcgatgtgcttgtgt

SEQ ID NO: 1868 - DNA, 501 bp, Zea mays
  unsure (1)..(501): unsure at all n locations
  Clone ID: TF_LIB4729-091-Q1-K1-D10
gccccgtncgaactccgaaccccagaacagagaaagctcctcggnctccctgtccccagccttccccgatggnccgnacgaangagacggcgcgcaaggcgacgggcgggaaggcgccgcggaagcagctggcgacgaaggcggcgcgcaagtcggcgccggcgacgggcggcgtgaagaagccgcaccgcttccgcccgggnaccgncgcgctgcgcgagatccgcaagtaccagaagagcacggagttgctgatccgcaagntcccgttccagcgtctggtccgcgagatcgcgcaggacttcaagacggacctccggntccagncctccgccgtcgccgcgctgcaggaggccgccgaggnctacctggtgggnctcttcggggacaccaacctctgtgccatccacgccaagcgcgtcaccatcatgcncaaggacatccagctcgcgcggcgcatccgcggcgagcgcgcctaggncggaatcggntgcggcgcct

SEQ ID NO: 1869 - DNA, 614 bp, Zea mays
  Clone ID: TF_LIB4975-019-R1-K1-C5
aacacagcgaacacatctcctcgctttcttcccatccgatccccccttcgctaccgaatcccctactcgccccgcatcgatggcggccaagtccgagaagaaaccgcggcgaacaagcggcgccaggatcgacccgcgcacgacaacgcagcccgccgagaacaatccgaacgtggagaagcgacgtccccgcgtggcaatgcccgctgccaaggaaggcgactgaggtgagagcgctgagaagaaagccaagaaaagcggggagacctacacatatctacatcttcaaggtgctgaagcaggcgcacccgtacattgccatctcctcctcggccatgtgcatcatgaactccttcattaacgatatcttcgagaagctcgctgctgaggccgccaagctcgcgcgctataacaagaagtctatccatcacctcccgtgagatccagacctccgtgcgcctcgtccttcccggacagatcgacaagcacgccgatctccgacgcgaccgaggacgtcaccgaggtcgcctcgacctactactgcgcggccgccgcttgcatgattctctcctgagttcacgccgcttgcatgtagatacgagctgctgcctgct

SEQ ID NO: 1870 - DNA, 442 bp, Zea mays
  Clone ID: TF_LIB4729-014-R1-K1-D4
cggcgacattttccggcctcccattcctcgcgcggcgaccacccgattcgaagcgtgcggagagaccgaagaagcggaagagatggctcgtaccaagcagactgctcgcaagtccacgggagggaaggctcccaggaagcagcttgccaccaaggctgcccgtaagtctgcccccaccactgctggagtgaagaagcctcaccgctaccgccctggaactggtgccctccgcgagatccgcaagaatcagaaaagcactgtgctgctgatcaggaagctgatcttacagaggctcgtcttgaaaattgcacaggactctaaaactgatttgctgttgcagagccatgcggtgcttgccctccaggaggttaggtgaagcacacctttgatgagctgtttgttgacacgaacctgtgcgccatccatgcttagctgtgggacc

SEQ ID NO: 1871 - DNA, 458 bp, Zea mays
  Clone ID: TF_LIB3116-025-P1-K2-F8
ggccccccgcaagcagttcgccaccaaggtggttaggaagtcggcgccgacaaccggggtgttgaatattcccaataggtgcgggcccggaacagtggcgctgcgcgagatccgcaagtaccagaagagcacggagctcctgatccgcaagctgcccttccagcgctggtgcgcgagatcgcgcaggacttcaagacagacttccggttccagagccactccttgttgtcgctccagtagttcttatttatttttttttctttttatatttttttttatttttttattttttatttttttttaattttgggttgatggttggttgttttttttttttaaataattaatatttattaattattttcttcttttatatatatattattttaaatattttttctttttttctattttttatattttatatatttattttttattaatttatttatttattt

SEQ ID NO: 1872 - DNA, 390 bp, Zea mays
  Clone ID: TF_LIB4730-015-R1-K1-A10
tgtcctggaatccgagagagcttgttccgttcaggcaccaaaagcatgttgccccgccgcgcagaggaagaagagagcacaggcggatggctcgtacgaagcagaccgcccgcatgtccacgggaggcaaggccccccgcaagcagctcgccaccaaggcggtgaggaagtcggcgccgacgaccgttggcgtgaagaagcctcacaggtacaggcccgtaaccgtggcgctgcgcgagatccgcaagtaccagaagagcacggagctgctgatgcgtaagctgccctttcagcgcctggtgcgcgagatcgcgcatgacttgaagacagaccttcggttgcagagtcacgcttgtgctgatactgcatgaggccgtctaggtctacctc

SEQ ID NO: 1873 - DNA, 531 bp, Zea mays
  Clone ID: TF_LIB4730-040-R1-K1-C12
tgcgccctgaaattccttctgtccaggcaggaagatgttggcagccaggagaggataagatggcctcgacgaagcagatcgaccgcaagtccaccgtaggcaaggacacgcgcatgcagctgcgccaccaattcggcgaggatagtcggcgccgactaccggaggggtgaataagccccacatgtacaggcccggcatggtggtgctgtgcgatgatccgcaagtaccagatgatcacggagctggtgatccggatgttgcccttccatcgcctggtccgggagatcgctcaggacttacagacggatctgcgggtccagagacaccccgtcctggtcctacaggaagccggcgaggtctatctagctggcctgttcgaggacaccaacctctgtgccattcacgcaaagcggggtatcatgatgtccaaagacattcagcttgaccgccgcattcgcagtaattgggcgtaagcctatctcgctgccggacccaatggaagaagagggactgaagagtgcaatttggaac

SEQ ID NO: 1874 - DNA, 623 bp, Zea mays
  unsure (1)..(623): unsure at all n locations
  Clone ID: TF_LIB4729-065-R1-K1-F10
aagtatggatgagaggagagagtgtggagagccactttatacacactcgactctcctctctcgcatccgcagcctctcgagctctactccatcccctcgatctcgaagcgcagcagcagcagtcaggcggccatggacgccagcgcagccggagccggcgggaaggcgaagaagggcgcggccgggcgcaaggccggcgggccgaggaagaagtcggtgacgaggtccgtcaaggccgggctgcagttccccgtcggccgcatcgggcggtacctgaagaagggccggtacgcgcagcgcgtcggcacgggcgcccccgtctacctggccgccgtcctcgagtacctggccgccgaggtgctggagctgggcggcaacgcggccaaggacaacaagaagacccgcatcatcccgcgccacgtgctcctggccatccgcaacgacgaggagctcggcaagctgctgtcccgcgttaccatcgcccacgngnggcgtccttcccaacatcaaccncggtgcttctgcccaagaagaccgctgaaaaaggcggcggcccaaggaaggccaagtcgcccagagaggccggccaaagtccccaagaaaggcatagaagggaccgcctt

SEQ ID NO: 1875 - DNA, 525 bp, Zea mays
  unsure (1)..(525): unsure at all n locations
  Clone ID: TF_LIB4762-056-R1-K1-E5
gggtccctcgggccggccggacccgcatcttcctctccccgtcaatccctgtcagaagccttccctccttcactcgctcgatggcccgcaacgaatgcagacggcgaggaagtccaccggcggcaaggcgccgaggaagcagttggcgactaaggcggcccgcaagtctgcccctgcgaccggcggagttaagaagccccaccgcttccgccccggtaccgtcgcgctccgggagatccgcaagtaccagaagagcacagagctgctgatccgcaagctgccgttccagcgcctggtgcgggagatcgcgcaggacttcaagaccgacctacgcttccagagctccgctgtctccgcgctgcaggaggcggctgaggcctaccttgtcggtctcttcgaggacaccaacctttgcgccatccacgccaagcgcgtcaccatcatgcccaaggacatccagctttgcccgccgattcgnggggagagggcctaagcatngtatattctgtcatcagtgcccgatca

SEQ ID NO: 1876 - DNA, 739 bp, Zea mays
  Clone ID: TF_ZmC369_55
ccggccgggaactacggtaactcgtctgctcgcatttcctcccaatccatcccgcctccaaacccgaactccaagtcgccccgcatcgatggcgcccaaggccgagaagaagcccgcggcgaagaagccggcggaggaggagcccgctgccgagaaggcgccggccgggaagaagcccaaggcggagaagcgtgtcccagcaggcaagtccgccggcaaggagggcggcgagggaaagaggggccggaagaagggcaagaagagcgtggagacctacaagatctacatcttcaaggtgctgaagcaggtgcacccggacatcggcatctcccctaaggccatgtccatcatgaactccttcatcaacgacatcttcgagaagctcgccgccgaggccgccaagctcgcgcggtacaacaagaagcccaccatcacctcccgtgagatccagacctccgtgcgcctcgtcctccccggggagctcgccaagcacgccgtctccgagggcaccaaggccgtcaccaagttcacctcgtcctaggctgcgtggcctccgcttgcaggcttccctcgtatgttcgcgtgtcttgctgtagttaggtgctgctgtgtctggtctcctccggtagcaactgttatctgatggaacagtaacaatgcttattgaatccagctagttgcttatttgtggatccaaaaaaaaaaaaaaaaaaaaaagggcggccgccaccgcggtgga

SEQ ID NO: 1877 - DNA, 257 bp, Zea mays
  unsure (1)..(257): unsure at all n locations
  Clone ID: TF_LIB3279-059-P1-K1-H8
gcctcattcatctccattagaaacaccgtcgcacccacactcttccttggggcgcagcccaaagccgcggaacgatgggtcgcgcgaagcatactgcgcgcaagtccacgggcggtaaggtccacaggaagcatattacgaccaaagaatggcgcaaaacggcccctgctaccggcggagagaaaaagccgcaccgcttccgcccgtncaccatggcgctgcgcgagatccgcatgtaccagaagagcacggagttt

SEQ ID NO: 1878 - DNA, 445 bp, Zea mays
  Clone ID: TF_LIB3357-052-P1-K1-D5
gctctaaagtgtccttgccgacgtcactgtccgatccaggtgtgcagactgctatatcctcatctacgttcagaatggtccgcacgaagcaaacgggtcgcaagtggaccggcggtaaggcgccccagatgcatctggccaccaaggcatgcgcgcatgtcggccccggccacagacggaataaagaagccgcaccggttcctcccaggaaccgtgcagcttcgatagatcctgaagcaccagaagagcacggagctgttaatgcggaagctgtcgtgccaacgcctagtgcgagagatcgagcaggacttgaagacggacctgctgtttcagttctctgccgtggctgtgctgcaagaggccgcggatgcgcacctggtggtgctattcgaggacaccaacctgtgcgccattcaagcgatgagggtgaccatcatgcccaaag

SEQ ID NO: 1879 - DNA, 583 bp, Zea mays
  Clone ID: TF_LIB4185-050-R1-K1-D5
aatccaacaatccttggaaaaagggtttttatccccctgaacaaattacttgatttaggggatggacccccagggaatacaaaacaaaattttgggcccaaaaattggccggggggggcacccccaaattaaaacagggcctcctcaagggtggaaccaatttttttcagcacaattgggaatattttaaaaatttccacactaaattggtcctggagcaaccttttagcacgggcctaaaaggccgaggaaaaaaaaaaaaaccgtctttccgggggggggggatttaaaaggaagaaaacttggaaacggccttggggcccttggaaacggggggtttgggaagctccccaggaaggacgagggcccccgaattctggatcccccgggaggttatggggggctttttgttggagcgggcaatcttgggggcctcaacggcccgtttttcaaaaatgtcgttgatgaaggggttcatgatggacatggccttggacaaaatccccttggccgggggcacctggttggccccctggaaaatggaaattttgggcgtctggaccttttttttggcctttttttt

SEQ ID NO: 1880 - DNA, 578 bp, Zea mays
  Clone ID: TF_LIB4976-001-R1-K1-A4
ccatcccgggttcgacgatgtttttgatcgaattccctatggcgctgtaggcttgatgaagaatcccttgcagaagatgtcgacggaggagaaggcctagaatacaaccattgtgaagaagagcgtgcacgtgcaagtagggcgtattgaagaaggtgaagtataaggccaagaacagtggagagatgtacaagatctacatcttcaaggtgctcaaggaggtgcacccggacattggtatctcgtgcatggtcatgtccatcatgaactctttcagtaacgatatcttcgagaagctggctgccgaggccgtcaagctcgctcgctacaacaagaagcccagcataacctcccgggagatccagacttctgttgtgcctcgtccttcccggcgagctcgccaagcactccgtttacgaggacaccaaggttgctacctagttcacttcctcttagattgtcgctccactggtgcgaggtgttctgtttcctttcctcgcaacttaggtgaatgctactaggttcgccccaggaaaaattgctgtgtgtgaattctctaacctattcctacttgtgct

SEQ ID NO: 1881 - DNA, 640 bp, Zea mays
  Clone ID: TF_ZmC369_44
aggcgccccccgggaagaaacccaaggcggagaaacgggtcccccctggcaagtcccctcccaagaaaggcggcgagggcaaaaggggcaaaaaaaagggcaaaaaaagcgtggagacctccaagatttccattttcaaggtgtttaagcaggtgcccccggacattggcatttcctccaaggccatgtccatcatgaactccttcattaacgatatttttgagaagctccctgttgaggcccccaagctcgcgcgctataacaaaaagcctcccctcccctcccgtgagatccagacctccgtgggcctcgtccttcccggggagctcgccaagcaccccgtttccgagggccccaaggccgtccccaagttcccctcggcctagggtgggcggcccccccttgcaggattttttcctgggttcccgtttcttgctgtagttaggggctgctgcccgctgggttctatgtatgttatctatctgtctgtagcaactgtgttatctgataggaccgtaatggtgcttattcaacccagctatatgtttctatgtgaatcatctctctatcggttgttgagtaactttatattgtgatgaagatgtgaatgtgatttataaaatgcgtcagtttctacggt

SEQ ID NO: 1882 - DNA, 649 bp, Zea mays
  Clone ID: TF_LIB4731-015-R1-K1-F11
accctcccctgcctgctttctttccgatcgccaacccagccaaccctccctgcctttcgttaactcacagagggaccgaccggcacccaccgagggcaagaagccagccgggaagaaacacgcccaggaagaaccagcccgcccgccggagaaggatcgctctgggaggaagccaaccgcgggcaagcagctccctcccggaaaaaacatccgccaggaaggcgggggtgacaagcaggagcggacgaaggacagccagaacgagcggacggacaagctctacatacataaggagcggactcaagcgcacccacacatacatatgtacttcatggacaggcacatccagaactaactcattaatgacatacatcagaagcaagccggccaggcaggcaagctcgcccgtcacaaccagaaggacaccatcaattacctggagatacatacatacgtccgtctggctctacctacccagctagctaagcacgcacgctgggagggcaccaacgacggcagcaagcacacctacctctaacttactttctagtaagtacttacgcgcccggcggcgctccgactgactggaaggaatgtcatccgacagaagatctgaccaaggcgatctataattcaggcttgctgactg

SEQ ID NO: 1883 - DNA, 477 bp, Zea mays
  Clone ID: TF_LIB3600-050-Q1-N6-E12
ccccgggaaaattcccagattcccaagttcctaaagaaaggaaaaaaatagcagggggagagatacaacttttttccacaggggggccataaaatctaaggggcccattacaatccggcgcgccggttttatagagcaggcaagctagctactaggcgggtagggggggggactgggaaaaggacacagaaaaaaacccttttaacaaacccggggatcccgaaacgcgctaagttgcggggaaactgggggacggccttggttccctcggaaacggggtgcttggcaagctctccggggaggactaggcccacggaggtctggatctcgcggaacgggagggggggctttttgtggacccgccccagtttgggggcctcgccggccagtttttaaaaaatgtcgttgataaaggagttcatgatggacatggccttggaggatatgccgatgtcggggtgcacctgcttaagcacc

SEQ ID NO: 1884 - DNA, 579 bp, Zea mays
  unsure (1)..(579): unsure at all n locations
  Clone ID: TF_LIB3595-026-Q1-K6-C2
cggtccgnattcccgggctccttgcttttccttgcactggttgcttatcctcctcccatcccagtacggtggcgcccaagtccgagcaagaagcccgcggcgtaagaagccggtggcggaggagcccgcggcgagagaagacgaccgccggggaagaagcccaagggcggagaagcgggtccccgcgggctagtccgccggtaaggagggcggtgagggcaagcgtggctaagaagaagggcatgaagagcgtggagacgtacaagatctacatcttttaggtgctgaagcaggtgcacccggacattggtattttgtccaaggccatgtccattatgaactccttcattaacgacattttctgaaaagctggccggcgaggccgccaagctcgcgcgcttcaacaagaagcctaccatcacgttccgcgagatcctgacctccgtgcgcctcgtgcttcccggtgagctcgccaagcacgctctctctgagggcaccaaggccgtcaccaagttcacctcctcctaggcttgcacgctcgccctttgtaggcatcttttgtgtttgatgttccccttg

SEQ ID NO: 1885 - DNA, 640 bp, Zea mays
  Clone ID: TF_LIB4758-062-R1-K1-D2
ctcgagccgccgggacacaccatgagcaagaaaagctcctcccgtccgcatcgcccctcatctccctcgaccccgacatccccgacccgatggcgcccaaggccgagaagaagccagcggagaagaagccggcggccgaggagaaggcggagaagacgaccgcagggaagaagcccaaggccgagaagcggctgcccgcgtccaagtcctccggcaaggagggcggcgagaagaaggggaagaagaaggccaagaagagcgtggagacctacaagatctacatcttcaaggtgctgaagcaggtgcaccccgacatcggcatatcctccaaggccatgtccatcatgaactccttcatcaacgacatcttcgagaagctggccggcgaggcagccaagctggcgcggtacaacaagaagcccaccatcacgtcccgcgagatccagacctccgtgcgcctagtcctccccggagagctcgccaagcacgccgtctccgagggaaccaaggtcgtcaccaagttcaccagcaactgagcgcgctgcgagatccgcggatctgatagaagggatctttgatgtgggctttccccaggaccctacccggctagggggtaggttggctgatgtataaatcccca

SEQ ID NO: 1886 - DNA, 795 bp, Zea mays
  Clone ID: TF_ZmC877532_1
tgtgcttgaaaagactaccttcagttgtgttgagcattaagcattgtcgcagtcggttgctgaaaaaaaaaaaaaaaaaaaaaaaaaaaaaaaaaaaaatcacagctctcaatcccaatctcccatcacaaaaccaatcctcctccgcgccccgagccccaagagcatcacctgcaagcaatggacgtctcaggcaccggagctggcgctaagggcaagaaaggcgcggccggacgcaaggctggcggccccaggaagaagtcggtgacgcggtccgtcaaggccgggctccagttccccgtcggccgcatcgggcgctacctcaagaagggccgctacgcccagcgcgtcggcaccggcgcccccgtttaccttgccgccgtcctcgagtacctcgccgccgagctgctggagctcgccgggaacgccgccaaggacaacaagaagagccgcatcatcccgcgccacctgctgctcgccgtcaggaacgacgaggagctcggaaagctgctggccggcgtcaccatcgcgcacggtggcgtgatcccgaagatcaacccggtgctcctccccaagaggaccgcggagaaggagggctaggagcccaagtctcccaagaaagcgaccaagtcccccaagaagaccaccaaggcttaatcgacgcgttccatgtcgtagtgttcttcgtagtggtccggtggtgttcctgtagttgtgttgttttatcttgttgtgtgcatgtttaatggaagaatgtcagaaatttctctgacttgcccaaaaattgcggcgtgc

SEQ ID NO: 1887 - DNA, 401 bp, Zea mays
  Clone ID: TF_LIB3227-021-P1-K1-F6
caacggcacgattctcctcctccgtccgcgtagctctcggtttcggcgatgtcggggcgcggcaagggcggcaaggggctgggcaagggcggcgccaagcgccaccgaaggggcttggccacaaccttcaaggcattaacaaacccgccattccttagcttgcccagaaggggcgggttaaaccccttttttggcttattttacaaggagacccgcggcgtgttaaaaattttcttggagaacgtattccgcgacgccgtaacttacaccgagcacgcccgccgaaggaccgtaaccgccatggttgtcgtttacgcgctaaagcgccagggccgaacgctctacggtttcggcggttaggccgcctccctttctgatgctttgatgtgacggccgtggtc

SEQ ID NO: 1888 - DNA, 623 bp, Zea mays
  Clone ID: TF_ZmC200443_1
tcatgtaattaagctgatcataatcgtgctgatattgtgaatgaattccatgcatttccctgtgggacgcatccaccgccacctgaaggatagcgcacaggccggcgagcgggtgggggcgacggcggccgtgtacgcggcggccgtcctggagtacctgacggcggagatcatggagctggccgggaacgcgtgcagggacctcaaggtgaagcgcatcaccccgcggcacctccagctggcggtacgcggggacgaggagctggacaccctgatcaaggccaccatcgccggcggcggcgtcatcccccacatccacagggagctcatcgacaaggctgcctaggaatgacgaaggagcaagcagtctgagaaaaaaacctgagaaccaagtagtaccatgaacctcttgtgggtggcttcgctcttgttgcgttgtcaatctgctgatacatacacatttctcaaaaatagaggcgggcactcgccgcttcatgctcccttggatggttgttcttttcatccatcagctgaacccagctgatcatcccggtcagcattgagaattggtctgtgcatgaacttaatcgataaacagtcaaagagctcaccctttttactct

SEQ ID NO: 1889 - DNA, 635 bp, Zea mays
  unsure (1)..(635): unsure at all n locations
  Clone ID: TF_LIB4979-081-A1-K1-B4
attctgcgatgcttcgatcaccacacagtcgctacgagatcgcttccatcctagctcaatcgatggtccgcaacacgcagacggggaggattccctccgtcgcctaggcgccgaggaagcagatggcgactaaggcggcccgcaagtctgcccctgcgaccggcggagttaagaagccccaccgcttccgccccggtaccgtcgcgctccgggagatccgcaagtaccagaagagcacagagctgctgatccgcaagctgccgttccagcgcctggtgcgggagatcgcgcaggacttcaagaccgacctacgcttccagagctccgctgtctccgcgctgcaggaggcggctgaggcctaccttgtcggtctcttcgaggacaccaacctctgcgccatccacgccaagcgcgtcaccatcatgcccaaggacatccagcttgcccgccgcatccgtggggagagggcctaagcatcgtatattctgtcatcagtgcccgatcagaagatgtagagatgtgctgggttctgtagtttgggttactgtcgaatcatcagntagttggttgttcactgctgtaacttattatcatgatgcatatgaaatggcaatgaactatgttatcagttctcg

SEQ ID NO: 1890 - DNA, 364 bp, Zea mays
  Clone ID: TF_LIB3150-078-P2-N2-D8
tgtaagcaagaaaactagaaaaggctcctgcgggccgcaacgccccgcatgggggtcgaccccgacatccccgacccgatggcgcccaaggcggagaagaagccagcggagaagaagccggcggccgaggagaaggcggagaagacgaccgcagggaagaagcccaaggccgagaagcggctgcccgcgtccaagtcctccggcaaggagggcggcgagaagaaggggaagaagaaggccaagaagagctgggagacctacaagatctacatcttcaaggtgctgtagggaggtgcaccccgtcatcttgtatattctccaaggtcatgtccattattgacttcctttatcaactaactttttt

SEQ ID NO: 1891 - DNA, 385 bp, Zea mays
  Clone ID: TF_LIB4730-007-R1-K1-C6
acagaacgatctcaatctccctagcaatctctagcagcagatcctcgtgcgaagcaaagcgctagcccccttcgtactgtcccgatggcccgcacgaagcagacggcgaggaagtccactggcggcaaggcgccaaggaagcagctggccaccaaggcggcgcgcaagtctgccccggcgaccggcggagtgaagaagccccaccgtttccggcggggcaccgtcgcgctccgggagatccgcaagtaccagaagagcacggagctgctgatccgcaagctgccgttccagcgcctggtgcgtgagatcgcccaggacttgaagaccgaccttcggttccagagctccgacgtcggcgagctggaggaagtgggtgaggcctacc

SEQ ID NO: 1892 - DNA, 609 bp, Zea mays
  Clone ID: TF_ZmC1215011_1
ttttttttttttttaagacccgaaagggcgtttgggctcataaactctataatggcaaatacacgtggttcttgttttgatcgaagaccggtggtcgattgcgaaaggcagctaattggcttgccatttaatatacatcccagctgtagaaagcatgttccaagcgaacgccttaattatcccctaaccgtgatatccctcatgtcaaagcaaaaagtcgtgatccctcccagatactcatgtgagatcgcttagttgcgctcacctcggaggcggcgggccagctggatatccttggactggatagtgacacgcttggcgtggatggcacagaggttggtatcctcaaagagggagacgaggtaggactcaacagactcctggagagcaccgatggcggaagactggaagcggagatcagacttgaagtcctgggcaatctcgcggaccaggcgctggaaggggagctttcggatgaggagctcggtcgacttctggtatcgtcgaatctcacggagagcaacggtaccaggcttgtagcggtgaggcttcttgacacctccggtggatggggcggacttgcgggcagccttggaagcgagctgcttg

SEQ ID NO: 1893 - DNA, 744 bp, Zea mays
  Clone ID: TF_LIB3279-011-H6_FLI
gccgcaccacagctcagctcccacccactcccaaaccctctcgccggagccccagcaacccgccagcaagcaagatggacggcagcaaggcgaagaaggtggcggcgaagaagttcggcgggccgaggaagaagtcggtgaccaagtccatcaaggccgggctccagttccccgtcggccgcatcgggcgctacctcaagaagggccgctacgcccagcgcgtcggctccggcgcccccgtctacctcgccgccgtcctcgagtacctcgcagcagaggtgctggagctggccgggaacgccgccaaggacaacaagaagagccgcatcgtgcccaggcacctgctgctggccatccgcaacgaccaggagctcgggaggctgctgtccggcgtcaccatcgcccacggcggcgtcatccccaacatcaacccggtgctgctccccaagaaggccgccgagaaggctgagaaggccgagaagaccgccaccaagtcgcccaagaaggccaccaagtcccccaagaaggccaccaaggcgtagatctggctccgagcgcccgtgccggtgaactggactgatggtgctccgtcagccctcgtgtgcctagtgtctctgtgttaagttagctgtggtgtgttccagagtgtgttgaagcttgttcttttgctttgccccgccatgtaaccgtgaacgaagaggaagcgtcttgcttcctctgttctgctatatcaatctggtttct

SEQ ID NO: 1894 - DNA, 405 bp, Zea mays
  Clone ID: TF_LIB3632-007-Q1-N6-A9
aaaaaaagcaaatttaatttccattaagaccggggacaacctttacaggggcgggaatgcaagaaaaacaatcaggttccccagcaacggaaaactctttatccctaagattctaaaaacaagcccaaggggcccaagaggcctttgccccccggaaggggaaccaagagaggcccaggtcctacaagcggggccaaagcaacaaccaccccccctggggggaggggggctcgcctcgttaaggccctttcccccctgatgcggcgcccgagctggatgtccttgggcataaaggggacccccttggcggggatggcccaaaggttagtgtcctcaaagagccccacaagggaggccttgggggcctcctgcaacgccccaacgggggaggactggaagcggaaa

SEQ ID NO: 1895 - DNA, 212 bp, Zea mays
  Clone ID: TF_LIB5027-003-R1-XP1-H3
ctctctcgctgctccgatggcccgacgaagcaaacagatggaatcgaccggcggcaaggccccccggaagtagctggctactaaggttgcgcgcaagtcgcccccggccaccggcggcgagaagaagccccaccgcttccgtcccggccccgccgcgctccgcgagatccgccagcaccacaatagcactgagctgatcttccgcaaagctc

SEQ ID NO: 1896 - DNA, 675 bp, Zea mays
  Clone ID: TF_LIB4740-047-R1-K1-C8
cccagtaccgggatagcatacagagcggggctgcagagcagggtagccgaggtagacgtagtagtcgtcactcatgagtcatgagcaaggacaagcatccacaagcacagagcaccacacatgcgtgccgatgatgcaggtgcatggcgacgctcctcctggcgctggtcctacatcgggggcttcgaataactggtagcgtacctggcgctgaaccgctggaatccgtgcttatacctggaagaacagcagctgtgcactgctatttaggtaggtgacctttcagaggctgggtagggaaattggacagtactttaaaactgatttgagtatccagagccatgcggtgatagccctccaggaggctgctgaagcataccttgctagcctgttagaggacaccaacctgtgcgccatccatgctaagcgtgtgaccatcatgccaaaggacattcagctggcaaggaggatccgcggcgagagggcctaatcgccacctcaaacatcgtgacaaaaacatgaagtcctggggttattgttaatctggtgccattgtaaggacatatgagtaggggtttgttttgtggatcgcaagtttctcttctgctactggtgctgctacctttgctggggttattgctagggtcgaatacttaagttaactatgcgctgaca

SEQ ID NO: 1897 - DNA, 573 bp, Zea mays
  unsure (1)..(573): unsure at all n locations
  Clone ID: TF_LIB3606-029-Q1-K6-F11
atcgtcgccctcacaattcgttccgtgccaggcaagggaanaaatcgagcagccaagnagaggagaagaggctcgtacgaagcagaccgcccgcaagtccaccggaggcaaggccccgcgcaagcagctcgccaccaaggcggcgaggaagtctgcgccgacgaccggcggcgtgaagaagccccacaggtacaggcccgggacggtggctctgcgcgagatccgcaagtaccagaagagcacggagctgctgatccggaagttgcccttccagcgcctggtccgtgagatcgctcaggacttcaagacggatctgcggttccagagccacgccgtcctggccctccaggaagccgccgaggcctacctcgtcggcctgttcgaggacaccaacctctgcgccatccacgccaagcgcgtcaccatcatgcccaaagacatccagctcgcccgccgcatccgcggcgagcgcgcgtattcttatctcgcgcccggcccccattgcggcctgaggatggaggagggcaatttgtaaccttatgctgtttgttcgcttttaaaccgcgtggtgaa

SEQ ID NO: 1898 - DNA, 735 bp, Zea mays
  unsure (1)..(735): unsure at all n locations
  Clone ID: TF_LIB4742-076-R1-K1-G12
cctcgaggccggccgtacttnncctggcctcccattcctcgcgcggcgaccacccgattcgaagcgtgcggagagaccgaagaagcgggagagatggctcgtaccaagcagactgctcgcaagtccacgggagggaaggctcccaggaagcagcttgccaccaaggctgcccgtaagtctgcccccaccactggtggagtgaagaagcctcaccgctaccgccctggaactgttgccctccgtgagatccgcaagtatcagaagagcactgagctgctgatcaggaagctgcccttccagaggctcgtcagggaaattgcacaggacttcaaaactgatttgcgtttccagagccatgcggtgcttgccctccaggaggctgctgaggcataccttgttggcctgtttgaggacaccaacctgtgcgccatccatgctaagcgtgtgaccatcatgccaaaggacattcagctggcaaggaggatccgcggcgagagggcctaatcgccacctcaaacatcgtgacaaaaacatgaaggcctggggttattgttaatctggtgccattgtaaggacatatgagtagggtttgttttgtggatcgcaagcttctcttctgctactgttgctggtacctttgctggcgttattgctagcgccgaatacttaagttaactatgcgcctgacaggctggactagcaatgttatgtgcgctgctgcaccttgcgcgaaat

SEQ ID NO: 1899 - DNA, 680 bp, Zea mays
  unsure (1)..(680): unsure at all n locations
  Clone ID: TF_LIB4762-121-Q1-K1-C4
ctcgaggccggccgggctagccaccgcatcgtcgccctcaattcgttccgtccaggcaaggaagaaatcgagcagccaaggagaggagaagatggctcgtacgaagcagaccgcccgcaagtccaccggaggcaaggccccgcgcaagcagctcgccaccaaggcggcgaggaagtcggcgccgacgaccggcggcgtgaagaagccccacaggtacaggcccgggacggtggcgctgcgcgagatccgcaagtaccagaagagcacggagctgctgatccggaagttgcccttccagcgcctggtccgtgagatcgctcaggacttcaagacggatctgcggttccagagccacgccgtcctggccctccaggaagccgccgaggcctacctcgtcggcctgttcgaggacaccaacctctgcgccatccacgcaaagcgcgtcaccatcatgcccaaagacatccagctcgcccggcgcattcgcggngagcgcgcgtaagcgtatctcgcgcccggccccaatggcggcggaaggatggaggagtgcaatttggaactttatgctggttggtcgcttttagacggcgcggcgaagaagtaatggaaaaacggctttacaagtctattttgtgcggtaattcgtggaagccgcttcctcccgaagcgatcttggtaaa

SEQ ID NO: 1900 - DNA, 633 bp, Zea mays
  Clone ID: TF_LIB4979-070-A2-K1-C5
aaaaaaaaactcttgtgtcgtggccgtcggccgtcgctgcgctgcgtcgttccagatttggggaaggaaatccggcaccgagattcgagtcgaaaagtcttttgtgtaggacatcatttgctagatggcgcgtaccaagcagaccgctcgcaagtccactggaggaaaggctcctaggaagcaactcgctacaaaggcagcccggaagtctgcacccacaactggaggagtgaagaagcctcaccgttaccgcccagggactgttgctcttcgtgagatccgcaagtaccagaagagcactgagttgctgattaggaagctgccgttccagaggcttgtcagggagattgctcaggatttcaagacggatctgcgcttccagagccatgccgtgcttgctttgcaggaggcagcagaggcctacctggttggtctcttcgaagataccaatctgtgcgcgatccatgccaagcgcgtgaccatcatgcccaaggacattcagctggcaagaaggatccgtggcgagagggcgtaagtctgtcgacgggcagaagaactctgcgctcgttttgtgtgttcgcctctctcaccctgtaagttttatgagaagatgatcctagtaaactgtacttg

SEQ ID NO: 1901 - DNA, 629 bp, Zea mays
  unsure (1)..(629): unsure at all n locations
  Clone ID: TF_LIB5116-015-A1-PF1-D3
ccctctctaccgaattcttgcttcccttcagttctccaaccacagcgagcgcaagccgaatcccagttcgaagtcctcgacaaggagaaggagagattgatggcgcgtacgaagcagaccgcccggaagtccaccggcggcaaggcgccccgcaagcagctggccaccaaggcggcgaggaagtcggcgccgaccacgggcggcgtgaagaagccccaccgctacaggcccggcaccgtggcgctgcgcgagatccgcaagtaccagaagagcacggagctgctcatccgcaagctgccgttccagcgcctggtgcgggagatcgcgcaggacttcaagacggacctcaggttccagagccacgccgtgctggccctccaggaggccgccgaggcgtacctcgtcgggctctttgaggacaccaacctctgcgccatccacgccaagcgcgtcaccatcatgcccaaggacatccagctcgcccgccgcattcgcggggagcgcgcatagatcaagcgtctgcctactcgacttaggccttgtacaatggngaggtgtttagagagatgcttagaaaaataaatcgggtttttctgaagcaccggtacctatttctatagaaatagaaa

SEQ ID NO: 1902 - DNA, 675 bp, Zea mays
  Clone ID: TF_LIB5116-023-A1-PF1-H6
atattcgcctttccgcacccacactaggtcgccttccgattcgaacctcccccaaatccgcagcagtccacaggaggcgaagccaccgcgatggcccgtacgaagcagaccgcccgcaagtccaccggcggcaaggcgccccgcaagcagctcgccaccaaggcggcgaggaagtcggcgccgaccaccggcggagtgaagaagccccaccgctacaggcccgggaccgtcgccctccgggagatccgcaagtaccagaagagcacggagctgctgatccgcaagctgccgttccagcgcctggtccgcgagatcgcgcaggacttcaagaccgacctccgcttccagtcccacgccgtgctggccctccaggaggcggccgaggcgtacctcgtcgggctgttcgaggacaccaacctgtgcgccatccacgccaagcgcgtcaccatcatgcccaaggacatccagctcgcccgccgcatccgtggcgagagggcctaagccgtcctccccgtcaacgccgttagtggatcggaagtggaatgtgttgcttccggttgtagtttgttcctaattgccgtgctaggtctatcttcttttgtgtagaagaaatatggttgttggagtaagacgaacttgatatgtgatgatgttccttctggtttgcgatgaagc

SEQ ID NO: 1903 - DNA, 755 bp, Zea mays
  Clone ID: TF_ZmC114_10
cccattcctcgcgcggcgaccacccgattcgaagcgtgcggagagaccgaagaagcgggagagatggctcgtaccaagcagactgctcgcaagtccacgggagggaaggctcccaggaagcagcttgccaccaaggctgcccgtaagtctgcccctaccactggtggagtgaagaagcctcaccgctaccgccctggaactgttgcactccgtgagatccgcaagtaccagaagagcactgagctgctgatcaggaagctgcctttccagaggctcgtcagggaaattgcacaggacttcaagactgatttgcgtttccagagccatgcggtgcttgccctccaggaggctgctgaggcataccttgttggcctgtttgaggacaccaacctgtgcgccatccatgctaagcgtgtgaccatcatgccaaaggacatccagctggcaaggagaatccgcggcgagagggcctaatcgccacctcaaacatcgtgacaaaaaacatgaagtcctggggttattgttaatctggtgccattgtaaggacatatgagtagggtttgttttgtggatcgcaagtttctcttctgctactgttgctgctacctttgctggtgttattgctagggtcgaatacttaagttaactatgcgctgacagtctggaccagcagtgttatgtgcgctgctggacttcgcgcgcagagctgtggccgatttgttcgttaatgtcaagaattgtgttacagtgcgtgt

SEQ ID NO: 1904 - DNA, 826 bp, Zea mays
  Clone ID: TF_ZmC114_15
tcagtttgtttgcgcgaaaaaaggttaggaatcctcttgtgtcctggccgtcggccgtcgctgcgtcgttccagatttgggggaaggaaatccggcaccgagattcgagtcgaaaaggacatcatttgctagatggcgcgtaccaagcagaccgctcgcaagtccacaggaggaaaggctcctaggaagcaactcgctacaaaggcagcccggaagtctgcacccacaactggaggagtgaagaagcctcaccgttaccgcccagggactgttgctcttcgtgagatccgcaagtaccagaagagcactgagttgctgattaggaagctgccgttccagaggcttgtgagggagattgctcaggatttcaagacggatctgcgcttccagagccatgccgtgcttgctctgcaggaggcagcagaggcctacctggttggtctcttcgaagataccaatctgtgcgcgatccatgccaagcgcgtgaccatcatgcccaaggacattcagctggcaagaaggatccgtggcgagagggcgtaagtctgtcgacgggaggaagaactctgcgctcgttttgtgtgttcgcttctctcaccctgtaagttttatgagaagataatctagtaaactgtacttggcctgtttgactgtagccgcagtagcatatgcatgcgcatactgttggctgttggcgtgtctggagtcttttatccatccattctagtactacttaataatcgtgatatatcaacgggttgctgaacgtgtatccagacttaactgtgtgtttggctgtctgaacctctgagtcgttattgatgtc

SEQ ID NO: 1905 - DNA, 796 bp, Zea mays
  Clone ID: TF_ZmC114_20
ccgggacttttccggcctcccattcctcgcgcggcgaccacccgattcgaagcgtgcggagagaccgaagaagcgggagagatggctcgtaccaagcagactgctcgcaagtccacgggagggaaggctcccaggaagcagcttgccaccaaggctgcccgtaagtctgcccccaccactggtggagtgaagaagcctcaccgctaccgccctggaactgttgccctccgtgagatccgcaagtatcagaagagcactgagctgctgatcaggaagctgcccttccagaggctcgtcagggaaattgcacaggacttcaaaactgatttgcgtttccagagccatgcggtgcttgccctccaggaggctgctgaggcataccttgttggcctgtttgaggacaccaacctgtgcgccatccatgctaagcgtgtgaccatcatgccaaaggacattcagctggcaaggaggatccgcggcgagagagcctaatcgccacctcaaacatcgtgacaaaaacatgaagtcctggggttattgttaatctggtgccattgtaaggacatatgagtagggtttgttttgtggatcgcaagtttctcttctgctactgttgctgctacctttgctggtgttattgctagggtcgaatacttaagttaactatgcgctgacagtctggactagcagtgttatgtgcgctgctggaccttgcgcgcaatgctgtggccgatttgttcgttaatgtcaagaattgtgttacagtgcgtgcaaaaaaaaaaaaaaaaaagcggcc

SEQ ID NO: 1906 - DNA, 894 bp, Zea mays
  Clone ID: TF_ZmC114_22
cattgggtacctcgaggccggccgggaggaatcctcttgtgtcgtggccgtcggccgtcgctgcgctgcgtcgttccagatttggggaaggaatccggcaccgagattcgagtcgaaaagatccgcggtatcgctcgaccttcaaatacttcggcaacgtcgccggttcaggacatcatttgctagatggcgcgtaccaagcagaccgctcgcaagtccactggaggaaaggctcctaggaagcaactcgctacaaaggcagcccggaagtctgcacccacaactggaggagtgaagaagcctcaccgttaccgcccagggactgttgctcttcgtgagatccgcaagtaccagaagagcactgagttgctgattaggaagctgccgttccagaggcttgtcagggagattgctcaggatttcaagacggatctgcgcttccagagccatgccgtgcttgctttgcaggaggcagcagaggcctacctggttggtctcttcgaagataccaatctgtgcgcgatccatgccaagcgcgtgaccatcatgcccaaggacattcagctggcaagaaggatccgtggcgagagggcgtaagtctgtcgacgggcagaagaactctgcgctcgttttgtgtgttcgcctctctcaccctgtaagttttatgagaagatgatctagtaaactgtacttggcctgtttgactgtagccgcagtagcatatgcatgcgcatactgttggctgtttgtcgtgtctggagtcttttatccatccattctagtactacttaataatcgtgatatatcaccgggttgctaaacgtgtatccagacttaactgtgtgtttggctgtctgaacctcagaatcgttattgatgtcatcccattcgtcc

SEQ ID NO: 1907 - DNA, 847 bp, Zea mays
  Clone ID: TF_ZmC114_24
acgcaggtgtcctaagatgagctcaacgagaaaaaaataaaaatctggtccgcggtcatctgtcagtttgtttgcgcgaaaaaggtgaggaatcctcttgtgtcctggccgtcggccgtcgctgcgtcgttccagatttggggaaggaaatccggcaccgagattcgagtcgaaaagtcttttgtgtaggacatcatttgctagatggcgcgtaccaagcagaccgctcgcaagtccactggaggaaaggctcctaggaagcaactcgctacaaaggcagcccggaagtctgcacccacaactggaggagtgaagaagcctcaccgttaccgcccagggactgttgctcttcgtgagatccgcaagtaccagaagagcactgagttgctgattaggaagctgccgttccagaggcttgtgagggagattgctcaggatttcaagacggatctgcgcttccagagccatgccgtgcttgctctgcaggaggcagcagaggcctacctggttggtctcttcgaagataccaatctgtgcgcgatccatgccaagcgcgtgaccatcatgcccaaggacattcagctggcaagaaggatccgtggcgagagggcgtgagtctgtcgacgggaggaagaactctgcgctcgttttgtgtgttcgcctctctcaccctgtaagttttgtgaaaagataatctagtaaactgtacttggcctgtttgactgtagccgcagtagcgtatgcgcatactattgggctgttgtcgtggtctggagtcttttatccatccattctactacttaataatcgggttgctgaacgtgttccggaaataaaaaaaaaaaaa

SEQ ID NO: 1908 - DNA, 939 bp, Zea mays
  unsure (1)..(939): unsure at all n locations
  Clone ID: TF_ZmC114_26
tggctcccaggaagcagcttgcaaccaaggctgctcgtaagtcggcccccaccactggaggagtgaagaagcctcaccgctaccgccctggaactgttgccctccgtgagatccggaagtaccagaagagcactgagctgctgatcaggaagctgcccttccagaggcttgtcagggaaattgcacaggacttcaagactgatctgcgtttccagagccatgccgtgcttgccctccaggaggctgctgaggcataccttgttgggctgtttgaggacaccaacctgtgcgccatccatgctaagcgtgtgaccatcatgcccaaggacattcagctggcaaggaggatccgtggcgagagggcctaatccccccctcaaatcattgtgacaaaaatgaagtcttgtgtcgtagcaatgaatttaatctggtgccgttgtaaggacatatgagtagggtttgttttgtggatcataagtttctctactgccgcactatgtgttgctgctacctttgctggtgttattactagtgtcgaatgcttaaattgtctagtcatgtaatgcgctgacagtctgtgacgtgtatgcgatgtaggcactgactagtagtgttgtctgcgctgctggatcttgcgcctcattgctgtggctgatttgttcgttaatgtcaagaattgtgttacagtgagtgtatatttgtgcatcgttgcnaaaaaaaaaaaaaaaaaaaaaaaaaaaaaaaaaaaaaaaaaaaaaaaaaaaaaaaaaaaaaaaaagaaaaaaaaaaaaaaaangaaaaaaaaaaaaaaagaaaaaaaagaaaaaaaaaaaaaaaaaaaggggggggcgcttttttgaggtcccaggttttcttaccggggcgtgccaggtaaaattttttttttagggcccctaaaatcaattcaatgggccggct

SEQ ID NO: 1909 - DNA, 815 bp, Zea mays
  Clone ID: TF_ZmC114_28
atctgaggttggggaaaaaagcctcgcgtgtcgcaaaccgctctccgctgatttgggatttgggaggcgctcgaggtaaaccatagtttgtgactcatggctcgtactaagcaaactgctcgcaagtccactggagggaaggctcctaggaagcaacttgccaccaaggctgcccgtaagtctgcacctacaactggaggagtaaagaagcctcaccgttaccgccctggaactgttgctcttcgtgaaatccgcaagtatcagaagagcactgagctgctcataaggaagcttccattccagaggcttgtcagggaaattgcccaggatttcaagactgatctgcgtttccagagccacgcggtccttgcgctgcaggaggctgcggaagcatacctggtgggtctgtttgaggacacaaacctgtgcgccatccacgccaagcgcgtgaccatcatgcccaaggacattcagctggcaaggaggatccgtggcgagagggcgtagtttctctgttactggattggctctggaagtatggtgtgcatctgttcgatgctttgcttttgtggtgcttaacgtttgtgggtgtttgaactccaatgctcattcgtagtggattagttggtaggaagtgctgcgatcttactatgtttttagagtctataattgttgtcgattagtataattgtctaagtgctggtttcgcccatcaacctgatgggttatctgaacctcgaattgatatgttaagttgtgaacttcgttatattgtgtcagcaacggttgcattttattgtgctgaagttttttgt

SEQ ID NO: 1910 - DNA, 852 bp, Zea mays
  Clone ID: TF_ZmC114_30
cattgggtacctcgaggccggccgggacttttccggcctcccattcctcgcgcggcgaccacccgattcgaagcgtgcggagagaccgaagaagcgggagagatggctcgtaccaagcagactgctcgcaagtccacgggagggaaggctcccaggaagcagcttgccaccaaggctgcccgtaagtctgcccccaccactggtggagtgaagaagcctcaccgctaccgccctggaactgttgccctccgtgagatccgcaagtatcagaagagcactgagctgctgatcaggaagctgcccttccagaggctcgtcagggaaattgcacaggacttcaaaactgatttgcgtttccagagccatgcggtgcttgccctccaggaggctgctgaggcataccttgttggcctgtttgaggacaccaacctgtgcgccatccatgctaagcgtgtgaccatcatgccaaaggacattcagctggcaaggaggatccgcggcgagagggcctaatcgccacctcaaacatcgtgacaaaaacatgaagtcctggggttattgttaatctggtgccattgtaaggacatatgagtagggtttgttttgtggatcgcaagtttctcttctgctactgttgctgctacctttgctggtgttattgctagggtcgaatacttaagttaactatgcgctgacagtctggactagcagtgttatgtgcgctgctggaccttgcgcgcaatgctgtggccgatttgttcgttaatgtcaagaattgtgttaaaaaaaaaaaaaaaaaaaaaaaaaaaaaaaaaaaaaaaaaaaaacaaaaaaaaaaaaaaaaaagcggcc

SEQ ID NO: 1911 - DNA, 805 bp, Zea mays
  Clone ID: TF_ZmC114_34
gccggccgggccgtgacttttccggcctcccattcctcgcgcggcgaccacccgattcgaagcgtgcggagagaccgaagaagcgggagagatggctcgtaccaagcagactgctcgcaagtccacgggagggaaggctcccaggaagcagcttgccaccaaggctgcccgtaagtctgcccccaccactggtggagtgaagaagcctcaccgctaccgccctggaactgttgcactccgtgagatccgcaagtaccagaagagcactgagctgctgatcaggaagctgcccttccagaggctcgttagggaaattgcacaggacttcaagactgatttgcgtttccagagccatgcggtgcttgctctccaggaggctgctgaggcataccttgttggcctgtttgaggacaccaacctgtgcgccatccatgctaagcgtgtgaccatcatgcccaaggacattcagctggcaaggaggatccgcggcgagagggcctaatcgccacctcaaacatcgtgacaaaaaaatgaagtcctggggttattgttaatctggtgccattgtaaggacatatgagtagggtttgttttgtggatcgcaagtttctcttctgctactgttgctgctacctttgctggtgttattgctagggttgaatacttaagttaactatgcgctgacagtctggactagcagtgttatgtgcgctgctggaccttgcgcgcgatgctgtggccgattttgttcgttaatgtcaagaattgtgttacagtgcgcgaaaaaaaaaaaaaaaaagcggcc

SEQ ID NO: 1912 - DNA, 868 bp, Zea mays
  Clone ID: TF_ZmC114_35
gccggccggttcggggtccgcggtcatctgtcagtttgtttgcgcgaaaaaggttaggaatcctcttgtgtcgtggccgtcggccgtcgctgcgctgcgtcgttccagatttggggaaggaaatccggcaccgagattcgagtcgaaaaggacatcatttgctagatggcgcgtaccaagcagaccgctcgcaagtccactggaggaaaggctcctaggaagcaactcgctacaaaggcagcccggaagtctgcacccacaactggaggagtgaagaagcctcaccgttaccgcccagggactgttgctcttcgtgagatccgcaagtaccagaagagcactgagttgctgattaggaagctgccgttccagaggcttgtcagggagattgctcaggatttcaagacggatctgcgcttccagagccatgccgtgcttgctttgcaggaggcagcagaggcctacctggttggtctcttcgaagataccaatctgtgcgcgatccatgccaagcgcgtgaccatcatgcccaaggacattcagctggcaagaaggatccgtggcgagagggcgtaagtctgtcgacgggcagaagaactctgcgctcgttttgtgtgttcgcctctctcaccctgtaagttttatgagaagatgatctagtaaactgtacttggcctgtttgactgtagccgcagtagcatatgcatgcgcatactgttggctgtttgtcgtgtctggagtcttttatccatccattctagtactacttaataatcgtgatatatcaccgggttgctaaacgtgtatccagacttaactgtgtgtttggctgtctgaacctcagaatcgttattgatgtcatcccatc

SEQ ID NO: 1913 - DNA, 902 bp, Zea mays
  Clone ID: TF_ZmC114_38
cattgggaccctcgaggccggccggatctgtcagtttgtttgcgcgaaaaaggataggaatcctcttgtgtcctggccgtcggccgtcgctgcgtcgttccagatttggggaaggaaatccggcaccgagattcgagtcgaaaaggacatcatttgctagatggcgcgtaccaagcagaccgctcgcaagtccactggaggaaaggctcctaggaagcaactcgctacaaaggcagcccggaagtctgcacccacaactggaggagtgaagaagcctcaccgttaccgcccagggactgttgctcttcgtgagatccgcaagtaccagaagagcactgagttgctgattaggaagctgccgttccagaggcttgtcagggagattgctcaggatttcaagacggatctgcgcttccagagccatgccgtgcttgctctgcaggaggcagcagaggcctacctggttggtctcttcgaagataccaatctgtgcgcgatccatgccaagcgcgtgaccatcatgcccaaggacattcagctggcaagaaggatccgtggcgagagggcgtaagtctgtcgacgggaggaagaactctgcgctcgttttgtgtgttcgcctctctcaccctgtaagttttgtgaaaagataatctagtaaactgtacttggcctgtttgactgtagccgcagtagcgtatgcatgcgcatactattggctgttgtcgtgtctggagtcttttatccatccattctactactacttaataatcgtgatatatcaccgggttgctgaacgtgtatccagacttaactgtgtgtttggctgtctgaagctctgaatcgttattgatgtcatcccattcgtccggttgtcggttttaacatgttgatgcttgcgagtt

SEQ ID NO: 1914 - DNA, 1286 bp, Zea mays
  Clone ID: TF_ZmC114_40
gggaccctcgaggccgggctgggacttttccggcctcccattcctcgcgcggcgaccacccgattcgaagcgtgcggagagaccgaagaagcgggagagatggctcgtaccaagcagactgctcgcaagtccacgggagggaaggctcccaggaagcagcttgccaccaaggctgcccgtaagtctgcccccaccactggtggagtgaagaagcctcaccgctaccgccctggaactgttgccctccgtgagatccgcaagtatcagaagagcactgagctgctgatcaggaagctgcccttccagaggctcgtcagggaaattgcacaggacttcaaaactgatttgcgtttccagagccatgcggtgcttgccctccaggaggctgctgaggcataccttgttggcctgtttgaggacaccaacctgtgcgccatccatgctaagcgtgtgaccatcatgccaaaggacattcagctggcaaggaggatccgcggcgagagggcctaatcgccacctcaaacatcgtgacaaaaacatgaagtcctggggttattgttaatctggtgccattgtaaggacatatgagtagggtttgttttgtggatcgcaagtttctcttctgctactgttgctgctgctacctttgctggtgttattgctagggtcgaatacttaagttaactatgcgctgacagtctggactagcagtgttatgtgcgctgctggaccttgcgcgcaatgctgtggccgatttgttcgttaatgtcaagaattgtgttacagtgcgtgtaaaaaaaaaaaaaaaaaaaaaaaagggcggccgccatgtactgggagaccaccatcgcgtcggcggtgtcggactaccgcgccgtggacggcggcgtggccgtcgcgcacgcgggcacgtccacggcgcacctcgcccggttcggcgtgggcgtccgcgccgcgcgcgtcgtcacgcggatggaggagtcgtggaccatcgacgacgtggcgttcaacgtgccggggctcggcccggacgccttcataccgccggaggaggtcaggaggagccggtcctacggcgccgccatcgcaggcggcaagtgagctctctataccaccgtgtcagtcagggctcaagcgtctgtgtaacatagtctgcaactgcatagagagagctttgctgtttggtagcttcgtcgtctttgtctgtcttccctttattttgtaacctgtgagtgagtgagtgagtcagtcagagtggcatcggtgatcgtgcatgtacatatatg

SEQ ID NO: 1915 - DNA, 917 bp, Zea mays
  Clone ID: TF_ZmC114_41
tcacaaccgatccagacggcccacccagcgcgaaccggatataccacacggatgccgctctataaataagaccccgcggccagcctactgtacttttccggcctcccattcctcgcgcggcgaccacccgattcgaagcgtgcggagagaccgaagaagcgggagagatggctcgtaccaagcagactgctcgcaagtccacgggagggaaggctcccaggaagcagcttgccaccaaggctgcccgtaagtctgcccccaccactggtggagtgaagaagcctcaccgctaccgccctggaactgttgccctccgtgagatccgcaagtatcagaagagcactgagctgctgatcaggaagctgcccttccagaggctcgtcagggaaattgcacaggacttcaaaactgatttgcgtttccagagccatgcggtgcttgccctccaggaggctgctgaggcataccttgttggcctgtttgaggacaccaacctgtgcgccatccatgctaagcgtgtgaccatcatgccaaaggacattcagctggcaaggaggatccgcggcgagagggcctaatcgccacctcaaacatcgtgacaaaaacatgaagtcctggggttattgttaatctggtgccattgtaaggacatatgagtagggtttgttttgtggatcgcaagtttctcttctgctactgttgctgctacctttgctggtgttattgctagggtcgaatacttaagttaactatgcgctgacagtctggactagcagtgttatgtgcgctgctggaccttgcgcgcaatgctgtggccgatttgttcgttaatgtcaagaattgtgttacagtgcgtgtaaaaaaaaaaaaaaaaaaaaaaaaaaactcgagactagttctctctctctctctcgtgc

SEQ ID NO: 1916 - DNA, 696 bp, Zea mays
  Clone ID: TF_ZmC263831_1
actattcgcccttccgcatccagtttggtcgccttccgattcgaacctccccgaaatccgcagcagtcgacaggaggccaaaggcgccgccatggcccgtacgaagcagaccgcccgcaagtccaccggcggcaaggcgccccgcaagcagctcgccaccaaggcggcgaggaagtctgcgccgacgaccggcggagtgaagaagccccaccgctacaggcccgggaccgtggcgctccgggagatccgcaagtaccagaagagcacggagctgctgatccgcaagctgcctttccagcgcctggtccgcgagatcgcgcaggacttcaagacggacctcaggttccagagccacgccgtgctggccctccaggaggcggccgaggcgtacctggtggggctgttcgaggacaccaacctgtgcgccatccacgccaagcgcgtcaccatcatgcccaaggacatccagctcgcccgccgcatccgtggcgagagggcctaagctgccccctccgccgacgccgttagtgagtcggaatgagttgattctggttgtagtttgttcctaattgctgtgctaggtctctctgcttttgtgtagaagaaatatggttgttggtacaagcaagacgaacttgttatgtgatgatgttacttttggtttgcgatgaagcaaacgtatgtcggagaccccta

SEQ ID NO: 1917 - DNA, 591 bp, Zea mays
  Clone ID: TF_ZmC518114_1
actattcgcctttccgaccctcttccgtcgccgtcgattcgaacctcccccaaatcagcagcagtcgaccggaggcgccgccatggcccgtaccaagcagaccgcccgcaagtccaccggcggcaaggcgccccgcaagcagctcgccaccaaggcggcgaggaagtcggcgccgaccaccggcggagtgaagaaaccccaccgctacaggccggggaccgtggcgctccgggagatccgcaagtaccagaagagcacggagctgctgatccgcaagctgcctttccagcgcctggtccgcgagatcgcgcaggacttcaagacggacctccgcttccagtcccacgccgtgctggccctccaggaggcggccgaggcgtacctcgtcgggctgttcgaggacaccaacctgtgcgccatccacgccaagcgcgtcaccatcatgcccaaggacatccagctcgcccgccgcatccgtggcgagagggcctaagctgtcctctccgtgaacgacggtagtggatcgggatgagttgattccggttgtagtttgttcctaattgctgttctaggtcttaagcttttgtgtag

SEQ ID NO: 1918 - DNA, 775 bp, Zea mays
  Clone ID: TF_ZmC518497_1
agccccactacccaccgccgctctccgagtctcctgaaagttgcaacctctccctctcggcgaatttggggtttctgaggcgcgcgaggtaaaccaaggttttgctcatggctcgtactaagcagaccgctcgtaagtccactggaggaaaggctccaaggaagcagctagccaccaaggctgcccgtaagtctgctcccactactggaggagtgaagaagcctcaccgttaccgccctggaactgttgctcttcgtgagatccgcaagtaccagaagagcacggagctgctcatcaggaagcttccattccagaggcttgttagggagattgcccaggacttcaagactgacctccgcttccagagccatgcggtgctggcccttcaggaggctgcagaggcctacctggtcggtctcttcgaggacaccaacctgtgcgccatccatgccaagcgggtgaccatcatgcccaaggacattcagctggctaggaggatccgtggcgagagggcttaagatgctgtgcttgccttgcctgtgggaatcgctctggcgggcatctgtgtctgcttttgctgctgaacgcttatcatgtgtcgtgaactactaatacttgtcgtgtgtagtaatgtcagtagcgtactctgtgccatactatgttcgtagagctggatcatttgttcgttggtcgtcctaaatcatccacctggtgggtgcttatctgaaccttgcattttatgtctgagaattagtgattgtgtgaaccattatta

SEQ ID NO: 1919 - DNA, 687 bp, Zea mays
  Clone ID: TF_ZmC519633_1
aaacccatccgtcgcgatccacttcaagttccccaaatccccaaccccgcagcgcgcgcaggccgaagcccggttcgcagtcgacgagaagcaggagagatcgatggcgcgtacgaagcagaccgcccggaagtctaccggcggcaaggcgcctcgcaagcagctggccaccaaggcggcgaggaagtcggcgccgaccaccggcggcgtgaagaagccccaccgctacaggcccggcacggtggcgctgcgtgagatccgcaagtaccagaagagcacggagctgctcatccgcaagctgccgttccagcgcctggtgcgggagatcgcgcaggacttcaagacggacctccggttccagagccacgccgtgctggcgctccaggaggctgccgaggcgtacctcgtcgggctcttcgaggacaccaacctctgcgccatccacgccaagcgcgtcaccatcatgcccaaggacatccagctcgcccgccgcatccgcggggagcgcgcctagatcaagcatctgccttggcaacttccatcgccggattgctgcaatgtagtgtagctgtccgttcgtcgcctctggtttcagatcgtgttagcaataggcaataggccactttctattttgttgtaaaaagtatttctggttggttacatagttacaatgactcatttccatat

SEQ ID NO: 1920 - DNA, 905 bp, Zea mays
  Clone ID: TF_ZmC653_105
accgctattcgtgtcctggcatccgcagagagcttgttccgtccaggcaaccaaaaagcaagttgccccgccgcgcagaggaagaagagagcagaggaggatggctcgtacgaagcagaccgcccgcaagtccacgggaggcaaggccccccgcaagcagctcgccaccaaggcggcgaggaagtcggcgccgacgaccggcggcgtgaagaagccccacaggtacaggcccggaaccgtggcgctgcgcgagatccgcaagtaccagaagagcacggagctgctgatccgcaagctgcccttccagcgcctggtgcgcgagatcgcgcaggacttcaagacagacctccgattccagagccacgccgtgctggcgctccaggaggccgccgaggcctacctcgtcggtctcttcgaggacaccaacctctgcgccatccacgctaagcgcgtcaccatcatgcccaaggacatccagctcgcccgccgcatccgtggcgagcgcgcgtagccatcatctccggggatctgatgaatgtctagttaccaaacaaataggctgtattagcgtcgttgttctgtattcgttattttggattcggttgcagtgaaaaacagctttactaatcttatttgtgatctctggtggttgctcgcttctaagcgatcatctgtggtgcaaaattcgggctggttattttgttatggccccgtgtttggtctggcggcctggtccatctcaagtgcccgacggaagttgtcgtgcagcatcatgtgggttttactgcgtcacagctcacgaccatccttctcttccgagatgctaatagttggccgtctatttcactgagataatattaatagttcgacgctgttgctggctgtctaaaaaaaaaaaaaaaaaa

SEQ ID NO: 1921 - DNA, 1604 bp, Zea mays
  Clone ID: TF_ZmC653_107
ccggccgggaaaaaaaaaaaaaaaaaaaaaaaaaaaaaaaaaaaaaaaaaaaaaaaaaaaaaaaaaaaaacctagccaccgcatcgtcgccctcaaattcgttccgtccaggcaaggaagaaatcgagcagccaaggagaggagaagatggctcgtacgaagcagaccgcccgcaagtccaccggaggcaaggccccgcgcaagcagctcgccaccaaggcggcgaggaagtcggcgccgacgaccggcggcgtgaagaagccccacaggtacaggcccgggacggtggcgctgcgcgagatccgcaagtaccagaagagcacggagctgctgatccggaagttgcccttccagcgcctggtccgtgagatcgctcaggacttcaagacggatctgcggttccagagccacgccgtcctggccctccaggaagccgccgaggcctacctcgtcggcctgttcgaggacaccaacctctgcgccatccacgcaaagcgcgtcaccatcatgcccaaagacatccagctcgcccgccgcatccgcggcgagcgcgcgtaggcgtatctcgcgcccggccccagtggcggcggagggatggaggagtgcaatttgtaactttatgctgtttgttcgcttttagacggcgcggcgaagaagtagtgtaaaaacggctttacaagtctattttgtgcggtagttcgtgtaggccgcttcgtcccgaagcgatcttggtaaaagactgatcattcgtgttgccaaacgacacaattcgtatttttttgtgtgccgtgtagaacacggtttgttgttattggaatggtttacccaaacgggcacacagatttcggtgaaccattccaataacaacaaaccgtgttctacacggcacacaaaaaaatacgaattgtgtcgtttggcaacacgaatgatcagtcttttaccaagatcgcttcgggacgaagcggcctacacgaactaccgcacaaaatagacttgtaaagccgtttttacactacttcttcgccgcgccgtctaaaagcgaacaaacagcataaagttacaaattgcactcctccatccctccgccgccactggggccgggcgcgagatacgcctacgcgcgctcgccgcggatgcggcgggcgagctggatgtctttgggcatgatggtgacgcgctttgcgtggatggcgcagaggttggtgtcctcgaacaggccgacgaggtaggcctcggcggcttcctggagggccaggacggcgtggctctggaaccgcagatccgtcttgaagtcctgagcgatctcacggaccaggcgctggaagggcaacttccggatcagcagctccgtgctcttctggtacttgcggatctcgcgcagcgccaccgtcccgggcctgtacctgtggggcttcttcacgccgccggtcgtcggcgccgacttcctcgccgccttggtggcgagctgcttgcgcggggccttgcctccggtggacttgcgggcggtctgcttcgtacgagccatcttctcctctccttggctgctcgatttcttccttgcctggacggaacgaatttgagggcaacgatgcggtctcggccgc

SEQ ID NO: 1922 - DNA, 818 bp, Zea mays
  Clone ID: TF_ZmC653_108
ccggccgggattcactatataaaaaaaaatcctagccaccgcatcgtcgccctcaaattcgttccgtccaggcaaggaagaaatcgagcagccaaggagaggagaagatggctcgtacgaagcagaccgcccgcaagtccaccggaggcaaggccccgcgcaagcagctcgccaccaaggcggcgaggaagtctgcgccgacgaccggcggcgtgaagaagccccacaggtacaggcccgggacggtggctctgcgcgagatccgcaagtaccagaagagcacggagctgctgatccggaagttgcccttccagcgcctggtccgtgagatcgctcaggacttcaagacggatctgcggttccagagccacgccgtcctggccctccaggaagccgccgaggcctacctcgtcggcctgttcgaggacaccaacctctgcgccatccacgccaagcgcgtcaccatcatgcccaaagacatccagctcgcccgccgcatccgcggcgagcgcgcgtaggcgtatctcgcgcccggccccagtggcggcggagggatggaggagggcaatttgtaaccttatgctgtttgttcgcttttagacggcgtggtgaagaactagtgtaaaaacggctttaaagtctattttgtgcggtagttcgtgtaggccgcttcgtcccgaagcgatcttggtaaaagactgatgattcgtgttgccaaacgacacaattcgtattttttttgtgtgccgtgtagaacacggtttgttgttattggaatggttcatcgaaaaaaaaaaaaaaaaaaaaaaaggccccta

SEQ ID NO: 1923 - DNA, 685 bp, Zea mays
  Clone ID: TF_ZmC653_28
ccgggattcgtgtcctggcatccgcagagagcttgttccgtccaggcaaccaaaaagcaagttgccccgccgcgcagaggaagaagagagcagaggaggatggctcgtacgaagcagaccgcccgcaagtccacgggaggcaaggccccccgcaagcagctcgccaccaaggcggcgaggaagtcggcgccgacgaccggcggcgtgaagaagccccacaggtacaggcccggaaccgtggcgctgcgcgagatccgcaagtaccagaagagcacggagctgctgatccgcaagctgcccttccagcgcctggtgcgcgagatcgcgcaggacttcaagacagacctccgattccagagccacgccgtgctggcgctccaggaggccgccgaggcctacctcgtcggtctcttcgaggacaccaacctctgcgccattcacgccaagcgcgtcaccatcatgcccaaggacatccagctcgcccgccgcatccgtggggagagggcctaggcgtcgtcgcggtggaggtggaagtagtagtcgcagtttctgtcatcactgtctggctagaagttgtagagatgtgccggtttatgtagtttgggttattggtcgaatcattatgtagttgggtcttcactgctgtaatttaactatgactatgcaatggcaatgaagttctcgg

SEQ ID NO: 1924 - DNA, 1104 bp, Zea mays
  Clone ID: TF_ZmC653_33
ccggccgggaccgctattcgtgtcctggcatccgcagagagcttgttccgtccaggcaaccaaaaagcaagttgccccgccgcgcagaggaagaagagagcagaggaggatggctcgtacgaagtagaccgcccgcaagtccacgggaggcaaggccccccgcaagcagctcgccaccaaggcggcgaggaagtcggcgccgacgaccggcggcgtgaagaagccccacaggtacaggcccggaaccgtggcgctgcgcgagatccgcaagtaccagaagagcacggagctgctgatccgcaagctgcccttccagcgcctggtgcgcgagatcgcgcaggacttcaagacagacctccggttccagagccacgccgtgctggcgctccaggaggccgccgaggcctacctcgtcggtctcttcgaggacaccaacctctgcgccattcacgctaagcgcgtcaccatcatgcccaaggacatccagctcgcccgccgcatccgtggcgagcgcgcgtagccatcatctccggggatctgatgaatgtctagttaccaaacaaataggctgtattagcgtcgttgttctgtattcgttattttggattcggttgcagtgaaaaaaaaaaaaaaaaaaaaaaaaaaaaaaaaaaaaaaaaaaaaaaaaaaaaaaaaaaaaaaaaaaaaaaaaaaaaaaaaaaaaaaaaaaaaaaaaattttttaaaaaaaaaaaaaaaaaaaaaaaaaaaaaaaaagggccccccctttaaaaaaccccaattttccccccccgcccttccaacttaaaattttttttttgggccccccaaattaaattcccctcccccttttttaacaccccgggacttgaaaaacccctgggttccccaaattaattccctttaaaaaaaacccccttttcccaatttgggtaaaaacaaaaaagcccccccccatccccctttccaaaaatttcccccccctaattgcaaaaggacccccccccttaaccgccccttaaccccccggggttttggggttcccccccaggtaaccctttacttttccaaccccctaagcccccctccttttgcttttttccct

SEQ ID NO: 1925 - DNA, 690 bp, Zea mays
  Clone ID: TF_ZmC653_40
attgggaccctcgaggccggccgggcgctattcgtgtcctggcatccgcagagagtttgttccgtccaggcaaccagaaagcaagttgccccgccgcgtagaggaagaagagagcagaggaggatggctcgtacgaagcagaccgcccggaagtccacgggagggaaggccccccgcaagcagctcgccaccaaggcggcgaggaagtcggcgccgacgaccggcggcgtgaagaagccccacaggtacaggcccggaaccgtggcgctgcgcgagatccgcaagtaccagaagagcacggagctcctgatccgcaagctgcccttccagcgcctggtgcgcgagatcgcgcaggacttcaagacagacctccggttccagagccacgccgtgctggcactccaggaagccgccgaggcctacctcgtcggcctcttcgaggacaccaacctctgcgccatccacgccaagcgtgtcaccatcatgcccaaggacatccagctcgcccgccgcatccgtggcgagcgcgcgtagccatcatctccgaggatctgatgaatgtctagttaccaaaaaaataggccgtattagcgtcgttgttctgtattcgttattttggattcggttgcagtgaaaaacagctttactaaaaaaaaaaaaaaaaaaaaaaaaaaaaaaaaaaaagcggcc

SEQ ID NO: 1926 - DNA, 724 bp, Zea mays
  Clone ID: TF_ZmC653_49
ccggccgggctagcacccgcatcgtcgccctcaaattcgttccgtccaggcaaggaagaaatcgagcagccaaggagaggagaagatggctcgtacgaagcagaccgcccgcaagtccaccggaggcaaggccccgcgcaagcagctcgccaccaaggcggcgaggaagtcggcgccgacgaccggcggcgtgaagaagccccacaggtacaggcccgggacggtggcgctgcgcgagatccgcaagtaccagaagagcacggagctgctgatccggaagttgcccttccagcgcctggtccgtgagatcgctcaggacttcaagacggatctgcggttccagagccacgccgtcctggccctccaggaagccgccgaggcctacctcgtcggcctgttcgaggacaccaacctctgcgccatccacgcaaagcgcgtcaccatcatgcccaaagacatccagctcgcccgccgcatccgcggcgagcgcgcgtaggcgtatctcgcgcccggccccagtggcggcggagggatggaggagtgcaatttgtaactttatgctgtttgttcgcttttagacggcgcggcgaagaagtagtgtaaaaacggctttacaagtctattttgtgcggtagttcgtgtaggccgcttcgtcccgaagcgatcttggtaaaagactgatcattcgtgttgctaaacgaaaaaaaaaaaaaaaaaagcggcc

SEQ ID NO: 1927 - DNA, 806 bp, Zea mays
  Clone ID: TF_ZmC653_66
aaaaattacaaaaaaaaaaaaaaaaaaaaaaaaaaaaaaaaaaaaaaccaaaaaaaaaaaaaaaaaaaaaaaaaaaaaaggaaatttcgtgtcctggtatccgcagagagtttgttccgtccaggcaaccagaaagcaagttgccccgccgcgcagaggaagaagagagcagaggaggatggctcgtacgaagcagaccgcccggaagtccacgggaggcaaggccccccgcaagcagctcgccaccaaggcggcgaggaagtcggcgccgacgaccggcggcgtgaagaagccccacaggtacaggcccggaacagtggcgctgcgcgagatccgcaagtaccagaagagcacggagctcctgatccgcaagctgcccttccagcgcctggtgcgcgagatcgcgcaggacttcaagacagacctccggttccagagccacgccgtgctggcgctccaggaggccgccgaggcctacctcgtcggcctcttcgaggacaccaacctctgcgccatccacgccaagcgtgtcaccatcatgcccaaggacatccagctcgcccgccgcatccgtggcgagcgcgcgtagccatcatctccgaggatctgatgaatgtctagttaccaaaaaataggccgtattagcgtcgttgttctgtattcgttattttggattcggttgcagtgaaaaacagctttactaatcttatttgtggcctctggtggttgcttcgcttctaagcgatcatctgtggtgcaaaattcgtgctggctattttgtcaaaaaaaaactaaaaaaattgaaa

SEQ ID NO: 1928 - DNA, 675 bp, Zea mays
  Clone ID: TF_ZmC653_77
cattgggaccctcgaggccggccggaaattcgtgtcctggtatccgcagagagtttgttccgtccaggcaaccagaaagcaagttgccccgccgcgcagaggaagaagagagcagaggaggatggctcgtacgaagcagaccgcccggaagtccacgggaggcaaggccccccgcaagcagctcgccaccaaggcggcgaggaagtcggcgccgacgaccggcggcgtgaagaagccccacaggtacaggcccggaacagtggcgctgcgcgagatccgcaagtaccagaagagcacggagctcctgatccgcaagctgcccttccagcgcctggtgcgcgagatcgcgcaggacttcaagacagacctccggttccagagccacgccgtgctggcgctccaggaggccgccgaggcctacctcgtcggcctcttcgaggacaccaacctctgcgccatccacgccaagcgtgtcaccatcatgcccaaggacatccagctcgcccgccgcatccgtggcgagcgcgcgtagccatcatctccgaggatctgatgaatgtctagttaccaaaaaataggccgtattagcgtcgttgttctgtattcgttattttggattcggttgcagtgaaaaacagctttactaaaaaaaaaaaaaaaaaaaaaaaagcggcc

SEQ ID NO: 1929 - DNA, 927 bp, Zea mays
  Clone ID: TF_ZmC653_82
gtcctggcatccgcagagagtttgttccgtccaggcaaccaaaaagcgttgccccgccgcgcagaggaagaagagagcagaggaggatggctcgtacgaagcagaccgcccgcaagtccacgggaggcaaggccccccgcaagcagctcgccaccaaggcggcgaggaagtcggcgccgacgaccggcggcgtgaagaagccccacaggtacaggcccggaaccgtggcgctgcgcgagatccgcaagtaccagaagagcacggagctgctgatccgcaagctgcccttccagcgcctggtgcgcgagatcgcgcaggacttcaagacagacctccggttccagagccacgccgtgctggcgctccaggaggccgccgaggcctacctcgtcggcctcttcgaggacaccaacctctgcgccatccacgccaagcgcgtcaccatcatgcccaaggacatccagctcgcccgccgcatccgtggcgagcgcgcgtagccatcatctccgaggatctgatgaatgtctagttaccaaacaaataggccgtattagcgtcgttgttctgtattcgttattttggattcggttgcagggaaaaacagctttactgatcttatttgtgatctctggtggtcgcttcgcttctaagcgatcatctgtggtgctaaattcgtgctggttattctgttatggtcccgtgtttggtctggcggcctggtacatctcaagtgcccgacggaagttggccgttctgcatcatgtcggtttactgcgtcacagctccagctcactaccatccttctcttccgagatgctaatagttggccctctatttcattgagataatgttaatagttcgacgctgttgctggctgtctaataaatttacgattatgatactctgcaagacagtctaccattgtat

SEQ ID NO: 1930 - DNA, 143 bp, Zea mays
  Clone ID: TF_LIB3153-005-Q1-K1-H1.6U0
cgtcttagaatcctgcgcgatcttgcggacgaggcgctgggaggggagcttgcggatgagcagctccgagctcttcaggtacttgcggatctcgcggagcgcaacggagccgaagcggaagcggtgctattttttaacgccga

SEQ ID NO: 1931 - DNA, 914 bp, Zea mays
  Clone ID: TF_ZmC2139_2
gcctgattaaaacccgtcctctgtccgtcctaccaccaccgctcacctcggtttggctttctcccctcttccgcacccgcttctcgctccggattccggattccctctgctctttccctaacgaaggtagccatggcggggagaggtaaggcgatcggctcaggcgccgccaagaaggccacgtccaggagctccaaggctggcctccagttccccgtgggaaggatcgccaggttcctcaaggccggcaagtatgccgagagagtcggcgccggcgcccctgtctacctcgctgccgtgctcgagtatcttgctgctgaggattctgattcaataattggggccctctccgtgttcgttcgtgcaggttcttgagctggccggcaatgcggcacgtgacaacaagaagacccgcatcgtaccgcgccacatccagctcgccgtccgcaacgacgaagagctctcccgcttgctgggcacggtgaccatcgctagcggtggtgtaatgcccaacatccataaccttttgctcccgaagaaggccggcggcggcagcgccaaggctgcggctggtgacgaggactaagtccttgactacgcctggtggcacctccaggatgctgccgtatcaacatgtgtctgtgtagtacgttaggtgttcgttgtagctgggtatgtgggttgctgtaacactgctaaactaagttactcttgtgcttgctaaggattaagttctgtatttgttgctataaaaggtgcatcctttgaatgactggttcatcaatcatagaaaatgttcatagtgtcccaatttgcatttcgtgtgtctggatcatttcgaaatgttgcgctgtgttgatttggaatttatttctgagattgaatgcgaaaaaaaaaaaaaaaaaaggccccta

SEQ ID NO: 1932 - DNA, 544 bp, Zea mays
  Clone ID: TF_LIB4975-040-A1-K1-H3
aactacggtaactcgtctgctcgcatttcctcccaatccatcccgcctccaaacccgaactccaagtcgccccgcatcgatggcgcccaaggccgagaagaagcccgcggcgaagaagccggcggaggaggagcccgctgccgagaaggcgccggccgggaagaagcccaaggcggagaagcgtgtcccagcaggcaagtccgccggcaaggagggcggcgagggaaagaggggccggaagaagggcaagaagagcgtggagacctacaagatctacatcttcaaggtgctgaagcaggtgcacccggacatcggcatctcctctaaggccatgtccatcatgaactccttcatcaacgacatcttcgagaagctcgccgccgaggccgccaagctcgcgcggtacaacaagaagcccaccatcacctccctcgtatgttcgcgtgtcttgctgtagttaggtgctgctgtgtcaggtctcctccggtagcaactgttatctgatggaacagtaacaatgcttattgaatccagctagttgctc

SEQ ID NO: 1933 - DNA, 614 bp, Zea mays
  Clone ID: TF_LIB4764-068-R1-K1-D11
cattgggtacctcgaggccggccgggggttctcctcctgtctccgtcctctcaccaccgctgcctccgcggttcggtttcccgccgagttcgcaagactttgcttcgctcttcgttgcggattccctctggtcatggccggaagaggagagaggcgatcggctcacgagacgccaagaacgacatgtccagcagctccatacgcgccgggctccagttccccgtgggaaggatcgccaggttcctcaaggccggcaagtacgtcgagagggtcggtgccggagcccccgtatacctcgctgccgtgctcgagtatcttgctgctgaggttctctagcttgccggaaacgcggctcgtgacaacaagaagagccgtatcgtcccgcgccacatccagctcgacgaccgcaacgacgaggatctctaccgattgctgtgcacggggaccatcgacagtggctgaagacatgcccgacatccataacctggtgctgtccaagaagactgcctgctaccagcgacaaggctgcagctggtgatgaggactacaccgaccacgactaggctttcatccggtgcagctacctcttgtggacactgccggatcagcttgtg

SEQ ID NO: 1934 - DNA, 2398 bp, Zea mays
  Clone ID: TF_ZmC119_1859
aaaaatacttgtagttccgtgattttttttcaactattatagttattgtcaatgtcacgatctgtttgaatagatttacaacaaatattaactctgaccaattggtccaaaattcctaatgttttattgtcaaacaaatggtctattgttaacgccatccctagttccctatctactcgagcaatattttgatagttcatgtcaaaaaaacctagaagaattttgaaatgtaatctattgtcaggtacatctgaactaggtcctctgagcttcctgatttcatgtttcatacttgcattgcacctgaatttagcaattatgcatcaggcactcatcctattgatgttagcgaatgtagaaaactgcaatgtgtctgtgtggagcattctccagtttgtgtatagcattgaagtatgcttgtaatgttgacaattttggcggaccttttcctaaagcagtagtgtgtatgggcttgctttggcctgccagagcctgactgccaataccaacataacgaagagtcatccatcagagatgaatcaaagagccaagactgatttctctgatagatcattctcttcaagcatggacatattgtcccctttcatggtgggcagcagaagccttcagttcttatgaaatagtaacaataatctagtacttcacaagggctggtattacagtatagcagtccgataagcaatggaaaagccagttcagaagtagggtatctggcaaattcacgaggagttcagccttaatttccttttcagcaaatgatagggaattccgatgtgtctcagaagtcattgcttctgtcatgagcctaaataccttcttgttcatgtttgttttcatgaatatcatcttgccagatggatatatccgactgataccaagatctgcagccatccgccttacatagagctttttcagtagtaactccatatcacggggctcctttccgtatcgtcgacggaggtcttctgtaaactgtatcaaggtccatagatctttctctgcagcttttgccgcttcattgagcaactcaacaggattttccagataacttatgtattcagaagagagacgtggagaaatgtttatatccagctgaacatctttgtatggtactgggactaggcaaaactggtcaacctttgacaagctatcaaaaagcatatcaaagaataaatcgatgccaacatttgcaacatctccagactgttgctcaccaaacaagcttccaaatcccctgatacccatatccttctctgcaacatggaaaccttggccaagctctgaatgctcctcaatagctccgagtcgttgcaactcttgagagcaaagacttatcagtgtagaaaaggtatgcgaagccttctgtacctgatcttcctactcttcctcgtaactgatacagctgggcaagtccatatagttcagcaaactggataatcattgtattggcatgtgcaatatctattccactttcaatgatatgtgtgcagacaagaatttcccacgcgtccgcccacgcgtccgcccacgcgtccgcccacgcgtccgcccacgcgtccggcattcctcccatctcccaagacctcctcagacccgagaagcgcagctgcggccatggacgccaccggcactggagctggagggaaggcgaagaagggagcggccggtcgcaaggccggcgggccgaggaagaagtcggtgacgaggtccgtgaaggccgggctccagttccccgtcggccgcatcgggcgctacctcaagaagggccgctacgcgcagcgcgtcggcagcggtgcccccgtctacctcgcggccgtcctggagtacctcgccgctgaggtcctggagctcgccggcaacgctgccaaggacaacaagaagacgcgcatcgtcccgcgccacgtgctgctggcgatccgcaacgacgaggagctcgggaagctgctgaccggcgtgaccatcgcccacggcggcgtgttgcccaacatcaacccggtcctgctgcccaagaagacggcggagaaggcgtccagcggcgggagcaaggaggccaagtcgcccaagaaggccgccaagtcccccaagaaggcatagggtttggaggcggatccgatgttgtcatgtgtaggttgtaagcgggcaatgtgattggctgtgtatctgcttcgctcaagttgctttatgtcattcctaatggaataggaaatgccgtgtttcttacgcctgcttttggttctgcattctactgaaaaagcgtacgataattaacacattcacctttgaagaatcacgattgaaaagtacattaaatatttgctaatggagattttgggagcgtttgctttaaggaatcaaaaaaaaaaaaaaaaaagtacct

SEQ ID NO: 1935 - DNA, 685 bp, Zea mays
  Clone ID: TF_LIB4979-060-R1-K1-E1
cattccaggaaatctttcggtctcaaccaacctaccggattcgtcgcagtctctcaccctcgtgagtcccgacctcctgtagccgccgcacagatgataccctctgctgctttaacaagccgacgtacacgaggcccgcgagaggaggagcccgcgacatagaacgtggacaaggatccgacgccaaaaaatcccaaggctcgagcatggcgcctcccggcgggaaagatcaacggaggtcgtcagagggcgaagaaggatgacaaagaaagtcaagaacgccgtgcatacctacctcatctgacatcgttcaaggtgtctgtaggtggtggcacccctgcatcggcctctcgtgcaaggccatgtccatcatgaactccttcatcaacgacatcttcgagaatctcgcggccgagtccgccaaagtgctgcgctacgatgagaaggccaccctcacctcccgcgagatgcatacctcggagcgcctcgccctccctggcgagctcggccagcacgccgctctcccagggctctaagggcggtacaaaactcacctcgtcttaacatccttggaatgctcctgtgtgctgccgcatcagcatgtgtctcatgttatgcgatactggtaccgatgaattgtgatatatctgctggtaattcaattatagaattgtgctcatctttc

SEQ ID NO: 1936 - DNA, 261 bp, Zea mays
  Clone ID: TF_700426183H1
ctttctcccctcttccgcacccgcttctcgctccggattccctctgctgttttcctaatgttggttgctatggtggggcgaggtatcgcgattctctttcgcctcgtctatcctgccacgtccatgcgctccaaggctggcctccagttccccgtgggaaggatcgccaggttcctcgcggccggcaagtctgccgagagagtcggcgccggcgcccctgtctacctcgctgccgtgctcgagtctcttgctgctgaggtt

SEQ ID NO: 1937 - DNA, 560 bp, Zea mays
  Clone ID: TF_LIB4668-008-R1-K1-F1
ggaatgttgtctggctcgaggaacaacagcgaacacatctcctcgcatttcttcccatccgatccccccttcgcaaccaaaaccccaactcgccccgcatcgatggcgcccaaggccgagaagaaacccgcggcgaagaagccggcggaggaggagcccgcggccgagaaggcgcccgccgggaagaagccgaaggcggagaagcgggtccccgctggcaagtccgctgccaaggaaggcggcgagggcaagaggggcaagaagaagggcaagaagagcgtggagacctacaagatctacatcttcaaggtgctgaagcaggtgcacccggacattggcatttccttcaaggccatgtccatcatgaacttctttattaacgatatcttcgagaagctcgctggtgagggcggccagcttgcgcgcttttacaagaagcctaccattaccttccgtgagattcaaaccttcgtgcgccttgttctttccggggagcttggcaagcacgccgtcttcgagggcaccaagggcgtcaccaaggttacctcggcctaagctgg

SEQ ID NO: 1938 - DNA, 664 bp, Zea mays
  Clone ID: TF_LIB4744-093-A1-K1-H11
aggccggccgggaccgattttctaatcgtgcgcagaatccctagcagtagccttccatcctcactcgctcgatggcccgcacgaagcagacggcgaggaagtccaccggcggcaaggcgccgaggaagcagctggcgactaaggcggcccgcaagtctgcccctgcgaccggcggagtgaagaagccccaccgcttccgccccggcaccgtcgcgctccgggagatccgcaagtaccagaagagcacggagctgctgatccgcaagctgccgttccagcgcctggtgcgggagatcgcgcaggacttcaagaccgacctacgcttccagagctctgctgtctccgtttttcatgaggcggctgacgcctaccttgtcgggctcttcgaggacaccaacctctgcgccatccacgccaagcgcgtcaccatcatgcccaaggacatccagcttgcccgccgcatccgcggggagagggcctaagcgtcatattttctgtcatcagtgcccgatcagaagatgtagagatatgctgggttctgtagtttgggttactgtcgaatcatcgagtgttggctgttcactgctgtaacttaaaaaattatcatgatgcatatgaaatggcaatgaactctgttatcaaaaaaaaaaaaaaaaaagcggcc

SEQ ID NO: 1939 - DNA, 313 bp, Zea mays
  unsure (1)..(313): unsure at all n locations
  Clone ID: TF_LIB3151-020-Q1-K1-G7
gntgtaaatcacgagcggcttcccttttttttttttttccggcctcccatggctcgcggggcgaccacccgattcgaagcgtgcggatagaccgaataagcgggagagatggctcgcaccaagcagactgctcgcaagtccacgggagggaaggctcccaggaagcagcttgccaccaaggctgcccgtaagtctgcccccaccactggtggaatgaagaaacctcaccgctaccgccctgtaactgatgccctccgttagatccgccagtatcacaagagcactgagctgcttatcaggaaactgcccttcc

SEQ ID NO: 1940 - DNA, 487 bp, Zea mays
  unsure (1)..(487): unsure at all n locations
  Clone ID: TF_LIB3151-020-Q1-K1-G7.R2
cggactaccattgctgggggggggaccacccgattcgaagcgttctttttgaccgaanaacgggagagatggttcgtaccaagcagactgttcgcaagtccattttttgaaggctcccaggaagaatttgtggggggggggggcgtaagtctgcccccaccactggtggagtgaagaagcctcaccgatacccccctggaactgttgccctccgtgagatccgcaagtttcagaagagcactgagctgctgatcaggaagctgccctttcagagctggtcggggaaattgtacaggacttcaaaactgatttgcgtttccagagccatgcggtgcttgccctccaggaggctgctgtggtataccttggtggcctgtttgaggacaccaacctgtgcgccatccatgctaagcgtgtgaccatcatgccaaaggacattcacctggccagggagatccgcggcgagagggcctaatcgtcaactcaa

SEQ ID NO: 1941 - DNA, 255 bp, Zea mays
  Clone ID: TF_LIB3245-607-P1-N1-A2
ccctcaagcgcaagctggctgctcatcgtagtacaatcctaagaagggatggcattccataatacggctatccatgctgtctccgaacacaaggcaacctcgaagagctccaagggcggactcctgttcctcgtcggcaggattgccagggtcctcaaggcgggcaagtacgcggagcgcgtctgcgccggcgcccccgtgtacctcgccgccgtcctctagtacctcgcggctgaagttctagaacttgccccc

SEQ ID NO: 1942 - DNA, 517 bp, Zea mays
  Clone ID: TF_jC-zmXLIB3526P100ab02a1
gcgattcgttacgtccaggcaaggaagaaatcgagcagccaaggagaggagaagatggctcgtacgaagcagaccgcccgcaagtccaccggaggcatggccccgcgcaagcagctcgccaccaaggcggcgaggaagtcggagcctacgaccgtcggcgtgaagaagccccacaggtacaggcccggcaccgtggcgctgcgcgagatccgcaagtaccataagagcacggagctgctcatccggaagttgaccttccagcgcctggtccgtgagatcgctcacgacttcaagacagatctgcggttccagagccacgccgtactggccctccaggaagccgccgaggcctacctcgtcagtctgttcgaggacaccaacctgtgcgccatccacgccaagcgcgtcaccatcatgcccaaagacattcagctcgcccgccgcatccgcggcgagcgcgcgtaggcgtatctcgcgcccggccccagtggcggcagatggatggaggagtgcaatt

SEQ ID NO: 1943 - DNA, 427 bp, Zea mays
  Clone ID: TF_LIB3632-023-Q1-K6-G1
ggaaaatttggcggtcttgtggcgcccatggctgtgtaagaacccggccgtgacggaaggtggcggaggacgagccctcggagaagctgttcccgcggggaagtccccgctggaagaacccaggctgtgaatcggctacctgctggctagtcctgcggcaaggacggcggcgacaagtaagggtactaagaagggcactactagcgtgagagacctacaagagtacctcttcaccgtcctgaagcacgtgcacccctacatcatgatgtactgcaacgccatgtgcatcatgaacttcttcatcaacgacatgttacagaagctggacgagatggccgtcatgcttgcccggtacaacatgaaggccaccatcacctcccgtgtcatccagtacctccgttcgacttgtcctccgcggtgagctcgc

SEQ ID NO: 1944 - DNA, 635 bp, Zea mays
  Clone ID: TF_LIB4742-110-Q1-K1-E8
tcatcttttcgtgtttataatctctaaaatttcccccactctccagtcgcagcagcacctgtagtagccatggacgccagcggagccggtatgaaggggaagaagggtgcggccgcccgcaaggtatgcggccccactaacaagtcatcgacacggcccgtcaaggctgggttgcaattccccgtcgggcgaatcggatgctacctcatgaatggccggaacgcgcagcgcgtgtccactggttcccccgtctacctctccgccgtcctggagtatctcgccgccgaggttctggagttagcagggaacgcgtggatggacaacaagaacacgcgcatcatcccgcgccatctgctcctggcgatccgcaacgaccatgacttcgctcaactgctggcctgcgtcaccatcgcgcacggcgtccccctcccctgcatgcactccgggctcctgccctagaaggaggatatataatgatgtcattcggcgattgcaaggagtcctagtcccccaagaaggtcgccaagcccccctagaatgcttataaagtatgggcttcgtttgggctgagtgctgaaccatgtgcatgtctatatctgtggatgagatgtggcctgctctaccatcgtccttgt

SEQ ID NO: 1945 - DNA, 724 bp, Zea mays
  unsure (1)..(724): unsure at all n locations
  Clone ID: TF_LIB4828-124-R1-N1-B9
ccggccgggacttttccggcctcccattcctcgcgcggcgaccacccnattcgaagcgtgcggagagaccgaagaagcgggagagatggctcgtaccaagcagactgctcgcaagtccacgggagggaaggctcccaggaagcagcttgccaccaaggctgcccgtaagtctgcccccaccactggtggagtgaagaagcctcaccgcttccgccctggaactgttgccctccgtgagatccgcangtatcaaaagagcactgagctgctgatcaggaagctgcccttccngaggctcgtcagggaaattgcacaggacttcanaactgatttgcgttaccagagccatgcggtgcttgccctccnggaggctgctgaggcataccttgttggcctgtttgaggacaccaacctgtgcgccatccatgctnagcgtgtgaccatcatgccnaaggacattcanctggcaaggaggatccgcggcgagagggcctaatcgccacctcaaacatcgtgacaaanacatgaagtcctggggttattgttaatctggtgccattgtaaggactatnaantagggtttggtttttgtggatcgcaagtntctcttctgctactgttgctgctacctttgctggtgttattgctagggtcgaatacttaagttaactatgcgctgaacgtctggactagcantgttatgtgcgctgctngacttgcgcgc

SEQ ID NO: 1946 - DNA, 694 bp, Zea mays
  Clone ID: TF_LIB4766-001-QB-K6-D11
gccggaaaaaaaaaaaaaaaaaaaaaaaaaaaaaaaaaaaaaaaaaaaaaaaaaaaaaaaaaaaaaaaaaaaaaaaaaaaaaaaaaaaggaaaaggcttcttttccgggttttcagccaaccggattcaggccacccccattccccttgaccccgaaaaacccgacccggtggggcccaaggccggaaaaaagcccggggaaaaaaaaccgggggccggggaaaaggggggaaaaaccaccggaggtaaaaagcccaagtccgaaaagggcctggcggccttaaaatccttcggcaaggggggcgggggaaaaaaggggaaaaaaaaggccaaaaaaaggggggggacctacaaaatttacatttttaagggcctgaagcaggggccccccgacattgggattttcttcaagggcatggccattatgaacttctttattaacgacatttttcaaaagcttgccgggggggcccccaaatttgggggggacaaaaaggagcccaccattaccttccgggggaaccaaaccttcgggggccttggtcttccagggggggttggcaaaaatgccggtttcgggggaaccaagggcggccccaagttccccaacaattggaccgcctggaggggccacggatttgttagggctcccctttttacaagggttttttggcggggcctttacccctccccg

SEQ ID NO: 1947 - DNA, 504 bp, Zea mays
  unsure (1)..(504): unsure at all n locations
  Clone ID: TF_LIB5026-022-B1-XP1-A5
gccggccgggctgcggagaacgatctcaatctccctagcaatctctagcagcagatcctcgtgcgaagcaaagcgctagcccccttcgtactgtcccgatggcccgcacgaagcagacggcgaggaagtccactggcggcaaggcgccaaggaagcagctggccaccaaggcggcgcgcaagtctgccccggcgaccggcggagtgaagaagccccaccgtttccgccccggcaccgtcgcgctccgggagatccgcaagtaccagaagagcacggagctgctgatccgcgctgcaggaggcgtccgaggcctacctcgtcgggctcttcgaggacaccaacctctgcgccattcacgccaagcgcgtcaccatcatgcccaaggacatccagctcgcccgccgtatccgtggggagagggcctaggcgtcgtcccggtggaggtggaagtagnagtcgccgtttctgtcatcactgcctgcttataaggtgtttacatctgcc

SEQ ID NO: 1948 - DNA, 553 bp, Zea mays
  Clone ID: TF_jC-zmshLIB3587P009f02a1
gcggtcgtccttttttttttttttagacaagcacatatttattcaattgttttggaagcagaggtgtttttaattgtaaccgagttcgatgtaacaaagcacagcgcaaccaatttgttccttccgattggtttggatcatacaagatgctgaaatccccggaaatgatgggtacacccgctcgccacggatgcggggggcaagctggatttccttgggcatgatggggacccgcttatcggggatggcccataggttggtgccccctaaaagaccgacgagggaggccttgggggcctcctggaacgccagcacggggtggttttgaaaccggagggctgttttgaagtcctgggggatctcgcgcaccaagcgctgaaagggcaatttggggatcaccagctcctggcttttttggaacttggggatctcgcgcagcgccacggttccgggcctgtacctggggggctttttcacgccgccggtcgtgggggccaacttcctcgcccccttggtggcaaactgcttgcggggggccttgcctcccgtggac

SEQ ID NO: 1949 - DNA, 1556 bp, Zea mays
  unsure (1)..(1556): unsure at all n locations
  Clone ID: TF_ZmC369_151
cattgggtacctcgaggccggccgggaagaaaagcctccattcccgagtctccagccaaccgcatccagtccaccccatccccctcgaccccgacaaccccgagtcccgacccgatggcgcccaaggccgagaagaagccagcggagaagaagccggcggccgaggagaaggcggagaagacgaccgcaggtaagaagcccaagtccgagaagcgcctgcccgcctcgaagtcctccggcaaggagggcggcgagaagaaggggaagaagaaggccaagaagagcgtggagacctacaaaatctacatcttcaaggtcctgaagcaggtgcaccccgacatcggcatctcctccaaggccatgtccatcatgaactccttcatcaacgacatcttcgagaagctcgccggcgaggccgctaagctcgcccggtacaacaagaagcccaccatcacctcccgcgagatccagacctccgtgcgcctcgtcctcccaggagagctcgccaaacacgccgtctccgagggaaccaaggccgtcaccaagttcaccagcaattgagcagcctccagcgtccacggatttgttaggtctccccttcttacaagggttcttcgtcgtgtcctctacccctcccctccccgcctatgtatgtgctgtgaaatcgttgatgttctcgtcgggtgaacaaaggccagtagctagcttgcctgcttcataaatcgtgccggattgtaatgggcctcttagatttggcgcccctgttttggaatatagttgtatccgtgccttccctgcttaaaaaaaaaaaaaaaaaaaagcggccgcttttttttttttttttttcagcacaatttggaatatattagaaatttccacactacattgttcctcgggcaacctagtagcactggcctaaagtacgaggaaacgaaacagagccgtcgcaccgtgcggcggcgatctaagaggaagtgaacttggtaacagccttggtgccctcggagacggcgtgcttggcgagctcgccgggaaggacgaggcgcaccgaagtctggatctcccgggaggttatggtgggcttcttgttgtagcgggcgagcttggcggcctcggcagccagcttctcgaagatgtcgttgatgaaggagttcatgatggacatggccttggacgagataccaatgtccgggtgcacctgcttgagcaccttgaagatgtagatcttgtacgtctcgacgctcttcttggccttcttcttccccttcttctcgccgccctccttgcccggcacgcgcttctccgccctgggcttcttctcggccttctcctccgtcggcttcttctccgcgggcttcttctcggccttgggcgccatcgggaattcgatcaaatggagcggcgaacgcgggatgggaagcggcggattgggaatttgttgattggaggtgacgagcgctggtggctttggctgtgtgcctaattttttttttttttttttttttttttttttttttttttttttttttttttttttnnggattttttccccggcc

SEQ ID NO: 1950 - DNA, 853 bp, Zea mays
  Clone ID: TF_ZmC369_38
gcgattgggttcctcgaggccggccaggatatagaaatcgaccgagcgaatcctcgcttcgcagtcgcagcctttcctgcatcacaccaccgcgaaaccccagcagccgcatcgatggcgcccaaggcggagaagaagcccgctgcgaagaagccagcggaggaggagcccgctgccgcgaaggccccggcggggaagaagcccaaggccgagaagcgcctcccggcggccaagtcgtccggcaaagaaggcggcgacaagaagggcaagaagaaggcgaagaagtcggtggagacctacaagatctacatcttcaaggtgctgaagcaggtccaccccgacatcggcatctcttccaaggccatgtccatcatgaactccttcatcaacgacatcttcgagaagctggccggcgaggccgccaagctcgcgcgctacaacaagaagcccaccatcacctcccgcgagatccagacctccgtgcgcctcgtgctccccggcgagctcgccaagcacgccgtctctgagggcaccaaggccgtcaccaagttcacctcctcctaggcttgcacgctcgccctttgtaggcttctcttgtgttgatgttcgccttgtgttgtagttagatgttgctggtttctctgtcggcgctgctctgcttctgtaggaactgcgtcatgtaacccagcaaggacttgtttatttgtgaatcatcaacactttgttgttgatcacttatgttccaaattctgagtttgacgctaaaaaaaaaaaaaaaaaaaaaaaaaaaaaaaaaaaaaaaaaaaaaaaaaaaaaaaaaaaaaaaaaaaaaaaaaggggcgggcggttttaa

SEQ ID NO: 1951 - DNA, 966 bp, Zea mays
  Clone ID: TF_ZmC369_134
ttgggtacctcgaggccggccgggacaaatgtaagtgagagccaacaaattctcattggtaattaaattattatgtatgtaccatgccattgtaattttgtatgcttactactactactaccactacaacacttgttgcttcatttttcttttaaacttgtactgagaaacagaaccatcaattttctctgccttctcattgtgcaataaaattcttaccttgaaaaaaaaaaaaaaaatagaaatcgaccgagcgaatccctcgcatcgcattcgcagcctttgctgcatcacaccaccgcgaaaccccagcagccgcatcgatggcgcctaaggcggagaagaagccggctgcgaagaagccagcggaggaggagcccgctgccgcgaaggccccggcggggaagaagcccaaggccgagaagcgcctcccggcggccaagtcgtccggcaaagaaggcggcgacaagaagggtaagaagaaggcgaagaagtcggtggagacctacaagatctacatcttcaaggtgctgaagcaggtccacccggacatcggcatctcttccaaggccatgtccatcatgaactccttcatcaacgacatcttcgagaagctcgccggcgaggctgccaagcttgcgcgctacaacaagaagcccaccatcacctctcgggagattcaaacctctgtccgccttgtccttcccggcgagctcgccaagcacgcggtctccgagggcaccaaggccgtcactaagttcacatcatcttagatttgaggtagtagctattgggtggcgttggtagctgtgtctcaatttgtctgctactaatagtggtaggagtatccatgtgtagttgggttgcggtaagaattgtgttaaactggcaatatgtttgaaattgctttttatggatgtggaatagttgtgttgcttgtccaaaaaaaaaaaaaaaaaagcggcc

SEQ ID NO: 1952 - DNA, 751 bp, Zea mays
  Clone ID: TF_ZmC369_150
cggggggaaaatacaaaaaaaaatagaaatcgaccgagcgaatccctcgcatcgcattcgcagcctttgctgcatcacaccaccgcgaaaccccagcagccgcatcgatggcgcccaaggcggagaagaagccggctgcgaagaagccagcggaggaggagcccgctgccgcgaaggccccggcggggaagaagcccaaggccgagaagcgcctcccggcggccaagtcgtccggcaaagaaggcggcgacaagaagggtaagaagaaggcgaagaagtcggtggagacctacaagatctacatcttcaaggtgctgaagcaggtccaccccgacatcggcatctcttccaaggccatgtccatcatgaactccttcatcaacgacatcttcgagaagctcgccggcgaggctgccaagcttgcgcgctacaacaagaagcccaccatcacctctcgggagattcaaacctctgtccgccttgtccttcccggcgagctcgccaagcacgcggtctccgagggcaccaaggccgtcactaagttcacatcatcttagatttgaggtagtagctattgggtggcgttggtagttgtgtctcaatttgtctgctactaatagtggtagcagtatccatgtgtagttgggttgtggtaagaattgtgttaaactggtaatacgtttgaaattgctttttatggatgtggaatagttgtgtgttgcttgtcaaaaaaaaaaaaaaaaaagcggcc

SEQ ID NO: 1953 - DNA, 922 bp, Zea mays
  Clone ID: TF_ZmC369_72
accgtcgccttccccgtttcgtcttccggtcctcgttttatcccctcgcccttgcactcctccgccgcacccctttcctccttccgccctccgccgcgcctggctttctcccttcccgagaggccacgctccatccccgcccgcgctgcctcccctggcgatcggcggcgaccgcggcccaacgaaagcgtcgtggtcggccgctgtcacgcttcttgcagacgctgggcggactgggaacaaaccccagcagccgcatcgatggcgcccaaggcggagaagaagccggctgcgaagaagccagcggaggaggagcccgctgccgcgaaggccccggcggggaagaagcccaaggccgagaagcgcctcccggcggccaagtcgtccggcaaagaaggcggcgacaagaagggtaagaagaaggcgaagaagtcggtggagacctacaagatctacatcttcaaggtgctgaagcaggtccaccccgacatcggcatctcttccaaggccatgtccatcatgaactccttcatcaacgacatcttcgagaagctcgccggcgaggctgccaagcttgcgcgctacaacaagaagcccaccatcacctctcgggagattcaaacctctgtccgccttgtccttcccggcgagctcgccaagcacgcggtctccgagggcaccaaggccgtcactaagttcacatcatcttagatttgaggtagtagctattgggtggcgttggtagttgtgtctcaatttgtctgctactaatagtggtaggagtatccatgtgtagttgggttgtggtaagaattgtgttaaactggtaatacgtttgaaattgctttttatggatgtggaatagttgtgtgttgcttgttctacgtttgatttctatctggatgcgattctcttatcttgg

SEQ ID NO: 1954 - DNA, 770 bp, Zea mays
  Clone ID: TF_ZmC369_74
actccatagggcgattgggttcctcgaggccggccacggccatagaaatcgaccgagcgaatcctcgcttcgcagtcgcagcctttcctgcatcacaccaccgcgaaaccccagcagccgcatcgatggcgcccaaggcggagaagaagcccgctgcgaagaagccagcggaggaggagcccgctgccgcgaaggccccggcggggaagaagcccaaggccgagaagcgcctcccggcggccaagtcgtccggcaaagaaggcggcgacaagaagggcaagaagaaggcgaagaagtcggtggagacctacaagatctacatcttcaaggtgctgaagcaggtccaccccgacatcggcatctcttccaaggccatgtccatcatgaactccttcatcaacgacatcttcgagaagctcgccggcgaggctgccaagcttgcgcgctacaacaagaagcccaccatcacctctcgggagattcaaacctctgttcgccttgtccttcccggcgagctcgccaagcacgctgtctctgagggcaccaaggccgtcactaagttcacatcatcttagatttgaggtagtagctattgggtggcgttggtagttgtgtctcaatttgtctgctactaatagtggtaggagtatccatgtgtagttgggttgcggtaagaattgtgttaaactggtaatatgtttgaaattgctttttgtggatgtggaaaaaaaaaaaaaaaaaaatgaagaaaaaaaaaaaagggggggccc

SEQ ID NO: 1955 - DNA, 454 bp, Zea mays
  Clone ID: TF_LIB3279-037-P1-K1-D4
ctcgagttctcctcaaccaaattcaaagtcacagcggttaaactctcggctatctctctcccgccgaaggtctgtaagggtctgggcaagggcagttccaagctccaccgcaaggtgctgcgtgacaacatctatggcatcaccaagccgtcgatccgcaggttggcgaggaggggcggcgtcaagcgcatctccgggctcatctactaggagacccgcggcgtgctcaatatcttcctcgagaacgtcatccgctacgccgtcacctacaccgagcactcccgcctcaagactgttaccgccatggacgttgtctactctttcaagcgccagggccgcaccctctactgtttctgcggttaagtcccccctctcccggtggcaatatacgtggtggctgtcgttattttttcttggtctatttaatctgtgtcgtctttatcggtgctttttt

SEQ ID NO: 1956 - DNA, 566 bp, Zea mays
  Clone ID: TF_LIB4729-103-Q1-K1-C10
cggccgggattaaatttaatcatctcatcttttctctcttacaatctctatgatttcccccactcgtcagtggcagcagcacctgtagcagccatggacgccatcggagccggtacaatggggaacaaaggggcgcccgggagcaaggcagacgtacccagaaagaagtcggagacgcggtccgacaaggtcggtctgcagttccacgccggccggatcgggtgctacctcaagaaggctcgatactggcagcgcgggggaactggcgcgcccgtctacctcgccgccgatatggagtacctcgccgccgaggtactgtagttgttagtcaacgcggtgagagattacaagaggacgcggatcatcccgcgacactggctcctgatgatacgcaaggatctagtgagctcgtcatactgctgtgcgaagactacatggggtactgtaggtgtcctctgcaagatactcttgcggcctcctgtccaagaaggcgttgaagaaggcgagcatcgtggtgagactggacaccctgctatgcaagaagggcgacaatgcccgctgaagga

SEQ ID NO: 1957 - DNA, 505 bp, Zea mays
  Clone ID: TF_LIB4975-015-R1-K1-D6
cgggactccgcaatctccaatctccccagcaatccctagcagaggccttccatcctcactcgctcgatggcccgcacgaagcagacggcgaggaagtccaccggcggcaaggcgccgaggaagcagttggcgactaaggcggcccgcaagtctgcccctgcgaccggcggagttaagaagccccaccgcttccgccccggtaccgtcgcgctccgggagatccgcaagtaccagaagagcacagagctgctgatccgcaagctgccgttccagcgcctggtgcgggagatcgcgcaggacttcaagaccgacctacgcttccagagctccgctgcttactctcttaagggtctctgtgtgggctatcgttaaccctacgatgttaactgctaacagccagcgaaccacaacagtccttgtacttgctccttgatgttatggaggccgctcaagaggttcacagccctggacagttggctcctttcgtgctcttatattcccccaa

SEQ ID NO: 1958 - DNA, 536 bp, Zea mays
  Clone ID: TF_LIB4730-002-R1-K1-F8
tcttccgggacagcgattcacaggctccctagcaatctctagcagcttatgctcgttcgaagccagcgctagccttcctactgtcccgatgggccgcacgaagcagacggtgaggaagtccactggcgggaaggcgccaaggaagcaagtggccacgaaggcggcgcgcaagtctgccccggcgaccggcggagtgaagaagccccaccgattacggcccggaacgtcgcgcttcgggagatacgcatggaccagaagaggacggagctgctgatccgcaagctgccgatccagcgcctggtgcgtgagatcgaccaggacattaagaccgaccttctctttcagagctacatcgtcgacgcgctgcatgaggcgtacgatggctacctcgtcgggctattggaggacaccaacctgtgtgccatttacgccgagcgcgtggccatcatgcccaaggacattcagctcgcccggcggatcccaggggagagggcctaggcgtcatcgctgaggacgaggaagtattagtcgcaggt

SEQ ID NO: 1959 - DNA, 696 bp, Zea mays
  unsure (1)..(696): unsure at all n locations
  Clone ID: TF_LIB4766-002-R1-M1-B10
ggccgcttttttttttttttttttggattcaataagcattgttactgttccatcagataacagttgctaccggaggagaccagacacagcagcacctaactacagcaagacacgcgaacatacgagggaagcctgcaagcggaggccacgcagcctaggacgaggtgaacttggtgacggccttggtgccctcggagacggcgtgcttggcgagctccccggggaggacgaggcgcacggaggtctggatctcacgggaggtgatggtgggcttcttgttgtaccgcgcgagcttggcggcctcggcggcgagcttctcgaagatgtcgttgatgaaggagttcatgatggacatggccttagaggagatgccgatgtccgggtgcacctgcttcagcaccttgaagatgtagatcttgtaggtctccacgctcttcttgcccttcttccggcccctctttccctcgccgccctccttgccggcggacttgcctgctgggacacgcttctccgccttgggcttcttcccggccggcgccttctcggcagcgggctcctcctccgccggcttcttcgccgcgggcttcttctcggccttgggcgccatcgatgcggngcgacttggagttcgggtttggaggcgggatgggattggaggaaatgcgagcagacgagttacccgtagttcccggccgg

SEQ ID NO: 1960 - DNA, 778 bp, Zea mays
  Clone ID: TF_ZmC369_140
ggcacgaggtctgctcgcatttcctcccaatccatcccgcctccaaacccgaactccaagtcgccccgcatcgatggcgcccaaggccgagaagaagcccgcggcgaagaagccggcggaggaggagcccgcggccgagaaggcgccggccgggaagaagcccaaggcggagaagcgtgtcccagcgggcaagtccgccggcaaggagggcggtgagggaaagaggggccggaagaagggcaagaagagcgtggagacttacaagatctacattttcaaggtgctgaagcaagtgcacccggacatcggcatttcctccaaggccatgtccatcatgaactccttcatcaacgacatcttcgagaagctcgctgccgaggccgccaagctcgcgcggtacaacaagaagcccaccatcacctcccgcgagatccagacttccgtgcgcctcgtcctccccggggagctcgccaagcacgccgtctccgagggcaccaaggccgtcaccaagttcacctcgtcctaggctgcgcagcctccggttgcaggcttctctcgtatgttcgcgcgtcttgctgtagttaggtgctgctgtgtctggtctccttctgtagcaactgttatctgatggaacagtaacaatgcttatttaatccagctagttgcttatttgtggatcctctctctttgttgttggccacctttatctcgtgatgtttgtgtgcatgtgaatactctgaatgtgcatttcgaagtttgagaaaaaaaaaaaaaaaaa

SEQ ID NO: 1961 - DNA, 849 bp, Zea mays
  Clone ID: TF_ZmC369_154
aaaaaaaaaaaaaaaaaaaaaaaaaaataaaaaaaaaacggtaactcgtctgctcgcatttcctcccaatccatcccgcctccaaacccgaactccaagtcgccccgcatcgatggcgcccaaggccgagaagaagcccgcggcgaagaagccggcggaggaggagcccgctgccgagaaggcgccggccgggaagaagcccaaggcggagaagcgtgtcccagcaggcaagtccgccggcaaggagggcggcgagggaaagaggggccggaagaagggcaagaagagcgtggagacctacaagatctacatcttcaaggtgctgaagcaggtgcacccggacatcggcatctcctctaaggccatgtccatcatgaactccttcatcaacgacatcttcgagaagctcgccgccgaggccgccaagctcgcgcggtacaacaagaagcccaccatcacctcccgtgagatccagacctccgtgcgcctcgtcctccccggggagctcgccaagcacgccgtctccgagggcaccaaggccgtcaccaagttcacctcgtcctaggctgcgtggcctccgcttgcaggcttccctcgtatgttcgcgtgtcttgctgtagttaggtgctgctgtgtctggtctcctccggtagcaactgttatctgatggaacagtaacaatgcttattgaatccagctagttgcttatttgtggatcctctctctttgttgttggccacctttatctcgtgatgtttgtgtgcatgtgaatactctgaatgtgcatttcgaaaaaaaaaaaaaaaaaaaaaaaaaaaaagagcgaccgctcgcgatctagaactagtc

SEQ ID NO: 1962 - DNA, 741 bp, Zea mays
  Clone ID: TF_ZmC369_47
tctgctcgcatttcctcccaatccatcccgcctccaaacccgagcttccaagtcgccccgcatcgatggcgcccaaggccgagaagaagcccgcggcgaagaagccggcggaggaggagcccgcggccgagaaggctccggccgggaagaagcccaaggcggagaagcgtgtcccagcgggcaagtccgccggcaaggagggcggcgagggaaagaggggccggaagaagggcaagaaaagcgtggagacctacaagatctacattttcaaggtgctgaagcaggtgcacccggacatcggcatttcctccaaggcgatgtccatcatgaactccttcatcaacgacatcttcgagaagctcgccgccgaggccgccaagctcgcgcggtacaacaagaagcccaccatcacctcccgcgagatccagacctccgtgcgcctcgtcctccccggggagctcgccaagcacgccgtctccgagggcaccaaggccgtcaccaagttcacctcgtcctaggctgcgtggcctccgcttgcaggcttctctcgtatgttcgcgtgtcttgctgtagttaggtgctgctgtgtctggtctccttctgtagcaactgttatttgatcgaacagtaacgatgcttattgaatccagctagttgtttatttgtggatcatctctctttgttgttggccacctttatctcgtgatgtttgtgtgcacattcgaaatgccctattaattt

SEQ ID NO: 1963 - DNA, 151 bp, Zea mays
  unsure (1)..(151): unsure at all n locations
  Clone ID: TF_LIB3114-059-P1-K1-G4
agcaggacttcatgacagacctacgtttccagtcctttnccacggccgtgctgcacgaggccgncgagtcctacctcgtgggcctcttcgaggacaccaacctttgtgcgatccacgcagagcgcgttactatcatgctcaaagacatcca

SEQ ID NO: 1964 - DNA, 343 bp, Zea mays
  unsure (1)..(343): unsure at all n locations
  Clone ID: TF_LIB3357-025-P1-K1-G7
cgcatttcttcccatccgatccacagtatcgaaccaaaaccccaactcgctccgcatcgatggcgcccaatgccgagaagaaacccgcggcgaataagccggcggaggaggagcccgcggccgagaaggcgcccgccgggaagaagccgaaggcggagaagcgggtccccgctggcaagtccgctgccaaggaaggcggcgagggcaagaggggcaagaagaagggcaagaagagcgtggagacctacaagatctacatctttaaggtgctgaagcaagtgcacccggacattggcatctncttcaaggccatgttcatcatgaactccttcatttacgattt

SEQ ID NO: 1965 - DNA, 1252 bp, Zea mays
  Clone ID: TF_ZmC697_67
gccgggataatcatccacccaccacaccaaccaacaagcaaaaattccccaatcctctcgtctccgcggcgaagatgtcggggcgcggcaagggcggcaagggcctgggcaagggcggcgcgaagcgtcaccggaaggtgctgcgcgacaacatccaggggatcacgaagccggcgatacggaggctggcgcggcggggcggcgtgaagcgcatctcggggctcatctacgaggagacccgcggcgtgctcaagatcttcctggagaacgtcatccgcgacgccgtcacctacaccgagcacgcgcgccgtaagaccgtcaccgccatggacgtcgtctacgcgcttaagcgccagggccgcaccctctacggcttcggcggctaggcctgccgcgccgcgattcgccgtcgctgcggttctggtgttgctgcagttcgcaagttgtttgtgtgggcggaaaaatgctagatactgtagaactgcagtgcggtatgtgcacatggtgtgtttgtctgaagaaatgttgtcaatgctggcttgctctggactcaaacatgctccattttgtgtctaaaaaaaaaaaaaaaaaagcggccgcttttttttttttttttttcgagaactgataacatagttcattgccatttcatatgcatcatgataacaagttacagcagtgaacaaccaactactcgatgattcgacagtaacccaaactacagaacccagcacatctctacatcttctgatcgggcactgatgacagaatatatgatgcttaggccctctccccacggatgcggcgggcaagctggatgtccttgggcatgatggtgacgcgcttggcgtggatggcgcagaggttggtgtcctcgaagagcccgacaaggtaggcctcagccgcctcctgcagcgcggagacagcggagctctggaagcgtaggtcggtcttgaagtcctgcgcgatctcccgcaccaggcgctggaacggcagcttgcggatcagcagctccgtgctcttctggtacttgcggatctcccggagcgcgacggtgccggggcgggagcggtggggcttcttcactccgccggtcgcaggggcagacttgcgggccgccttagtcgccagctgcttcctcggcgccttgccgccggtggacttcctcgccgtctgcttcgtgcgggccatcgagcgagtgaggatggaaggcttctgctagggattgctggggagattgaagattacgggt

SEQ ID NO: 1966 - DNA, 519 bp, Zea mays
  Clone ID: TF_LIB4835-001-R1-M1-H10
ggccgcgggtttttttttttttttttggcgaattgtgtcgtttggcaacacgaatgatcagtcttttaccaagatcgctgggggacgaatcggctcgtacacgaactagccgaacaaaatatactggttaagccgtttttacactagcttgttcatcgtgccgcttaaaagcgaacaaacagcataaaggacagatggcacttctacatgcctccgccgacactggggccggacgcgagatacgcctacgctcgctcgccgcggatgcggcggacgagctgaatgtgtttgggcatgatggggacgcgctttgcggggatggcgcaaaggttggtgacctccctcaggccgacgaggtaggcctcggcggcttactggatggccaggactgagtggccctggaaccgcatatccgtcttgaagtcctgagcgatctcaccgaccaggcgctaggagggcaactttcgaatcagaagctgcgtgctcttatggtacttgcggatatggcgcagtgccacc

SEQ ID NO: 1967 - DNA, 333 bp, Zea mays
  unsure (1)..(333): unsure at all n locations
  Clone ID: TF_LIB3069-057-Q1-K1-H9
ttccaaatcaccgccggctcggctcttcatcttcgcgccaacaccgggtcttcgaggcccgcacgaagcaaacggctcncaaatcgactggcggcaaggcgccccgcaagcagctggccaccaatgcggcgcgcaagtcggcgccggcaaccggtggcgtgaagaagcctcaccgctttcgccccggcaccgtcgcgctccgggagattcgcaagtaccagaagagcacggagctgctcatccgcaagctgcccttccagcgcctcgtccgtgagatcgcgcaagatttcaagaccgacctccgctttcagtcctccgctgtcgccgcgcttc

SEQ ID NO: 1968 - DNA, 314 bp, Zea mays
  Clone ID: TF_LIB3279-001-P1-K1-D10
attcgttcccgcccgccgatggcgatatccatcagccatagacacgacaacatggctcgcgcgaatcacaccgtccgcacctccacccaatgcaacgcaccctacaagcaggtcgccaccaacgcgcagaggaagtctgcgccgactacctgcgacgataagaagccccacacgtacaggcccagcaccgtcgcgcttcgcgagatccgcaagtaccagaagagcacggagctgctcatcctgaagctgcccttccagcgcctggaccatgagatcgctcacgacttcaagacggatctgcaggtccagagtca

SEQ ID NO: 1969 - DNA, 431 bp, Zea mays
  Clone ID: TF_LIB3357-027-P1-K1-F9
atcgccagcctcaaattcgttccgtccaggcaaggaagaaatcgagcagccaaggagaggagaagatggctcgtacgaagcagaccgcccgcaagtccaccggaggcaaggccccgcgcaagcagctcgccaccaaggcggcgaggaagtctgcgccaacgaccggcggcgtgaagaagccccacaggtacaggcccggcaccgtggcgctgcgcgagatccgcaagtaccagaagagcacggagctgctcatccggaagttgcccttccatcgcctggcccgagagatcgctcaggacttcaagacggatctgcggttccagagccacgccgtactggcccttcaagaagccggcgaggcctacctggtcggtctgttcgaggacaccaacctgtgcgccatacacgccaagcgcgttaccatcatgccc

SEQ ID NO: 1970 - DNA, 303 bp, Zea mays
  Clone ID: TF_LIB3357-035-P1-K1-E10
tccaaggtcccttttttttctggatctggaagcgccgcagtagcagccatggacttgagcggagcaggccttaaggctaagaatgtttcgtacgaactcaaggccgtcggtccgactaagaagtcggtgtcgcggtcctccaggtccgttctgtagtttcttgtcagccttgttgggcggtacctcaaaaagggccgttacgcgcatcgtgtttgcacggttgcccctgtctacctcggcgtcgtactggagtacctctcggtcgaggtgctttagctcgccggcaacgcggtatgttacaac

SEQ ID NO: 1971 - DNA, 485 bp, Zea mays
  unsure (1)..(485): unsure at all n locations
  Clone ID: TF_LIB3279-177-Q1-K6-A8
ccaggcgagccccccggcgcaaccaaaaccccaacgcgccccgcnnacgaggcgcccaaggccgagaagaaacccgcggcgaagaagccggcggaggaggagcccgcggccgagaaggcgcccgccgggaagaagccgaaggcggagaagcgggggccggggggcaagnccgcngccaaggaaggcggcgagggcaagaggggcaagaagaagggcaagaagagcgnggagaccnacaagancnacancnncaaggggcngaagcaggggcacccggacangggcancnccnccaaggccagggccancangaacnccnncannaacganancnncgagaagcncgcngcngaggccgccaagcncgcgcgcnanaacaagaagccnaccancaccncccgggagaaccagaccnccgggcgccncgnccnncccggggagcncgccaagcacgccgncnccgagggcaccaaggccggcaccaa

SEQ ID NO: 1972 - DNA, 320 bp, Zea mays
  Clone ID: TF_700206634H1
atctcctcgcattttccttgcaaccgattgcctatcgccctcccagcccaagatcgatggcgcgcaaggtcgagaagaagcccgcggcgaagaatccggcggaggaggagcccgctgcggagaagacgaccgccgggaagaagctcaatgcggagaagctggtccccgcgggcaagtccgccggcatagagggcggcgagggcaagcgtggctagatgaagggcaagaagatcgttgagacgtacaagatctacatcttcaaggtgctgaagcaggtgcacccggtcatcggcatctcgtccaaggccatgtccatcatg

SEQ ID NO: 1973 - DNA, 569 bp, Zea mays
  Clone ID: TF_LIB3969-002-Q1-M6-D12
tccaccgcggtggcggccgccctttttttttttttgcaggtaaaaagtcattcgtttattttagacgagcaatccctttccattttccattcatggaggacaacacgcccgatatagacaaataggcacgcgcatcaaaagcacccaccactcatatacttcacacattacaactacgaacctcatgaccgcgacagctcaggctctctctcccctgatgcggtggacgatctggatgtccttgggcatgatgctgaccctcttggcgtggatggcgcagaggttggtgttcttgaagagccccaccatgtacgccttcgcggactcctgcatcgtcgtcacgggcgaggactggaaccgcaggcccgtcttgaattcctgcggtatctcgaggacgaagctctggaaggggagcttgcggatgagcatctacgtgctcttctggtacttgcggatctcgcgtgacgcgactgtgccatggcggaagcggagcgacttcttcacgccgtccgtggccctggcctacttgcgcgccctcttggtggtcagctgcttcctcggccccttgc

SEQ ID NO: 1974 - DNA, 581 bp, Zea mays
  unsure (1)..(581): unsure at all n locations
  Clone ID: TF_LIB4863-005-R1-K1-D7
atcaactcgcaattccgcattcgttccaactcctgagcactttctcctcgtccccgacaagccaatcgaagccgagatacggccatggactccaccggcaccggagcagggggtaaggggaagaagggagcggccgggcgcaaggtcggcgggccaaggaagaagtcggtgtcgaggtccgtgaaggccgggctccagttccccgtcgaccgcatcgggcgctacttgaagaagggccgctacgcgcagcgtgtcggcaccggcgcccccgtctacctcgccgctgtcctcgaatacctcgccgctgaagttttggagctcgccggtaatgctgccagggacaacaagaagactcgcattattccgcgccacgtgcttctggcgatccggaacgacgaggagcttgggaagctgttgggcggcgtgactatcgctcacgggcggtgttgctccccaatatcaacccttgttctgcttgccaagaagaacggggagaaaaggcgtccagtgtgggngaggcaaggagggcaaagtcgcccaaaaaggccggccaagtccccccaagaagggcatagacttga

SEQ ID NO: 1975 - DNA, 876 bp, Zea mays
  unsure (1)..(876): unsure at all n locations
  Clone ID: TF_ZmC369_114
ggccggccgggccgggggaaaaaaaaaaaaatagcacacagccaaagccaccagcgctcgtcacctccaatcaacaaattcccaatccgccgcttcccatcccgcgttcgccgctccatttgatcgaattcccgatggcgcccaaggccgagaagaagcccgcggagaagaagccgacggaggagaaggccgagaagaagcccagggcggagaagcgcgtgccgggcaaggagggcggcgagaagaaggggaagaagaaggccaagaagagcgtcgagacgtacaagatctacatcttcaaggtgctcaagcaggtgcacccggacattggtatctcgtccaaggccatgtccatcatgaactccttcatcaacgacatcttcgagaagctggctgccgaggccgccaagctcgcccgctacaacaagaagcccaccataacctcccgggagatccagacttcggtgcgcctcgtccttcccggcgagctcgccaagcacgccgtctccgagggcaccaaggctgttaccaagttcacttcctcttagatcgccgccgcacggtgcgacggctctgtttcgtttcctcgtactttaggccagtgctactaggttgcccgaggaacaatgtagtgtggaaatttctaatatattccaaattgtgctgatataatttgcttcaaaccttgaggaggcgctgttttaatttggggttgctacagccgtacaattttggcgccaatatcttgcttcgtattcactggggttcaatcacctgaatcatgtaatttgttcagggggataaataacatttatcanaggattgtgagatagtacagataacaaatcagctggcatgctatgcaaaatctggtct

SEQ ID NO: 1976 - DNA, 691 bp, Zea mays
  Clone ID: TF_ZmC369_141
ggccgcttcgaggcccggccggtgcccgggatagcacacagccaaagccaccagcgctcgtcacctccaatcaacaaattcccaatccgccgcttcccatcccgcgttcgccgctccatttgatcgaattcccgatggcgcccaaggccgagaagaagcccgcggagaagaagccgacggaggagaaggccgagaagaagcccagggcggagaagcgcgtgccgggcaaggagggcggcgagaagaaggggaagaagaaggccaagaagagcgtcgagacgtacaagatctacatcttcaaggtgctcaagcaggtgcacccggacattggtatctcgtccaaggccatgtccatcatgaactccttcatcaacgacatcttcgagaagctggctgccgaggccgccaagctcgcccgctacaacaagaagcccaccataacctcccgggagatccagacttcggtgcgcctcgtccttcctggcgagctcgccaagcacgccgtctccgagggcaccaaggccgttaccaagtttacttcctcttagatcgccgccgcacggagcgacggctctgtttcgtttcctcgtacttttaggccagtgctaataggttgctcgaggaacaatgtagtgtggaaatttctaatatattccaaattgtgctgaaaaaaaaaaaaaaaaaagcggcc

SEQ ID NO: 1977 - DNA, 940 bp, Zea mays
  Clone ID: TF_ZmC369_146
gggtaccctcgggctcggccggaaaaaaatagcacacagccaaagccaccagcgctcgtcacctccaatcaacaaattcccaatccgccgcttcccatcccgcgttcgccgctccatttgatcgaattcccgatggcgcccaaggccgagaagaagcccgcggagaagaagccgacggaggagaaggccgagaagaagcccagggcggagaagcgcgtgccgggcaaggagggcggcgagaagaaggggaagaagaaggccaagaagagcgtcgagacgtacaagatctacatcttcaaggtgctcaagcaggtgcacccggacattggtatctcgtccaaggccatgtccatcatgaactccttcatcaacgacatcttcgagaagctggctgccgaggccgccaagctcgcccgctacaacaagaagcccaccataacctcccgggagatccagacttcggtgcgcctcgtccttcctggcgagctcgccaagcacgccgtctccgagggcaccaaggccgttaccaagtttacttcctcttagatcgccgccgcacggagcgacggctctgtttcgtttcctcgtacttttaggccagtgctaataggttgctcgaggaacaatgtagtgtggaaatttctaatatattccaaattgtgctgatataatttgcttcaaaccttgaggaggcgctgttttaatttggggttgctacagccgtacaatttttggcgccaatatcttgcttcgtattcactggggttcaatcacctgaatcatgtaatttgttcagggggataaataacatttatcaaaggattgtgagatagtacagataacaaatcagctggcagtgctatgcaaaatctggtctgtggcaatgtttgccttgtggccagtttttcataattcatgtaatgtgcgttcatggacttct

SEQ ID NO: 1978 - DNA, 309 bp, Zea mays
  Clone ID: TF_LIB5025-016-B1-XP1-F1
gctcaggcggcggtttcaatcatactttcgactctcactctcccgtccctttttttttctcgatctggaagcgccgcagtagcagccatggacgtgagcggagcaggcggtaaggcgaagaagggcgcggcggggcgcaaggccggcgggccgacgaagaagtcggtgtcgcggtcctccagggccgggctgcagttccccgtcagccgcgtcgggcggtacctcaaaaagggccggtacgcgcatcgtgtatgcacgggtgcccccgtctacctcgccgccgtcctgtagtacctcgacgttctattt

SEQ ID NO: 1979 - DNA, 547 bp, Zea mays
  unsure (1)..(547): unsure at all n locations
  Clone ID: TF_LIB4827-072-R1-N1-D12
ccggccgggacttttccggcctctcatttctcacgcggcgaccacccaacttcgaagcgcgcgctagagaccgaacaagcgggagagataggctcgtaccaatcacactgctcgcaagtccacggtagggaacgatcccaggaagcagcttgccaccaaggatgcccggaagtctgccccgcgcacctggaggagagaaaaaggctcaccgctaccgacctgcaactgttggcctccgtgagatccgcaagtatcacaatagcactgagctgctgatcaagaagctgcccttccagaggctcgtcaggtaaattgcacacgacttcaaaactgatttctgtttccagagccatgcggagcttgccctccaggaggctgctgaggcataccttgttggcctgtttgaggacaccaacctgtgcgacatccatgctaagcgtgtgaccatcatgccaaaggacattcagctggnaaggaggatccgcggcgagagggcctaatcgccacctcaaacatcgtgacaaaaacatgaagtccttggggttat

SEQ ID NO: 1980 - DNA, 783 bp, Zea mays
  Clone ID: TF_ZmC369_102
gaagcgtgtcccagcaggcaagtccgccggcaaggagggcggcgagggaaagaggggccggaagaagggcaagaagagcgtggagacctacaagatctacatcttcaaggtgctgaagcaggtgcacccggacatcggcatctcctctaaggccatgtccatcatgaactccttcatcaacgacatcttcgagaagctcgccgccgaggccgccaagctcgcgcggtacaacaagaagcccaccatcacctcccgtgagatccagacctccgtgcgcctcgtcctccccggggagctcgccaagcacgccgtctccgagggcaccaaggccgtcaccaagttcacctcgtcctaggctgcgtggcctccgcttgcaggcttccctcgtatgttcgcgtgtcttgctgtagttaggtgctgctgtgtctggtctcctccggtagcaactgttatctgatggaacagtaacaatgcttattgaatccagctagttgcttatttgtggatcctctctctttgttgttggccacctttatctcgtgatgtttgtgtgcatgtgaatactctgaatgtgcatttcgaagtttgagaagttacgacgcgttaaaaaaaaagcgtgcaccacagcccgtcccgagcgctgcacgacctcacggggatcaagaagcactactgccagaagcacagccagaagaaggtcaagtgctacaggtgcaacatgcgctacgacgtttagtacgacttgaatgcgcacgtcaagacctgcagcgaccgcaagtatct

SEQ ID NO: 1981 - DNA, 598 bp, Zea mays
  Clone ID: TF_ZmC653_46
aaatgctctttgaatttaaatcttgctcgacaaaagttatgaatcaaagcactgaatcacattcataacagccaaactgatttgcctagaacatcagtacacgattgcaggacaagaagcgatagattccatcccctagttcagacactacagaaacaggaagacagagcagcaatcaggccctctcgcccctgatgcggcgcgcgagctggatgtccttaggcatgatggtgaccctcttggcatggatggcgcagaggttggtgtcctcgaagagacccaccaggtacgcctcacgcagctctctccgatggcgcgcacgaagcagacggcgaggaagtcgaccggcggcaaggcgccgcggaagcagctggccaccaaggcggcgcgaaagtcggccccggccaccggcggcgtgaagaagccgcacaggtttcgccccggcaccgtcgcgctccgcgagatccgcaagtaccagaagagcacggagctgctcatccggaagctgcccttcccagcggctggtgcgggagatcgcgcaggacttcaagaccgacctccggttccagtcctcctgcagcgcggcgacggcggagga

SEQ ID NO: 1982 - DNA, 378 bp, Zea mays
  Clone ID: TF_LIB4979-019-A1-K1-E4
tcttcatctcccagcctccctagagaagcttcctcctcactcgctcgatggcccccgccaggcggacggcgaggaagtccaccggcgccaaggctgccgagaagcagttggcgactaagggggcccgcaagtctgcccctgcgacaggtgtagttaagaagctccaccgcttccgccccggtaccgtcgcgctccgggagatcggcaagtccctgaagagcacagagctgctgatccgcgaggtggcgttccagcggctggtgcgggagatcgcgcaggcacttcagagcgacctacgcttccagagctccgcggtctccaggctgggggaggcggctgagcgctaccttgtcgctcgctgcgaggacgccagcctct

SEQ ID NO: 1983 - DNA, 454 bp, Zea mays
  Clone ID: TF_LIB3279-174-P1-K6-E10
tccgggtcgctccagcgtccgcgcatttcacctcgcagccgtattcttgtctcgaatcctctctcgccgctccgatggcccgcacgaagcaaacagcaaggaagtcgaccggcggcaaggccccccggaagcagctggccactaaggctgcgcgcaagtcagccccggccaccggcggcgtgtttaagccccaccggtttcgccccggcaccgtcgcgctcctttgagatccgcaagtaccagaagagcactgagctgctcattcgcaagctccccttccagcgcctcgtcctcgagatcgcgcaggacttcaagactgatctgagggattagtcctccaccgacccggctcctgcaggaggccgacagggcgaacctggtgggggttttagaggacatcaacttttgctccattcaagccaagtgcgtcactttcatgcccaaggacatttca

SEQ ID NO: 1984 - DNA, 680 bp, Zea mays
  Clone ID: TF_LIB4742-082-R1-K1-H5
ctcgaggccggccgggacatagtttgaaagctacgagcactcgccgccactcaccagcaaattcccaagccgccccttcccccatctctttcgcgccccatttgatcgattcctgatggcgcccaaggccgagaagaagcccgcggagaagaagccggcggaggagaaggccgagaagaagccaagggcggagaagcgcgtgccgagcaaggagggcggcgagaagaagggaaagaagaaggcgaagaagagcgtcgagacgtacaagatctacatcttcaaggtgctcaagcaggtgcacccggacattggcatctcgtccaaggccatgtccatcatgaactccttcatcaacgacattttcgagaagctcgccgccgaggccgccaagctcgcccgctacaacaagaagcccaccatcacctcccgggagatccagacctcggtgcgcctcgtcctccccggcgagctcgctaagcacgccgtatccgaagggaccaaggcggttaccaagtttacatcctcttagggtgccgccgcacgttgctacgatcctgtttaattctcatatttaggcctgtgctaggttgcttctgcaacaatgtagaatttgttataattgctgaatgaatcagttacccctgttgaagtttctgaaaaaaaaaaaaaaaaaagcggcc

SEQ ID NO: 1985 - DNA, 837 bp, Zea mays
  Clone ID: TF_ZmC369_125
gttgctgtggactgtttgtttgcttattttcccatccggcgcttgtacttgatttaatttgtgtgttttatgtgtgatattggcgaaaagaaatattaggatgtttgggtgaagaagaaatagtcgaaagctacgagcactcgccgccactcaccagcaaattcccaagccgccccttcccccatctctttcgcgccccatttgatcgattcctgatggcgcccaaggccgagaagaagcccgcggagaagaagccggcggaggagaaggccgagaagaagccaagggcggagaagcgcgtgccgagcaaggagggcggcgagaagaagggaaagaagaaggcgaagaagagcgtcgagacgtacaagatctacatcttcaaggtgctcaagcaggtgcacccggacattggcatctcgtccaaggccatgtccatcatgaactccttcatcaacgacattttcgagaagctcgccgccgaggccgccaagctcgcccgctacaacaagaagcccaccatcacctcccgggagatccagacctcggtgcgcctcgtcctccccggcgagctcgccaagcacgccgtatccgaagggaccaaggcggttaccaagtttacatcctcttagggtgccgccgcacgttgctacgatcctgtttaattctcatatttaggcctgtgctaggttgcttctgcaacaatgtagaatttgttataattgctgaatgaatcagttacccctgttgaagtttctaatatattgtaatcttgctagtataatttgcttcaaacctggatggggtttccattcgtcgtttaaaattgccacaaccacc

SEQ ID NO: 1986 - DNA, 743 bp, Zea mays
  Clone ID: TF_ZmC369_126
ctcgaggccggccgggccggaaaaaaaactagtcgaaagctacgaacactcgccgccactcaccagcaaattcccaagccgccccttcccccatctctttcgcgccccatttgatcgattcctgatggcgcccaaggccgagaagaagcccgcggagaagaagccggcggaggagaaggccgagaagaagccaagggcggagaagcgcgtgccgagcaaggagggcggcgagaagaagggaaagaagaaggcgaagaagagcgtcgagacgtacaagatctacatcttcaaggtgctcaagcaggtgcacccggacattggcatctcgtccaaggccatgtccatcatgaactccttcatcaacgacatcttcgagaagctcgccgccgaggccgccaagcttgcccgctacaacaagaagcccaccatcacctcccgggagatccagacctcggttcgcctcgtactccccggcgagctcgccaagcacgccgtatccgaagggaccaaggcggttaccaagtttacatcctcttagggtgccgccgcacgttgctacgatcctgtttaattttctcatatttaggactgtgctaggttgttcgtgcaacaatgtagaatttgttataattgctgaatgaatcagttacccctgttgaagtttctaatatattgtaatcttgctagtataacttgcttcaaatcttgatggggtttccaaaaaaaaaaaaaaaaaagcggcc

SEQ ID NO: 1987 - DNA, 686 bp, Zea mays
  Clone ID: TF_ZmC369_67
cattgggtacctcgaggccgggccggatagtcgaaagctacgaacactcgccgccactcaccagcaaattcccaagccgccccttcccccatctctttcgcgccccatttgatcgattcctgatggcgcccaaggccgagaagaagcccgcggagaagaagccggcggaggagaaggccgagaagaagccaagggcggagaagcgcgtgccgagcaaggagggcggcgagaagaagggaaagaagaaggcgaagaagagcgtcgagacgtacaagatctacatcttcaaggtgctcaagcaggtgcacccggacattggcatctcgtccaaggccatgtccatcatgaactccttcatcaacgacatcttcgagaagctcgccgccgaggccgccaagcttgcccgctacaacaagaagcccaccatcacctcccgggagatccagacctcggttcgcctcgtactccccggcgagctcgccaagcacgccgtatccgaagggaccaaggcggttaccaagtttacatcctcttagggtgccgccgcacgttgctacgatcctgtttaattttctcatatttaggactgctaggttgttcgtgcaacaatgtagaatttgttataattgctgaatgaatcagttacccctgttgaagtttctaaaaaaaaaaaaaaaaaagcggcc

SEQ ID NO: 1988 - DNA, 1028 bp, Zea mays
  unsure (1)..(1028): unsure at all n locations
  Clone ID: TF_ZmC369_91
tgcaccatttgtcataaaagtacttttataaaagtataaatgtattaacagttcatttgtattttaacaaaaacattggtcaaagttatattttggagaccgtgtcgttgtcctaaacgacaactaataggnaaaccggagggagtagtagnaaagctacgagcactcgccgccactcaccagcaaattcccaagccgccccttcccccatctctttcgcgacccatttgatcgattcctgatggcgcccaaggccgagaagaagcccgcggagaagaagccggcggaggagaaggccgagaagaagccaagggcggagaagcgcgtgccgagtaaggagggcggcgagaagaagggaaagaagaaggcgaagaagagcgttgagacgtacaagatctacatcttcaaggtgctcaagcaggtgcacccggacattggcatctcgtccaaggccatgtccatcatgaactccttcatcaacgacatcttcgagaagctcgctgccgaggcagccaagctcgcccgctacaacaagaagcccaccatcacctcccgggagatccagacctcggtgcgcctcgtcctccccggcgaactcgccaagcacgccgtctccgaagggaccaaggcggttaccaagtttacatcctcctagggtgccgccgcacgttgctacgatcctatttaattctcacatttaggcctgtgctaggttgctcctgcaacaatgtagaatttgttataattgctgaatgaatcagttacccctgttgagttttctaatatattgtaatcttgctagtataatctgcttcaaatcttgatggggtttccattcgtcgtttaaaattgcgacaaccaccaatcttttacccgtcgaacctacttctgaattgtgattgcctggagataaaatgccttgtatcatgtattgccctcagggttttataaactgctgacgggtaaacactgcctgtcacataaatgctttgtgaggtacagttaaataatcggctgtcattgctata

SEQ ID NO: 1989 - DNA, 689 bp, Zea mays
  Clone ID: TF_ZmC369_92
acgagcactcgccgccactcaccagcaaattcccgagccgccccttccccatctctttcgcgacccatttgatcgattcctgatggcgcccaaggccgagaagaagcccgcggagaagaagccggcggaggagaaggccgagaagaagccaagggcggagaagcgcgtgccgagcaaggagggcggcgagaagaagggaaagaagaaggcgaagaagagcgtcgagacgtacaagatctacatcttcaaggtgctcaagcaggtgcacccggacattggcatctcgtccaaggccatgtccatcatgaactccttcatcaacgacatcttcgagaagctcgccgccgaggccgccaagctcgcccgctacaacaagaagcccaccatcacctcccgggagatccagacctcggtgcgcctcgtcctccccggcgagctcgccaagcacgccgtatccgaagggaccaaggcggttaccaagtttacatcctcttagggtgccgccgcacgttgctacgatcctgtttaattctcatatttaggcctgtgctaggttgcttctgcaacaatgtagaatttgttataattgctgaatgaatcagttacccctgttgaagtttctaatatattgtaatcttgctagtataatttgcttcaaacctggatggggtttccattcgtcgtttaaa

SEQ ID NO: 1990 - DNA, 422 bp, Zea mays
  Clone ID: TF_LIB3076-044-Q1-K1-G3
gattaagacccgttctagtgctgcagggggatctgttgcaacttaaggggggcaagggtctatgcaagggtggagccaatcgccaccggaaggtgctccgcgacaacatccatggcatcaccaagcctgcgatccttatgctggctctgatgggcggcgtgaagcgcatctcggtgctcatctacgaggagacccgctatgtgctcaagatcttcctcgagaacgtcatactcgacaccttcacctacaccgagcacgctcgccgcaagaccgacaccgccatggatgtcgactacacgctcaagctccagtgccgtaccctctacggcttttgatgctaggcgcctcttcttaactggggaatgcttatggtgatacgtatctgtcgctgtgggtcgtaatgtatcttcattccttgatat

SEQ ID NO: 1991 - DNA, 353 bp, Zea mays
  Clone ID: TF_LIB3279-224-Q6-N6-B8
tttttttttttttttttttttttttttttttttttttttttttttttttttttttttttttttttttttttttttgggggaaccggttcattcagcaattataacaaattctacattggtgcaaaagcaacccaacccaggcccaaatttgaaaattaaacaggatcgtagcaaccggcgggggccccctaagagggtgtaaacttgggaacccccttggccccttcggataccgcgtgcttggcgagccccccggggaggaccaggcccacccaggtctggatctccccggaggggaaggggggctttttgttgtaacgggcgaacttggcggccccggcggcgaacttctc

SEQ ID NO: 1992 - DNA, 803 bp, Zea mays
  unsure (1)..(803): unsure at all n locations
  Clone ID: TF_LIB4730-144-A1-K1-G1
attgggacctcgagccggcgggaagaatctctcaatctccctagcaatctctagcagcagatcctcgtgcgaagcaaagcgctagcccccttcgtactgtcccgatggcccgcacgaagcagacggcgaggaagtccactggcggcaaggcgccaaggaagcagctggccaccaaggcggcgcgcaagtctgccccggcgaccggcggagtgaagaagccccaccgtttccgccccggcaccgtcgcgctccgggagatccgcaagtaccagaagagcacggagctgctgatccgcaagctgccgttccagcggctggtgcgtgagatcgcccaagacttcaagaccgaccttcgcttccagagctccgccggcgccgcgctgcaggaggcggttgagggctacctcgggggtttcttcgaggacagctacctctgcgccattcgcgccgagccccgtnacgtcatgacctcggcattgcagctcgcccgccgtanccgtggggagagggcattaagcgttcatggcggtggaggtagaagtagtcggcggagtttctggcatccacctgttgaggttacaacggagaaagatgagccgtttgataaagctttccttgtcctcgcaaggatatggactggggatcctaaccttcactttgaagtatgctgttgctcttaagccgccggaagttaccatcgacatggctatgcagcagcagcatgaagctgagcttgctgcagatgctgctcagcctcttcctgattgacatgctgatctgcctgagtacaaaggatctgagtc

SEQ ID NO: 1993 - DNA, 764 bp, Zea mays
  Clone ID: TF_LIB4979-120-Q1-K1-A8
tttcagcactgtggcgagtcaatccatatcttcttgatcacaccactgtcttcgaacactcgatggcgatgtatgagcgagtcaaggtcgccaaggacatgaacaatgacgttgacaaacaccaccgcaaggttctccgaagacaacataccatggtgatcacttaaacctcactatccggcatgctgcgcgagcgatggcgcggccatgaacccgtatctccgggcttatctacgaggaaacccgtcacgtgctcaagatcttcctcgagaatgtaatccgcgacgcaatcacctacacccaacacgctcgacgcaataccgacaccgccatgcatgttgagtacgcccacaagcgccagcatcgcactctgctacgaagtcggaggtcttagcgcatcatcttccactcatgtgcagcctgtgcctgcggcgtttcctcacttccctctgtcttgcttggcttgatgtacagagatatccaattaaaatatctctgatgggcttcgttattgggtgtaatcatgtgtcccgtgagtgatgggaaatcaagatcatgatgtatctttctttgcagcaatgaaatgacttaatcgagatcaagatgtatctttctttgcatgaaagaaactttgctattgctcccactgataggctaatcactatgcaggtttcatgaggtggttcatgtattaattatgctgctatattagctattttgatggtgtgtcatatcatctaagaacaagttttatggactttgat

SEQ ID NO: 1994 - DNA, 496 bp, Zea mays
  Clone ID: TF_LIB3279-211-Q6-N6-C3
ggggaaaaaaggaggcccaaattatttattgccccggtcaaatcaactttaaaatgaaaaaaattccatacaggcaaaagggcccccggggcttaagggcccccccaaaaggggcctaggacgaggggaacttggggacggccttggggccccccaaaacggggggcttgggaagccccccgggtaaaaaaagggggacggaggtttggatcccccgggaggggaaggggggctttttgttgaaacggggaaacttggccccctccccggggaactttttaaaaaagtccttgaaaaaagagttcaaaaaggacaaggccctggaggaaaagcccatgtccgggggcccccggttaaacaccttaaaaaaggaaaatttggacctttccaccctttttttgggctttttccccccctttttggaaacacccccttccttggcgggggattttcccgccgggagccgcttttccccctttgggtttttcccaagggg

SEQ ID NO: 1995 - DNA, 445 bp, Zea mays
  Clone ID: TF_LIB4756-093-R1-K1-E3
ggccgggtattttctgccctcccattcctcgcgcggcgaccacccgattcgaagcgtgcggagggaccgaagaagcgggagagatggctcgtaccaagcagactgctcgcaagtccacgggagggaaggctcccaggaagcagcttgccaccaaggctgcccgtacgtctgcccccaccactggtggagcgaagaagcctcaccgctaccgccctggaactgttgcactccgtgagatccgcaagtaccagaacagcactgagctgctgatcaggaagatgcccttccagaggctcgatagggaaattgcacaggactacaacactgactcgcgtctccacgagccatgcggtgcttgctctccaggaggctgcctgaggaataccttgttgccactgcctgaggaaaccaacctggcgcgccatccatgctaagacgtgtgacc

SEQ ID NO: 1996 - DNA, 393 bp, Zea mays
  unsure (1)..(393): unsure at all n locations
  Clone ID: TF_LIB3150-095-P1-N1-D1
tgtctttgccgccgccactgcccnatccaggtgggcatactaatccctcctcgtctccgctccaaatggcccgcacgaagcatactgcgcgcaagtcgaccggcggcaaggcgccgcggaagcagctggccaccaaggcggcgcgcaagtcggccccggccactggcggcgtgaaaaagccgcaccgcttccgccccggcaccgtcgcgctccgcgagatccgcaagtaccagaagagcacggagctgctcatccgcaagctcccctcccagcgcctcgtccgcgagatcgcgcaagactttaagacagacctgcggttccagtcctctgccgtggcggcgcttcatgaggccgctgaagcgtacctggtggggctcttcgaggacaccaacc

SEQ ID NO: 1997 - DNA, 512 bp, Zea mays
  Clone ID: TF_LIB4829-034-R1-N1-E6
ccggccgggattcgtgtcctggcatccgcagagagcttgttccgtccaggctacaaattatgatgtgccccctcgcgcacaggaagaagatatagaggaggatcgtctccacgaaccgaccgcccgcgagtccacggaaggaaatggccccggtaagcaggtcgccacaaatgcggagagtaagtcggagccgacgaacgctcggtcgagaagaacgcccctcattcacagggccggaaacgtggcgctgcgggtgatccgtaagcactgtaatagcacgctcctgctgagccgcagggtgccctgcctgcgactgtggcgtgagatcgcgcacgacttcaagacagagctccgctgacagatgctcttcgccgctggagctccaacaagacggcgagggctacctcggcgttgtcttataggacataatactctgctgcattgactttaagtgcgatttcatcatgcccgatgacatccagctatgccgtcgaagccgtgtacttcgaaag

SEQ ID NO: 1998 - DNA, 423 bp, Zea mays
  unsure (1)..(423): unsure at all n locations
  Clone ID: TF_LIB3059-047-Q1-K1-H1
agcgcctncacgatctcgacgagaggatgcccaatcgcgaaaccgccgccctattgcaatggcgcccaaggccgagaagaagcccgccgtcgagaagcctgcggaggaggagccggcggcggagaaggccacggctgggaagaagcccaaggctgagaagcggctccccgccggcaagtacgcaggcaaggagggtggctagaagaaggggaagaagaaggcaaacaagtcggtggagacgtacaagatctacatcttgcaggtgctgaatcaagtgcacccagacattggcatctcgtccaaggccatgtccatcatgaactccttcatcaacgacatcttcgagaagctggcggcggaggcggccaatctggcacggtacaacaagaagcctaccattacgtccagcgagatccagacctg

SEQ ID NO: 1999 - DNA, 302 bp, Zea mays
  unsure (1)..(302): unsure at all n locations
  Clone ID: TF_LIB3279-014-P1-K1-D8.F2
ggccccccttggtggcgatttccattggtgccccccncggggttggcttggtttgggacattgctgntcngttcacctctccttcnccacgtcccgcccgctgggggggggctgccgtgtagagcctgcgccccgggccccggcctttccggccggccgccttggcgcgctccccggggttgcggggggcgagctggttgtccttgggcttgatggtgacccgcttggcgtgggtggcgccggggttggtgtcctctaaccggcccgcggggtgggccttggcggcctcctgctccgcggcg

SEQ ID NO: 2000 - DNA, 367 bp, Zea mays
  Clone ID: TF_LIB3245-158-P1-N1-A4
attcttattctttttagctttacgtggacccttttgagttttttagcgcattattagcaatcaggcttccatggacgcgagcgcattctgagccgccccgaaggcgaaaaagggcacgggcggacacaaggacggcgggcctacgaagaagtcggtgacctggtccctcaaggccaagatgcaatttcccatcggccgcatcggtctgtacctgaagaagggcctttacgcgcagcgcgtaagcacgggcgccctcgtctacctggtcggcgaccttgagtacctggcacgacgaagttgctggatctgtggcggcaacccctcccaagggccacatgagagacccgcatcatcccttgccacgtgc

SEQ ID NO: 2001 - DNA, 453 bp, Zea mays
  Clone ID: TF_jC-zmX700352241a1
acgaagctcttattcggctgagctgattctcgaacacgaaaataaacccgcaaaccctaccagccttttgcggacttttagagggacccgatggcacctttcgcggagaagaagccggcggcgaagaagcccgcagaggaggagcccgcggccccggcggagaaggcccccgctgggaagaagccgaaggcggagaagcggctcccggcgggaaaatccgccggcaaggaaggcggagttgacaagaaggggcggaagaaggccaagaagagcgtggagacgtacaagatctacatcttcaaggtgctgaagcaggtgcacccggacatcggcatctactccaaggccatgtccatcatgaactccttcatcaacgacatctttgagaagctcgccggcgaggcggccaagctccgcccgtacaacatgaagcccaccatcaccttccgggag

SEQ ID NO: 2002 - DNA, 362 bp, Zea mays
  Clone ID: TF_LIB3332-011-P1-K1-A11
cccacgcgtacgaagcagacggcgcgcaagtcttcgtgcggcaaggcccctaggaagcaggtgtcgaccaagggggggcgcgtgtcggcccctgcgaccggcggtgtgaagaagccgcaccgcttccgtccgggcaccgcggcgctgcgcgagatccgcaagtaccagaagagcacggagctgctcatacagaagctgtccttccagctcctggtccgcgagatcgcgcaagacttcaagaccgacctgcgctttcagtccttcgccgtcacctctcttaaagaggcatccttgggtgccttcttgcccataagaatgacctccagcttttgtctacttattaccaagcccaaaaaaatcta

SEQ ID NO: 2003 - DNA, 264 bp, Zea mays
  Clone ID: TF_700448372H1
gccgctgaggtcctggagcttgctgggaacgcagcgaaggataacaagaagacccggatcgttgccgcgtcacatacagctcgacgtgcgcaacgacgaggagctgaccaagctgcttggtggtgtcaacatcgcgagctgcggctttatgcccaacatacaccagcagctcgtccccaagaaggctggctcgtccaaggcttccaccgtcgatgacgatgaaaactgaagctgcacactggagaaggcattcgctaccgtctt

SEQ ID NO: 2004 - DNA, 518 bp, Zea mays
  unsure (1)..(518): unsure at all n locations
  Clone ID: TF_LIB3592-095-Q1-K6-C3
caccgatagggaaggctctcatgaagcagcttgacaccaaggtctgtccgtaagtgtgcccccaccactggtggagagaagaaacgctcaccgataccgccctggtaactgttgcactccgagtagatccgcacgtaccagaagagcactgaactgctgatcatgaagctgcccttccagaggctcattagggaaattgcacaggcacttcaagactgatctcgcgtttccagcagccatgcggtgcttgctctgcaggaggctgctgaagcataccttgctggcctgtttgaggacaccaacctgtgcgccatacatgctaagcgtgtgaccatcatgcccaatgacattcagctggcaaggaggatccgcggcgagagggcctaattaccacctcaaacanagcgacaaaaaaatgatacgctggggatattgataatctggtgccattgtaaggacatatgagtagggcttgttctgtggatcgcaagttattctattgctactgatgctgctac

SEQ ID NO: 2005 - DNA, 500 bp, Zea mays
  Clone ID: TF_LIB4979-107-B1-K1-C9
actcaacgatctcatcattctacactctactactcgaaatcactagctcgcgagcttgcttctacagccacttcatactgagccgaggatgcgcacaacagaagacctcgacgaagtcccttgtcctcctggcgccaaggaacgagctggccaccaaggcggcgcgcaagtctgccccggcgaccggcggagtgaagaagccccaccgtttccgccccggcaccgtcgcgctccgggagatccgcaagtaccagaagagcacggagctgctgatccgcaagctgccgttccagcgcctggtgcgtgagatcgcccaggacttcaagaccgacctccgcttccagagctccgccgtcgccgcgctgcaggaggcgtccgaggcctacctcgtcgggctcttcgaggacaccaacctctgcgccattcacgccaagcgcgtcaccatcatgcccaaggacatccagctcgcccgccgtatccgtgtggacagggcctaggcg

SEQ ID NO: 2006 - DNA, 821 bp, Zea mays
  Clone ID: TF_ZmC369_131
cattgggtacctcgaggccggccgggaagaaaagcctccattcccgagtctccagccaactgcatccagtccacccccatccccctcgaccccgacaaccccgacccgatggcgcccaaggccgagaagaagccagcggagaagaagccggcggccgaggagaaggcggagaagacgaccgcaggtaagaagcccaagtccgagaagcgcctgccggcctcgaagtcctccggtaaggagggcggcgagaagaaggggaagaagaaggccaagaagagcgtggagacctacaaaatctacatcttcaaggtcctgaagcaggtgcaccccgacatcggcatctcctccaaggccatgtccatcatgaactccttcatcaacgacatcttcgagaagctcgccggcgaggccgccaagctcgcgcggtacaacaagaagcccaccatcacctcccgcgagatccagacctccgtgcgcctcgtcctcccaggagagctcgccaaacacgccgtctccgagggaaccaaggccgtcaccaagttcaccagcaattgagcagcctgcagcgtccacggatttgttaggtctccccttcttacaagggttcttcgtcgtgtcctctacccctccccctccccgcctatgtatgtgctgtgaaatcgttgatgttctcgtcgggtgaacaaaggccagtagctagcttgcctgcttcataaatcgtgccggattgtaatgggcctcgtagatttgacgcccctattttggaatatagttgtatcggtgccttccctgcttgccaaaaaaaaaaaaaaaaagcggcc

SEQ ID NO: 2007 - DNA, 830 bp, Zea mays
  Clone ID: TF_ZmC369_136
tacctcgaggccgggccgggaagaaaagcctccattcccgagtctccagccaaccacatccagtccaccccatccccctcgaccccgacaaccccgagtcccgacccgatggcgcccaaggccgagaagaagccagcggagaagaagccggcggccgaggagaaggcggagaagacgaccgcaggcaagaagcccaagtccgagaagcgcctgcccgcctcgaagtcctccggcaaggagggcggcgagaagaaggggaagaagaaggccaagaagagcgtggagacctacaaaatctacatcttcaaggtcctaaagcaggtgcaccccgacatcggcatctcctccaaggccatgtccatcatgaactccttcatcaacgacatcttcgagaagctcgccggcgaggccgctaagctcgcccggtacaacaagaagcccaccatcacctcccgcgagatccagacctccgtgcgcctcgtcctcccaggagagctcgccaaacacgccgtctccgagggaaccaaggccgtcaccaagttcaccagcaattgagcagcctgcagcgtccacggatttgttaggtctccccttcttacaagggttcttcgtcgtgtcctctacccctccccctccccgcctatgtatgtgctgtgaaattgttgatgttctcgtcgggtgaacaaaggccagtagctagcttgcctgcttcataaatcgtgccggattgtaattgtaatgggcctcttagatttgacgcccctgttttggaatatagttgtatccgtgccttccctgcttgcgaaaaaaaaaaaaaaaaaaggccccta

SEQ ID NO: 2008 - DNA, 994 bp, Zea mays
  Clone ID: TF_ZmC369_139
cattgggtacctcgaggccggccgggaagaaaagcctccattcccgagtctccagccaaccgcatccagtccacccccatccccctcgaccccgacaaacccgacccgatggcgcccaaggccgagaagaagccagcggagaagaagccggcggccgaggagaaggcggagaagacgaccgcaggtaagaagcccaagtccgagaagcgcctgccggcctcgaagtcctccggcaaggagggcggcgagaagaaggggaagaagaaggccaagaagagcgtggagacctacaaaatctacatcttcaaggtcctgaagcaggtgcaccccgacatcggcatctcctccaaggccatgtccatcatgaactccttcatcaacgacatattcgagaagctcgccggcgaggccgccaagctcgcgcggtacaacaagaagcccaccatcacctcccgcgagatccagacctccgtgcgcctcgtcctcccaggagagctcgccaaacatgccgtctccgagggaaccaaggccgtcaccaagttcaccagcaattgagcagcctgcagcgtccacggatttgttaggtctccccttcttacaagggttcttcgtcgtgtcctctacccctccccgcctatgtatgtgctgtgaaatcgttgatgttctcgtcgggtgaacaaaggccagtagctagcttgcctgcttcataaatcgtgccggattgtaatgggcctcttagatttgacgcccctattttggaatatagttgtatcggtgccttccctgcttgctaattttcttctgccctggtaatttgggatctaagattttgaccgggcagtggagaaccgatgaagatacagggtcatgaggtcgaaagctcatgggtttgtttcagtctcaggttcttcggcatggatatatttatgagcggtaactatgtattgcagccatatggttcaccatgtgatgaaatgatgattccatttgcgcc

SEQ ID NO: 2009 - DNA, 818 bp, Zea mays
  Clone ID: TF_ZmC369_56
ctcgaggccggccggaagaaagtctccttcccgagtctccagccaacagcattcagtccaccccatccccctcgaccccgacaaccccgagtcccgacccgatggcgcccaaggccgagaagaagccagcggagaagaagccggcggccgaggagaaggcggagaagacgaccgcaggcaagaagcccaagtccgagaagcgcctgcccgcctcgaagtcctccggcaaggagggcggcgagaagaaggggaagaagaaggccaagaagagcgtggagacctacaaaatctacatcttcaaggtcctgaagcaggtgcaccccgacatcggcatctcctccaaggccatgtccatcatgaactccttcatcaacgacatcttcgagaagctcgccggcgaggccgccaagctcgcccggtacaacaagaagcccaccatcacctcccgcgagatccagacctccgtgcgcctcgtcctcccaggagagctcgccaagcacgccgtctccgagggaaccaaggccgtcaccaagttcaccagcaattgagcagcctgcagcgtccatggatttgttaggtctccccttcttacaagggttcttcgtcgtgtcctctacccctccccctccccgcctatgtatgtgctgtgaaatcgttgatgttctcgtcgggtgaacaaaggccagtagctagcttgcctgcttcataaatcgtgccggattgtaatgggcctcttagatttgacgcccctgttttggaatatagttgtatccgtgccttccctgcttgctcaaaaaaaaaaaaaaaaaaggccccta

SEQ ID NO: 2010 - DNA, 774 bp, Zea mays
  Clone ID: TF_ZmC369_82
gccggccggtccgggattcccgagtctacagccaaccgcatccagtccacccccatcaccctcgaccccgacaacctcgacccgatggcgcccaaggccgagaagaagccagcggagaagaagccggcggccgaggagaaggcggagaagacgaccgcaggtaagaagcccaagtccgagaagcgcctgcccgcctcgaagtcctccggcaaggagggcggcgagaagaaggggaagaagaaggccaagaagagcgtggagacctacaaaatctacatcttcaaggtcctgaagcaggtgcaccccgacatcggcatctcctccaaggccatgtccatcatgaactccttcatcaacgacatcttcgagaagctcgccggcgaggccgctaagctcgcccggtacaacaagaagcccaccatcacctcccgcgagatccagacctccgtgcgcctcgtcctcccaggagagctcgccaaacacgccgtctccgagggaaccaaggccgtcaccaagttcaccagcaattgagcagcctgcagcgtccacggatttgttaggtctccccttcttacaagggttcttcgtcgtgtcctctacccctccccctccccgcctatgtatgtgctgtgaaatcgttgatgttctcgtcgggtgaacaaaggccagtagctagcttgcctgcttcataaatcgtgccggattgtaatgggcctcgtagatttgacgcccctgttttggaatatagctgtatcggtgccttccctgcttgcg

SEQ ID NO: 2011 - DNA, 1035 bp, Zea mays
  Clone ID: TF_ZmC369_96
ccgggaagaaaagcctccattcccgagtctccagccaactgcatccagtccacccccatccccctcgaccccgacaaccccgacccgatggcgcccaaggccgagaagaagccagcggagaagaagccggcggccgaggagaaggcggagaagacgaccgcaggtaagaagcccaagtccgagaagcgcctgccggcctcgaagtcctccggtaaggagggcggcgagaagaaggggaagaagaaggccaagaagagcgtggagacctacaaaatctacatcttcaaggtcctgaagcaggtgcaccccgacatcggcatctcctccaaggccatgtccatcatgaactccttcatcaacgacatcttcgagaagctcgccggcgaggccgccaagctcgcgcggtacaacaagaagcccaccatcacctcccgcgagatccagacctccgtgcgcctcgtcctcccaggagagctcgccaaacacgccgtctccgagggaaccaaggccgtcaccaagttcaccagcaattgagcagcctgcagcgtccacggatttgttaggtctccccttcttacaagggttcttcgtcgtgtcctctacccctccccctccccctccccgcctatgtatgtgctgtgaaatcgttgatgttctcgtcgggtgaacaaaggccagtagctagcttgcctgcttcataaatcgtgccggattgtaatgggcctcgtagatttgacgcccctattttggaatatagttgtatcggtgccttccctgcttgctaattttcttctgccctggtaatttgggatctaagattttgaccgggcagcggagaaccgatgagatgcagggtcataaggttgaaacctcatgggtttgtttcagtctcaggttcttcggcatggatatatttatgagcggtaactatgtattgcagccatatggttcaccatgtgaagaaatgatgattcgatttgcgccaaaaaaaaaaaaaaaataaaaaaaaaaaaaaaaaaaaaaactcgagcccgg

SEQ ID NO: 2012 - DNA, 328 bp, Zea mays
  Clone ID: TF_LIB4740-076-R1-K1-E7
cggggaaccacatccagtccaccccttcctcctcgaccccgacaaccccgagtcccgacctgatggcgcccaatgtccctgaataagccagcggataaaaagtcggcggccgaggagaaggtgttgatgacgaccgtggtcatgaagcccaagtgcgagaagcgcctgcccgcctcgaagtccttcggcacggagggcggtgagaagaaggtgaagaagatggccaagaagatcgtggagacctacaaaatctacatcttcaaggccctaaagctggtgcaccccgacatcggtatctttttcaatgccatgtccatgatgaactgct

SEQ ID NO: 2013 - DNA, 437 bp, Zea mays
  unsure (1)..(437): unsure at all n locations
  Clone ID: TF_LIB4730-070-R1-K1-A3
cgaaccccaaaacgaccaagcgnaanncgccacagcangcgcaccacgcgagacctggcgaaggcacccaaggcaggacaagaagccgggggcgaagaagaccggagaggaggagcccgcgacagagaaggcggagaaggcccgggcggggaagaagcccaagcgcgagaagcgcgtcccggcgggcaaatccggcggcaaggagggaggcgggggcaagaaggggaaaaagaaggctaagaagtccgtggagacctacaagatctacatcttcaaggtgctgaagcaggtgcaccctgacattgtcatctaggtcaaggccatgtccatcatgaactgctttattagcgacatcttcgagaagctcgcgggcgattgcgccgagctggcgcgctataacaagaagcccaccgtcacctgccgcgatatccacacct

SEQ ID NO: 2014 - DNA, 456 bp, Zea mays
  Clone ID: TF_LIB4730-063-R1-K1-H5
cggggcctcgcatcaaaccaaccctttcccaaatccaccgccggctcggctcgcccatagtcgcgccaagcaccgaatctccgatggcccgcacgaagcagacggcgcgcaagtcgacgggcggcaaggcgccccgcaagcagctggccaccaaggcggcgcgcaagtcggggccggctaccggtggcgtgaagaagcctcaccgctatcgccccgacaccgtcgcgctccgggagattcgcaagtaccacaagagcacggagctgctcatccgcaagctgcccttccagcgcctcgtccgtaagatcgcgcaggatttcaagcccgacctccgcttccagtcctccggtgtcgccgcgctggaggaggccgtcgaggcctacctcgtgggcttcttcgaggacaccaacctctgcgacatccacgccaagcgcgttaccaagatccccaaggtca

SEQ ID NO: 2015 - DNA, 582 bp, Zea mays
  Clone ID: TF_LIB4762-133-Q1-K1-G9
cgcaccgcagcatggccacaagaagccaccggatgattgcgcgccgactaatgatgggcgactaacgaggctcgaagtctgcccctgcgaccggcggagtgaagaagccccaccgcttccgccccggcaccgtcgcgctccgggagatccgcaagtaccagaagagcacggagctgctgatccgcaagctgccgttccagcgcctggtgcgggagatcgcgcaggacttcaagaccgacctacgcttccagagctctgctgtctccgcgctgcaggaggcggctgaggcctaccttgtcgggctcttcgaggacaccaacctctgcgccatccacgccaagcgcgtcaccatcatgcccaaggacatccagcttgcccgccgcatccgcggggagagggcctaagcgtcatattttctgtcatcagtgcccgatcagaagatgtagagatatgctgggttctgtagtttgggttactgtcgaatcatcgagtgttggctgttcactgctgtaacttaattatcatgatgcatatgaaatggcaatgaactctgttatcaaaaaaaaaaaaaaaaaagcggcc

SEQ ID NO: 2016 - DNA, 673 bp, Zea mays
  Clone ID: TF_LIB4974-066-Q1-K1-C8
cctcgaggccggccgggccggacagcggacacatctcctcgcatttcttcccatccgatccccccttcgcaaccaaaaccccaactcgcccgccgggaagaagccgaaggcggagaagcgggtccccgctggcaagtccgctgccaaggaaggcggcgagggcaagaggggcaagaagaagggcaagaagagcgtggagacctacaagatctacatcttcaaggtgctgaagcaggtgcacccggacattggcatctcctccaaggccatgtccatcatgaactccttcattaacgatatcttcgagaagctcgctgctgaggccaagctcgcgcgctataacaagaagcctaccatcacctcccgtgagatccagacctccgtgcgcctcgtccttcccggggagctcgccaagcacgccgtctccgagggcaccaaggccgtcaccaagttcacctcggcctaggctgcgcggccgccgcttgcaggattctctcctgtgttcacgtctcttgctgtagttaggtgctgctgcctgctggcttctatgtatgttatctatctgtctgtagcaactgtgttatctgataggaccgtaatggtgcttattcaacccagctatatgtttctatgtgaatcagcaaaaaaaaaaaaaaaaaaggcccctagggcc

SEQ ID NO: 2017 - DNA, 282 bp, Zea mays
  Clone ID: TF_LIB3088-050-Q1-K1-C2
ccgaatcgttcggaagtccagaacattttgttgtcgttcgaaacaagccattcgaaattgaggtacaacggtgatctgcagaggtaccgaggcatgtcgttagggatcgaaggcaccggccgagcgcacggtcggcgggccatggaagaagtcgatgtcgaggtgcttgaaggccgatctacagttccgcgtcggacgcatctggcgctacttgaagaaaggccggtacgcgcagcgtgtcggcaccggcgccctcgtctaccttgacgatgtcctcgaata

SEQ ID NO: 2018 - DNA, 310 bp, Zea mays
  unsure (1)..(310): unsure at all n locations
  Clone ID: TF_LIB3957-024-Q1-K6-E7
ggccggccgagnaanaaggcggcggcggggtgcgagggttcttcgacgaggaggcccaggtcgacgaggatgaggaagaagaggacgaaggcgagggagaggacgattttattaatgatgctggggccgaccttcctgatgaggatgttgttaggggctcaagacgtcattctattcctatgagggatgaggaagaggatattgatgagatccagacctccgtgcgcctcgtccttcccggggagctcgccaagcacgccgtctccgagggcaccaaggccgtcaccaagttcacctcggcctaggctgc

SEQ ID NO: 2019 - DNA, 536 bp, Zea mays
  Clone ID: TF_LIB5116-016-A1-PF1-A4
cgcctcctgtcccctcgcgcgttccgcctcccagttgcggctccggtcgttcccctcctcctcggttgctgagatggccggtcgtgggaaggcaatcggcgccggcgcggccaagaaggcgacgtcaaggagctccaaggctgggctgcagttccccgtgggaaggatcgccaggttcctcaaggccggcaagtacgccgagcgcgtcggagccggcgcccccgtctacctcgccgccgtccttgagtacctcgccgctgaggtgcgtttctcgcagatctcatccttgcccctgttctcgcggtattctattccttgatccggttccgtcgcgggatccgacaaatcgggctattcttagatctgtttagaaccgtgccgtatgttaatagcaatgcgtcgaaatccaagtaattttttgtccaaattcgtcaagataaggtttcttgggtgcggaatcgatgtgctttcctatgtatccattgcattggttgctgcttgttctaatctggtcgtccttcccctttgatccaggt

SEQ ID NO: 2020 - DNA, 529 bp, Zea mays
  Clone ID: TF_16917799
tttttttttttttttttttttttttttttttttttttttttttttttttttaaaaacagccaaattgatttgccaaaaacatcggtccccgattgcaggacaaaaagcgataaagtccatcgcctatttcaaactttacaaaaacaggaaaacagagcagcaatcaggccctttcccccctgatgcggcgcgcgagctggatgtccttgggcatgagggggacccttttggcggggatggcccaaaggttggtgtcctaaaaaaaacccaccaaatacccctggggggcctcctgcagcgggggaacaggggaggactggaaccaaaggtcggtcttgaatttttgcgcgatctcacccaccacccgttggaagggcagtttccggatgaacagctccgggcttttttggtacttgcggatctcgcggaaagcaacggtgccggggcggaacctgtgcggttttttcaccccgccgggggccggagccgacttgcgcaatcgaaggatttgaaattggaaatcggatgc

SEQ ID NO: 2021 - DNA, 637 bp, Zea mays
  Clone ID: TF_LIB4974-021-Q1-K1-B4
gattccacaaatcctccgcaacttcaccgcgtatcatcatttttcatcggtcctactcctatcatccacaaaatcagagcgatattgatggcgaccatggcggagaagaacccggcgttgaagaaggaggcgtcggacgacccctccgatgaggcggctccgatccaagaacgcccccgcgatgcacaagccccaggaggagatccgcttacctgcggacaagttcgccgacaaggaggccgtcgacaacaacggcatgaagaaggagaacaacatcgcgcagaccgtacaagacctacatctgcaaggtcctgaagcaggagcaccacgacctcggcatctcctccaaggacatgcccatcatgaactccttcatcctccacgtcgtcgagatattcggcgcgcaggccgacaagctcggccggccacaacaagaaggccacgatcacctcccgagagatccagacctccgttcgtctcctactccccggagagctcgtactgcacgccgtctcggatggtacctgggtacgacaccaaggtcacctctgcttgaccgccttgcattatgcgtcgatgtagcctgcttctcgaggaagcactgtgatgtggcgcttctcatggaactagcggaggt

SEQ ID NO: 2022 - DNA, 386 bp, Zea mays
  Clone ID: TF_LIB4762-046-R1-K1-G4
tgttccacatcctgagcactttctgctcgttcccgacatgccattcgaagccgagatacggcgcatggactctcaccggacaccggagcagggggtaagggcgaagaatggcgagcggccgttgcgcatggtcggcgggccaaggaagaagtcggcgtcgaggtccgagatggccccgctccagttccccgacggccggatcgggcgctacttgaagaagggccgctacgcgcagcgtgtcggcaccggcgcccccgtctacctcgccgctgtcctcgaatacctcgccgctgaggttctggagctcgctggtaatgctgccagggacaacaagaagactcgcattattccgcgccacgtgcttctggcgatccggaacgacgagg

SEQ ID NO: 2023 - DNA, 598 bp, Zea mays
  Clone ID: TF_LIB4758-085-R1-K1-H3
cgagccggccgggatccaatttcctccactcatcttttcgcgtttagatacctctaaaatttcccccactcgccagtcgcagcagcacctgtagccatggacgccagcggagccggtagcaaggggaagaagggtgcggccgggtgcaaggcaggcggccccaggaagaagtcggtgacgcggtccgtcaaggccgggctgcagttccccgtctgccggatcgggcgctacctgaagaagggtcggtactcgcagcgcgtgggcactggcgtccccgtctaccttgccgccgtcctggagtacctcgccgccgaggttctggagttggtagggaacgcgccgaaagacttttttttactcgcaccctcccgcgccatgtgcttctggcgatccgcaacgacgaggagctcccgaagctgctggcaagcgtcaccatcgtcgcacgggggcgtcctcctcaacatacactccgtgctccttccccagaaggcttgcgaaaaggcggtcagtcccggcttcaatgatctccccttcccctagatagtcgcccagtccccccccaaggctttcaaagcacggcctttcttttcactgtgtg

SEQ ID NO: 2024 - DNA, 447 bp, Zea mays
  Clone ID: TF_LIB4730-018-R1-K1-A5
acggataccgcagctttagtcccatctctcaaaccatccgaccccacctcgccgctcactcccaagccagtccctgccggcagcgatggcccgcacgaagcagacggcgcgcaagtcgacgggcggcaaggcgccgcggaagcagctggcgacgaaggcggcgcgcaagtcggcgccggccacggggggcgtgaagaagccgcaccgcttccgcccgggcatcgtggcgctgcgggagatccgcaagtaccagaagagcacggagctgctgatccggaagctgccgttccagcggctggtgcgggagatcgcgcaggacttcaagacggacctccggttccagtcctccgccgtggccgcgctgcaggaggccgccgaggcctacctcttgggccttttcttggacaccatcctgtgggccattcacgctaagcgcgttaccattat

SEQ ID NO: 2025 - DNA, 687 bp, Zea mays
  Clone ID: TF_LIB4766-042-R1-K1-E3
ttgggtacctcgaggccggccgggaacctccactgcattctcgaattccgattcccaatccagcaaaccctaccagccttttgcaaactcagagagggacccgatggcacccaaggcggagaagaagccggcggcgaagaagcccgcagaggaggagcccgcggccccggcggagaaggctcccgctgggaagaagccgaaggcggagaagcggctcccggcgggaaaatccgccggcaaggaaggcggtgttgacaagaaggggcggaagaaggccaagaagagcgtggagacgtacaagatctacatcttcaaggtgctgaagcaggtgcacccggacatcggcatctcctccaaggccatgtccatcatgaactccttcatcaacgacatcttcgagaagctcgccggcgaggcggccaagctcgcccgttacaacaagaagcccaccatcacctcccgggagatccagacctccgtccgcctcgttctacccggcgagctcgccaagcacgccgtctcggagggcaccaaggccgtcaccaagttcacctcgtcctaagctcctttcgagtaggtccttaagcgccgtggcgccttttgactgtatggaatgtttgtcatctgaaagttgatctgagcagtgcaatatataattctggcaaaaaaaaaaaaaaaaaagcggcc

SEQ ID NO: 2026 - DNA, 1021 bp, Zea mays
  Clone ID: TF_ZmC369_107
ccggccgggacgcaacctcccactgcattctcgaattccgattcccaatccagcaaaccctaccagccttttgcaaactcagagagggacccgatggcacccaaggcggagaagaagccagcggcgaagaagcccgcagaggaggagcccgcggccccggcggagaaggcccccgctgggaagaagccgaaggcggagaagcggctcccggcgggaaaatccgccggcaaggaaggcggtgttgacaagaagggtcggaagaaggccaagaagagcgtggagacgtacaagatctacatcttcaaggtgctgaagcaggtgcacccggacatcggcatctcctccaaggccatgtccatcatgaactccttcatcaacgacatcttcgagaagctcgccggcgaggcggccaagctcgcccgctacaacaagaagcccaccatcacctcccgggagatccagacctccgtccgcctcgttctacccggcgagctcgccaagcacgccgtctcggagggcaccaaggccgtcaccaagttcacctcgtcctaagctccttttctagtaggtccttaagcgccgtggcgccttttgactgtatggaatgtttgtcatctgaaagttgatctgagcagtgcaatatataattctggcatactattctcgcaatcgttttggggttcagaatgggactgacatcagagtaatatgtggcataccttctgatcctctgtactcgagaggattttgttgtggataagccacttgctgcctttgtttggtgggtaattgcttcgagcataagaaacagcgtatgctgctataaacgtctttttgcaacgcgaaaaaaaaaataccatagaaaaaagaaaaacaaaaaagtgaaggcacagaagagagaatcaaaggttgcaagattttatcactaaggctatgaagaaccattgcttaagctgatgagaatgaaaactgatcatgctggactagttattaatgctgaagaaagaacgctttccttgac

SEQ ID NO: 2027 - DNA, 692 bp, Zea mays
  Clone ID: TF_ZmC369_109
tgggaccctcgggccggccgggacgcaacctcccactgcattctcgaattccgattcccaatccagcaaaccctaccagccttttgcaaactcagagagggacccgatggcacccaaggcggagaagaagccggcggcgaagaagcccgcagaggaggagcccgcggccccggcggagaaggcccccgctgggaagaagccgaaggcggagaagcggctcccggcgggaaaatccgccggcaaggaaggcggtgttgacaagaaggggcggaagaaggccaagaagagcgtggagacgtacaagatctacatcttcaaggtgctgaagcaggtgcacccggacatcggcatctcctccaaggccatgtccatcatgaactcattcatcaacgacatcttcgagaagctcgccggcgaggcggccaagctcgcccgctacaacaagaagcccaccatcacctcccgggagatccagacctccgtccgcctcgttctacccggcgagctcgccaagcacgccgtctcggagggcaccaaggccgtcaccaagttcacctcgtcctaagctcctttctagtaggtccttaagcgccgtggcgccttttgactgtatggaatgtttgtcatctgaaagttgatctgagcagtgcaatatataattctggcaaaaaaaaaaaaaaaaaaggccccta

SEQ ID NO: 2028 - DNA, 871 bp, Zea mays
  Clone ID: TF_ZmC369_110
cattgggtacctcgaggccgggccgggacgcaacctcccactgcattctcgaattccgattcccaatccagcaaaccctaccagccttttgcaaactcagagagggacccgatggcacccaaggcggagaagaagccggcggcgaagaagcccgcagaggaggagcccgcggccccggcggagaaggctcccgctgggaagaagccgaaggcggagaagcggctcccggcgggaaaatccgccggcaaggaaggcggtgttgacaagaaggggcggaagaaggccaagaagagcgtggagacgtacaagatctacatcttcaaggtgctgaagcaggtgcacccggacatcggcatctcctccaaggccatgtccatcatgaactccttcatcaacgacatcttcgagaagctcgccggcgaggcggccaagctcgcccgttacaacaagaagcccaccatcacctcccgggagatccagacctccgtccgcctcgttctacccggcgagctcgccaagcacgccgtctcggagggcaccaaggccgtcaccaagttcacctcgtcctaagctcctttcgagtaggtccttaagcgccgtggcgccttttgactgtatggaatgtttgtcatctgaaagttgatctgagcagtgcaatatataattctggcatactattctcgcaatcgttttggggttcagaatgggactgacatcagagtaatatgtggcataccttctgatcctctgtactcgagaggattttgttgtggataagccacttgctgcctttgtttggtggataattgcttcgagcataagaaacagtgtatgctgctataaacatctatttgctatgtgacggcatctg

SEQ ID NO: 2029 - DNA, 703 bp, Zea mays
  Clone ID: TF_ZmC369_119
gccggccgggccgggacgcaacctcccactgcattctcgaattacgattcccaatccagcaaaccctaccagccttttgcaaactcagagagggacccgatggcacccaaggcggagaagaagccggcggcgaagaagcccgcagaggaggagcccgcggccccggcggagaaggcccccgctgggaagaagccgaaggcggagaagcggctcccggcgggaaaatccgccggcaaggaaggcggtgttgacaagaaggggcggaagaaggccaagaagagcgtggagacgtacaagatctacatcttcaaggtgctgaagcaggtgcacccggacatcggcatctcctccaaggccatgtccatcatgaactccttcatcaacgacatcttcgagaagctcgccggcgaggcggccaagctcgcccgctacaacaagaagcccaccatcacctcccgggagatccagacctccgtccgcctcgttctacccggcgagctcgccaagcacgccgtctcggagggcaccaaggccgtcaccaagttcacctcgtcctaagctccttttctagtaggtccttaagcgccgtggcgccttttgactgtatggaatgtttgtcatctgaaagttgatctgagcagtgcaatatataattctggcaaaaaaaaaaaaaaaaaaagggcggccaaagactagtgagcta

SEQ ID NO: 2030 - DNA, 709 bp, Zea mays
  Clone ID: TF_ZmC369_133
gggaccctcgaggccggccgggctacgcaacctcccactgcattctcgaattccgattcccaatccagcaaaccctaccagccttttgcaaactcagagagggacccgatggcacccaaggcggagaagaagccggcggcgaagaagcccgcagaggaggagcccgcggccccggcggagaaggctcccgctgggaagaagccgaaggcggagaagcggctcccggcgggaaaatccgccggcaaggaaggcggtgttgacaagaaggggcggaagaaggccaagaagagcgtggagacgtacaagatctacatcttcaaggtgctgaagcaggtgcacccggacatcggcatctcctccaaggccatgtccatcatgaactccttcatcaacgacatcttcgagaagctcgccggcgaggcggccaagctcgcccgttacaacaagaagcccaccatcacctcccgggagatccagacctccgtccgcctcgttctacccggcgagctcgccaagcacgccgtctcggagggcaccaaggccgtcaccaagttcacctcgtcctaagctcctttcgagtaggtccttaagcgccgtggcgccttttgactgtatggaatgtttgtcatctgaaagttgatctgagcagtgcaatatataattctggcatactattctcgcaaaaaaaaaaaaaaaaaagcggccctcg

SEQ ID NO: 2031 - DNA, 700 bp, Zea mays
  Clone ID: TF_ZmC369_33
aggaccagcctaagccaccagcgctcgtcacctccaatcaacaaattcccaatccgccgcttcccatcccgcgttcgccgctccatttgatcgaattcccgatggcacccaaggcggagaagaagccggcggcgaagaagcccgcagaggaggagcccgcggccccggcggagaaggctcccgctgggaagaagccgaaggcggagaagcggctcccggcgggaaaatccgccggcaaggaaggcggtgttgacaagaaggggcggaagaaggccaagaagagcgtggagacgtacaagatctacatcttcaaggtgctgaagcaggtgcacccggacatcggcatctcctccaaggccatgtccatcatgaactccttcatcaacgacatcttcgagaagctcgccggcgaggcggccaagctcgcccgttacaacaagaagcccaccatcacctcccgggagatccagacctccgtccgcctcgttctacccggcgagctcgccaagcacgccgtctcggagggcaccaaggccgtcaccaagttcacctcgtcctaagctcctttcgagtaggtccttaagcgccgtggcgccttttgactgtatggaatgtttgtcatctgaaagttgatctgagcagtgcaatatataattctggcatactattctcgcaaaaaaaaaaaaaaaaaaaagtacct

SEQ ID NO: 2032 - DNA, 993 bp, Zea mays
  unsure (1)..(993): unsure at all n locations
  Clone ID: TF_ZmC369_43
cgaggccgtgccgggaaaaaaaaaaaaaaaaaaaaaaaaaaaaaaaaaaaaaaaaaaaaaaaaaaaaaaaaaaaaaaaaaaaaaaaccgccccgacttttgggcaacggatattttgggttttcgcatcgatgaaaaacgtagcaaaaggcgatccctggggggaattgcaaaatcccgcgaaccttcgagtttttgaacgcaagttgcgcccgaagccttttgggggggggcaggtttgcttgggggtaacgcacgcaacctcccactgcattctcgaattccgattcccaatccagcaaaccctaccagccttttgcaaactcagagagggacccgatggcacccaaggcggagaagaagccggcggcgaagaagcccgcagaggaggagcccgcggccccggcggagaaggctcccgctgggaagaagccgaaggcggagaagcggctcccggcgggaaaatccgccggcaaggaaggcggtgttgacaagaaggggcggaagaaggccaagaagagcgtggagacgtacaagatctacatcttcaaggtgctgaagcaggtgcacccggacatcggcatctcctccaaggccatgtccatcatgaactccttcatcaacgacatcttcgagaagctggccggcgaggccgccaagctcgcgcgctacaacaagaagcccaccatcacgtcccgcgagatccagacctccgtgcgcctcgtgctccccggcgagctcgccaagcacgccgtctctgagggcaccaaggccgtcaccaagttcacctcctcctaggcttgcacgctcgccctttgtaggcatctctntgtgttgatgttccccttgttgtagttatatgttgctggtttctctgtcggcgctgctcgtaactgcgtcatgtaaccctgcaaggacntggtttatttgtgaatctcnancacttttgttggtgatcactcatgttctanaaaaaaaaaaaaaaaagcggccc

SEQ ID NO: 2033 - DNA, 780 bp, Zea mays
  Clone ID: TF_ZmC369_59
cggacgcaacctcccactgcattctcgaattccgattcccaatccagcaaaccctaccagccttttgcaaactcagagagggacccgatggcacccaaggcggagaagcggctcccggcgggaaaatccgccggcaaggaaggcggtgttgacaagaaggggcggaagaaggccaagaagagcgtggagacgtacaagatctacatcttcaaggtgctgaagcaggtgcacccggacatcggcatctcctccaaggccatgtccatcatgaactccttcatcaacgacatcttcgagaagctcgccggcgaggcggccaagctcgcccgttacaacaagaagcccaccatcacctcccgggagatccagacctccgtccgcctcgttctacccggcgagctcgccaagcacgccgtctcggagggcaccaaggccgtcaccaagttcacctcgtcctaagctcctttctagtaggtccttaagcgccgtggcgccttttgactgtatggaatgtttgtcatctgaaagttgatctgagcagtgcaatatataattctggcatactattctcgcaatcgttttgggggttcagaatgggactgacatcagagtaatatgtggcatatcttctgatcctctgtactcgagaggattttgttgtggataagccatttgctgcctttgtttggtgggtaattgcttcgagcataagaaacagtgtatgctgctataaacgtctttttgcaacgcgacgccaaaaaaaaaaaaaaaaaagcggcc

SEQ ID NO: 2034 - DNA, 703 bp, Zea mays
  Clone ID: TF_ZmC369_93
ttgggaccctcgaggccggccggaacgcacctccactgcattctcgaattacgattcccaatccagcaaaccctaccagccttttgcaaactcagagagggacccgatggcacccaaggcggagaagaagccggcggcgaagaagcccgcagaggaggagcccgcggccccggcggagaaggcccccgctgggaagaagccgaaggcggagaagcggctcccggcgggaaaatccgccggcaaggaaggcggtgttgacaagaaggggcggaagaaggccaagaagagcgtggagacgtacaagatctacatcttcaaggtgctgaagcaggtgcacccggacatcggcatctcctccaaggccatgtccatcatgaactccttcatcaacgacatcttcgagaagctcgccggcgaggcggccaagctcgcccgctacaacaagaagcccaccatcacctcccgggagatccagacctccgtccgcctcgttctacccggcgagctcgccaagcacgccgtctcggagggcaccaaggccgtcaccaagttcacctcgtcctaagctcctttcgagtaggtccttaagcgccgtggcgccttttgactgtatggaatgtttgtcatctgaaagttgatctgagcagtgcaatatataattctggcatactattctcggaaaaaaaaaaaaaaaaaagcggcc

SEQ ID NO: 2035 - DNA, 852 bp, Zea mays
  Clone ID: TF_ZmC369_94
ggaccctcgaggccgggccgggacgcaacctcccactgcattctcgaattacgattcccaatccagcaaaccctaccagccttttgcaaactcagagagggacccgatggcacccaaggcggagaagaagccggcggcgaagaagcccgcagaggaggagcccgcggccccggcggagaaggcccccgctgggaagaagccgaaggcggagaagcggctcccggcgggaaaatccgccggcaaggaaggcggtgttgacaagaaggggcggaagaaggccaagaagagcgtggagacgtacaagatctacatcttcaaggtgctgaagcaggtgcacccggacatcggcatctcctccaaggccatgtccatcatgaactccttcatcaacgacatcttcgagaagctcgccggcgaggcggccaagctcgcccgttacaacaagaagcccaccatcacctcccgggagatccagacctccgtccgcctcgttctacccggcgagctcgccaagcacgccgtctcggagggcaccaaggccgtcaccaagttcacctcgtcctaagctcctttcgagtaggtccttaagcgccgtggcgccttttgactgtatggaatgtttgtcatctgaaagttgatctgagcagtgcaatatataattctggcatactattctcgcaatcgttttggggttcagaatgggactgacatcagagtaatatgtggcataccttctgatcctctgtactcgagagggattttgttgtggataagccacttgctgcctttgggttggtgggaattgcttcgagcataagaaacagtgtatgctgctataaacatctatttggt

SEQ ID NO: 2036 - DNA, 352 bp, Zea mays
  unsure (1)..(352): unsure at all n locations
  Clone ID: TF_LIB4730-036-R1-K1-H3
cctccattcccgagtctccagccaaccacatccagtccaccccatccccctcgaccccgacaaccccgagtcccgacccgatggcgcccaaggccgagaagaagccagcggagaagaagccggcggccgaggagaaggcggagaagacggccgcaggcaagaagcccaagtccgagaagcgcctgcccgcctcgaagtcctccgggaaggagggcggngagaagaaggggaagaagaaggccaagaagagcgnggagacctacaaaatgtacatgttgaaggtgctaaagcaggtgcacccggacatggggatgtggtgtaagttatgggcatgatgaactggttgatgaac

SEQ ID NO: 2037 - DNA, 683 bp, Zea mays
  Clone ID: TF_LIB4729-067-R1-K1-G7
tcctcttatttcttatcagacgatcccttcttagctaactaaatccctagtcgccccgcatcggtggcgcacgacgccgagaagaaacccgcggcgaagaagccggcggaggaggaccccgccgccgaggaggcccccggcgagaagaagccggaggaggagaagcggctccctgctgggtagtctgctgccgagggaggcgggtagggcacgaggggcaagaaggacggcaagaacagcgtggcctcctacaacatcttcttcttggaggtgctgaaggaggtgcaccccgtcattgtcttctcctccgaggtgatgttcatgatgaacttctttattgacgatttctttgagaagcttgctgatgacgccgacctgctcggctgttataacaagaatactatcatctcctcccgggagatccagtccttcgggcgcctccttcttgccggggaggtcgagcagcacgccttctacgagggcaccgagggcgtcaccaagatctcctcctactatgctgggccgccgcttgttggaggattttctgctgtgatcacgtttgttgctgttagtaggtgctgctggctgctggcttttatggatgtctactatccggctggaacagctgtgttatctgataggaccgtgatggtgattattccaccccgttttttttttttttt

SEQ ID NO: 2038 - DNA, 361 bp, Zea mays
  Clone ID: TF_jC-zmXLIB3527P015Bh10d1
cgcagagcgggggtacgggcgcccccgtctacctggccgccgtcctcgagtacctggtcgccgaggtgctggagctggccggcaacgctgccaaggacaacaagaagacccgcatcatcccgcgccacgtgctccttgccatccgcaacgacgaggagctagagaagctgctgtacggcgccaccatcgcccacggcggagccctccccaccatcaaaccggtgctcctgcccacgaagaccgctgagacggccgccgcccaggatgccaagccgcccaacaaggccgtcccgccccccaagaaggcatagaggggcgggcgcctttaccgctgcgaagtcgaatgctcgtgttcagtaga

SEQ ID NO: 2039 - DNA, 710 bp, Zea mays
  Clone ID: TF_LIB4185-036-R1-K1-H7
tcgagtttttttttttttttttttttttttttttttttttttttttttttttttttttttttttttttttaagggactgcaaacacaatacagttacttttttacataaaaaacatcaaccgagcccaaaaaacaaacgcaggggcaactaccaccggggaaacacacctaaccgtactactattgtactactgcaaaaaggaaacgagggcccgtcgcatggctcgcctaggagctagggaacttggggacggttttggggccctcggaaacggggtgcttggcgagctccccgggaaggacgaggcggacggaggtctggatctcgcgggacgtaatggtaggctttttgttgtaccgcgccagtttggccgcctccgccgccagtttttaaaaaatgtcgttgatgaaggagttcatgatggacatggccttggacaaaatgccaatgtccgggtgcacctgtttcagcaccttgaaaatgtaaattttgtacgtctccaccgacttttttgccttttttttcccctttttttcgccaccctccttgcctggggacttgcccggggggagccgtttttcggccttgggctttttccccgccgtggccttttccgccgccggttcctcctccggaggctttttgggggggggctttttctcggccttgggcgccattggaatagggcggggggttcgggattgggctt

SEQ ID NO: 2040 - DNA, 642 bp, Zea mays
  Clone ID: TF_ZmC520105_1
actatctcagtccccatcttccctgcctccagcaaactcacacatctcaccaccggagctcccaatcccacccgaagcggcagccatggcccccaaggcagacaagaagcccgtcgccgagaacaaggtggagaaggcggcggagaaaacccccgccggcaagaagcccaaggccgagaagcggctgccggcgggcaagacggcgtccaaggaggccggcggcgaggccaagacgaggggccggaagaagggcagcaaggccaagaagagcgtcgagacgtacaagatctacatcttcaaggtgctgaagcaggtccaccccgacatcggcatctcctccaaggccatgtccatcatgaactccttcatcaacgacatcttcgagaagctcgccggcgagtccgccaagctcgcgaggtacaacaagaagcccaccatcacctcccgggagatccagacctccgtccgcctcgtcctccccggcgagctcgccaagcacgccgtctccgagggcaccaaggccgtcaccaagttcacctcctcctagactgacggcgtgtagttggtttctgtatctgtactctgcttatctatctatctgcaagtagcggtagcggtagcagtgcctgtgctgggtgattg

SEQ ID NO: 2041 - DNA, 754 bp, Zea mays
  unsure (1)..(754): unsure at all n locations
  Clone ID: TF_LIB4826-019-A1-N1-F2
ccggccggggctattcgtgtcctggcatccgcagagagcttgttccgtccaggcaaccaaaaagcaagttgccccgccgcgcagaggaagaagagagcagaggaggatggctcgtacgaagcagaccgcccgcaagtccacgggaggcaaggccccccgcaagcagctcgccaccaaggcggcgaggaagtcggcgccgacgaccggcggcgtgaagaagccccacaggtacaggcccggaaccgtggcgctgcgcgagatccgcaagtaccagaagagcactgagttgctgattaggaagctgccgctccagaggcttgtcagggagattgctcaggatttcaagacggatctgcgcttccagagccatgccgtgcttgctctgcaggaggcagcagaggcctacctggttggtctcttcgaagataccaatctgtgcgcgatccatgcgaagcgcgtgaccatcatgcccaaggacattcagctggcaagaaggatccgtggcgagagggcgtaagtctgtcgacgggaggaagaactctgcgctcgttttgtgtgttcgcctctctcaccctgtaagttttgtgaaaagataatctagtaaactgtacttggnctgtttgactgtagccgcagtagcgtctgcgcataccgttggctgttggcgtgtctggagtcttttatccatccattctagtactacttaataatcgtgatatatcaccgggttgctaaacgtgatccagacttaact

SEQ ID NO: 2042 - DNA, 713 bp, Zea mays
  Clone ID: TF_LIB4762-109-Q1-K1-E12
cattgggtacctcgaggccggccgggatcgaacgatctattctccctagaatatataacagcagatcctgcatgcgaacgaaagcgctagcccccttcgtactgtctcgatgggccgcaccatcctcacggctaggaactcctctgacgacaaggcgtcaaggaagcgcctggtcaccaatgttcctgatcaagtctgccccaggccactgcctgtactgaacaagccccatcgtcttccgccccgataccgttatgctccgggaaatacgcaagaaccaaaagagcacgaacttgctgatcctaaagctgtcgatctaacaactgctgtgtgagatcgaccaaaacttcaagaccgacctccgcttccagagctccggctgcgccgcgctgaaataagagtccgaaatctacctcgacgggctcttcaaggacaccaacctctgctgcattcacgtcaaaagcgacaccatcatggccaaggacatccatttcgcccggcgtatccctggttataagacctaggattcttaccggtggatgtagtaatcagcagcggccgtttctgtcatcactgactgaatagaaggtgtatagatgtgccgaatgtctgtagctagagttatcggtgaaatcatgatgtatctgatactacactggtgtgaataactatgtctatgcatggccaatgaaggtctcccttatcatctccct

SEQ ID NO: 2043 - DNA, 476 bp, Zea mays
  Clone ID: TF_LIB3637-255-Q6-N6-H9
gggtggctgaagatcccctccctggggccccacatacaataggacccaagggcccaaactggggcagggcacatcccatccccagatctagacccgagcatgccccagcccacagggcaaaggaaatccctactttctaagccctcgggggggaccaggcgcccctcttgggggacctgggctccttggtgccggcgctggcccccttttccgccaccttcttgggccggaacaccgagtggttttcggggaggaccccccccggccccagggacccccctcccaccaaattccccagctccccctgggtgcggatcccccggagcccctggcgcggaacaaaccccctctttttggtggctttcgccgagttccccgccaactccaaaacctcgcgggggaggccctccaggacagggggcaggcaaaccggggcgccacggcccaccccctggaactacccgcccttttttagg

SEQ ID NO: 2044 - DNA, 566 bp, Zea mays
  Clone ID: TF_LIB3969-010-Q1-M6-G2
tccaccgcggtggcggccgcccttttttttttttttttttttaagaaacatgtttttttctatatccattaggggtgacataaagaaacttgggcgaaaaaggtacactagccaattacaattggccgtttacagacctacacatgcacaacactatatcctacttgaaaccctctgccttgtaggagaggaacttgaagaacttcttgggcgacttggttctacttgctcccacccgtggacgccttctccgacgttttcttgggcaaaataaccgagtggatgttgggcaacacgccgcccagggccacgggaacactggtcacaagattcccgagctgctcggcattgtggatagcaaagaccacgtgccccgagacgatgctcgccttgttggtgctcttggcagaaaagctggtgagctgcatgacctagcgggcaggttctacatgacggacgttaagcagacggaggtaccggtgccgacgcactgagcgtaccggcttttcttgacgtagcaccccatgcgggcgaaaaaaaactggagcccggtcttcacggacctc

SEQ ID NO: 2045 - DNA, 295 bp, Zea mays
  Clone ID: TF_LIB3150-075-P1-N1-F7
tcttcctttcgccctcaaattcgttccgtccaggcggggttgatatcgagcagggaaggagaggtgaagatggctcgtacgaagcataccgcccgcaagtccaccggaggcaaggccccgcgcaagcagctcgccaccaaggcggtgaggaagtcggcgccgactaccggcggcgtgaagaatccccacaggtacaggccctgcaccgtggcgctgttcgagatccgcaagttccagaagagcacggtgctgctcattcggaagttgcccttttcagtgcctggttcgtgagatc

SEQ ID NO: 2046 - DNA, 759 bp, Zea mays
  Clone ID: TF_LIB4766-007-R2-K1-D10
ccggggatacaaacccgtcctctgtccgtcctaccccaccgctcacctcggcttggctttctcccctcttccgcacccgcttctcgctccggattccggattccctctgctctttccctaacgaaggtagccatggcggggagaggtaaggcgatcggctcaggcgccgccaagaaggccacgtccaggagctccaaggctggcctccagttccctgtgggaaggatcgccaggttcctcaaggccggcaagtatgccgagagagtcggcgccggcgcccctgtctacctcgctgccgtgctcgagtatcttgctgctgagaacaatgggcggattttggctgaagatctaaacctatggttcttgagctggccagcaatgcggcacgtgacaacaagaagacccgcatcgtaccgcgccacattcagctcgccgtccgcaacgacgaagagctctcccgcttgctgggcacggtgaccatcgctagcggggggggaatgcccaacatccataacctgctgctcccgaagaaggccggcggcggcagcgccaaggctgcggctggtgacaaggactaagtccttgactacgcctgggggcacctccaggatgctgccgtatcaacagtgtctgtgtagtacgctagctgttccttgtagctgggtatttgggggtggtgtaacactggtaaactaagatactctttgtggttgctaaggattaaaatctgtatttggtgctataaaaagggcatccttg

SEQ ID NO: 2047 - DNA, 489 bp, Zea mays
  unsure (1)..(489): unsure at all n locations
  Clone ID: TF_LIB4740-009-R1-K1-F6
ggccggggctattcgtgtcctggcatccgcagagagcttgttccgtccaggcaaccaaaaagcatgttgccccgccgcgcagaggaagatgagagcagaggaggatggctcgtacgaagcagaccgcccgcaagtccacgggaggcaaggccccccgcaagcagctcgccaccaaggcggcgaggaagtcggcgccgacgaccggcggcgtgaagaagccccacaggtacaggcccggaaccgtggcgctgcgcgagatccgcaagtaccagaagagcacggagctgctgatccgcaagctgcccttccagcgcctggtgcgcgagatcgcgcaggacttcaagacagacctccggttccagagccacgccgtgctggcgctccaggaggccgccgaggcctacctcgtcggtctcttcgngggccccnccctctgcgccctgctcgcttngcgcgtcgccttcttgcccctgggcctcctgctcgccc

SEQ ID NO: 2048 - DNA, 338 bp, Zea mays
  Clone ID: TF_LIB3357-004-P1-K1-G11
cgcacagggctacaccaaccaacagcaggggaaattctcccattccactttattttatgcgggtaatatatggctgcccgcaacgggcggcaagggcctgtgcaaggacggatctaaccgccaccggaaggtgctccgggacaacatccaggggatcacgaagccggctatccggcggctggcgcgcaggggcggcgtgaagcgcatctccgggctcatctacgaggagacccgcggcgtcctcaagatcttcctggagaacgtgatccgagacgccttcacctacaccgagcacgcgcgccgcaagaccgtaacagccatggacgttttttacgcac

SEQ ID NO: 2049 - DNA, 871 bp, Zea mays
  Clone ID: TF_ZmC6351_58
cattgggtacctcgaggccggccgggagatttcccaactttttgttcctcgcgccgccgccgccgccgccgtgacggaaggaagaggaggagcaaggagcacgacgcgatgggtcactccaacgtgtggaactcgcaccctaagaactacggccctggctcccgcgtctgccgggtctgcgcgaaccctcacggtctgatcaggaagtacgggctcatgtgctgcaggcagtgcttccgcagcaacgccaaggacattggtttcatcaagtaccgttgaagaggccactgtgctgctgtggagaacttcctacatcaaagaaatgggtccttcattagaaggcctaatttatgcgctttagctttttgttcagaacttgagactcatgtgttaaactcgacttgttaaagttttgatggctactttgtgcttgttggaccagctataatcagaagattgaaattttctcacgcaaaaaaaaaaaaaaaaaaaaaaaaaaaaaaaaaaaaagcgccactaatctcgccttccgaggaaactcaccagcccaccacagacccgagcggaagaagccatgtccgggcgcggtaagggtggcaaggggctcggcaagggcggcgcgaagcgtcaccggaaggtgctgcgcgacaacatccagggcatcaccaagccggcgatccggcggctggcgaggaggggcggcgtcaagcgcatctcggggctcatctacgaggagacccgcggcgtgctcaagatcttcctcgagaacgcatccgcgacgccgtcacctacactgagcacgcccgccgcaagaccgtcaaccgccatggacgtcgtctacgcgctcaagcgccagggccgcaccctctac

SEQ ID NO: 2050 - DNA, 281 bp, Zea mays
  Clone ID: TF_LIB3357-035-P1-K1-H3
cggccgaatccgtcgccacgcgtccgacagtgaccgatcctgctgaatcttctcgtgctcatggccgacaacaacagaggagtcaccgcggagggccccggagcactgctctaagctggcgcagtggccggcacgcgggtgagaagcccaccgtttcgcccggaccgtcgcgctccgcgagatccgcaggtaccagaagagcactgagctgctcatccgcaagctccccttccagcgcctcgtccgcgagatcgcgcaggaacttcaaagactggatctga

SEQ ID NO: 2051 - DNA, 381 bp, Zea mays
  Clone ID: TF_LIB3070-005-Q1-N1-B3
ccaaactcgtgagcactatgtactagtgacgcacaagccacgatatagccattatacagacatggactccaacgacaccggatcatgaagccaagggaaagaagggagcggacggccgcaaggactgcaatccaaggaagaagtcagagtcggaggccgtgaaggctatacttcaattgcacgtatgccgcatcgtacgctacttgaagaaaggccgatacacgcaacatgtcagcacctgcgccaacgtctacctcgcagctgtactagaatacctcgccgctgaggttctggagctcgccggtaatgctgccagggacatcaagatgactcgcattattacgagccacgagcttatggcgatccggaacgacgaggagc

SEQ ID NO: 2052 - DNA, 1257 bp, Zea mays
  Clone ID: TF_ZmC2834_1
gccggccgtgccgggagacaccacaccagtgtgctcagtgctcactgctcaccataataacgctgcacctcttttcatttcaccatctcctgcccccttaaaaaaaagactcaccgtcgacacgccctcccgtcccgagagttctgaatcgaaaccgtcggccacgagagcagtgcgaggcgcccaccgcgatggctcgaaccaagcaccaggccgtgaggaagacggcggagaagcccaagaagaagctccagttcgagcgctcaggtggtgcgagtacctcggcgacgccggaaagggctgctgggaccgggggaagagcggcgtctggaggtgactcagttaagaagacgaaaccacgccaccgctggcggccagggactgtagcgctgcgggagatcaggaagtaccagaagtccactgaaccgctcatcccctttgcgcctttcgtccgtgtggtgagggagttaaccaatttcgtaacaaacgggaaagtagagcgctataccgcagaagccctccttgcgctgcaagaggcagcagaattccacttgatagaactgtttgaaatggcgaatctgtgtgccatccatgccaagcgtgtcacaatcatgcaaaaggacatacaacttgcaaggcgtatcggaggaaggcgttgggcatgatatataatatccattctgattgcatcattcttgtgaatttgtttgtaggagctagacattagtgttgttgaatgctgcatggttcctaatccttttcgcagtctaacatctgtggagttagtatgttacatggcaacagctgaacatctgtggactataactatatggcaacagccgaagattgtgtctgtgggataactggttgttttggttgctcttcagtagtttgtttgcttcagtctgcagtatggactatggagtaaactgcatgctgaaacccgaaccactgctgaaacggcagttgccaggatagcaggagggcctttatgcacagtggaattgagtagagaactgagtaaaccatggttctttctccttttgaactggaacacacacagttggatcttgtttctcttcttatgccattgtcatcgtgtttataaggggtgtaaatggtacaaatattatctgcccgtattcaaatttgatctatctaagaaggctgaaatccgatccatattcgagtccacgtattcagtacccgacctgtatctgaattatattcatacccatatactcaaagttggatatt

SEQ ID NO: 2053 - DNA, 1158 bp, Zea mays
  Clone ID: TF_ZmC2834_2
aattcggcacgaggccctcccgtcccgagagttctgaatcgaaaccgtcggccacgagagcagtgcgaggcgcccaccgcgatggctcgaaccaagcaccaggccgtgaggaagacggcggagaagcccaagaagaagctccagttcgagcgctcaggtggtgcgagtacctcggcgacgccggaaagggctgctgggaccgggggaagagcggcgtctggaggtgactcagttaagaagacgaaaccacgccaccgctggcggccagggactgtagcgctgcgggagatcaggaagtaccagaagtccactgaaccgctcatcccctttgcgcctttcgtccgtgtggtgagggagttaaccaatttcgtaacaaacgggaaagtagagcgctataccgcagaagccctccttgcgctgcaagaggcagcagaattccacttgatagaactgtttgaaatggcgaatctgtgtgccatccatgccaagcgtgtcacaatcatgcaaaaggacatacaacttgcaaggcgtatcggaggaaggcgttgggcatgatatataatatccattctgattgcatcattcttgtgaatttgtttgtaggagctagacattagtgttgttgaatgctgcatggttcctaatccttttcgcagtctaacatctgtggagttagtatgttacatggcaacagctgaacatctgtggactataactatatggcaacagccgaagattgtgtctgtgggataactggttgttttggttgctcttcagtagtttgtttgcttcaggtaaccatgctgcgaactatgatgttttcattctcggtttgcttcagctaaccgagatcgattcagtctgcagtatatggactatggagtaaactgcatgctgaaacccgaaccactgctgaaacggcagttgccaggatagcaggagggcctttatgcacagtggaattgagtagagaactgagtaaaccatggttctttctccttttgaactggaacacacacagttggatcttgtttctcttcttaggccattgtcatcgtgtttctaaggggtgtaaatggtatctgtccgtattcgaatttgatctatctaacaaggctgaaatccgaaaaaaaaaaaaaaaaaaaaaaaaaaaaaaaa

SEQ ID NO: 2054 - DNA, 730 bp, Zea mays
  Clone ID: TF_ZmC2834_4
attcgctcctcccgaccgccgccgtcgccgcctcctctccccagcacccggagctcgaccgaacgccgctcaccgtcgacacgccctcccgtcccgagagttctgaatcgaaaccgtcggccacgagagcagtgcgaagcgcccaccgcgatggctcgaaccaagcaccaggccgtgaggaagacgcaggaaagggctgctgggaccgggggaagagcggcgtctggaggtgactcagttaagaagacgaaaccacgccaccgctggcggccagggactgtagcgctgcgggagatcaggaagtaccagaagtccactgaaccgctcatcccctttgcgcctttcgtccgtgtggtgagggagttaaccaatttcgtaacaaacgggaaagtagagcgctataccgcagaagccctccttgcgctgcaagaggcagcagaattccacttgatagaactgtttgaaatggcgaatctgtgtgccatccatgccaagcgtgtcacaatcatgcaaaaggacatacaacttgcaaggcgtatcggaggaaggcgttgggcatgatatataatatccattctgattgcatcattcttgtgaatttgtttgtaggagctagacattagtgttgttgaatgctgcatggttcctaatccttttcgcagtctaacatctgtggagttagtatgttacatggcaacagctgaacatctgtggactataactatatgac

SEQ ID NO: 2055 - DNA, 706 bp, Zea mays
  Clone ID: TF_ZmC2834_5
cggccgggccgggatctcctgcccccttaaaaaaagactcaccgtcgacacgccctcccgtcccgagagttctgaatcgaaaccgtcggccacgagagcagtgcgaggcgcccaccgcgatggctcgaaccaagcaccaggccgtgaggaagacggcggagaagcccaagaagaagctccagttcgagcgctcaggtggtgcgagtacctcggcgacgccggtgagcgcgtgcgtgcggggatcagttccctccttttgccttttttgtgggctgctcttacttgcttgcaagctgtttgatggaatgcaggaaagggctgctgggaccgggggaagagcggcgtctggaggtgactcagttaagaagacgaaaccacgccaccgctggcggccagggactgtagcgctgcgggagatcaggaagtaccagaagtccactgaaccgctcatcccctttgcgcctttcgtccgtgtggtgagggagttaaccaatttcgtaacaaacgggaaagtagagcgctataccgcagaagccctccttgcgctgcaagaggcagcagaattccacttgatagaactgtttgaaatggcgaatctgtgtgccatccatgccaagcgtgtcacaatcatgcaaaaggacatacaacttgcaaggcgtatcggaggaaggcgttgggcatgatatataatatccattctgattgc

SEQ ID NO: 2056 - DNA, 545 bp, Zea mays
  unsure (1)..(545): unsure at all n locations
  Clone ID: TF_uC-zmflteosinte067f04b1
tcagagagggacccggggggacccatggcggagaagaagccggcggccaagaagcccgcagaggaggagcccgcggccccggcggagaaggcccccgctgggaagaagccgaaggcggagaagcggctcccggcgggaaaatccgccggcaaggaaggcggtgttgacaagaagggtcggaagaaggccaagaagagcgtggagacgtacaagatctacatcttcaaggtgctgaagcaggtgcacccggacatcggcatctcctccaaggccatgtccatcatgaactccttcatcaacgacatcttcgagaagctcgccggcgaggcggccaagctcgcccgctacaacaagaagcccaccatcacctctcgggagatccagacctccgtccgcctcgttctacccggcgagctcgccaagcacgccgtctggagggcacaaggccgcaccaagtcacctcgcctagctcttttagtaggccttagcgccgggcgcctttgactgatggaatgttgcattgaagttgaccggcagngattttc

SEQ ID NO: 2057 - DNA, 585 bp, Zea mays
  Clone ID: TF_LIB4730-049-R1-K1-C4
tgggtaccccctcgaggggccggccgggactcggactcacacgcgaatatcagagcactcacgccccgtccgaactcgagagtcataatcaagagacctactcgacctccctgtccccagcgctagcccgatggagccgaagcgaagcagagcagagacgcaagtcgatcgaggcgcaaaggggtcgcggaagcagctggcgacgaaggcggcgcgcacgtcgtcgccgtcgacgggcggagtgaagaaaccgcaccggttgcgcccaggcaccgttgcgctgcgcgagatccgcaagtaccagaaaagcacgaagctggtgatccgcaagctcccgatccagcgcctggagcgcgagatcgcgcaggacttcaagacggacctccgcttccagtcctccgccgtcgccgcgctgcaggaggccgtcgaggcctacctggtgggcctcttcgaggacaccaacctttgtgccatccacgccaagcgcgtcaccatcatgcccatggacatccagctcgcgcgccgcatacggggcgagcgcgcctaggcggttcggtttgggcgcctgctcgctactgttggagg

SEQ ID NO: 2058 - DNA, 632 bp, Zea mays
  unsure (1)..(632): unsure at all n locations
  Clone ID: TF_LIB4977-005-R1-K1-A4
ttgggtccctcgaggccggccgggccgggactcaccctcttcaatctccccagcaatccctagcagaagccttccatcctcactcgctcgatggcccgcacgaagcagacggtgaggaagtccaccggcggcaaggcgccgaggaagcagttggcgactaaggcggcccgcaagtctgcccctgcgaccggcggagttaagaagccccaccgcttccgccccggtaccgtcgcgctccgggagatccgcaagtaccataagagcacagagctgctgatccgcaagctgccgttccagcgcctggtgcgggagatcgcgcaggacttcaagaccgacctacgcttccagagctccgctgtctccgcgctgcatgaggcggctgaggcctaccttgtcagtctcttcgaggacaccaacctctgcgccatccacgccaagcgcgtcaccatcatgcccaaggacatccagcttgcccgccgcatccgtgacgagagggactaagcatcgtatattctgtcatcagcgcccgatcagaacatgtagagatgtgctgagntctgtagtttgtgctactgtcaaatcatcgagtacctggttgttcactgctgtaacttgatatcatgatgcatatg

SEQ ID NO: 2059 - DNA, 652 bp, Zea mays
  Clone ID: TF_LIB5026-038-Q1-XP2-B2
gccggccggtccgggacacagcaatcttcaatctcccgagcaaagcaaagctctagccttccatcctcactcgctcgatggcccgcaccaagcagacggctaggaagtccaccggcggcaaggccccgaggaagcagctggcgactaaagcggcccgcaagtctgcccctgcgaccggcggagtgaagaagccccaccgcttccgccccggcaccgtcgcgctccgggagatccgcaagtaccagaagagcacggagctgctgatccgcaagctgccgttccagcgcctggtgcgggagatcgcgcaggacttcaagaccgacctacgcttccagagctccgctggctccgcgctgcaggaagcggctgaaggctaccttggcgggctcttccaggacaccaacctctggggcatccacggcaagggcggcaccatcatggcccaggacattcagcttggccgccgcattcgtggggagagggcctaagcatcatatattctggcatcaatggcccaacaaaagaaggaaagaagggctggggtccggaatttggggtactggccaatcatccaagaagtgggtggtcaccggtggaacttaatatcctggtggctatggaatggcaatggactatggtatccgttctccag

SEQ ID NO: 2060 - DNA, 531 bp, Zea mays
  Clone ID: TF_uC-zmroteosinte019g10a1
aacaaggttaacaactgatgtatatggtagacggacataggatcactgatcaacattcaaataaccagagcaatgcattaccaccatgactaaattcataacacaggcaaaagccactgcaccacttagacacaccagccaaccaccactactaccacgagaagcggcacatcacagtgcttgcttgagaagcagacacaacgacgcctactagaaggcggctaagacgaggtgaacttggtgacggccttggtaccctccgagacggcgtgcttggcgagctcgccggggaggacgaggcggacggaggtctggatctcgcgggaggtgatggtgggcttcttgttgtagcgggcgagcttggcggcctccgcggcgagcttctcgaagatgtcgttgatgaaggagttcatgatggacatggccttggaggagatgccgatgtcggggtgcacctgcttcaggaccttgaagatgtagatcttgtaggtcttcacgctcttttttgccttcttcctacccttcttgtcg

SEQ ID NO: 2061 - DNA, 723 bp, Zea mays
  Clone ID: TF_LIB4762-139-Q1-K1-C10
cattgggtacctcgaggccggccgggacgaacatacaatctgactcgagcgtatctctctcatcggattcgcatcttttgctgtatcacaccaccgtgaaaccccagcaggcgcatcgatgtggcctaaggggcataagaaggcgggtgcgaagagccagcgcaggaggagcccgctgtcgcgaaggccccggcggaccaacaagcccaaggacggataagcgcctcccggcggccaagtcgaccgagaaagaacggggccaccagagggcgaagaagaacgccaagaactgctagtacacctactacatctacatcttcaaggtgctgaagtgcgaccactcgcacatctacatctcttccgagggcatgtctcgatcatgaactccttcatcaacgacatcttcgagaagctcgtcgttgaggctgccaagcttgcgcgctaaaacaagaagcccaccatcacctctcgtgagattcaaacctctgtccggcttgtccttcccggtgatgtcgacaagtacgcgctgtccgagggtaccatgggcgccactaagctcacatcatcttagatttgaggaagtagctattggcctggcgttggctagctgagtgctcaatttgcctgctactaatagtgcgatgactatccattgtgtagttgtgttgcgctaagaagtgagctacactgatgatatgtttgacattgttttttatgcatgtg

SEQ ID NO: 2062 - DNA, 779 bp, Zea mays
  Clone ID: TF_ZmC369_61
ctcctcgcatttcttcccatccccccttcgcaacccaaaccccaactcgccccgcatctatggcgcccaaggccgagaagaagcccgcggcgaagaagccggcggaggaggagcccgcggccgagaaggcacccgccgggaagaagccgaaggcggagaagcgggtccccgctggcaagtccgctgccaaggagggcggcgagggcaagaggggcaggaagaagggcaagaagagcgtggagacctacaagatctacatcttcaaggtgctgaagcaggtgcacccggacattggcatctcctccaaggccatgtcgatcatgaactccttcattaacgatatcttcgagaagctcgctgctgaggccgccaagctcgcgcgctataacaagaagcccaccatcacctcccgagagatccagacctccgtgcgcctcgtccttcccggggagctcgccaagcacgccgtctccgagggcaccaaggccgtcaccaagttcacctcggcctaggctgcgctgccgccgcttgcaggattgtctcctgtgttcacgtgtattgctgtagttaggcgctgctggcttctatgtctgttacccatctgtctgtagcaactgtgttatctgataggaccgtaatggtgcttatttaacccagctatatgtttctatgtgaaccatctctctatcggttgttgagtacctttatattgtgatgttgatgtgaatatgtttaataaaacgtgtcagtttctaaaaaaaaaaaaaaaaaaagcggcc

SEQ ID NO: 2063 - DNA, 777 bp, Zea mays
  Clone ID: TF_LIB5025-063-A1-XP1-B8
gccggcagggtcgggaattgtcatcacaaccactctcttcgactctttcatccatctcaataaagtctttcagactcctcaatcacctcttttttaaccaaccaccccaaaccacccaaccttcaaaatgactggcggcggaaagtctggcggcaaggcctctggttccaagaacgcgcaatcgcgatcttccaaggctggtctcgcgttccctgttggtcgtgtccaccgtcttctccgaaagggcaactacgctcagcgtgttggtgccggtgctcccgtttacctcgctgccgttctcgagtacctcgctgccgaaatcctcgagttggctggtaacgctgcccgtgacaacaagaagactcgtatcatcccccgtcatctccagctcgccatccgaaacgatgaggagttgaacaagcttctgggtcacgtcaccattgcccagggtggtgtccttcccaacatccaccagaaccttctgcccaagaagacgggtaagactggcaagaacgctagccaggagctgtaaatggttcatttggttcttgtttttccatgcgatggctggttgtttgggttgtcatgacaaaggggtcacggttcaagggttcatacggttgtttttcatcagtttattcgcgcgttagggttgtacaataatcccccacggctatggtcatgaaataagaatacttcaaagatctaaaaaaaaaaaaaaaattttaataataatattattattaaaggtaaaaaaaaaaaaaaaaaaggccccta

SEQ ID NO: 2064 - DNA, 462 bp, Zea mays
  Clone ID: TF_LIB4976-032-R1-K1-G8
atggctgtagctggctcctgcgcgtaattctaaagcgatcgcggacctcaggccatgttttttttatcctttttctctccactctagaggggcattagcgaggagatctaactcgcgtactccgagtccgcgttcacaggattccctggatcctcaaaacaggcaaagactcctctattaccgaatccttcaaccccaagtgccacgccgcctgcctctagaacatctcttgctgggttctctctgactttacggcggcgccacggggaacctcaagaacacccggatatggccgcaccacatccagctttatgtgttctccgaccactagctgacaaaactgttgaggacatccaccatcccgagcggtgctgttatgcctaccatccatcagcctctgctctccagtaatgctgactcctccaacgccagtgacaacaaccacaacaactgcgactgctt

SEQ ID NO: 2065 - DNA, 486 bp, Zea mays
  Clone ID: TF_3341037
tttttttttttttttttcccggcaaaaatactaaatttccaagttcctaatttttttttttttttttcccggcaaaaatactaaatttccaagttcctaagcatcaaatctaagaggaccattacaatccggcgggccggatttattgagcaagcaagctagctactaggcgggtagggtaggggactggggaaaggacacagcaaagaacccttctaacagatccgcggatcccgcagcgcgctcagttgctggtgaacttggtgacggccttggttccctcggaaacggcgtgcttggcgagctctccggggaagactaggcgcacggaggtctggatctcgcgggacatgatggtgggcttcttgttgtaccgcaccagcttggcggcctcgccggccaacttctcaaaaatgtccttgatgaaggagttcatgatggacatggccttggaggatatgccgatgtcggggtgcacctgcttca

SEQ ID NO: 2066 - DNA, 603 bp, Zea mays
  Clone ID: TF_LIB4762-048-R1-K1-H7
ccctcgaggtcgggcgggacacgcgaatcctaaatctgcccttgccgccgccactgcccgatccaggtgtgcagactgctccctcctcctctccgctccgaatggcccgcacgaagcagacggcgcgcaagtcgaccggcggcaaggcgccgcggaagcagctggccaccaaggcggcgcgcaagtcggccccggccacgggcggcgtgaagaagccgcaccgcttccgccccggcaccgtcgcgctccgcgagatccgcaagtaccagaagagcacggagctgctcatccgcaagctccccttccagcgcctcgtccgcgagatcgcgcaggacttcaagacggacctgcggttccagtcctcggccgtggcggtgctgcaggaggccgcggaggcgtacctggtggggctcttcgaggacaccaacctctgcgccatccacgccaagagggtcaccatgatgcccaaggacatccagctcgcccgccgcattaggggcgagagggcttgagctgacgcgctgctgctgttcgttgttgtaatgactagagtagatggtggtgggtgctttctatgccgtgcctattttgctatttcgggcg

SEQ ID NO: 2067 - DNA, 693 bp, Zea mays
  unsure (1)..(693): unsure at all n locations
  Clone ID: TF_LIB4719-012-R1-K1-F1
ctctaatctaggttgggggaaataggcctcgcgggtcgcaaaccgctctctgctgatttgggatttgggaggcgctcgagttttcaggtaaactatagtttagtgacccatggctcgtactaagcaaactgctcgcaagtccactggagggaaggctcctaggaaacaacttgccaccaaggctgcccgtaagcctgcacctacaactgggggagtaaagaagcctcaccgttaccgccctggaactgttgctcttcgtgaaatccgcaagtatcagaagagcactgacctgctcataaggaagcttccgttccaaaggcttgtcagggagattgcccaggatttcaagactgatcttcgtttccagagccatgcggtgcttgcgctgcaggaggctgcggaggcgtacctggtgggtctattcgaggacactaatctgtgcgccatccatgccaagcgcgtgaccatcatgcccaaggacgttcagctggctaggaggatccgtggtgaaagggcctagattctctatttattgctactgngagtggctccgtagtatggtttgcatctgttcgatgcttgcttttgtgggagtttacgtttgtggggtgttcgaatttgtaatattcatncgtagtggacaagtggtaagaagtgccgcaatctgactatgttttcaaatctataatcgct

SEQ ID NO: 2068 - DNA, 416 bp, Zea mays
  unsure (1)..(416): unsure at all n locations
  Clone ID: TF_3341197
taggcaattcgccgcagcctctcaccctcgcgagtcnccacctcccgcagtaggcaattcgccgcagcctctcaccctcgcgagtcnccacctcccgcagcccgcggaggatgatcccgcgacagataatgtggataatgctccggcggggaataaacccaaggccgataagcgcctcccggcgggcaagtccaatgagggcggcgagggctataaggggaaaaagaatgcgaataaatccgtggagacctacaagatctacatcttcgaggtgctgaagcaggtgcaccccgacatcggcatctcgtccaatgccatgtccatcatgaactccttcatcaacgacatcttcgataagctcgcggccgagtccgccnagctggcgcgctacnaccagaagcccaccatcacctccc

SEQ ID NO: 2069 - DNA, 451 bp, Zea mays
  unsure (1)..(451): unsure at all n locations
  Clone ID: TF_LIB3595-023-Q1-N6-C2
ggaaaaaccncaacttataactacaacagggggaacatcaacacaaggaaatgcctacaaagggcgagcgtgcaagcctagggagaggtgaacttggtgacggccttggtgccctcagaacggcgtgcttggcgagctcgccggggagcacgaggcgcacgggggtctggatctcgcggggcgtgatggtgggcttcttgttgtagcgcgcgagcttggcggcctcgccggccagcttctcgaaaatgtcgttgatgaaggagttcatgatggacatggccttggacgagatgccgatgtccgggtgcacctgcttcagcaccttggaagagtagatcttgtacgtcttcacgctcttcttgcccttctttttgccacgcttgccctcgccgccctccttgccggcggacttgcccgcggggacccgcttctccgccttgggcttcttccc

SEQ ID NO: 2070 - DNA, 638 bp, Zea mays
  unsure (1)..(638): unsure at all n locations
  Clone ID: TF_LIB4730-002-R1-K1-E2
gacaaccccgagtcccgacccgatggcgcccaaggccgagaagaagccagcggagaagaagccggcggccgaggagaaggcggagaagacgaccgcaggcaagaagcccaagtccgagaagcgcctgcccgcctcgaagtcctccggcaaggagggcggcgagaagaaggggaagaagaaggccaagaagagcgtggagacctacaaaatctacatcttcaaggtcctaaagcaggtgcaccccgacatcggcatctcctccaaggccatgtccatcatgaactccttcatcaacgacatcttcgagaagctcgccggcgaggccgctaagctcgcccggtacaacaagaagcccaccatcacctcccgcgagatccagacctccgtgcgcctcgtcctcccaggagagctcgccaaacacgccgtctccccttcttacaagggttcttcgtcgtgtcctctacccctccccctccccgcctatgtatgtgctgtgaaaattgtgatgttctcgtcgggtgaacaaggccagtagctagcttgcctgcttcataaatcgtgcccggattgtaatgggcctctttagatttgacgccccctgttttggaaatatagttgatnccgtgccttccctgctc

SEQ ID NO: 2071 - DNA, 746 bp, Zea mays
  unsure (1)..(746): unsure at all n locations
  Clone ID: TF_ZmC584870_1
acctaaagaatccaattccccaccagccccctcgcaccttccggcgaatcaccgcacctctccccggcgaagcagcagcgtccgatggcccccaaggcggagaagaagccggctgccgcggagaagactccggcggccgagaagaccaccgcgggcaagaagcccaaggccgagaagcggccgcccaagtccaaggagggcggcgccgacaagaggaagaagaaggccaagaagagcgtggagacgtacaagatctacatcttcaaggtgctgaagcaggtgcacccggacatcggtatctcctccaaggccatgtccatcatgaactccttcatcaacgacatcttcgagaagctcgccggcgagtccgccaagctcgcccgctacaacaagaagcccaccatcacctccagggagatccagacctccgtccgcctcgtcctcccgggcgagctcgccaagcacgccgtctctgagggcaccaaggccgtcaccaagttcacatcctcttagataggctgttctctgtcttcgtggttgatcgatggttctctgtaatgctcgttagctgttcggaccatgtcgctgtgtaacttgtgctggtgttgtggcaacatactgtttcatcatctcgtgaatcagtaactttgcttannaannaaaaaaaaaaanaaaaaanaanaaaaannnnnttggatggctgattctccaccggtacatcccgtcaccggtaaaaaaacttattc

SEQ ID NO: 2072 - DNA, 845 bp, Zea mays
  Clone ID: TF_ZmC369_137
cattgggtacctcgaggccggccgggagccaccgaaatcttccgtctccaaatcctcctagcgaattcaccacagcttctcaccaccgctaccttcgatggcacccaaggcggacaagaagccggcggcgaagaagcctgcagaggaggagcccgcgacagagaaggcggagaaggctccggcggggaagaagcccaaggccgagaagcgcctcccggcgggcaagtccgccggtaaggagggcggcgagggcaagaaggggaaaaagaaagcgaagaagtccgtggagacctacaagatctacatcttcaaggtgctgaagcaggtgcaccccgacatcggcatctcgtccaaggccatgtccatcatgaactccttcatcaacgacatcttcgagaagctcgcggccgagtccgccaagctggcgcgctataacaagaagcccaccgtcacctcccgcgagatccagacctcggtgcgcctcgtcctccccggcgagcttgccaagcacgccgtctccgagggcaccaaggccgtcaccaagttcacctcttcttaaggttcatagtactaggctgggtggtgttggtagacgtggctcaatttatctggtaggggtagtgatggatgatatgatctgcgtctatttgagctgttaagactgatgaacattgttccacgtcacgttgtgtttgatggacattgttccagatcacgttgttaagactgcagaactgtgtctgacatggaacaagtatgatacttgaaatttctgtgagtgcattgaaacgtgaaatctgcagtccttaaaaaaaaaatctgaaataaaaaaaaaaaaaaaaaaa

SEQ ID NO: 2073 - DNA, 706 bp, Zea mays
  Clone ID: TF_ZmC369_69
cattgggtacctcgaggccggccgggagccaccgaaatcttccgtctccaatcctcctagcgaattcaccacagcttctcaccaccgctaccttcgatggcacccaaggcggacaagaagccggcggcgaagaagcctgcagaggagcccgcgacagagaaggcggagaaggctccggcggggaagaagcccaaggccgagaagcgcctcccggcgggcaagtccgccggtaaggagggcggcgagggcaagaaggggaaaaagaaagcgaagaagtccgtggagacctacaagatctacatcttcaaggtgctgaagcaggtgcaccccgacatcggcatctcgtccaaggccatgtccatcatgaactccttcatcaacgacatcttcgagaagctcgcggccgagtccgccaagctggcgcgctataacaagaagcccaccgtcacctcccgcgagatccagacctcggtgcgcctcgtcctccccggcgagcttgccaagcacgccgtctccgagggcaccaaggccgtcaccaagttcacctcttcttaaggttcatagtactaggctgggtggtgttggtagacgtggctcaatttatctggtaggggtagtgatggatgatatgatctgcgtctatttgagctgttaagactgatgaacattgttccacggcaaaaaaaaaaaaaaaaaaggggcggcc

SEQ ID NO: 2074 - DNA, 554 bp, Zea mays
  Clone ID: TF_ZmC1223464_1
ttttttttttttttttagcggaaacaaattaatttcagaaagcgacaaatacaaaagtagcaatgacaaggaagagaactaaggagcgaggtggaaacaatcaaacttcctgagagactttggaagttttgtcctttgatttggcaggaaggagctccgagtgaatctgaggaatgacacctccctgtgagatatctttttggcctaggagcttgttcaactcctcgtcgttccggatagcaagttggagatgacgggggatgatacgggacttcttgttatcacgagcagcgttgccagccaattcgaggatttcggcggccagatactccaagacggcagccaggtacacaggggcaccggctccaacgcgttgggcgtagttacccttccggagaagtcggtggatacgaccgacagggaattggagaccagccttggacgatcgggattggctcgcggctttgtcgcctccggctttgcctcctttaccaccagacatgctgtgtgttgggttgttttggtttgggttaggtttgtgggtggttgggctc

SEQ ID NO: 2075 - DNA, 385 bp, Zea mays
  unsure (1)..(385): unsure at all n locations
  Clone ID: TF_LIB4729-091-Q1-K1-H12
ctcccgccggcccgcctcccctctcccgcgacncgcaccccgnctcccggttgaaccaaatccctcgcctcatcaccccagcgccagccgccctatcgccctgtcgcgcgaagcaatggcgccccccggcaaggcgattggcgctggcgccgcgaacaaggcgacgtccaggagctccaaggctgggctgccgttcccagccggcaggatcgcccgtttcctcaaggccggcaagcacgccgagggcgtgggcgccggagccgctgccacggtgggcgctgaccaggagagcccgggggcggcggccagggggcgcggggggaacggagacggggggagggggcggggggggaggcggggggggggnnggggggggggggcgggg

SEQ ID NO: 2076 - DNA, 758 bp, Zea mays
  Clone ID: TF_ZmC114_32
tctcgattttttccggcctcccattcctcgcgcggcgaccacccgattcgaagcgtgcggagagaccgaagaagcgggagagatggctcgtaccaagcagactgctcgcaagtccacgggagggaaggctcccaggaagcagcttgccaccaaggctgcccgtaagtctgcccccaccactggtggagtgaagaagcctcaccgctaccgccctggaactgttgccctccgtgagatccgcaagtatcagaagagcactgagctgctgatcaggaagctgcccttccagaggctgctgaggcataccttgttggcctgtttgaggacaccaacctgtgcgccatccatgctaagcgtgtgaccatcatgccaaaggacattcagctggcaaggaggatccgcggcgagagggcctaatcgccacctcaaacatcgtgacaaaaacatgaagtcctggggttattgttaatctggtgccattgtaaggacatatgagtagggtttgttttgtggatcgcaagtttctcttctgctactgttgctgctacctttgctggtgttattgctagggtcgaatacttaagttaactatgcgctgacagtctggactagcagtgttatgtgcgctgctggaccttgcgcgcaatgctgtggccgatttgttcgttaatgtcaagaattgtgttacagtgcgtgtatatatgtgtgtcgccgcatttttatttttgagaattgttttaagctgatgtttcgtcacc

SEQ ID NO: 2077 - DNA, 321 bp, Zea mays
  Clone ID: TF_LIB148-002-Q1-E1-B12
tgtagttgtacatatatcaacgcaagaccacggcatcgaaggcgctgctgatgcataccttgttggcctgtttgaggacaccaacctgtgccccatccatgctaagcgtgtcaccatcatgcccaaggacattcacctggcaatgaggatccgccgcgagagggcctaatcgacacctcgaacatcgtgacaaaaaaatgacctcctgcggttattgttaatctgatgccattgtgatgacatatgagtagggtttgttttgtggatctcaggtcaaaacggcggtccaccagtccaggtcgattcgggaaggcactctca

SEQ ID NO: 2078 - DNA, 328 bp, Zea mays
  Clone ID: TF_LIB3206-021-P1-N1-D8
aaaaaacacggcatttcctattccattgggaatgacataaagcaacttgggcggagcgaatacacagccaatcacattggccggttacaacctacacatgacaacatcggatccgccttcaaaccctatgcctttttgggggactgggcgggctttttgggcgacttggcctccttgctcccgccggtggacgccttttccgccgtttttttgggcaacaagaccggattgatgttgggcaacaccccgccgcgggcgatggtcacgccggtcaaaaacttcccgagctcctcgtgattggggatcgccagcaacacgtggcgcggga

SEQ ID NO: 2079 - DNA, 517 bp, Zea mays
  Clone ID: TF_LIB4730-061-R1-K1-A9
ggaaggagagaagcaaggagagcgtgccgagtcgcaaggattggcgggccacaggaagatagttggatgttgaggaccgtgaaggctgagctcacagatccccgtcgggcgatgggcacgctacattgaagaagggcacggtacgcgcagggtggcgggaccggtgcccccgtttacctcgccgatgtcctggaatacgtcttcgctgaggttctggagctcgtcggtaatgctgtcagggacaacatgaagactcgcattattccgagccacgtgcttctgacgatccggaacgacgaggagatcggtaagctgctgtgcggcgtgaccatagctcacggaggggtgctcaccaatatcaaccctgatatgctgcccaagaagactgagagagaggcgtacagtgtcagatagcaaggaggcaaagtcaaccaagaaggccgccaagtcccctaagaaggcatagactgactgtccggagtgatctgatgcttaacatgaccttgctaccagtatg

SEQ ID NO: 2080 - DNA, 528 bp, Zea mays
  Clone ID: TF_jC-zmX700552707a1
attcggctcgagagcgaatccttagcattttattcgcaggctgtgctgcatcacaccgccgggaaggcccattagccgcatcgatggctcctaaggcggataagaagtcggctgcaaagaagccagtggtggatgagcctggtggcgacaaggcccacggggggaagaagccaaaggccgagaagtgcctcccggcggccaagtaggccggcaatgatggcggctacaagaagggtaagaagaaggctacgaagtggggggagacctacaagatctacaccttcaaggtgctgaagcaggtccacccagacatcggcatatcttccaaggccatgtccatcaggaactccttcatcgacgacatcttcgacatgctcgccggcgaggctgccaagcttgcgcgctacaacaggaagcccaccatcacctgtggggagattcaaacctcaggccgccttgtcctggccggcgagctcgccaagcacgcggtcttcgagggcaccatggccgacactaagttcacatcat

SEQ ID NO: 2081 - DNA, 1044 bp, Zea mays
  Clone ID: TF_ZmC369_144
caaaaaaaaaaaaaaaaaaaaaaaaaaaaaaaccgaaatcttccgtccccaaatcgaccgagcgaattcaccacagcttctcaccaccgctaccttcgatggcacccaaggcggacaagaagccggcggcgaagaagcctgcagaggaggagcccgcgacagagaaggcggagaaggctccggcggggaagaagcccaaggccgagaagcgcctcccggcgggcaagtccgccggtaaggagggcggcgagggcaagaaggggaaaaagaaagcgaagaagtccgtggagacctacaagatctacatcttcaaggtgctgaagcaggtgcaccccgacatcggcatctcgtccaaggccatgtccatcatgaactccttcatcaacgacatcttcgagaagctcgcggccgagtccgccaagctggcgcgctataacaagaagcccaccgtcacctcccgcgagatccagacctcggtgcgcctcgtcctccccggtgagcttgccaagcacgccgtctccgagggcaccaaggccgtcaccaagttcacttcttcttaggctcatagtactaggctgggtggtgttggtagacgtggctcaatttatctggtaggggtagtgatggatgatatgatctgcgtctatttgagctgttaagactgatgaacattgttccacgtcacgttgtgtttgatgggcattgttccagatcacgttgttaagactgcagaactgtgtctgacatggaacaagtatgatacttgaaatttctgtgagtgcattgaaacgtgaaatctgcagcccttgaaaaaaaaatctgaaatacaactgcgtgttcatgatcaagttcaggatgcaggcacattttgtatcctatcattagtgctatttggtttatatatttataatgtaatagctggctaatatgataatgttaaattatatttctttaaaaaaaaaaaaaaaaaaaaaaaaaaaaaaaaaaaaaaaaaaaaaaaaaaaaaaaaaaaaaaaaaaaaaaaaaaaaaaaaggggcggccgc

SEQ ID NO: 2082 - DNA, 993 bp, Zea mays
  Clone ID: TF_ZmC369_65
aattaccagatttccaagttcctaaagaatgagaataatagcaagcggagagatacaactatattccacaacagggacatcaaatctaagaggaccattacaatccggcgcgccggatttatagagcaggcaagctagctactaggcgggtagggtgggggactggggaaaggacacagcaaagaacccttctaacagatccgcggatcccgcagcgcgctcagttgctggtgaacttggtgacggccttggttccctcggagacggcgtgcttggcgagctctccggggaggactaggcgcacggaggtctggatctcgcgggacgtgatgcggacgcgtgggcggacgcgtgggcggacgcgtgggcggcggcgaagaagcctgcagaggaggagcccgcggcagagaaggcggagaaggctccggcggggaagaagcccaaggccgagaagcgcctcccggcgggcaagtccgccggtaaggagggcggcgagggcaagaaggggaaaaagaaagcgaagaagtccgtggagacctacaagatctacatcttcaaggtgctgaagcaggtgcaccccgacatcggcatctcgtccaaggccatgtccatcatgaactccttcatcaacgacatcttcgagaagctcgcggccgagtccgccaagctggcgcgctataacaagaagcccaccgtcacctcccgcgagatccagacctcggtgcgcctcgtcctccccggtgagcttgccaagcacgccgtctccgagggcaccaaggccgtcaccaagttcacttcttcttaggctcatagtactaggctgggtggtgttggtagacgtggctcaatttatctggtaggggtagtgatggatgatatgatctgcgtctatttgagctgttaagactgatgaacattgttccacgtcacgttgtgtttgatgggcattgttccagatcacgttgctaaaaaaaaaaaaaaaaaaggccccta

SEQ ID NO: 2083 - DNA, 638 bp, Zea mays
  Clone ID: TF_ZmC584893_1
ctcgaatcctccagtcctcccctcgcgccccaaacaacccgatccctcgtcctctccacctccgccgaaaccgccatggcgcccaaggccgagaagaagcccgccgcggagaagaagccggtggagacggagaagaagcccaaggccgagaagcgcgtgcccggcaaggacggcggcgccgacaagaagaagaagaaggccaagaagagcgtcgagacgtacaagatctacatcttcaaggtgctcaagcaggtgcaccccgacatcggcatctcctccaaggccatgtccatcatgaactccttcatcaacgacatcttcgagaagctcgccggcgagtcggccaagctggcgcgctacaacaagaagcccaccatcacctcccgggagatccagaccgccgtgcgtctcgtcctccccggcgagctcgccaagcacgccgtctccgagggcaccaaggccgtcaccaagttcacctcctcttagattgctgccgtccgtccgagtctgtttagtatggtctggtctgaatttgttcccgtgttaaaacatattacagggggttagattcccctatcgaacagtgtaaaatgagtccgatttgctgaatcaaagaatcatccagtggttgtctcagt

SEQ ID NO: 2084 - DNA, 1411 bp, Zea mays
  Clone ID: TF_ZmC21094_1
ctgctatctatctcttttctgaaggaaaaaaaagttcagcgcgcagttaagcatagcaggacgaccacgacgatgtatcacccgcagtgcgagctcctgacgatggcgcacgaaacgccggacctggacgccggccagccgcacctaaccgtctccggcgtcgccagcatcccggcagagctgagcttccacctgctgcactcgctcgacgccgcggcggcggtcaatcccgtcacggcgccgccgcagtccaccatcgactacttcctcggcggcgccgatccccaccagcaggccatgcagtacgagccgctgccgcccgccgcgggcggccaccaccagtacaccatggacatgttccgcgactactgcgacggccactaccccaccgccgagccgtacatccgcgggacaatgactggagccctcgtgttcggggccaccgacgacgacgactcggccgctgcctacatgcccggggggcactttgagacctccccgccgccgccacgcgccaccggccgcggcaggaagcggggcagggcgctgggcggcggcttccatgcggtgctggccaacggcgtcgagaagaaggagaagcagcgccggctgcggctcaccgagaagtttacggccctcatgcacctcatacccaacgttacgaagactgatagggcgacggtgatctcggacgcgatcgagtacatccaggagctggggaggacggtggaggagctgacgctgctggtggagaagaagcggcgtcggagggagctgcagggggacgtcgtggacgcggcgccggctgcggtggttgctgccgccggtgaggcggagagctcggagggcgaggtggctcctccgccgccggccgtgccgcggcagccgatccgcagcacgtacatccagcgacggagcaaggacacgtccgtggacgtgcggatcgtggaggaggacgtgaacatcaagctcaccaagcgccggcgcgacgggtgcctcgcagccgcgtcgcgcgcgctggacgacctccgccttgacctcgtccacctctccggcggcaagatcggtgactgtcaaatctacatgttcaacaccaagattcacaaggggtcttcagtgtttgcgagtgcagtggccggtaggctgatggaagtggtggacgagtactaggctaccatgcacttgaatttctagctagctctacgtaccgcgctgctatgaatctagctatagcgtttcttggatgaaagactagttagttgttaccttctatctttgcttcaattaaatccgcttgctcgttacagactgagtttgtttctaaatgtcaaggttgttttggtcaaattgaataaattggcacactggcctgtgaggttattatatatatttatgtgtttattactggtct

SEQ ID NO: 2085 - DNA, 1015 bp, Zea mays
  Clone ID: TF_ZmC3534_3
gctcaacttaaatagaatatgaacacaggcaagtgtttagaggatggcaaaaggaagggttctggagaggacagttcatcactacgttctctaggtgaaaccagtgcattgcagcgagaagtcagcatggagtgtgctgatgagaaggcgggtgatgctagagccaagagagaggactacgtgcatgtccgggcaaagcgcggccaagccaccaacagccacagccttgcagaaagagtagtttctacctcttaagcaacatttttctttgagcgacatagttaacgctccgattgaaatgcctcaattctgttgcttacggtagcatgcctgtccgaactgcagtttcgaagggaaaagataaatgaaaggatgaagcttcttcaagaccttgtcccaggttgcaacaagattacaggcaaggccatgatgcttgatgagatcataaactatgtgcaatctctgcagcgacagattgagttcctttcgatgaagctctcagcgatcggccctgggctcaactgtgacctcgacctacaagatatcctctgcacacaagatgctagctctgcttttccaggatacaacctgcaaacgagcaatgtgcatattaatctgtacagagcatctgaagaaggtttctcacacaggaacaggatcatccctagtccagcaaatgttcacgtgacaagaaacgcccagctatctgcatttcctcagagaggagttatctggaacgaggagctttgcagcatcgcttcagatagaaatgctgattcaatgaaagtggagtgacattgtggcaactgacaagccggcagtttaatggtgatcaactctgaaagtcttgacaagttgggttgctactgaggtgcctttcaagttgcagtggtagcacgacttctcttgggatgagctagttaacttttggtatttgagaggaattctggtgtgtccacccatcctgtacagttattagaataactaatcaaaggagtactgtgaaattcttgcg

SEQ ID NO: 2086 - DNA, 1409 bp, Zea mays
  Clone ID: TF_ZmC14919_2
ctgatcccacactgcaacaagactgacaaagcatctatactagacgagacgattgagtacctgaagtccctccaaatgcaagttcagatcatgtggatgacttctgggatggtgccaatggtgtttcctggtgctcaccaatacatgccaccaatggctctaggcatgaattcaggttgcatccctgcagcacaaggcctaagtcagatgcgaagattaccatacatgaaccaccccatgccaaatcatatccctctgaactcgtctccagctatgaatccaatgaatccactgaacactgtgaaccagttccaaaacggtcacctcagggaggtaccaagacctggaccccatgtttatggacaccaaatagcacaagccgaagaacacaacagaatactggaagtggcagctagtactgttataccaacttctaaggcagggcaaccacctacttttgatggagtttagagtggtcataaatcctgtaaggtgttgcactgataatctgacgatgcatagcgttggtaccttgagttgtatatctgtgcagtagtgtcagcagcatactctttgacatctaagcttggttctagagttattaataggagcctagtataggtaacaagattgcaagacaactacctgtctaccaccatattctctgtggaagaactggagctgcatactgctgtgcagtacagtgttcaagagagaatggaacagatgagtatttgaagcacaacctgaacaggaaatggtcttctttctggcaatcgctgaaaatactgacgtgatgaggagcagattgcatccctatggctgtattgtaatatatctacatcaacatggcaatacgtgtctggacttggatgctacagttacatgtaaatgcagagttgcaggtttggtcggcaggagcatacatcttcacacgacgtggacagtggactacgggccgagacagtggcccaggcacgacacggctcttatatcaggctagcccagacactatttaatgtgtcatgcctcaggccggtccacgagacacggctgaccatctataccacatactctactcctccacggcaacagttcagcatcctcctggcaatggcaacggttcagcgtcctccatggcaactgtgcggagccctagactagacctgctgcaagatggcagaccctcatcttcagagcggattgggtttggatcccctgtactcctccttgctcccctgttgctttcagttcgtctcacggttattgttcagacttcagatacatatgtcgttgtgcctggttggctgtatctggacatcagtttccgtgttgctactattttcccccctgtatttctttataacggacattcaccttataaatatacacacaaaacctctatttct

SEQ ID NO: 2087 - DNA, 1556 bp, Zea mays
  Clone ID: TF_ZmC25517_1
gcccccgggaaacaagaaaaagaaaaggccgggccggaggggcaaagctgtaaacttgagctggaagcactgcgcccctgtcttcacaccagtttgctgtttctttttcaccccgagcgcgagaactagggcgaccgcagcactacgcccctgctgcccatgtcttcgtcggggcctttgccggcgaccggaacccaccacggcagtcaaagggcagagtgtaaatcccagggttccacttctgcacgcaaggtacaaaaggctgatcgtgagaagatgcgaagagataaattaaacgagcagttccaggacttgggaaatgcacttgatccagaccgtcccaggaatgataaggcaactatacttggtgacacaatccagatgctgaaagatttgactactcaggtgaacaagctgaaagctgaatacacgtcactttctgaagaagcgtgtgagttaacacaagaaaagaatgagcttagagatgagaaagcttcactgaaatctgaggttgataatttgaataatcagtatcagcaacggatgcgggtgctatacccatgggttggaatggagccttctgttgtcatggggccacctcctgcatatccctacccagtcccagttccaataccctctggtgctgtacccatgcatccgcagttgcaaacataccacttcttccacagtcaagcttctggaaccatcccaaacacatgcatcccttacatggcatatacacaaccctgccatcctcccactgatcagccgtctaaccaacttaatactccagttgcccattcaagtagtcataggtctaactctccagctcaagactgtagaagcaagtcatctacattgcagcaaccaagctgtggagtgagaagcagtgatgctggtgatattgcaactgatctggaattgaagactcctggttcttcatgtcaatcacatgcagagattgctaacaacgattcctcttcggatttgaaaacaaagaagcattgcataaagcagattaatgattgcactctcactgaaagcagtagttcaagcagatgctcttccaatggtcccccagatgtttctaatagtgctattgatgaataagctgcttgacgaccgattaacatacaaaacgttgactggtatagattgagaaaagatctcgtttaaccacccataagtgagctcccaactctatatgcagtgtaatttgctattgttgctagcttatttacatagaagtggtcagattctaatgtgatgactcacaaattgggaggcgtggactttgtagataatctcatgattgttagtggtaaaagtttggtggaagggaaaaaaggagagaacaaaatcatagacagcagcatctatggtggttcggtagggactccaggactaggtatggtgagcattgtcagtgttcggcatggcaggtagatattcataataactggattctagtaccattgcatagttcgtcctagactggcattttacataaatttctgtgtcaaatatgtaaataactcgagggcggataactggat

SEQ ID NO: 2088 - DNA, 1657 bp, Zea mays
  Clone ID: TF_ZmC6825_1
aattcggcacgagggctacagcaaagtcgtgttaaaagtcgcccatctgcacagctatccattgggagtagatcgaggaccatcctcgctaccctgcaggccggcactgcactgcactgcagtctacagaactcgtcagtcacagatcggtgcaggcggtctgcacctgcatcacctaaccaattcctcgattagtctgctgttgcgatttgcgaggcaggtcagctgcaatctttttgcagcagccactaaacctgtaccaagtcttcttgcctgagggcagaggcaggctccgtcagtcacgccggcggcgtacagatcatggaggactttggcggctggaatatgcagtatgcagcagagctatgcctgccaagccgccgggacgacgacgacgacggcctcctcggtgatttcctaggcggcggcggtttggacatccgttctgaccatggcggcctcaacctgccctcgtcgcaccctgctgtccagaaccttgtgccctgccacggcggcgtgagtctttccgtttccgacgccttcatgggcctggacacggcggatatgctcgctagcgtcaccggcgcactggactgcagcctcctcgacacgtttgcttgcggttcggacgccgtcgtcgtcgccgaggagcccgccgcgcagcccaccgcgtcgagcaacgccttctccggatacagcagcaccacgggcggcaattacggcaacatctcctccggcgagtccaacacgtacggcggcagcggcggaggccatgacacggaggttgcgtcgccgacctgcgcctcgaagcggaagctggccggcaagtaccctgcaatagccgcgtcggcctcggccacagccacgacgacaacggcggaggggcaggttgcagccccgcggcgtggcacgaagcgcgactccgcgacgtcgtcttcgtcgaccagcgccacggtcgccgggcatggcggcggcaaccatgcggccggaggaggcgggtcgtcatcggtcggcgacgggaacgggtacgagccggactcggaggcaatagcgcaggtgaaggagatgatctaccgcgcggcggcgatgcggccggtgcaccagctcgtgtgcggggccgccggcggcgagccgccgtcttcgtcccagaacaagccgcggcgcaggaacgtgcggatctcgagcgacccgcagacggtggcggcgcggctgcggcgggagagggtgagcgagcgcctgcgcgtgctgcagcggctcgtgccgggcggtagccggatggacactgcgtccatgctcgacgaggcggccggctatctcaagttcctcaagtcgcaggtcaaggcactggagagggcaaaccctagtagtaatggtggctacaacgacagcagcttcctgccgcagaattacacggggtgcctctgtgtcgacggtggcaccagtgttgcctttggaagcgatggcgccattgggggctacgtaaaaccaggtaggaacatgcaccggtagcgatgcaataatgtaaccattgatgcgagtgagcgatatatgagagaagtactgcagtactgctactggattttgagtttaataaggctttactgtatttctgagtaataataatcaaaacgatttgatttaaaaaaaaaaaaaaaaa

SEQ ID NO: 2089 - DNA, 1391 bp, Zea mays
  unsure (1)..(1391): unsure at all n locations
  Clone ID: TF_ZmC35411_1
aattcgaaggattaatctcatcccaactttatacgaatgttcttatcaagagtgtggatccatatataaataaagtattcaacgcagatagcagatccaccaacgctgaaacgcatgctcagcctccattgaccaaagcctgcctcggacctccactttggaaaaatggagaaggaagaacatcgctatcaacatcatcttccatttcatcctgtatctaaactttgtcaaccatttgcgcaggccgcagacacactcatacatcagtcccttttgattagtccatatacacccactaccagaaaaagcagcccccccaccacaaagtgtatggctagctagtgcactacagacccggaaagaaacattatgagagcatgccagactcttttagcagctccctctctccatcactcacactcatagggggcattgaaagatggaggagcatgagcaggttattgcttaccatatccttgcaattaaagcacctttgaacaaaagatcggaaagggaaaggcgatatcatataccatttggtacaacttcaagtggagaggatcttttaggtcttttttccctgcctcctccttgttagtgaatcgaagccggcatttctatcttacgctttgattggtaggttaacgcctgctaacagccccgaaaggatgcaagttacgcttgctgccactatactaggaaggagtgttgggttctggttttactggttgtccgtcctgcgaatgttgcgtgtcatagattgccatggcgagcgagatgggcatcatgcagagtgctttggactggaggaattgcatcgctgccccaatgtcttcttccatcagctttgcgatctgtctttctgtgccgtccgttgaccacttctcccaaatctgctgtttgctcccactatcacttgcttcccccttaactgaaagtgggatatcagcgaccagctgtgccacagcaccagcaccacccagcctgctcatgcttagaaccttgacttgaagcctcagaaacttcacataatcgaggatctcatctagcataactgctctatctgtcttgtttctcgtgcccaccaattcctgtagggccctcatcctttntgctattctctctcttcttagcctctccgcgatgctgtgggggtcggtcgcctgcccacgccgcgcccgcacctttggcctcggtgccggcggttgtggcccgactgccgcaccgccttgcttcggctgctgcgcgtggaacacctgggtaggcggggtggcacggaggtggggtggctgcacaccgccgccgaacaccggcgggaagagcccagggagctgtatagcctcccggtccgccttgccaccgtcggcgtgcttcccacttccggaagcctc

SEQ ID NO: 2090 - DNA, 309 bp, Zea mays
  Clone ID: TF_700085722H1
tggtggactgcgccgcgggcctcggggcctgcaatgtaggatcccggcctgtcggagagctgcggcgcgttcggcgctggcgctggcgctgcgccgtagccggccctggcgtccaagaataagagggtcgaggggaagccgtccatgaacctgatggccgatcgctgctgccgtaagcgcctcaacgaccgcctctccattctacgctccgtcgtgccctagattagcaagatggaccggacttcgattctgggcttcacgatctactacattaaggagctgctggtgagtatcaatctgctttaggaa

SEQ ID NO: 2091 - DNA, 503 bp, Zea mays
  Clone ID: TF_jC-zmXLIB3527P075bd10a1
gcgaggcgtggctgcgcgactcacccacggagcattgccgagagggtcagttcatctactcgatccttcggtccttcccaaacgattcgctaaaaaaaagcacggcgcaatatatggtgccacactctgccagctttgatgctagctggatgtcagcacagaaaccaatttcgttttccttgttcgctggcgtacgttcaggaaagaaggacgaggatcagcaagaggctgaagaagctgcaagacctcgtgcccaacatggacaagcaaacgaatacgtcggacatgttggaccttgctgtggagtacatcaaagagctcaaggaccaagttgagaagctaaaacacgaccaagcaaactgctgttgcctaggcaacaagagctgctgctgatgctggagaagcagacggaggagggtttttacgccgtaacaatgtgactgttaaaccagagctgttgcttcaggagaccaggccgcgggcagaagtgcgtgacatgtgga

SEQ ID NO: 2092 - DNA, 680 bp, Zea mays
  Clone ID: TF_LIB5116-051-A1-PF1-E3
aattctccgcaggaggatggcttcttctactcacaccatggcgcgtgccatgccgattccagtcaagggacggaatgtaaagcccagagttcggttaccgctcgcaaggttcacaaggctgaccgtgagagaatgcgacgagacaaattgaatgagcagttcctggaattgggaaccacacttgacccagatcggcccaggcatgataaggctactattcttggtgatacagttcagatgctcaaggattagacttctcaagtaaacaagcttaaagctgaatactcttctctctttgaagaagaatgtgagttgactaaagaaaaaaatgagcttcggagtgaaaaagcttcgctgaagtctgatgtggataatttgaacaaccactatcagcaacgtattcaaatgttatacctgtgcactacaatggagccttctgtactcgttgggccacctccatcatatcccttctcgctccaagttcctatacccgctggtgctgtaactatgcatccacagcttcagccatgcccgttcttccaaaatcaaacttcaggagccatctcgaatccatgtactccttacatggcatacagtcaatcctgtcaggctcctagtgatcaaccatctagccagttcagtactccagttctgctttcagtagtaatcgatctcactct

SEQ ID NO: 2093 - DNA, 1207 bp, Zea mays
  Clone ID: TF_ZmC4799_1
ggcgagtgacacacgcggcagtgcggcacgcctactatcttgcgcgcgtgcggccggccggccatggatccgttctacttcggcccggaccagctggatgccgccgccgccgtcgacgaggactacctgacgagcctcggcctggtggtcctctcgccggagccagtggcgccgttgcctggcggcgcatttgaggcgtaccagcggcgtgcgccggcgttgctggagcactccctgcagacgatgagccggcggtacagtggagagcagaacatgcaccggaggatgttcagttacctgagacgcgtagctcatgacgccggcgccgccgtggtggcggccccagcgttcccggcgcccgcgcgcgagagcgttcccggcttcggggttggcacgtcgcaggcgccgcgaagctcgcggttccggaacatcatgcgcgagcggctgcggcgggagcgcctcagccagggattcgccgacctccacgctcttctgccccacggcgcgtcgtcaaaaggtggcaagaacgacatcgtcggcgcggcggccggctacgtcagggagctggtggccaggaaggagcagctcagcgccaggaaccaggagctcctagagaaggccgcgagccgctggaagcagcagggaggcacgaggagtggtgtcgggcggggcatggtggtgaaggtgcaagccgagagccaagaccattcgatggcgcttggtgcgtttgtgagggtgctccagcggctcaaggccatggaggccgggctgcaggtgacggcgatccggacgcgcttctccgcgggaggcgtgtggatgaacatcggagtggaaggccaggtatccgcttgtgatgtggacaagtcaataacaaacgccttgatagagctggaggggaacgatccaagaagcagcaagcccagattcagctgtcaagtcgaaactgtccagatggattgatcttgtttagttgtcgatcaaaatatagtagcagctagagatgataatctatctgctgccgctttaaaccaattattcagaatgctgcagctataatttataggaacaaaatactatagaaaagtaaaggctggtggattaaagccacaacgaagaggctggatctttttccaacatctgctgaaacacaagcggaagaattcaatttataccattcttaaacatggtggatctaagaaacaccact

SEQ ID NO: 2094 - DNA, 782 bp, Zea mays
  unsure (1)..(782): unsure at all n locations
  Clone ID: TF_LIB4729-053-R1-K1-G9
ccggaccgccaccccaggcgcccaccgtcagcgtcctccccaccttcaccgcctcctacgcccagccgcaagcgcctcaacgaccgcctctccatgctacgctccgtcgtgcccaagatcagcaagatggaccggacgtcgatcctgggcgacacgatcgactacatgaaggagctgctggagaggatcaagctgctgcaggaagagatcgggcagcagcaggaggaggcgccaggcatgctcagcgtcttccgggagctcaaccccaacgagatggtggccaggaacacccccaagttcgacgtggagcggaaggagggcggcgacacccgggtggagatctactgcgccgccaagccggggctgctgctgtccacggtgagcacgctggacacgctagggctcgacatccagcagtgcgtcgtcagctgcttcaacgacttcggcatgcacgcctcctgctccgagatgcagagggaaatgatcagcgccgacgcgataaagcaggagctgttcaagaacgctggctatggcggaggctgcttgtagaggggcatgtcatcatggcatgggaggaagaagaagaagaggcagcaataaattaatcttaagcagctgtgggagcagcagtagtagtatcagttcaggtccagtagcgggaaaggcaggcagggaanagatttgggaggcctttntgcaatccgtctcccccatcataacccacttcgatctatccatgttagcagtaccgtgtccgttcgtcctatagcatcatgcaggat

SEQ ID NO: 2095 - DNA, 875 bp, Zea mays
  unsure (1)..(875): unsure at all n locations
  Clone ID: TF_ZmC8592_3
tgctttgctgctggnaaagttcagcagacttgctctgcagttgttgaatgacatggcatgttgttcctttcacctttcttattattatgtaaaaggatcttttttcaattcaagtttttgtgcctctaacagtgctagagaaaagatgagatggaactttgatgataaggtctttgaagcctcaaacagagtcttgaacattgtcttggatgctgtgaacaaaataaggtctctgaagtctccagtagatacaaatgaaagatggtctgcttttgcacttttccgaggccaagagatataacatatacgacaatggcgatgaaatgatggaagcaaatgtgcaaaccaagctggtgctgtgtgaatttgtgatgagcaatccaagtgatacaacacaacctctatccaatactttgccttcgtccttcaagacttccgcaagaggagcaactcagtccacaagtagcaaagaaaagctcgtctactcatagtaagtgtggaagtgggcagctatgtgaacaccaatgatgttttcaaggagcccaatgatgtcttcaaggagcctggcagcaataaacgtttgaggtcaggatccaatgatgtgcatgtgccaacatctaaagcttctagggaaaaattgaggaggaacaagttgaatgacaggtttcttgaattggggtctacattagaaccagggaagccagtaaaagctgacaaagctgctatcctaagtgatgttactctcatggttattcagcttcgttcagaagcacagcagctgaaagaaactaatggtagtcttgaagaaaagatcaaagaactcaaggttattcagccttttcttttgaacactgttaacccacagataatgcatt

SEQ ID NO: 2096 - DNA, 1037 bp, Zea mays
  Clone ID: TF_ZmC2238_2
aaaaaaaaaccactcatcaggcgagacgcgagaagatcaatgcgaggatggagctgctcaaggagctggtccccggctgcagtaaggtatcaggaacagcgttggtgctagatgagatcatcaatcatgttcagtctctccaaagtacttgtcaatgaggcttgcaactgtaaacccgaggggcgattttggtgggctagatagctttctgaccacggagataaatgtatcattagagtatcatggctggcccacatattactttcaagaacgtcttggaaaatgttcagatatgcacacttgctgaagtttaagcatttctgagtgtggaaggatagcaagcttcaactgcaagaacggaatcgacttggagcaggtaacctggccagaaatgggtgttcatggagcaaggcagctgatgcaactccaacagcagttctggcatggtgatttggcgcatccacaccaagtggtttcacagtgggaaaagcggggggatggccatcctcccgtcttcagcaactccagtccctctctcttcggctatgatctaacaagctctggagcccagcaaaacccggcgagcaagctaaagaccgagctttgatcgacaacggtaaatagcatgtcaggggagcaagatggacatatggggggagggggacacagaatttcagcaaattgatcaaggcacaaacgagctgcgaatgaatgatggctgtggatggttgatgtcaagcccagcgaaatcaacattttcagagaggggatgtacatatagcgatagagatactgttggtgttgagctgaagacggggatgcatatgatgggcgaggataccgcagtcgttggagagacaggcaagccctgttgctatcgttgcagagatggccaagcgataccctggtttcgttactgatgatgatgacattcttagtgtatttctgacgactataatggcagtcttaaggttatatgggcagcattttttacgaacgcaagacatttcaacaagcattggaaaatttggcaaccc

SEQ ID NO: 2097 - DNA, 863 bp, Zea mays
  Clone ID: TF_LIB4746-137-Q2-K1-C12
cattgggtacctcgaggccggccggggtgatcatcgatacgttcacttcaccgttgttcacactgttcgtgtatgcccaccgaaccatcaagccatcgagccatcaaaccatcgtttttctcatccatcgtcgattctggaaatgaactataccggctacaccatcgggtccaattcagactactctcctgcgcaggagatgctgtcttatcccgaccaacttgggggcacgtacatccctgataactacacaacgtctcctggattctcgctcgaatcttttttcgaccaggctgcatttccatcagctgatgtgtcaacaatctttcccaaggaacagggccaatacgccacattcccttcaagtggtgcttccacaacaaatgacatggcgggcaacagaataagctcccactcgacttcgcgacacccatcggatgccgccccgcttggtaagctcgaacagttctcgttcggcttttccttcgacgcgctatcaaccgagccgtttgaaagagcctgcttctccccaaatacccacatatcctccaggactccttccctctgcggcgacgcatcggaaaagacctcatcaccctcatcacttactctttcgccatgcagtctcaagcgcgaatccccttcgtcccctgactcggcctcagaagaacaacctactcctccccggcctcaacggaagcgaggccgaccacgactcgaccgcaacgaaacgatatcaagcacttcctcgcctaagggcccgaagactggacgactgccgcacaatcaagttgaacgaaaatatcgcgagggtctcaatgcagagttggagagactacgcaaggcagtgccgacattgaccc

SEQ ID NO: 2098 - DNA, 981 bp, Zea mays
  Clone ID: TF_ZmC1150_1
ctcgatgatcaggcaaagcaactaacttctaaagccttgcgtctcgagaagggagaaagaagataagtgagaggatgaagcttcttcaagatcttgttcctggatgcagtaagatcactggcaaggcagtcatgctcgatgagattatcaactatgtgcagtcattgcaacgacaagtcgagttcttgtcaatgaaactcgcaactgttaaccccgagcttggctttgacattgagcagatcatatccaaacaaatgctgctttcacaagacagacatcttgctttctatggagtcgatccaggatcaagcggccttactggcccatttaaccaaggaatcatgcagccagcattgatgtgcaccatttctaatcccgccgatgttttgcacggagctattcacgacgtgtcaacaatgaaccagataccttctatgtgggaaggacttcagaatatgcctcagatgaacttcaaccctggcgtggcagccgatagcggcaccaacaactctggctccatgaagatcgagcagtgagcttctgtatagctccggaattgttctgtgaatcatgaatcgtcgaaaagcgctcacggggtggagtcttttttgtatagctggaggcctaaccattcatgccggtttccttctgttgcttccatactgtgcgacacattgtttatggtacggcaaatgaggatcatgtacagctggagctggaaaactgatgccactgtaaatttctgctgtgttttggcctgtggaaattgggatggaaacctattaccatccatgaaatccaatggcagaagcttgttggaactagggaccaggtgctgaatgctgatgggccaacatactagaatggaatagtaggtacaaaaatgcagagtttgaagcctctttgtcggaaattccatggaacatgcaatgtaaggtttcatcatgcaatggaaggaaactcattattgttaatcttccc

SEQ ID NO: 2099 - DNA, 976 bp, Zea mays
  unsure (1)..(976): unsure at all n locations
  Clone ID: TF_ZmC37662_1
ttttttttttttttttttaggaatcaatccagagctcaaatccataacaaccgaacagagcctgacacggatttgactggcacctgatttcgattcggaatttcatgagatagagctagctaactgaacagggcaaaagcatgtaccaagaactagaacagaccaggaaggagaacaccggcattattttctactctatcagactaattaaaggaagactagcaggtctgtaacggtctcaaactgttaaaagacgaaaaccaaccctgagactggaaacaccagttcatgtaaacttccccttagctacattgttctttcttttctctctctctctgtctctttttcagcggtcttgttgtcctagctcacggcatcacgccgccatggaacccagcggactgcaggagcacggacttgatctcctccggcagaagcccagggccttccttgcacagctcggccttgaagatgtccaaggaaaacccattgaagcaactgatgacagcttgctggacatcgaggccgaggccttcgatcgctctcatggcagagagcaggagaccgggcctgcgagcgcacagcatgtggatgttcactgcccggccttccctcatcctcacctcaaccctcggttgctgaaaagtagggctaggcaatgcgcttgggcacagctcttccttcacgcgagacggtaaagtgggcagcgtcggggtcagagggtggaagcttgtgggcgtcggaggcagcgaggccgtggaaggggacgactccagatcattctgaagatcgttgatcttctgcagcagctccttcaggtactcgattgcgtcgccgagaatggaggccctgtccatcttgctgatcttgggcacgacggaccggagcatgtagagccggtcattaagcttcttcccggcgacgggcgatactgccatgaggttattggccggcaaccccttcctcttaccctncc

SEQ ID NO: 2100 - DNA, 630 bp, Zea mays
  unsure (1)..(630): unsure at all n locations
  Clone ID: TF_LIB3279-183-Q1-K6-C7
cggacgcgtgggcgctctcgctctcgggtctcgggtctccaccagtctccgctctctggacgccggaaatgcagatggactcctacaactacaactacgccagtttcttccacgacgaggctccgtccttctacccgcacgttgccgtgccgccctccccggagctgcccatcggcctcattgcctcgccaggggagccggagccgcccttcgcgccgccgatgccggccgcgttccaggactacccgccgggcgccgtggccgtgggggtgggagcgccgttcgggggggccagcgtgcacgggcaggcgatcgacgcgatgggcgggggcgacgggcagcgcgagcagagcatggcaatggcggaggacggggaggagccgccgccgtcgagagcagccgcgggttccggcacatgatgcgggagcggcagcggcgcgagaagctgagccagagctacgccgacctgcacgcgctggtggcggcccggtccaggggcgacaagaactccatcgtgcaggccgccgccgtgtacatccacgagctgaggggcgcgcggaaccagctgcagcgcccggacgaggagctcaaggcccgcatcctgngccacgacgccgggcagcagtgcgt

SEQ ID NO: 2101 - DNA, 1882 bp, Zea mays
  Clone ID: TF_ZmC14684_1
ttccaagtacgtggaaccttctgagacggctatcctacgtgtacgctagcctccaaacttcaaagcgcgtctctgcagggctcgcacgtgctctttttccctcctcaccccgaattaacaatcgcgaaatcccaggtttgacctttcccccagccttgttgttccagtgggacccactacacccatgtcccttcttcctcgcacacgcgggacactgcacctgatcctctcaagccctcaacacgccaatttgaccacgtgaccgtaatcttgatccacgccctccttgcacttgcaccgcaccggtgcctatttaacccgcgctcgaacaactctctgccggcaacgcaaccaactcgctctcggctctcggctctcggctctccaccagtctccgctctctggacgccggaaatgcagatggactcctacaactacaactacgccagtttcttccacgacgaggctccgtccttctacccgcacgttgcggtgccgccctccccggagctgcccatcggcctcattgcctcgccaggggagccggagccgcccttcgcgccgccgatgccggcctcgttccaggactacacgggcgccgtgggcgtgggcgtaggggtgagagcgccgttcgggggtgccagcgtgcacgggcaggcgatcgacgcgctgggcgggggcgacgggcagcgcgagcagagcatggcaatggcggaggacggggaagagccggcgccccggcggcggcagccggcgggaggccccgccgccgccgccgtcgagagcagccgcgggttccggcacatgatgcgggagcggcagcggcgcgagaagctgagccagagctacgccgacctgcacgcgctggtggcggcccggtccaggggcgacaagaactccatcgtgcaggccgccgccgtgtacatccacgagctgaggggcgcgcgggaccagctgcagcgccggaacgaggagctcaaggcccgcatcctgggccacgacgccgggcagcagtgcgtcaaggtgcagttcgaggtggacgagccggcgtccgccatcgactccatgatcggggcgctcaggcgcctcaagggcatggacgtcagggccaggggcatccgctccagcctgtccgggcgcaggctgtggacggagatgaatgtggagaccacgatggcggccgacgaggtggaaaggggcgtggaggaggctctgctgcaggaagtggagaggaagcagcagcagcagcttggagctgggagcgccgcccctggttttccaggcccgtcatcgcacgtgcaaaacgtgttttgacacgcgatcctcccccacaacaagaagccaaaaagaaacatgaaccccgagcctcatttcttgattctttttttttaagaaccggatgcgcaaaacgagcatccgcgtccctggctctattgatttgtttttaagtagaaatcggtgctgtttgtgtacaagtgttgtcgcagcctccaagtgagattttgagcacgtgtataaagttctagggctcgtgttcttacaacacacacacacaaaaaaaaagagacgtgcggccagtgaggactgaggacatgtgggcagggatcaagtgggccggaggaagcgggcgagaaatggggtcgagggacaggcacgttccggtcgtgccgtgtggagattcctagccgcggcggcaaccggtcaccagtgtgctctcgttgtccttggtctctactactcctgctacaaatggtgacgcctttattttatcgtgtggagtggatgtaaatggacgccaccacaataaatcagagtcctaaattaattttagtttaaaaataaataaataaaaatagagtatgattcttatataataatgggc

SEQ ID NO: 2102 - DNA, 612 bp, Zea mays
  Clone ID: TF_LIB3689-204-Q1-N6-A6
cttccatacttgtcagattaaacatcggcccagccatgtgatacgtcctttttggtcgttagtcaccctggccctctgccttgcgcgctctccgggagcagcactccgggtgcggcgccggcgggcatgatgctgccgccgggccccggcacgtggtgaagctctgcagcctgctgcacggccttcgccgtcgcccccagcggcggcgggtagtagctcacgccctgcgcgtagtgctggacctgcggtggcggcggcgccggctgcaggtggttgacgccgatgtagtgcccgtacggctccgtgatgcccaccgcgggcatgtggccccggtaggccggcaccgggcccacgctcaccggcgcgctgggcaccaccggttgcggggccatgaacggcagccgcggcatggacggccgcgccgccgccgctgccgcgcccatcccgacgcccatccgaggcaggtactggtgtacgccggggaacatcaccgccggcggcgccgcgatgccggcgctgcccatccacatcatctgcacttgcagctgcagcgacttgaggtactcgatcgcctcgtcaagcattgacgccttgtccgtcttgttgcagtga

SEQ ID NO: 2103 - DNA, 420 bp, Zea mays
  Clone ID: TF_uC-zmflb73012g11b1
tcgcccttgcgtccgcgacatgagcaagagacccagagggaagcggctgtctggcatctctgagaccgtggcgccagggaaagggaagcacgcgcggccaaaggcaggcacaaagaaaaaggccgaggctgcatcggtggcggccgccgctgctgctgccggccataacaccgactacatagacgttcgggcccgccgaggccaggccaccataagccacagcctcttcgagcgcttgaggagggagaggatcagctagcggatgccgcacctgcaggagcttttgcccgggttcagaaaggtcacggtcaaggcctgcatgcttgacgagatcatcaactacatgcagtccctgcagaagcaagccgagttcctgtccatgaagatcgacgctttcaacccggtggtgagcttccacat

SEQ ID NO: 2104 - DNA, 1774 bp, Zea mays
  Clone ID: TF_ZmC5874_1
attttttagaaatgcgcggcacacgacaggaattttgatccgccttcctatgttggccgggcgcaaactcgtaggataacgcctactatacggaaccccgtcgggaattaatgcgcccgtcctcgccagtcgccacgaccgcagcaatccgccgcccttggccgtgccccgtgctgccgtactcgtaatccgtgaggggaagcgtccgcgctccgggccccgccgccgatagttccttcaagggagcgatgagcgcgcggtcgatggagacggtggaggaggacgtggaggagtacagctggcgggaggtggtgctgccgcacctcgtccccgtggttcccggcgcgcaaccggagctcgagcgggagaccggggagcggcgccgcggcagggacctcctcgtcgccgtcgacttcggcccgaactccaagcacgcctttgactgggcgctcgggcacatcgcgcgcatggccgacacggtccacctcgtccacgccgtctccagtgtgcaaaatgagattgtgtatgataaaagtcgggagctcatggaggatttagcagtcgaggcattcaagacgttactggtccggaccaaggccagaattgttgaaggagacgctggaaaagttatttgccgagaagcagatcgactgaagcctgccgctgtcattcttggtacacgtggtagaggccttattcaaagtgtgttgcagggaagtgtcagtgagtattgcttccacaactgtaaagcagccccaattatcattgtgcctgggaaagaagctggtgaacagtctgtgctttgaaggaagatgagtaggagagttgttcctgttcgttgtactgtcagtttaggtgataaagtgttgtatattggtgctggtttgttgtgggaacatgtccttaagtgctttgctttgcttgtaatctgaagctctgaaccctctgtctggcttggttatgaaggaatgcttagaaaccgggagagtagcagacaaacatataacacaagaaatgtacttgtattgccattgctgacagaatacttcattagtacagttgatatgaataaagaatcttcagccacaagtttttttccccgtggttaaaactccagcaatgaggattaattcttctcacatttccattttgaggttgtctagcaagcagccactttctaccgactgaaattgtgcatcaaatccgctgaacaaattctgggagccaatatcccaggcagcagttccattcacgttgaggcacggctcgatggtcgacggtccggcggccaccgaaaccgacggggcagccgacacagggcagctcgcggcggcgggcgcgtacaggttgctgaggaccatttccagcccaaagccagtggagcctgccgctgcagacgggtgcactacctgctgcatggggctcatgctcatctgaaggcaggacggctccagctggccggccgccgggccgcacgcatgcttcagctggcggccgaagaggtcctcgacgatgtcgaagctcaccaccgggttggaagcggcgatcttcatggacaagaactcgacttgcttctgcagggactggacgtagttgatgatctcgtcgagcatgccggccttgcccgtgaccttgctgcacccgggcaccagctcctgcaggtaccgcatccgctcgctgatcctctccctcctcacctgcacgccaatccacccggccatgagttctgacttctgacgcacgcggcagggtcgtcggtgcccacgaactagca

SEQ ID NO: 2105 - DNA, 610 bp, Zea mays
  Clone ID: TF_LIB3912-048-Q6-K6-D12
gctaggtacaaggaaagggcgtgcatggctggcatggggatcatcggaatcgagctcgtcggttacccgttgcgtgtaggcgggcggcatgagggagcggagcgcggcgaggtactcgttcatctgcttgcgccggttgcgctccacggcaatgtggaccatgcgctggctctccacttcctcctcgttcttcagtggcctcatccttcgccgcttccttcttccggttccggccgccgctgtcgcggtcacagcaagtgccgccggggcatcctgaccggcgccgccactcgcgctccccacggacgacgccacaggcagcgcgcgggcagccggctcctgcaggagctgtggcggcgagcacccggccacgtcccggccgccgccagcgccactaccgatctcgaccacgccctccattccactaaaaaacaggccactccaaggccctcctgctgccatggcaccacacccaaagcgactgccttgctgggaaagcaccacggcctccagtgccatcccttcagggtctcgcctctcaagaaaccagcagcagcagcgtgcagagtgcatacccgagctagaatccgagaaaattaggtcgtctctc

SEQ ID NO: 2106 - DNA, 1176 bp, Zea mays
  Clone ID: TF_ZmC3274_1
attgggtacctcgctcgagccgcatcatcgtcgtctccctaccgcaatcgaagaaagggccgggctcaaccgagccctcaaatcgccgcatcgcgcccctagctctctccgtctccctcatcctgacctcgattcgagctagtttcgggaagcaaaggtatcggatcaacccccttgatcacccatggtgcccagggatagggcgcacagcgccgctgctgccaccgcgcccccgacggagaagcccgttcaagggcctatccagaacaacaagtgcgaaaagaaggctccaaagaaggtgcataaatctgagagagagaaacgtaagcgggacaagcagaatgatctctttggtgagctgggaaacatgctagaacctgatagacagaacaatggaaaggcatgcatattaagtgacactacacgaatacttaaagatctactttcacaagtagaatctcttcgaaaggagaacaacacgctgaagaatgagtctcattatgtcgctttggagagaaatgaactactggatgaaaccaatatgatccgtggcgaaatatcagaccttcaaaacgagatgaggatgcggctagaagacaactctatctggagtcatgacacttctagaccaaatcttacagcaccccatccagcgaccacagtatttacattgcagcattcaccacatccacaagtcattgcaacaatgacacttcctctgcaacagccagcagtcgttgagcaatcttacgctgccccacggcgggagctacagctattccctgaagctgcacccactgaagatactgagccaccacaaaacgaggggacctctaatcatgtgatgcggccgcaggccaggagcccaccagcaatgaccactttgcctgggcatgtatatccagtccttccaagagtggaagatgagcaacgcagcagcggcactactggtagcagaaaggaaggcggggtaggcaaccgttaacagctcgagtacaaaacgagagatctggctcacagtttgaaaagttctcgtagtttcaactttaatgtttccattctagctgatgtgctaaagaaaccttaaaacctatgcggctgtgcctgcacatgtaaatatcattccactctgtattacccgaacttaatcttcaactagttacttcgatgggtgcc

SEQ ID NO: 2107 - DNA, 575 bp, Zea mays
  Clone ID: TF_ZmC3753_1
cccacgcgtccggccgaccttcaaggtgaggaaagagaagctcggggacagaatcactgcgctccagcagctagtctcgccttttggaaagacggatactgcatcggttcttcacgaggccatcgaatacatcaggttcctgcatgaccaagtagcttccctgagctctccctacctcgggtgtgggcggcccgtagtgcagcagatacagcaacgacgacaggcgaaggacgacggcggcgccgcggcgaaggaggacctgcgaagccgagggctgtgccttgtcccggtggcgagcactacgacttatgcagtggccgctggtggcgagacggcgccggagttctggctccctaactttgggggcacactacggtagggacagagacagagacatgaatatagtagcgtggacatggagatcttggtagctagctaggtctcgtaggcatgtatttgtagctaataaggccgtattctcatgtctgatgcaaaagcaaatgaataaacctgaccagtcgatccccctaaaaaaaaaaaaaaaaaaaaaaaaaaaaaaaaaaccccccaccaac

SEQ ID NO: 2108 - DNA, 1347 bp, Zea mays
  Clone ID: TF_ZmC35784_1
gtaccctccgggccggccgggaatctggatccacccccgccccgagccagctcgctataaaggcacccctctccctttctgtctccctcgcagctcagttactcactccggcctccagcttttcctttgcgccccagggccggaagagcccacacaccaccaccaccactagatagccagcgacgatcgagccgcgcgccggtggacgcgcacatacacgcggtagcttccttctcaagcctagctagccccatcctgcgcgcaggcggcggcagcgagaattgacgtgcgacgacgagcttgtgcttgctagctagagagcgaggatgtcgagccggaggccgtcgtcgcgtggcaacatctccgaggacgagatcaacgagctcatctccaagctgcaggccctgctccccagctcccgccgccgcggctccggccaggcgtcgacgacgaagctgctcaaggagacctgcagctacatcaagagcctgcaccgggaggtggacgacctgagcgaccggctgtccgacctcatggccaccatggaccacaacagccccggcgcggagatcatccgcagcatcctccgctcctgatcgcccacgcgcctcctactgcggcggcgccggccggcgcgcgagagagcgaggtcggcgacgacctcgatcgccgacaacgacgaccgcgcgcgcccgcgccccccggcccatctgttctctccaccggctggccgccgggagccgagctcaattagctagggtatatctcaacctctctctctctctctctctcgctcgctctacatgtgtgtgtacctttctcttcctttcacctgcctgtctcctccctagatctgagatcatgtggctagctctcccatatcaaaatgtactagctacacgcgcacgtatggtggtctctgctaagcctaagcttcactgggtagtagggtactagtagcactaggggcttaagcaagctaagcttatcctcctcatcagaatcacattagctcgcaccgcactctctggcttctcgtcgatcgtcttcgtcgtcctcgctcctccgacccacatgatggctagctctccatgtgccgcttctcctctcgcacgtgccgcttctcctcttgtgttcgatatgttgtattgtttccatgtaaatttagtcggtggcctggatcgagttggctagctctctctacaggcaagagacaaccgaccgaccactactatcctagagcaaattgattatcgtcatgatggtgtactgttcaagcttttattaacgacttttaatttacttgctaaaaaaaaaaaaaaaatcatgccagaaaaaaaaaaaaaa

SEQ ID NO: 2109 - DNA, 640 bp, Zea mays
  Clone ID: TF_ZmC35784_4
cattgggtacctcgaggccgaattcggctcgaggctccggcctccagcttttcctttgcagcgcagggccagaagcccacacaccaccaccactagacagccagcgacgatcgagtcgcgcgccggtggacgcgcacatacacgcggtagcttccttgtcaagcctagccccatcctgcgcgcaggcggcggcagcgagaattgacgtgggacgacgagctgagcttgcttgctagagagcgaggatgtcgagccggaggccgtcgtcgcgtggcaacatctccgaggacgagatcaacgagctcatctccaagctgcaggccctgctccccagctcccgccgccgcggctccggccaggcgtcgacgacgaagctgctcaaggagacctgcagctacatcaagagcctgcaccgggaggtggacgacctgagcgaccggctgtccgacctcatggccaccatggaccacaacagccccggcgcggagatcatccgcagcatcctccgctcctgatcgcccacgcgcctcctactgcggcggcgccggccggcgcgcgagagagcgaggtcggcgacgacctcgatcgccgacaacgacgaccgcgcgcgccccccgggccatctggtctctccaccggc

SEQ ID NO: 2110 - DNA, 318 bp, Zea mays
  Clone ID: TF_20803362
tagctgttggctgttgccggttcgcagtttcgcacgtactcgcgacttcgcaagccatcggcttcccgcctctcttcctttcaaaaaagaaagaaacagctaaaggctcaagcaacacggtggtgcctgtcgggattgacgaagctagcagcggaggtggcgatggacggggagtgctcaccgatggcagcaacgacgcggagcgggacgggcagaagccacagcgaggcggagcggaagcggcggcagcgcatcaacgcccacctcgccacgctccgcaccctcctccctgcggcgtcgcggatggacaaggcggcg

SEQ ID NO: 2111 - DNA, 566 bp, Zea mays
  Clone ID: TF_ZmC1210628_1
tttttttttttttttttggagaaaaaaaaatgaatagtccactagatttagctgagcgtagctagatgaaataaaccatctcatattatgagaaccgttagataaaaaaattgaaggaaacggcaggaaccattgaatgaacatgcatgcacacctgaagatggaggctatagaatgtcttgttcccaaaggtggagtaggttgatgagctgatgaggtgaaggcctgcgtcctccagcacctttatgcacttggagagagggagagccgtggctgccacattgctgtgcaggctgacctgaaccatgatctccgtgtcgttgaggcaagtagcagaaacaatgggagtagttacgatctcgctggtgttgagaactcccggcttgcagttggcgttggtcagctcccgcttcctcctctccaggttgtccacctgcttctgcagctccgggatgtacttgaggactcgggacacggtggtggggatgctcagcttcttggtgtggtcagcgtccgggaggagggagcggagcgaggagtaaaggtcgttgagctgcttccgtcgg

SEQ ID NO: 2112 - DNA, 594 bp, Zea mays
  unsure (1)..(594): unsure at all n locations
  Clone ID: TF_LIB3632-010-Q1-K6-F2
ggggcgcggggacgagtanaccgtgtcgtcgtccatttgggttttgggcatcgatcgagtagtagcgatggcgctggaggccgtggtgttctcccagccccaggcggcggcgggccacttcggctacggccgcggggactcgacgacgtacgcggtgccgtggtgcgacctgctacagggaggcgtaggaggaggagggggagggtttggcgatctctgcgcggcgggcgagtgggacctcgacatcgacacctgggccgccgccgccgccgccgccgcgcccaccgtggagctggggggcgacgactgggactgggaggcgctctcccgggactaccagtcctcggacgcctccacggagtactaccacggcggcagcaggaaggcggcggcggcgcccgagcctgcggggaggaggaagcggaggcgcgccaaggccgtcaagaacaaggaggagatcgagagccagcgcatgacccacattgccgtcgagcgcaaccgccgccgccagatgaacgagtacctcgccgtgctccgctccctcatgccgccgtcctacgcgcacaggggtgaccaggcatccatcgtcggtgg

SEQ ID NO: 2113 - DNA, 859 bp, Zea mays
  unsure (1)..(859): unsure at all n locations
  Clone ID: TF_ZmC584642_1
ggccgggcccgggaaagcaaaaaggttgggcggaaaagtctcccacctttacgcggcgacggcggtggcgacgacgacggcgagctaggttgccgcggcaccgatgtctctccctccgaccgacggcggcgacgattggttcctcgactgcggcatcctcgaggacctcccggccgctgcctgcggcgctttcccgtgggacgcatccgtctcctcgtccaatccaagtgcggaagtaggcagccatgtgaacaagttagatctccccaaggattccggcagcaataaacgcttaaggtcagagccctgtggtaggccgacatctaaggcttgtagggaaaaagtgagaagagacaagctgaatgacaggttccttgaattgggtactacattggatcctggtaagccagtaaaagctgacaaagctgctatcctgagtgatgcgactcgcatggttactcagcttcgtgctgaagcgcagcagctaaaggatactaatggaagtctagaagacaagattaaagagttgaaggcagagaaggatgaacttcgtgatgagaagcagaagctgaaactagagaaagagacattagagcaccagatgaaacttttgacggcaactccagcctatatgcctcatcctactatgatgccctccccgttcgctcaggctccgatggctcccttccatgcacagggacaagctctaggacagaaactgatgatgccctttgttggttacccaggatatccgatgtggcagttgatgcccgcctctgaagtcgacacctcaaaggacagcgaagcatgcccgcctgntgcgtgatatgcntggaccgcttaaatcgcatgaactcat

SEQ ID NO: 2114 - DNA, 1200 bp, Zea mays
  Clone ID: TF_ZmC3491_1
gtcgacccacgcttcctcaaggacaaaaaaaaaaaaaacagagcgcagcattggaggcgaggaagagctgtcggccggagatggacaagtactgggaggagacgcagcgctacctggagtacgaggagctcagcatctatttggaggcgcaggaggacgccatgtcttgctacgactccagctcgccggacggctccatctcccactcgtcgtcgtcggcggcggcgtgcggcaacaagaacatcctgatggagcgcgaccgccgccgcaagctcaacgacaagctctacgcgctccgcagcgtcgtgccgaacatcaccaagatggacaaggcgtcgatcatcaaggacgccatcgagtacatccagcagctgcaggcggaggagcggcgggtgctgcaggagctgcgcgtgctcgacgacgacaccgccgccgccgccaccgcgcaggtggagtgctgcgacgtcgacgggggcctgctgcgacgggaagccgagcgcgcgaagaagatgaagcgcgcgcagtccgtcgccagcggcgcgcagtctgctccgcctccgcctccgcccgcgccgccgcacgtcgaggtgctggagctgcgcgtgtcggaggtgggcgaccacgtgctggtggtcagcgtgacgtgccgcaagcgacgcgacgccatggccagggtgtgccgcgccatcgaggacctccggctccgtgtcatcactgccaacgtcacctccgtcgccggctgccacgtgcacaccgtcttcgtcgaggtagataaaatcgaccacatccaagtgaagaacatgattgaggctgctctcacgttgctcgacgcccccggaagcccccacagctcgatgagctattacgagacctaactatgttgagcaatgcttttcggacgtctactaggtcaacaactcagtccacaattaaccagaaaggagtatgtcgtgttttgctacaatgtgcttgttgtgttttttttcaacatcacccctaagagatgatggttgtttcctctaagatgcagctagtgtaccaagcaatgtttggacttcgtgtcatacatcaccacgagagtgacatgtatttgtgtactataacatgtatatgctaaagaaaataacaaggggacttgtctttcgaatgaagagctatcaaatatgctgtcctcataaaaaaaaaaaaaaaaaagtccac

SEQ ID NO: 2115 - DNA, 1862 bp, Zea mays
  Clone ID: TF_ZmC14059_1
catggtgagggacgagccgagctttttccaccagtggcagtccgacacgctgctggagcagtacacggagcagcagatcgcggtggcgttcggccagggggagccggtggaccacgccgtggcggcggccctggcgacggcgatgcccatgcagctgcagcagcccgcggcggccgagcagccgcaccaccgcccgcgcaaggcggccaaggtcaacaccagctgggactcgtgcatcacggagcagggctcccccgccgcggactcctcctcgccgaccatcctctccttcggcggccacaccgcgttcgccaaggccgagccgacgacgcaccagccgcccagcggtgcgccgggtactacggcgccgccgccgccgccgcgaaggcgccgaagcaggagatgatggacgccgccgcgatgccgccgttccagcaggcgcgcccggccaagcgttcctacgacgacatggccgcggtggccgaggccgccaacgcgccgtccgccaacacgcgcccggcctcccagaaccaggaccacatcttggccgagcggaagcgccgcgagaagctcagccagcgcttcatcgcgctctccaagatcgtcccgggcctcaagaagatggacaaggcatccgtgctcggcgacgcgatcaagtacgtgaagcagctgcaggaccaggtgaaggggctggaggatgacgcccggaggcgcccggtggaggcggcggtgctggtcaagaagtcgcagctgtccgccgacgacgacgagggctcctcctgcgacgacaactccgtgggcgccgaggcctccgccacgcttctgccggagatcgaggcccggctgtcgggccgcacggtgctggtgagggtccactgcgacaaccgcaagggggtgctcatcgccgccctctccgaggtggagcgcctcggcctctccgtcatgaacaccaatgtgctccccttcaccgcctcctccctcgacatcaccatcatggccatggctggtgacgacttctgcttgtctgcaaaggatattgtcaagaagctaaatcaagcgttcaaatcacccttctgatgggattagcttaatctatgtcaacttttttcccattagccttaaggatttgaggctaatggttaggttatcaggtccttccttgcctttgcttccgaagagagttgcttgcagtccccaagagtccccccacacaaagatagccatttccactggttttttgctacatgggtgcagagattgatcacctagctagttacctacttaccatcccattttatctgtctctccagttttttacatggtttgatgttgtcactccatgtttttgggagagagcagattgtaaaaaaaaaacagcctttttttctagggctttgctatataggcctggggagtttgacttttacaaacctaatttttctttctccccttcgcccgtatgttgccctttaattcaccttgttttttccatgagaggatggtgtttttcaaacaccagcacctaccttcgccgtcctctcaaccttgatcacactgctcccagaaaaagcttcagttgtggagaaaatggcgccgtctttttttttaatcagctctgagggggactttgcaagccttgatttggaagtactgtagggatgcctcacttctattgtttctgttttttttgagggtcctacaagttggccgccacttgaaacttgatggagcctttgcctatagttttcacatgtgagttttgttgtcacaggacaggatgaaggtgtagttgttgtcatctcttgtttactctcatagaagcataaataaataaatgtgctcgtttggtaccttggtaacaa

SEQ ID NO: 2116 - DNA, 401 bp, Zea mays
  Clone ID: TF_ZmC14059_3
gctcccccgaggactactcctcgccgtccatcctctccttcggcggccaccacgccaaggcgcccaagcaggagctgctcgacgccgccgccgccgcgctgccgtcgttccagcaggcgcgcccggcgcccaagcgctcctacgacgacatgatggccgaggccgccagggcgcctgccgccgccgccgccgccgcacgcccggcctcacagaaccaggaccacatcttggccgagcggaagcgccgcgagaagctcagccagcgcttcatcgcgctctccaagatcgtcccgggcctcaagaagatggacaaggcatcggtgctcggcgacgcgatcaagtacgtgaagcagctgcaggaccaggtgaaggggctggaggatgacgcccgaaagcgcccg

SEQ ID NO: 2117 - DNA, 1996 bp, Zea mays
  Clone ID: TF_ZmC13586_3
ccacgaaatggaaatggtcacttccaaattgcacgagctggaattatatactcttctgatcttcttcaccgtctctttatagcgtgatatgcgtttctggcttcttgcttacgtgaaggattattagtaaggcgcgtgatggcgctctcagcttccccggctcaggaagaactgctgcagcctgctgggaggccgttgaggaagcagcttgctgcagccgcgaggagcatcaactggagctatgccctcttctggtccatttcaagcactcaacgacctcgggtgctgacgtggacggacgggttctacaatggcgaggtgaagacgcgtaagatctcccactccgtggagctgacagccgaccagctgctcatgcagaggagcgagcagctccgggagctctacgaggccctccggtccggcgagtgcgaccgccgcggcgcgcggccggtgggctcgctgtcgccggaggacctcggggacaccgagtggtactacgtgatctgcatgacctacgccttcctgccgggccaaggcttgcccggcaggagttccgcgagcaacgagcatgtctggctgtgcaacgcgcacctcgccggcagcaaggacttcccccgcgcgctcctggccaagagcgcgtccattcagacaatcgtctgcatcccgctcatgggtggcgtgcttgagcttggtactactgataaggtgccggaggacccggacttggtcagccgagcaaccgtagcattctgggagccgcaatgtccgacatactcgaaagagccgagctccaacccgtcagcatacgaaaccggggaagccgcatacatagtcgtgttggaggacctcgatcacaatgccatggacatggagacggtgactgccgccgccgggagacacggaaccggacaggagctaggagaagtcgagagcccgtcaaatgcaagcctggagcacatcaccaaggggatcgacgagttctacagcctctgcgaggaaatggacgtgcagccgctagaggatgcctggataatggacgggtctaatttcgaagtcccgtcgtcagcgctcccggtggatggctcaagcgcacccgctgatggttctcgcgcgacaagtttcgtggtttggacgaggtcatcgcactcctgctcgggtgaagcggcggtgccggtcatcgaagagccgcagaaattgctgaagaaagcgttggccggcggcggtgcttgggcgaacacgaactgcggtggcgggggcacgacggtaacagcccaggaaaacggcgccaagaaccacgtcatgtcagagcgaaagcgccgggagaagctcaacgagatgttcctcgttctcaagtcgttggttccctccattcacaaggtggacaaagcatccatcctcgccgaaacgatagcctatctaaaggagcttcaacgaagggtacaagaactggaatccaggaggcaaggtggcagtgggtgtgtcagcaagaaagtctgtgtgggctccaactccaagaggaagagcccagagttcgccggtggcgcgaaggagcacccctgggtcctccccatggacggcaccagcaacgtcaccgtcaccgtctcggacacgaacgtgctcctggaggtgcaatgccggtgggagaagctcctgatgacacgggtgttcgacgccatcaagagcctccatttggacgctctctcggttcaggcttcggcaccagatggcttcatgaggctcaagataggagctcagtttgcaggctccggcgccgtcgtgcccggaatgatcagccaatctcttcgtaaagctatagggaagcgatgaaagggcgctacatgtgaagcttaattaatggaagcaaacttgtatttcttgtgcaaaagcttactatatatttctgcaaaacctggtgtgccttgttttgattttcagtcgccaattgtgcccttgtttttatcaagtgatgatctacaaaatatataaggaatctttg

SEQ ID NO: 2118 - DNA, 2473 bp, Zea mays
  unsure (1)..(2473): unsure at all n locations
  Clone ID: TF_ZmC14919_1
ggcctctctcctttctcgagagagcgaagtaaacgggacagcggctgcagccacccagtgtacgagcgctccgacttgtgtgctctcatgccgtgctgctacagagctgcctcataaaagctccctgagcctgctcctgtttgcagcttgcaaggcgccaaggacggacggaggcgacgactcgcaaggtagctctgctcgggcgaggcagcagcagcacgcagcagtactccgttcagaatcaggagagaagacgttgttctccgggcactcgagtcgaagtcctgacgagatggacggcaatgcgaggtcggcggcaacgaatcagaagaagcccgtcgtcgcggacgacgacctcgtggagctgctgtggcacaacgggagcgtcgtcgcgcagccccaggcgcaccagaggccggcgcccacctacgaccccgaccgcccgggcaccagcggcctcaccggcgaagagaccgccgcgtggttcccggacaccctcgacgacgcgctggagaaggacctgtacacgcagctctggtacagcaccatcgccgacgccgccccgcagcacgagggaacgctcccgggccctacctcgcagccttcgccttcgccgcccgttgggagcagcggcgtcgagtcgagctgggctggcgacatctgctcgaccttctgcggaagcaaccaggtgctcaggacgccggcaaggatcagggggaaggacgcggcattgcagtcggagttgccgagcaataccggcgcgcacgacggcacatcgtcatccggcgggtctggaagcaactatgggggatccgggctgcccagtgacagcgtccatgtacagaagagaaaggggaggtgtagagacgactcagatagtccgagtgaggatgccgagtgtgaggaggcaagtgaggaaacgaaaccatcaaggcgatatgggacgaaacgccggactcgtgcagctgaagttcacaatctctcagagaggagaagaagggaccggatcaatgaaaagatgcgcgcgttgcaagagctcatcccgcactgcaacaagactgacaaagcgtcgatattagacgagacgattgagtatctgaagtcactccaaatgcaagttcagatcatgtggatgacttctgggatggcgccaatgatgtttcctggtgttcaccaattcattccacagatggctctaggaatgaatccaggttgcatccctgcagcacagggcctaagtcagatgccaagattaccatacatgaaccacaccctgccaaaccatatccctctgaactcgtctccagctatgaatctaatgaatccactgaacgccgcgaaccaggtgcaaatcggtcacctcagggatgcaggtagccacgtccttcacctagatggcgggcgagcagcagtggtaccccaggtaccaggaccaggaccccatgtcgttcatggacatcaaatagcacaagccgaagaacacaataagatactggaagtggcagctagtactgttataccaacttctaaggcagggcaaccaccaactttccatggagtttagagtgatcaaaatcatgccttaagctgtatatctgtacagaagtgtcagaaccatattctttgacatgtaagcttagttctagagttattatcaggagtcttgtataggttacaagacaacagcctgtctaccgccgtattctatctacggaagaactcgagctgcatactgctgtgcagactgcagtacagcgttcaagagaattgaatgggatcaagaaagggtctttcttttctggcaatccctggaaatactgacgtgatgaggagcggatggcatctctgtagctgcgctgcagtgtatctacatcaatatggcaatgcttgtctggacacgaatgctacatctacatgtaaatgcagagttgcaggtagatagcaacccctctcccctgagatgccaactccgactcctgtcctactgtgtgtactgatctgtacagcaagcaatattcaatcagcagtcaattcctaggaaaaaaaaaaacagcactttgggtctccaaagattgaagttgttgatgtcaccggtgttgtagtacccgcccaccaaatccacctgcactccggatatagatatactatacatcgaggtcaggtggtcatcgtagtgctgggtgtcgtcgctgaggctggactcgctgagctagggagcccggccatacggttgcccggcgacagcttgccggagcgtgggtcctcgaaggagatgatggacttggcgaccgcgtcagcgtagttgaagttcgcggcaaggcccagagtgaggagcagcagcaacacgatacacatgttgatgagcaacctgctcagggtctccatggctggctagtgaagtctccgtgagctcgagtggagagganaggcgagggcacaatgagganagnnnnnnnnnnnnnnnnnnnnnnnn

SEQ ID NO: 2119 - DNA, 463 bp, Zea mays
  Clone ID: TF_jC-zmXLIB3527P004ce08d1
tttctcgccgtctgatagtgcagcaggagacaggccgacaaccaccgctgccagaatcactacctagagagagacacgcggggagctgctagtaggcaggaccaactcaagatgccccagacaatgacctgccgcagatggcactctggaaggaggaaccgtcaggacgatgttttttagaggagagggaggaggaagcggagagccagcagatgacccacattgctgtggaccgcaaccgacgcaagcacattaacgagcacctcagcgcgctacgatcactcatgccgtcagaccacacgcatcggggcgatcaggcattcatcgagatgcggctcgatcaactgcggcaaggagctggatcagctgctgcagacgctggaagcccggaggccacacccgcagggcagtgcctacgcacgaaatcccgacgacacggccgccgaagcggactaactcacct

SEQ ID NO: 2120 - DNA, 1561 bp, Zea mays
  Clone ID: TF_ZmC26240_1
aattcggcacgaggcctatgtcctcctctatcctcctcttcgtctatctcttcctcctctttcctgttccattacgcagtgcagtctatactacactactacagtgctgctgcaactgctactccgactactagtaactagtggtagcagtagcaccaaggccggagtagtttatatgttgtggacagctagccctcgctgctcgtagtcgtagctccaggcctccggctgctgctgccgccgccgccgccacagggagagctagctaggaggtatataggtatagccgtatagctagctagctgctgctgcgtgaacggggaagaggggagggggggctgctgttgcagtgttgcctgttggcctgttgcaggctcagctcgcaagtcgcgagtcgcgtctgcagcagctgctgcctcagggaggggctcattactccctcgttgcgtgctgcagttattgcttgctaccgctagctactgtgtacgttttggccttgccaataagctctaatggagaggatgcagctgcaactgcaagggtccatcgccttttcgctggtaagttcacatacactacacagccaggggagggggcagccgggcaggcaatggagcacgcacgcagcttccatttgtagcggcaggcagcttctttctggaggaagctccgtcgtaaatgcaatggagtattaattctcctgctcctgctgcatgccgctgctgcctcctctagtcttgacgcttcctttcccttccatgccctctctgcattgttcacctttgctagtacttccctctcatgtcgtcgcagtggcagctctgccgccggcacccacgcacgcacgcacgcacaattcaatgcgcaccactgtactcgctctctgtgcttcctgctaggagatcgacatcgactcgactactaggagtatctttaatgtcgttgctgctgctcccctttctcgatcggcttgctgatgatgtgcctttcttgctccccttccggcgatggcgtggtgatgacgacggtggcggtaatggaacagtgggcagacaagcagcagcaggcggccagcaccaacgccgcagcggcggcggcgcagatgcccttcctggcgctgctccagggcgcgggcgttgtggtggaggcggagcagcaggaggagcagcaccacgacgggcgcaagcggcaggccttcgcgcgcgccgtctccgaccttgatctgctcgagagctgcgtcacgcaggcggtagctcccgcagcggcggcgtctgcgcccgtggccggcaggaccgagaggcggaggaagcggcagaggccccgcgcgcgcgccgcgccgccgccggagaagcgcaagaagcccgaggaggccgagagccagcgtatgacgcacattgctgtggagcgcaaccggcggcgcctcatgaacgaccacctcgcctcgctccgctccctcatcccttccagctacaccccgcgcggcgaccaggccacggtggtgggtggcgcgatcgactacgtgaagcagctggagcagcagctggtggcgctgcaggcggcc

SEQ ID NO: 2121 - DNA, 873 bp, Zea mays
  Clone ID: TF_ZM4442.C1.o15.fg
atggacgacctgctctcgccctgctcgtccttttccccgccctcgccggcgtccttcttctcccacgccggccacccagtcatcgagttcgcctcctgtgaggtccccgagcaatggctactcgacgacctcgtcgtcgccaagaacgagggctatgacgacgtggacgacctgtggcccgtgcggagctcgctctccccggactccgaggtctccgagcagccgcttcctccccagccgccgccaccgtcacagcaggagctgacgagcgtcacggcggccccggcgcagcagcagcagcgcctcgggaagcggcgtgggcggaaacccgggccccgcccggacggccccgccgtcagccacgtggagtccgagcggcagcggcgggagaagctgaaccggcggttctgcgacctccgcgccgccgtgcccaccgtgtcgcgcatggacaaggcgtccctgctcgcggacgccgcctcctacatcgcggagctccgcggccgcgtcgcgcggctcgaggccgactccaggcgtgccaccgcggcgaggtgggaccccgccgtaacggcggcggcctccgccagcgccgccgctatggggctggcgggagccggcggcggcgccgacgaggcggtggaggtgcggatgctggggccggacgcggccgcggtgcgcgcgacgagcgcgggcccccacgcgcccgcgcggctgatgggcgcgctccggtctctggagctccacgtgcagcacgcctgcgtgacccgcgtgaacggcgtgaccgttcaggacgtcgtggtcgacgtggcgactccgctgcaggacgacgacggcggactccgcgccgcgctgctccagatgatgcaggacagctag

SEQ ID NO: 2122 - DNA, 1685 bp, Zea mays
  Clone ID: TF_ZmC3240_1
tcgaggcctggcacgggtagtcccaccgcacccgactccttggatttgaattagattccggtttccctttctccgcccgctggccggggcccgctcgccgggcaacacataagcacgcgcccgcgttggcgtattctattcgccaagagccaaggggattggggaggccgtccatgttgcgtgttgtttagacgcgccaaaaggcaaaagcgtggaggaggctcatcaagcacaagcacgccacgcgatccacacacggcaagcaacgcccagggctcgtgctcgccccgcgacccgcgaaagatctgtgctggttcgctcgctcgctcgcgccgcgccgccgcgtgggggtgccgatgagctgcgcggggcaggccggcgggtggctgctcgactacgcgctggtggaggaggagatccagggctccgagttcatctacatggtcgacgacccggccgtctccagcgtgatactggggtttgatgctcccaggaaggaggacggcgtccaggacaaccccggcgccaagaagagatcccggccggagtccagcgcgccacccggcaccaaggcttgccgtgagaagctccggcgagacaggctcaacgaaaggttcaacgagctctgtgccatcttggaacccggcaagccacccaaggccgacaaagtcgctatcctaagcgacgctgcccgtctcctgaaccagctgcagggcgaggcccagaagcttaagcaatcgaacgaatcgctccaggagtccatcaagagtcttaaggctgagaagtccgagctgcgagacgagaagacgaggctcaaggctgagaaggagaggttggagcagatgctcaagggcgtcgtcagccacgccgcggtggctgctccggggcccttcgtcccgcaccctgctgcggtcgctccatctttccaccaccacccggcggcgtttgctcaggctggaaagttcgtcccgtaccccagctacccgccgccggctgcgttctggcagtggataccgccgacgtccctcgacacgaccaaggaccccgcacactggccgccggtcgcctagccgacctaccacctcaccgtggcatcattcatcggtgatgcgttgccgtgtgtactgaatttgatcgaagcatgcctgaaaaaagaaaccttggctgctgctcgtgtcaaggacgtgatgtgctgaagttcaggcgatctaggtcggctggagaagtctatgtaacagccataatgctaaagcaatgaaagtgatatattaattgaatcgggctagtgtttcctgaaactacggttatttagacattgcctggaaggctagaacaatgcaaacttgggtaacattgtgactgaaaaatgaaaccttggcgctgctcgtgtcaaggacgtgatgtgctgaagttcaggcgatctaggtcggctggggccgtatatctgaccgcctggtggtctaaaatgcaaatttggctaacattgtgggctgcaataccgatactggggtttgatgctcccaaatcagatcaaggaacagggcggtttttccacataacgctgtgtgtaagaaagacaaagtgccaagcggcgtatacgccaccaagatctcgcaggaggagtacctcaacgcgccaggcgagacctactccgttaccctcaccgtgccgggaacctacggctt

SEQ ID NO: 2123 - DNA, 1084 bp, Zea mays
  Clone ID: TF_ZmC3240_10
atgagctgcgcggggcaggccggcgggtggctgctcgactacgcgctggtggaggaggagatccagggctccgagttcatctacatggtcgacgacccggccgtctccagcgtgatactggggtttgatgctcccaggaaagaggacggcgtccaggacaaccccggcgccaagaagaggcaatctttctcttcttccttcctttctgttgaccctcaacataaacggaaaagtgtccacatcacactaagtccaattctgttgcccctgaagtccgtgggcataatttgctgtgctttcctgtttccctttcttctacgcagatcccggccggagtccagcgcgccacccggcaccaaggcttgccgtgagaagctccggcgagacaggctcaacgaaaggttcaacgagctctgtgccatcttggaacccggcaagccacccaaggccgacaaagtcgctatcctaagcgacgctgcccgtctcctgaaccagctgcagggcgaggcccagaagcttaagcaatcgaacgaatcgctccaggagtccatcaagagtcttaaggctgagaagtccgagctgcgagacgagaagacgaggctcaaggctgagaaggagaggttggagcagatgctcaagggcgtcgtcagccacgccgcggtggctgctccggggcccttcgtcccgcaccctgctgcggtcgctccatctttccaccaccacccggcggcgtttgctcaggctggaaagttcgtcccgtaccccagctacccgccgccggctgcgttctggcagtggataccgccgacgtccctcgacacgaccaaggaccccgcacactggccgccggtcgcctagccgacctaccacctcaccgtggcatcattcatcgtgtttgttgttgcccatctgtgtttttgattaaaggtcgctctgtgtcagttgtaagtgctgtgttcatcctcggccccaccaaacccatgcatcaaccagcatggactgcggatcgatgggtgctgttacccccgtcaggctttattctaagttaaatcctaaggaaaaaaatggtgcttcttggtgctgc

SEQ ID NO: 2124 - DNA, 846 bp, Zea mays
  unsure (1)..(846): unsure at all n locations
  Clone ID: TF_ZmC3240_4
attgggtacctcgaggccggccgggtagcgaatttgctttctcgtaattaactccactttgagagctactactntgtgcgaattcgtttccctttcttctacgcagatcccggccggagtccagcgcgccacccggcaccaaggcttgccgtgagaagctccggcgagacaggctcaacgaaaggttcaacgagctctgtgccatcttggaacccggcaagccacccaaggccgacaaagtcgctatcctaagcgacgctgcccgtctcctgaaccagctgcagggcgaggcccagaagcttaagcaatcgaacgaatcgctccaggagtccatcaagagtcttaaggctgagaagtccgagctgcgagacgagaagacgaggctcaaggctgagaaggagaggttggagcagatgctcaagggcgtcgtcagccacgccgcggtggctgctccggggcccttcgtcccgcaccctgctgcggtcgctccatctttccaccaccacccggcggcgtttgctcaggctggaaagttcgtcccgtaccccagctacccgccgccggctgcgttctggcagtggataccgccgacgtccctcgacacgaccaaggaccccgcacactggccgccggtcgcctagccgacctaccacctcaccgtggcatcattcatcggtgatgcgttgccgtgtgtactgaatttgatcgaagcatgcctgaaaaaagaaaccttggctgctgctcgtgtcaaggacgtgatgtgctgaagttcaggcgatctaggtcggctggagaagtctatgtaacagccataatgctaaagcaatgaaagtgatatattaattg

SEQ ID NO: 2125 - DNA, 862 bp, Zea mays
  Clone ID: TF_LIB4764-117-A1-K1-E8
cctcgaggccggccgggacccggcctctctctcatcctcccttctcttccctctctcttctctctaccgcgaccgcgccaaggatcaagcgcacgcgacgtccgacgccccgaccgcctcgacccgcctgcgcccaggaagacccgacgccgccaggcgacccctcacctctctcctcccttccctcgggaccagggcaacgcacaacgcgccgacggtgaccagtagcccgctctggcaccagctcggcagctcctcccatcgcatctcccctgctaggccttctcgtcccgctcggaagatgattcagctggtgcatgcgaggaacctattgtgctgaaataaagtaccagctcaagaggtcctagccgctcctcaaaggattcaaagagcctctacgcaaagaggagaagggagaggatcaatgaaaaactaaggacgctacaacagctaattcctaatggcaccaaagttgacatgagcactatgctggaggaagcagttcagtacgtcaagtttctgcagctgcaaataaaggttgggacaaaagtggctgcagtttccctcaagacaaatactacgactcacaaaattttgggggtgctaacaaaagggaacacacagattgtatgtcatattatcagccccattcgccacgcgctccgttgctgaagcccccgcccgcgccgtccaggagggatctggaataacaggagcctgatggaagcatgaagattttttaggctcctctgctcctggagctggacatgatgggccaagtcatttatattggggctaacaacaaaggttgatcagttttgcctagtcccagtaccatacaaagatgggtcagtgaacctga

SEQ ID NO: 2126 - DNA, 1517 bp, Zea mays
  Clone ID: TF_ZmC18277_1
cattgggacctcgagccggccgggccggagtagtgggtaaccttggtctccactacctgctgccaagtgccgacgcgagtccgtccctcttctcctccgcatccaaagaaaccagaccacaagacatcgagagaacagttgcggccttgctggcacggggatagatcttctccactccaatggcgggcttctcacggccgaacaactcgctcctcctcaagatgcctgcgactttggccagtagccacaccccgaacctctcaagcctcctgttctacgaccagaaccatggccaagctgtaaatgcaaatgcagcagcgatgacgatggtggaggacgacgcctcactccagagctcatctgcagtgctcgacacctccccgcagccacagggcagtgctgctgctgcgtctccgatggagaggaagaggaagcctgcagaagacagtgctacactcagctctgctcaatccaaggaggattgcaagcagcagcaggagagcaagagcaggcggggaaagaggccccacaacaaggaggctaatactgaggagaagagcgctactgaagacgaggccaccagggggtacatccatgtgagggcgaggaggggtcaggcaacggacagccacagccttgcagagagggtaaggagagagaggatcagtgagaggatgaggatgctgcaagcactggtccctggttgtgacaaggttactggaaaggccctgattctggatgagattatcaactatgtgcagtccctgcagaaccaagttgagttcctttccatgaggattgcctccatgagcccagtgctatatgggttcggactggatagtgatggcctccatgaccacgcacaaaagatgggagtcatgttccaggaagcccttgcaatggcaggtccagtgctgagccaagccagcccagcagctccatctgaagccatcatggacaccaccacaccttactcactgcatggccatggccagggttccatctctttttcccaggacaatggcagcagcacttacctgatgcagcatcagcaagcagcgggggagccaacaagacagcaggagctgctcagccagttggtgttcaacaacatgtgctctttccagtaggggtggggagcatttgggtgagaggaagcgaggaatggaccccacattgacaataggaaggaaataatgctgcgagatttggtaggagcatgcacgtaccagatgagtttgagatgttggatctagtccatccccttgtctggatttggagagagcagtagcaagtagatcgagcctgctgtttgtttacacattttgagagactttgtagtatttgtaactcctttattgggcattgtccatgaggattttctcagcggctgcaccttccatctcaccgtgttgttgtagttcttgagcaatcggttgttagtacatacgagagctattttgttctttgccaaacagtgattgactgttccatccaagaaaaaaaaaaaaaaaaaa

SEQ ID NO: 2127 - DNA, 578 bp, Zea mays
  unsure (1)..(578): unsure at all n locations
  Clone ID: TF_LIB3597-024-Q1-K6-H7
ggntggttgaattttagccggnggcagagcgggagcgggcgcagtgtgcgcgggacgcgagcccccgagcgcgcagaggcgccgccgctgagagccccccggcccgccgcgccgacccgcccgcggagccccggccgcgcagccagcatgaagcgagcccacccggactacagctcctcggacagcgagctggacgagaccgtcgaagtggagaaggagagcgcggatgagaatggaaacttgagttcggctctaggttccatgtccccaactacatcttcacagatcttggccaggaaaagacgaagaggcatcattgagaagcgccgacgggaccggattaataacagtttgtctgagctcaggcggctggtacccagtgcttttgagaagcagggatctgctaagctagaaaaagccgaaatcctgcagatgaccgtggatcacctgaaaatgctgcacacggcaggaggaaaaggctatttcgacgcgcacgcccttgctatggactatcggagtttggggttccgggagtgcctggcggaggtggcccgatatctgagcatcattgagggact

SEQ ID NO: 2128 - DNA, 827 bp, Zea mays
  unsure (1)..(827): unsure at all n locations
  Clone ID: TF_LIB4764-112-A1-K1-B8
tgggtacctcgaggccggccgggacgccacctgcttctgagcttctccacccggtctctctctcatcctcccttctcttccctctctcttctctctaccgtgaccgcgccaaggatcaagcgcacgtgacgcccgacaacccgactgcctcgacccgcctgcgcccaggaagacccgacgccgccaggcgacccctcacctctctcctcccttccctcgggaccagggcaacgcacaacgcgccggcggtgaccagtagcccgctctggcaccagctcggcatctcctcgcatcgcatctcccctgctaggcctcctcatcccgctcggaagatgattcagctggtgcatgcgaggaacctattgtgctgaaacaaattaccatctcaagaggtcctagacgctcctcaaaggattcaaagagcctctacccaaagaggagaagggagaggatcaatgaaaaactaaggacgctacagcagctaattcctaatggcaccaaagttgacatgagcactatgctggaggaagcagttcagtacgtcaagtttctgcagctgcaaataaagtgttcagcgctcagggtgccttggaagtacgctagcttgttgtcatgaagaaatcattcaagttccttccactgaagttgatgcataaggctgcaacaccatctagtggagggtgttctggacaaagaaagcttgtaccttanaacaggaggatacaagaagctggagtggttgtctgaagggctttgaactgcttgaagcattagtgtagctttggtgcttttgtgactgatcagctctggagcagctagaatgatat

SEQ ID NO: 2129 - DNA, 1060 bp, Zea mays
  unsure (1)..(1060): unsure at all n locations
  Clone ID: TF_ZmC261576_1
ggcgcgcgagaggaggagcaagnacaacgagaagatgaaagcgctgcagagcctgatacccaactccaacaagaccgacaaggcatccatgcttgacgaggccattgagtatctgaagcaactgcagctccaagtgcagttggtgggggcaacattacagcgtcaagctctggggcagtgatgccaccagtaaaccaaagttcaggacttcaagtatttgatccattaaatcctccacgagaccaaccactgtcttttgtattaccaaatgtagacaaaaccattcaagaagctccctttcacttggaatcatcgcagttccaccctcgaccatttcgaatgcctgaatcttctgaggtgaggtagtggcaaagcaccagctaacttcaattcaaggaagagttagtatgccaggaattggtatgaaccccattaggcaagaatcatccactgtaaaagctgatcagtttgatggttgctcacatagcaaagagtgactacgagatatgtgccacaaaatgcatgacaagttcagcttaggaaatggcaaccgatgaggaccgaaggcaagatgacacagttcagtaacccagctgacagcctggcacgcaggcttcccctttattttcctctgttactgcaatagtaacttaaatttttaggcttcccctttattttcctctgttactgcaatagtaacttaattttttttaggcttcacctttcctttttgtttgaaaattagcagggcagtattaattaatagtacaaaaccatgtatcaccaagatttcaggggttgaaacttgaaatgccaatattcaccaagctttcgttttttttttcaaagagtaatttgcaaaggttgtaatgccctctatagcctatagcagacttaacaagcactacaatagaagacagcatcagcagagtcaatgcgtatacacctacaagggaacncaacccatgaagagagttaacaacaagaaggaaacttgtgctgtaactccacatctgttcattcatgacctagtaattaaaggatcagaataagcttcgcc

SEQ ID NO: 2130 - DNA, 342 bp, Zea mays
  Clone ID: TF_LIB3245-181-P1-N2-A2
gcaaaaggaagggttctggagaggacagttcatcactacgttctctaggtgaaaccagtgcattgcagcgagaagtcagcatggagtgtgctgatgagaaggcgggtgatgctagagccaagagagaggactacgtgcatgtccgggcaaagcgcggccaagccaccaacagccacagccttgcagaaagatttcgaagggaaaagataaatgaaaggatgaagcttcttcaagaccttgtcccaggttgcaacaagattacaggcaaggccatgatgcttgatgagatcataaactatgtgcaatctctgcagcgacagattgggttcctttcgatgaaac

SEQ ID NO: 2131 - DNA, 1560 bp, Zea mays
  Clone ID: TF_ZmC3534_1
aattgactgtgcccagctctcgatctactccaccctttaagtaaggcaacttcagttggcagacctggcaatgacaagctagaaggttaccaggcattccccctcccccaaaatgattgcaacgacatcgcactgagtccaagtatcagagtaggatgatgtattcccctccgcgcaccgatcccgacagagaggaagagcagtgcttctcaatcggaagtaatctgcttgcttcactagaccattaccataccatggattttgatgagcctgtcgtctccccaatgaccaatgcaggcatgcaagagggggttcagctctacagttctactggagatgctcaactaaatagaaatatgaacacaggcaagtgtttagaggatggcaaaaggaagggttctggagaggacagttcatcactacgttctctaggcaaaaggaagggttctggagaggacagttcatcactacgttctctaggtgaaaccagtgcattgcagcgagaagtcagcatggagtgtgctgatgagaaggcgggtgatgctagagccaagagagaggactacgtgcatgtccgggcaaagcgcggccaagccaccaacagccacagccttgcagaaagatttcgaagggaaaagataaatgaaaggatgaagcttcttcaagaccttgtcccaggttgcaacaagattacaggcaaggccatgatgcttgatgagatcataaactatgtgcaatctctgcagcgacagattgagttcctttcgatgaagctctcagcgatcggccctgggctcaactgtgacctcgacctacaagatatcctctgcacacaagatgctagctctgcttttccaggatacaacctgcaaacgagcaatgtgcatattaatctgtacagagcatctgaagaaggtttctcacacaggaacaggatcatccctagtccagcaaatgttcacgtgacaagaaacgcccagctatctgcatatcctcaggttttcattcgacgcccttgaacagcttcaagtgctttcctatgtcgattatactagtttctgccatggcagagaggagttatctggaacgaggagctttgcagcatcgcttcagatagaaatgctggtagccattcaatgcaagtggagtgacattgtggcaactgacaagccggcagtttaatggtgatcaactctgaaagtcttgacaagttgggttgctactgaggtgccttttcaagttgcagtggtagcacgacttctcttgggatgagctagttaacttttggtatttgagaggaattctggtgtgtccacccatcctgtacagttattagaataactaatcaaaggagtactgtgaaattcttgcgatctggtggagaaaatagcggacaattttcgtctggaatttctgacacaactgagttagtgctttggtggggtgtggctccacctaattatttagttgtaatagctggcagagctctatgactataactgcttgagattcgtgacaacgaatttaaattggccaaataaaacaccgttcttcggtatt

SEQ ID NO: 2132 - DNA, 1417 bp, Zea mays
  Clone ID: TF_ZmC412624_1
aggtgacactatagaagagctatgacgtcgcatgcacgcgtacgtaagctcggaattcggctcgaggccgcgcaccagctgctcccgtggctcggcgcggcgcccttctccgagccggcggccgtggcgggcctcggcgccgccatgggggcctacgcctgcgacggcgtcggcgggctcgggcatggcggggtgttcggcttcggtttcgacgccgcggtgcagcagcagcagcagcagcagcgcgcggcggacgggagcggcaaggcggtggtggtgtccgggctgctggggagcctgcaggcggagctggggcggatgacggcacgggagatgatggacgccaaggcgctggcggcctcgcgcagccacagcgaggccgagcgccgccgccggcagcggatcaacggccacctcgccaggctcaggagccttctccccaacaccaccaagacggacaaagcgtcgctgctggccgaggtgctggaccacgtgaaggagctgaagcgccagacctcggcgatgatggcggccaccgacgccgacgccgacgccgacgacgaaggcgccgggcggacgcaggcgcaggcgcaggcgcagctgctgccgacggaggccgacgagctgtgcgtggacgcgggggccgacggcgccggccggctcgtggtgcgcgcgtcgctctgctgcgaggaccgcccggacctcatcccggacatcgtccgcgcgctggccgccctccagatgcgcgcgcgccgggccgagatcaccacgctcggcgggcgcgtccgcagcttgctcctcatcaccgcggacaggagagcggacgtccagcgcggcggcggcggcggcggcggcgacggcgacgacgacgaggaggaggaggatgaggaggagggcggcgagcgcgctgcctcgcaccggaggcacgagtgcatcgcgtcggtccaggaggccctgcgcggcgtcatggaccgcaggacggccagcagctgcgacacgtcgtcgtctggtggcggcggcgggagcattaagcggcagcgcatgaactacggcgcgcaggagcagtgttcggtgtagcattcatgcatgcgcgcgcacacacacacacggcgttttccagcagcgtggtatcgagctgtgcgtctttatgctttgcattgcattgcatggatgcatgaacgcatatatatctgcaagttatttagcgtagctacttgctagtataagtttagccgtcgtttcaaaagcctttgggcgccatggtttcttcttcgggtataatggtgtgtggtgcatatgcatcagtgcgtggcagcggtaactgcttcaggctcagccattcagtggggagcgttttatgtatcccttttgtatgttcatgttgtcacgcacacggtaccggttactgatttcttgg

SEQ ID NO: 2133 - DNA, 762 bp, Zea mays
  unsure (1)..(762): unsure at all n locations
  Clone ID: TF_LIB3205-339-Q1-K1-B8
cccacgcgtccgggcgtggtcacaatccaaggaggtgcggttttcatgcgcaccagcgctggcggctggtaacctgcaccaggatatgcctctgggaagacctggcaacaacatgactccccaggggaaaatggagaccaaaaggcttgtgaggttgcagtcgctactccatcgctctgctccggcaatggcgagtcctggcgcgaacaaaagaggaagagtcaggccgaatgttctgcaagtcaagacgatgatcttgatgatgagtccggtgggatgcgaggatcaggcggcagaggtacgaagcgcagccgcaccgcggaggtgcacaatttgtccgaaaggaggagaagggacaggatcaatgagaaaatgcgcgccctgcaagagctcatccccaactgcaacaagattgacaaagcctccatgctggatgaagcgatcgagtacctcaaaaccctccagcttcaagttcagatgatggccatgggaagtggactgtgcattcctcccatgctgctgccgcgagccatgcagctgcaaattccttcaattgctcatttccatcatctcggcatgggattgggttatgggatggggtgtcctcgatatgaacagcacagcggcagttccatttcagcccatccctggtgctcactatacttgtccgatgatcccaggcacgccaccacaaggtcttggaattggaatgcctggcacaaacacgatgccagtgtttggactccctgggnncagcatcca

SEQ ID NO: 2134 - DNA, 1780 bp, Zea mays
  unsure (1)..(1780): unsure at all n locations
  Clone ID: TF_ZmC8592_2
cctcgaggcctgtccggactgcggcggccgagatgaacgcgcggcttcctcccccaatggcgcccttcccaaaccctcgacgcgctgctctcgcccagatcccgcgtggcttccttccctcggctgccgagatgcatccctcttccccagctgctctcccccaccaaaccctcgacgcgcggcttcaacagagccccagcccgagcccatcccgccttcaatgccggatctcgccccatcgccaccaacgacgtcgtcaagtggtccaacatcgatccctctagcttttaaagcctctggatcctccgcagacgacgtcaagttgtccaacatcgatgtccaagagttcatcgccttcgatccggtctacggggcccagtgctagagaaaagatgagatggaactttgatgataaggtctttgaagcctcaaacagagtcttgaacattgtcttggatgctgtgaacaaaataaggtctctgaagtctccagtagacccacgcgtccgcccacgcgtccgtccacttttccgagccctcccagggtctcacctcgaggccggccgggactgaaaggccccacgaacttttactctagccctcccagggtctctcttcggcggcggcgatgtctctcgccccggacccggcggacggcggcgccggcaccggcaccggcgacgactggttcctcgactgcggcatcctcgacgacctcccggccgcggcctgcggggccttcccgtgggacgcgtccccgtcttcttccaaccccagtgtggaagtgggcagctatgtgaataccaatgatgttttcaaggagcccaatgatgtcttcaaggagcctggcagcaataagcgtttgaggtcaggatgcaatgatgtgcatgtgccaacatctaaagcttctagggaaaaaatgaggaggaacaagctgaatgacaggtttcttgaattggggtctacattagaaccagggaagccagtaaaagctgacaaagctgctatcctaagtgatgctactcgcatggttattcagcttcgttcagaagcacagcagctgaaggaaactaatggtagtcttgaagaaaagatcaaagaactcaaggccgagaaggatgaacttcgtgatgagaagcagaagctgaaattggagaaggagagtttagaacaccagatgaagctgatgacatcgactccaacctacatgcctcatccgaccctgatgccggcgcctttccctcaggcacccctagcgccgttccatgcccaggggcaagctgcagggcagaagctgatgatgccctttgtcagctatccggggtacccaatgtggcagttcatgccgccttcagaggtcgacacctcgaaggacagtgaagcgtgccctcctgttgcataatcgcttcgattggcggctggtcgtgctcacaccatgcgaattagtcgcaactgaagcccccccctagctgtcgattcattgattggctataactgctgttgttatatttgtagttcgttggtgaccaagtaagctgctgatatctgtggcggggcgccctactatagaggctactgataccccttcaatggctgtacatttttttactgttattctttttgcggagaaaagaagaatgtttgttcttgttctccacagcaacaatgtcacataccctattattctatatatatgtcgtgtattttatatttaacaaaaaaaaaaaaaaaaaaaaaaaggggcggccaaaaaaaaaaaaaaaaaaaaannnnnnnnnnng

SEQ ID NO: 2135 - DNA, 1264 bp, Zea mays
  unsure (1)..(1264): unsure at all n locations
  Clone ID: TF_ZmC312_1
ggtgggttctttgcgccgctgccggcctcgggcttcaacgacgccgggatgagctgggacgacgaggacgagatcgaccaaagcgtcgacgcctcctcgatggccatctcggcctccatggagaatgctgcgggcgcggtggcgggggcaagtggcgccggcggtggcagcgggagaggcaagaagaaagggatgccggccaagaacctcatggcggagcgccggcgtcgcaagaagctcaatgaccgcctctacatgctgcgctcggtggtgccgaagatcagcaagatggatagggcttctatccttggcgacgcaattgagtatctgaaggagctcctgcagaggatcagcgatcttcacaatgaacttgagtcagctccgagctcttcgcttgttggaccaacatcagctagcttcaacccatcaacaccgacattgcagacatttcctggccaggtcaaggaagaactttgcccgggctcattcccaagccctactggacaacaagccacagtcgaagtcaggatgagggaagggcatgcagtcaatatccacatgttctgtgcgcgtaggccaggcatcctgctgtcgacaatgacggccctcgacagcctaggcctcgacatcgagcaggcggtcatcagctgcttcaatggctttgcgatggacgtgttccgagctgagtgcgcggatggtcctggaatggtgcctgaagaaattaaggccgtgctgatgcacaccgccggcctccacaacgcaatgtagccggtccgaaaacgggccaccgccaggatgacgacgatcctcctcctttctactaagggcttcggttcggaagcggcataagattaagctgtggtggccattggttttctggggcaagtgatgaattttaagatgatgaggctcgccatctcgggcatgaggcatgagtgatgatgtaactatgggattcttttttttcttctcattagcctaatgtcggattttctcctctctgatacacttgtggtgtaatagaatctatgctgcgtgttgaacaatatatggtggtgaatggtgatgcggtagctagcatcaaactcagtgcctgttggtcagagatcgatggtgcaaagagagacgagttcattcatcagcgtccagcaatgattttgactggctatgggtccgtccgtccttgattcgaatcaaatgaattgaatcctctggcttcttgttatttaaaagttgtgggntgttgggggtattaatattnggg

SEQ ID NO: 2136 - DNA, 908 bp, Zea mays
  unsure (1)..(908): unsure at all n locations
  Clone ID: TF_ZmC112780_1
cggggnaaccgtcccgtctccaatcataaatgcacccgccgtttgcgatgcgacggacgacgacgcggccggaggagagggaggcccgcgaccgaggcgaagcgcaggaccgccggcactgcagccgatcgaaaggcgctctcaaaagctctgcgctgcgctggcagctttgagctttctcgggccggagaaaagccgaaacaaacaaacggactggccgagtcgaggagagagagagggtgagagggagaagagaaggcggagagagaaagcgagctgaggagcgcaggcgctgtcgctggcgaggacatgctcgcggcagcgcggtatgggctcaaaccataggcgtgtcaggaacggtggagagcggcgaccactactcgccttcgtctcggtcctcgcgcgctcctgggctgcctcttggtgctagaaaccctcgcgtcgcgggagcttggttgcgactgcaagcgccaagctgctgtgctgtgccgtgggtggcggcggcgggagtggaagtggaaccgcagccggtgctgtgatggacgcgcagcagcagctggatttggtcatgcgtcaccagagcatggccaccgtctgcgagagcgaggacgcgctggggtcgtcggagtcggatcccgcgaggccggcgcgcccgcgcggcaagaggagccgcgccgccgaggtgcacaacctctccgagaagaggaggaggagcaggatcaacgagaagatgaaggcgctgcagaccctcatacccaactcgagcaagacggacaaggcttccatgcttgatgatgccattgagtacctgaagcatcttcagctccaggtgcagatgttgtctatgaggaatggcctctatctgcccccaggaaacctggtctggagcacccgagactctggcaccc

SEQ ID NO: 2137 - DNA, 2817 bp, Zea mays
  Clone ID: TF_ZmC1150_2
cggcaaagcgaggccaagccactaacagccaaagccttgcagaaagactagggagaaagaagataagtgagaggatgaagcttcttcaagatcttgttcctgaatgcagtaagatcattggcaaggcaatcatgctcgatgagattatcaactatgtgcagtcattgcaacgacaagtcgagatcatatccaaacaagtaaagccacccactcgatcaccatatctccctctaggatcaagcggccttactggcccatttaaccaaggaatcatgcagccataattgatgtgcaccattgccaatcccgttgatgttttgcatggagctattcacgaggcgtcaacaatgaaccattattgatttgtccactgttatgttcgttgctggtgcaatcatgggatacattatgttcactgaacctacgcgcccagttcaaacggaacttacacctctatctcgtggcttccaagattgcgggctagtctacggtaattgttcatttctggactctagatagaaaagaaaattatggcctctagctcaagtcacataatgcatataatgaaatataatcaagttcaatcacaatatgaatacttaaatgcttttatgtggcaagttatattcttctgatattgtgctttttcggtgcaggtgatgaatccaataaccaaatatccttggacttttattgtagctttttgtgtgcatttgttccgatacttaacaattaacattatatgacaccatagtttctctaatcacatgtaactccatctagccatctaggtttgtcctaagtcaaacatatcttttaattttgattagaaatatctataaaaaataattgtcttaaataagcagagttatttggttttagtaatgaatttagcaatgccaatgctatttttatcgttctatataaattttagatattcatggtcaaacttaaaaatgtttgacttggacaaatatagatagacctacacatgcattgtgattttaggaagtcctacaattctcctccccaaagtctgctatcaacttctaacagttagtccagttttcatgaacaaatttagttttaatcattctatgttgtgccaaccgccagcaactaataatcagagctgggtcatatcatcatatcatagtagattgtatagctttcttccctgtgcatgcttactggttactagatgaaaaaggtcgtgttacgttatggcgcactcctctcctttgaataggacatgctttcacactctcaattcggcatatccttctagagactagctgtgagttgggtcctaaatgtttcttccatgttcaattcgaatggcattgttgtgttaattagccgtcctgttttgtatttttttcctacaagttatagtggttacattaatgactaaatcaagatcttgacccactttattgatgacacccttttttcttcttattgcttctcctatcgtctctgagtttgtcattccattcaaacacgaaatttgtgtcagtatagatgccatggaaattttggtttagcttgagtattttgtagatacttcattcttgagtattcttgagtttgccttgttataaattgcagcacactccaatggtcttctaaatgaatagcacactatagtcaagagtatgacttaccaaattcattattggttccaagcatcttgaaagagaagtccatcgtctctcttactgtcatctcagcatggctaacagaagcacgcagcgacaagattaccccacatgttgtatcatggtttactagctagagaggctactcaagatgaggaatttgaagttatgtatggtgaggacgatgatgaagacaaagatgacgaggatgatgatgattatgatacaaagaccaagggggctactggagggggaagggcagcagcgaacgacctgttgagtgcaagcaggagtgagtgctgcacattgaatattggcatgcattggttgtggagcaattagtctggttctacttgatgcaaggtcattgagttattgaagtgatattttgtcgaatattttatatgccattgcaaagcacgggcatctaactagtctttcttatatatgtacactacaatacataatcatttatgccattgtttactacaaatatatatattaggcaactcttgaactggttgcaaggaatatttccactaaaaaaaaaaaaaaaaaaaaaaaaaagggggggccgcagataccttccatgtgggaaggacttcagagcatgcctcagatgaacttcaaccctggtgtggcagctgatagcggcaccaacaactctggctccatgaagatcgaacagtgagctgctgtatagtagcttcgaaattgttgtgtgaatcactgaatcatcgtaaagcgctctcgagatgaagctttttttgtatagctggaggcctgaccatttatgctggattcctgcggttgctcccatactgtgcggcacattgtttatggtatggcatatggatcgtgtacagctggagctgaagactgattccactgtaaatttctgttgtgctttggcctgcgaaaattgggatggaaacctagtagcatccacgaaattcaaggacagaagcttgttgggattgggacttgggaccacgtgctgaatactgatgggcctaaacgtactagacgagtactaatagaatcgtagttgtaggtaaaaaaatgcagagtttgaaaccagtggttttgtcagaaattccatggagtttgctatatttatttatgatatcaaaacagaaactgaatggccgctgac

SEQ ID NO: 2138 - DNA, 1293 bp, Zea mays
  unsure (1)..(1293): unsure at all n locations
  Clone ID: TF_ZmC3246_1
atcacccntttttttccgcccaccaccacgcaccaaccgacccgccacgaacttcatcgcatcaaggcccctggcgtctcccgaaaatccaaagggccccctcccccgcgcctccgcggggaccttgttaacaatctgggccgcatccagggggggcattctgcaaagggcgagcccggttcgttctcgacctttcgtctcgctctcgcccgcccgcccgaccccgcggagccctagcctagccttgcccccgaccgcggattccccctcggccgccgcgcgcccgcacccgcacccgcgatgatgaactgcgccggaggcggagaccccgtggaggacttcctgatctccggcgccgtcgacgacgaagatctagccatcttctgcgacggaggacttgggattgagggtgtcaatggagatgcttgtggatttgagcagtctaatttgggcaaaaggagtagagatgaaccatgttcatctggtctaaaatccaaagcttgtcgtgaaaaaatgaggagggacaagctgaatgacaggttcctggaattaagttcggttatgaatcctggaaaacaagcaaagttggataaagccaatatcttgagcgacgcagcccgtatggtggcacaacttagaggtgaggcagaaaagcttaaagaatcaaatgagaagctgcgggagaatatcaaggacctgaaggaggagaagaatgagctccgcgaagagaaagtgaggctgaaggtagagaaagataggctggagcagcaagtcaaagccatgagtgtagctcctacaggatatgttccccatctccctcatccagcttcataccacccggctgcatttgctccatttgtgccgccacagcaagctgcaggcaacaaaagtgctccaatccctgcacctttccctgggatggcaatgtggcagtggctgcctccgaccatcgtggacacaactcaagacccaaagctctggccgcctaatgcttaggggcagctagctgccttggggtgttgactcgccaatcgccatgccgtttcatgcattgggcggcagatcagagtatcagttagtaggtccctggagaggaggaatcaagtttcgcaactcgcgtcatgtttatgctgtaacagttgcttccagcagtcgtcatcaacttgctttgttctattgaagggtgatgcatgtaattaatatgtggatcttaaccctctagctggcaaatgtgtcctttgctgcctaaaaaaaaaaaaaaaaaaaaaaaaaaaaaaaaaaaaaaaaactcga

SEQ ID NO: 2139 - DNA, 929 bp, Zea mays
  Clone ID: TF_ZmC13338_1
cccggtcgacccagcgtccggccggcgccgccgacatggtcaccaacttcagcaccattgacccgcagttcggcctgtccaactcgtccctggagctgcccggcatggacgactacctgcagctgcagcaggactccgtcgcctgcagagtgcgtgcgaggcgtggctgcgcgactcacccacggagcattgccgagagggaaagaaggacgaggatcagcaagaggctgaagaagctgcaagacctcgtgcccaacatggacaagcaaacgaatacgtcggacatgttggaccttgctgtggagtacatcaaagagctcaaggaccaagttgagaagctaaaacacgaccaagcaaactgctgttgcctaggcaacaagagctgctgctgatgctggagaagcagacggaggagggtttttacgccgtaacaatgtgactgttaaaccagagctgttgcttcaggagaccaggccgcgggcagaagtgcgtgacatgtggagcggcttccatgactcagcttcctcttttcttggttgttccacggactagcgaccggggtgccaacggcttgaagactaggagataacaagtaggacgatgttgtaatttagttaccgcgacgcggtggctctggctttcgtgtaaagaagtcctccctttcaacgcgactgggattgttgttgctggtaaaattgttgtaggaatatcatctgtgctccatttttcatcgagctcatctttttttttgtttatgtcgaactgcttttcgacgaaactgagaaaccggttaaacacgaccaagcaaactgttgttgcctaggcaacaagagctgctgctgatgcttgagaggcagactgaagaaggtttttatgccgtaacaatgtgactgttaaaccagagctgttgctttaggagaccatgccgt

SEQ ID NO: 2140 - DNA, 1326 bp, Zea mays
  Clone ID: TF_ZmC34773_1
gggcaagtttcggttttccagtgttctctccgttctctgagcggctccctctccatcattactctctctccaccgcaagtgtgcacactgcacagtgccactgaccactgcgagctctccctccagtttcacacaccctgatctgttcgcatcagtctcccggtcgcaagcgcctccgaaaccctagactcgcctcgcgagttgcttcgcttctcctgcccccgatggagccgtccccggcggtcgctgcggagctctggtgctcaccgcacctcgccgcgggcggcggccgcccgttggaggcgacctcggccgtcacggagaagagcagcggcggccgcggaggaggcggcgccgtccggaggaggccgagggagaccccggtgtccgaggatgactcgtcccggatcgtctccacttccggcggtggcggcggccaggatttgactgatctagaagcaaagcgttccaaaacaaataagtccagtaataataaaggcagtctaagaacagaggttgaaactgactcaagaagtgctggcaaggctgttagtaaaaacattccagcagcagagccaccaaaacaagattatatccatgtcagggcaaggaggggtcaagcaactgatagtcatagtcttgcagagagggcacgtcgtgagaaaataagtgaacgaatgaaagttctccaagatcttgtgcctggatgcaacaaggttattggcaaagcatcagtacttgatgagataattaattacatccagtcgttgcaatgtcaagttgagttcctgtccatgaaactagaggcagtgaatgcccaggcaaaccagggagttgaagtatttccagccaaagattacggttctcagacatacaacacagctcctgggctgacatttgatacgcaaaccagtagagaatacgcccagggcacgtcgacctcggaatggcttcacatgcagattggcagtggctatgaaagggtttcatgaacgagatgaatccaggcagccgctaaataaagtgaaccatgatcaatcatggccgtgcttgtagatcattctttttcattttttttgaaaccatcatgttccagacgcattttttattcatgcttggagctgtaattccagccggaacatgtatttttgatgaggcgctcatttgtttccccatctgaatctcaagactgtttctgctgttcatgtattccatggaatttctgtagatcgcgttcgtctgtcagaaggatgaataaatcagttgatgctttgattttgaatcaaaaaaaaaaaaagtgggcggacgtgtgggcggacgcgtggg

SEQ ID NO: 2141 - DNA, 1335 bp, Zea mays
  Clone ID: TF_ZmC8592_1
attgggtccctcgaggccggccggggccctggctcaaaaaaaaaaaaaaaaaaaagagaaccatgaacctcgaggccggccgggaccaagagatccacgaatatacccatcccattccccacaaggctccgtcccttcggcggcggcggcgatgtctctcccccctggcccggcggacagtggcgccggcaccggagacgactggttcctcgactgcggcatcctcgacgacctgcccgccgcggcctgcggggccttcccgtgggacgcgtccccgtcgtcttccaaccccagtgtggaagtgggcagctatgtaaacgccaatgatgcattcaaggagcccaatgatgtcttcaaggagcctggcagcagtaaacgtttacggtcaggatccagtgatatgccaacatctaaagcttgcagggaaagaatgaggaggaacaagctgaatgacaggtttcttgaactggggtctgcattagaacctgggaagccagtgaaagctgacaaagctgccatcctaagcgatgctactcgcatggttattcagctccgttcagaatcacagcaactgaaggagactaatggcagcctcgaagaaaagattaaagaactaaaggccgagaaggacgagcttcgcgacgagaagcagaaactgaaactggagaaggagagtctagagcaccagatgaagctgatggcatcggctccagcctacatgccccatccgaccctgatgccggcgcctttcgcccaggcgcccctagctccattccatgcccagggccaagctgcagggcagaagctgatgatgcccttcgtcggctacccagggtacccaatgtggcagttcatgccgccttcagaggtcgacacctcgaaggacagcgaggcgtgccctcctgtcgcatgatcaccttgatggggctggtcctgctcacaccatgtggattagccgcaactagttgtcgttgtcgatccattgatggggtataactgatgttcttaggctatctccagcagcctctctatcctattctctatcttactccctattttaaattttactctataaacagtacagtctatagtgtaagacaatgttttgcatgtttatatccacactttgctggagatgggcatggtagtctgttggtgaccaaggaagctgtgatatctgtggcgaggtgccctgctagaggctcctttaatgggtgtacaattttcgtggtggaaagaagaatgttcgttcttgttctccatagcaacagtgtcatattatctatctatgccatatatattttataaataaaaaaaaaaaaaagcgaacgctgt

SEQ ID NO: 2142 - DNA, 845 bp, Zea mays
  unsure (1)..(845): unsure at all n locations
  Clone ID: TF_ZmC8592_5
gggaccctcgaggccggccgggccgggactcttctcatcttctcctgtcatgtatgcgctgatgctgctatgatattaattttgagagtaatttgcagtgatcttgttgtttgacctttttttttcttgctttactgaaagcggtccactccatatgctcagaattcaatgccttacatgtagctagttgtctgattactttcgtccatgaatggtttccagttaattggttgagaacaggtactagccaaatacgaaaaaaaagttcatgtccagttggagctgctaatcacccttatatttcacagtgtggaagtgggcagctatgtaaacgccaatgatgcattcaaggagcccaatgatgtcttcaaggagcctggcagcagtaaacgtttacggtcaggatccagtgatatgccaacatctaaagcttgcagggaaagaatgaggaggaacaagctgaatgacaggtttcttgaactggggtctgcattagaacctgggaagccagtgaaagctgacaaagctgccatcctaagcgatgctactcgcatggttattcagctccgttcagaatcacagcaactgaaggagactaatggcagcctcgaagaaaagattaaagaactaaaggccgagaaggacgagcttcgcgacgagaagcagaaactgaaactggagaaggagagtctagagcaccagatgaagctgatggcatcggctccagcctacatgccccatccgaccctgatgccggcgccttttcgccccagcgcccctagctccattccatgcccanggccaagctgcagggcagaagctgatgatgcccttcgtcggctacc

SEQ ID NO: 2143 - DNA, 1177 bp, Zea mays
  Clone ID: TF_ZmC28558_1
gcgagggggaggaggggagccccgtgaagctgtccaagccggagcaggccggcagcgacagctccgtcgaggacggcggcgcgcagaaccagaagccgccgccgccggggaaggggaagaatgccaagccggtggagcctcccagggactacgtccatgtccgggccaggagagggcaggctaccgacagccacagcctcgcagagagggtgagaagggagaggatcagccagaggatgaaggtccttcaggacctggtgccaggatgcaacaaggtgatcggcaaggcgctcatgctcgacgagatcataaactacgtgcagtcgctgcaacggcaggtcgagttcctctccatgaagctcgcaaccgtcaacccactggacctgagcaacctgcccacgctcctacaaaaagatatgttccaggcctgcggcgcttcggcaagctcggtcttctcgctggagagctgcagcccggggttcccgttcggcgggcaaggggacgtgttccagtccttcgtcccgaacggcctggagaacccgtgcggcggcctgaacccgctggacctggctctgtcccaggctaccggcgggcagttcggtttccaggacggaacggccggcacaaacctgcagcaaaggaactactgggaggaggaggaggaggacctgcagagcgtgttccacatcgacgacaacgggcagagccaggagcacggggcctcagcttcagcacaaagcttccatggtcagcttcaaccacaagagggccacatgaagatggagttcttctgatcgggcctcgacacccagccgccgacggccgagggagcgacctgtacatagcgaagactcgaggtacaagtacaaaagcaccagcggcggtggcggcggcggggacggaagctctgaagctatagctaacagcaagtccgtacatgtaggcccttccttgcccttggagaggcgagttcttcgctcgccgtagcgtgaaccagggggtgggcgatcgtgtgatttctttgaacgttttcgatccggcgattaatttgattgattaacacagccaccccgacgatagcgtacgtagcaatcacccgaacagtgaagctgtcacttttgtgtataagataatgcatatggtgcagatattagtatcaaaagcgcttctctctttt

SEQ ID NO: 2144 - DNA, 725 bp, Zea mays
  Clone ID: TF_LIB5116-057-A1-PF1-A9
gttctttttcgtgttccttgcaattttgactgagaaaaaaactcattgaacgcccgcgccgctccgatcttcttttccggcgacggcggcggtggaggcggtggtggcagtttggcttcgctcttccttggtctgaggatctccacccgcagtttgtgcaggatttggttgccgtgcggtggtcggccggctagggcaggcggcggggccggtctcctctctcatgcagaatcgaatacaatcccatcctgccggagcctcgtcctctgcctccagcggcggagacggctctggttcaggcttctgtctcagtgatataatggaaatcgatgctggcagcggaggagaccacaaagcaccaggctccccgaggtccaagcattccgctacagagcagagacgtcgctgcaaaatcaatgagagatttcagatacttcgtgatcttgtaccacaaagcgaccagaagagagataaggccacattccttttggaggtgattgaatatgtcaaattcttacaagaaaaggtacaaaagcatgaagcatgtgctggtggagactggagccaagaaaatacaaaattggcgccttggagtagcaatcgagtaccagttgacctcatgccaggtgtagcacccacaacaaaaattggctctgctggaaactttctggacaacagcatccccaccatgccagaaatgctgcaaaatgctgaaacagtagtag

SEQ ID NO: 2145 - DNA, 2832 bp, Zea mays
  Clone ID: TF_ZmC9134_1
aattcggcacgaggttcgggtttgcgccataatcccacggaatccgcattctgaaccatttccttcgctttccccttcgccctctctctctcccagtctccacccaccatttctcctctttcccggggggcggctgcaccttgccctcccccatgaacctgtggacggacgacaacgcctccatgatggaggccttcatggcttctgccgacctccccaccttcccctggggagcgccggccgggggcggcaactcgtcggccgccgcggcgtcgccgccgccgccgagatgccagcggcgatggctcccgggttcaaccaggacacgctgcagcagaggctacaagccatgatagaggggtcgagggagacctggacctacgccatcttctggcagtcctcccttgactccgccaccggcgcctcgctgctcggctggggggacggctactacaagggctgcgacgaagacaagcgcaagcagaagccgctcacgccctccgcccaggccgagcaggagcaccgcaagcgcgtgctccgcgagctcaactccctcatctccggcgcggcggcggctcccgacgaggccgtcgaggaggaggtcaccgataccgagtggttcttcctcgtctccatgacgcagtcgtttctcaacggttcgggcctccccgggcaggcgctcttcgccgggcagcccacatggatcgcctctggcctctcctccgcgccgtgcgagcgcgcgcgtcaggcctacaacttcggcctccgcaccatggtatgcttccccgtcggcaccggggtgctcgagctcggctccaccgacgtcgtgttcaagaccgccgagagcatggctaagatccgctcgctctttgggggcggagcagggggtggctcgtggccgcccgtgcagcctcaggcgccgtcgtcgcagcagcccgccgccggagccgaccacgcggagacggacccgtccatgctatggctcgccgacgcgccggtcatggacatcaaggattccttgtcgcacccgtcggccgagatctccgtctccaagcctccgccgcatccgccgcagatccattttgagaacgggagcacgagcacgctcacggagaaccccagcccctccgtgcacgcgccgccacccccgccggcgccggctgctccacagcagcggcagcaccagcaccagaatcaggcgcaccagggcccgttccgccgggagctcaatttctcggacttcgcgtccactccttccttggcggcgaccccgccgttcttcaagcccgagtccggcgagatcctcagcttcggcgccgacagcaacgcccggaggaacccgtcgccggtacctcccgccgccaccgccagcctcaccaccgctcccgggagcctcttctcgcagcacacggcgaccatgacggccgccgcggcgaacgacgcgaagaacaacaacaagcgctcaatggaggccacctcccgggcgagcaacaccaaccaccacccggcggcgacggcgaacgagggcatgctgtccttctcgtcggcgccgactacgcggccgtcgacgggcacgggcgcgccggccaagtcggagtccgaccactcggacctggacgcgtctgtgcgcgaggtggagagcagccgcgtggtggcgccgccaccggaggcggagaagcggccgcgaaagcgcgggcggaagcccgcgaacgggcgcgaggagccgctgaaccacgtggaggcggagcggcagcggcgggagaagctgaaccagcgcttctacgcgctgcgcgccgtggtgcccaacgtgtcgaagatggacaaggcgtcgctgctcggcgacgccatctcctacatcaacgagctccggggcaagctgacgtcgctggagaccgacaaggagacgctgcagacccaggtggaggcgctcaagaaggagcgcgacgcgcggccgccctcgcactccgctgggctcggcgggcacgacggcgggccgcgctgccacgcggtggagatcgacgccaagatcctggggctggaggccatgatccgcgtgcagtgccacaagcgcaaccacccgtcggcgcggctgatgacagcgctccgcgagctcgacctggacgtgtaccacgccagcgtgtccgtcgtcaaggacctcatgatccagcaggtcgccgtcaagatggccagccgcgtgtacacgcaggaccagctcagcgccgcgctctacagccgcctcgcggagcccgggtctgccatgggcaggtaatcaaggaggagagctgctcagctcgcctgtggctgccggattaggggacgacactgatactactgctactcaccaccggactgtcctgtcgtggtcaccacggttacaacacgataggcagaaagattcaggagggagggagacgacgacgatgccggtgctgtataaactttagaaggatggatggatggatgatgataccgagcttctgctgctgttcatcatcatcttcttgtgtttttgctagtagcgtgttaattagcaggattaagcaaccaacaagtgtccaaccgttgttgttaattaagtacatgttgtgagcgacccaaaaaaaaaaaaaaaaaaaaaaaaaaaaaaaaaaaaaaaaaaaaaaaaaaaaaaaaaaaaaaaatgtgagctgtgatgatgatggatcgaccgatgttagcgttgggttggatcgaaaactgtgtatagtatatggatcagcagtcgtcctatccggtggacgatgccctgatcctgatgtatgtatttttacagcaggatttcgctttgccatggagtcaggctaattgttcccc

SEQ ID NO: 2146 - DNA, 610 bp, Zea mays
  Clone ID: TF_LIB3597-024-Q1-K6-G11
catgcacgcccccaactgatgcagcacctcaagtccgcagcgcccggcagcccaagcggatttcggggagctcagacccggaggaacccttgcggagagacagcccccctcccgggagccccttgcaggacagtcctcaccccgacgttccgctactgcagacgggagtgcacagtggccccggctcgccgcgccatggagcggatccccagcgcgcaaccgccccccgcctgcctgcccaaagctccgggactggagcccggagacctacctgggatggattttgcccacatgtaccaagtgtacaagtcgaggcggggaataaagcggagcgaggatagcaaggagacctacaaactgccgcaccggctcatcgagaaaaagagacgtgaccggattaacgagtgcatcgcccagctgaaggatctcctacccgaacatctcaaacttacaactttgggtcacttggaaaaagcagtcgttctggaacttaccttgaagcatgtgaaagcactaacaaacctaattgaccagcagcagcagaaaatccttgccctgcagagcggtttacaagctggtgagctgtcggggagaaatgttgaagcaggtc

SEQ ID NO: 2147 - DNA, 963 bp, Zea mays
  Clone ID: TF_ZmC3797_1
cgacgacgacgaggaacatggacatggagaggacccgccgcaggaagctcaacgagaggctctacgcgctccggagcgtcgtgcccaacatcaccaagatggacaaggcgtccatagtcagggacgccatcgcccacatcgagcatctgcaggagcaggagcgccgactgctcgccgagatatccgttctccagtcttctgacgacggcaccgccgccgccgccgccgtcaagacggaggacgctgccgccactgggggtgctgcgtacgacgtcgacagcgtcccctggaggaagaagccgagggcggtgccactgccgtccgtgtatttcaccgacaacccgacgagctccatctcgtcatctccgccagtccgaatcctggaggtgcaggtctcgcaggcaggggagagggtggcggtggtgagcctctggtgcagcaggggcagggacgccgtgggcaagatttgcctcgcactggagccgctgcgcctccgggtcgtcacggccaccatcaccgcgcgcggcgacactgtcttccacacactgttcgtggagacaggagaaacgggtggtgctcggctaaaggaggcgatactggctgctctcgctcggttcaacgtcctcgctaacgctgaccaagtcgtccatgagttactgggatgattgatgcggtggcatctcggacagcaacacctggtgttgttgtcgttgtcaccactctcgactgtccgattcaataatgatgtacctagggctgacaataggcctcaaattttacactataaaacttaaggattaaatcggattaggatcggctttgtttctattcatttttgaactacaaattatttagggccttaacaaatggtgaagaggcatttggatcgtgatccattaccacccctagatgtacctcaggaatgtttgaatatgatgtcattgccatttcttggcctgaagt

SEQ ID NO: 2148 - DNA, 945 bp, Zea mays
  Clone ID: TF_ZM3641.C1.o6.fg
atggcggcgcagatgcccttcctggcgctgctccagggcgcaggcgtcgtggtggaggcggaggcggaggagcagcagcagcagcacgagcacgacgggcgcaagcggcaggccttcgcgcgcgccgtctccaaactcgacctgctcgagagctgtctcacgcaggcggtggatcccgcggcggaggcgtgtgcgcccgtggccagcaggacgaccgagaggcggaggaagcggccgaggacccgcgcgcgagctgcgccaccgccggagaagcgcagcaagcccgaggaggccgagagccagcggatgacgcacatcgccgtggagcgcaaccggcggcgcctcatgaacgaccacctggcctcgctccgctccctcatcccctcccgctacatcccccgcgtgagccatgcaatgcaaagcccatgcatgcatgctgcgttccgtttcgatctgacgacgcaacggttacatgcaatgcagggcgaccaggcgacggtggtgggcggtgcgatcgactacgtgaagcagctggagcagcggctggtggcgctgcaggcggccgcgggcgcgcggcgcggcagcagtgccgcgtcggacgacggcgtgttcctcgtgtccccgcagtacgcgagctactcgggctcgcgcggcggcggcggcggcctcggcgtggacgtggaggcgacgggcgcggtgggcgggcacgtgcgcgtgcgcgtagcggggaggcggtggcccggccggctcgtgcgcgccgtcgccgcgctggagggcctccgcctcgcggtcttgcacctcgccgtcacctccgtcgggcgtgacgccgtcgtgtgctgcttcaacctcaagatggaggaagggtgcgaggtggcaacggcggacgaggtggcgacggtggtgcaccagatcttcgcctgctccgccgctggcgcatgctgctga

SEQ ID NO: 2149 - DNA, 521 bp, Zea mays
  unsure (1)..(521): unsure at all n locations
  Clone ID: TF_jC-zmXLIB3527P004be08d1
gtgctcgccgggggagatcctgcaggagctgggtgacaacggtgctgccggctcactacctgtggcgtctgcggggagtgcgagtggcggcgccggtcaggatgccccggcaatggctgcggcagcggcgtccggaaggaggaagcggtggaggatgatgccagtgaagagcgaggaggaagtggagagccagcggatgatccacattgcggtggagcgcaaccgccgcaagcagatgaacgagcacctcgccgcgctccgctcactcatgccgccggcccacacgcaacggggcgatcaggcatccatcgtcggcggcgcgatcaacttcgtcaaggagctggagcagctgctgcagtcgctggaggcgcggaggcgttccccgcagtgcgctgcctacgccgtcgatcccgacgacgcggggccgttcgcggacttcctcaccttcccgcagtactcgatgtgcgccgtcattgcggccccagagaacactggccaccaccgngagggcggcgccgtcg

SEQ ID NO: 2150 - DNA, 602 bp, Zea mays
  unsure (1)..(602): unsure at all n locations
  Clone ID: TF_LIB4073-014-Q6-K1-H9
cggacgcgtgggcggacgcgtgggcagcaaccaactctctgcgttcgtgtgtgtgtgttcatcctcatcggatttgtgtcattcgtgtgataggattcaacagaaaactactactcctgtggcagcaggaagaaagcgacaggaggagcaaggaggtctcatcctgcagaaacacacaacctgacagagaagcgacgaaggcgcaagatagacgacaagttgaagacccttcgacagctcgttccagggtgcgatgacaagagcaaccaagcctcaattctggaccagaccatccagcacatcaactcactgcagcaacaaatccaggtccaacctaaggcaatctcgttggggtgcgatgccatcaagccaccagcagtttacccagtcgtgctgccacagggcacggctgtcgctgccgccggcgagctgctgccgcctgcagccgcgcttcctccagcggtgctggccatggcggcgagagggcatgtccggccagggttggcgcccttgcaccacctccgtcgttggtgcctttcggtccctttcttccagtggtgactcaattntgaagacacaggcagcagctgctgcgatcatat

SEQ ID NO: 2151 - DNA, 926 bp, Zea mays
  unsure (1)..(926): unsure at all n locations
  Clone ID: TF_ZmC792773_1
cgttgctgtcgattttgcaaggatcgaggctggccgggccgggaaccaaccccggccgtcagctggcaaaatggaggactcgagcctgttcctgcagtgggcgatgagcacgctgcggcatgagcaacaacccgcggcagccgtcaacgacgactgcagcagcgaggcaacgttcccctcactccaagcgctccgcgaggcctcgcatgcggccgagatggtccaggagctgatcggagaagccccagcgaacagctggagctcgggcgacaccaccgacggcagcataggaggcaacagcaactcggtccctggccctgctgcggcggccatggagcacgatgtctggcctgctgcgtcgtcgaagacctctccggccaggcgcgccttgagcaggagcagcagcgacaccaaccctcccgtgagctggaacttcagcgccgcagcctcggcacagctggccggcagcgccgacggcatgctgccggaattcgcccccaagagcgccctaccgccggaccaagcgtacggatcaccgcgggcaaggagagccggcttgaagagcctggcgggatccatgtcgtcggcggcgtacgctcaagaccacatcatcgcggagcggaagcggagggagaagatcaaccagcggttcatcgagctctccaccgtgatcccaggcctcaagaagatggacaaggcaacgatcctttcagacgcgaccaagtatgtgaaagaactccatggaaagctcaaggacctggaggctggcggcagcaaccggcgcaagagcantcgagacggtggtgctcgtcaaaaggccgtgccctcatgctgcgcccgcgccggacgacgatgccctcccattgtcagcgtcgtcaggcacgccggctgagacgaagacgcagctgccggagatcgaggcccgg

SEQ ID NO: 2152 - DNA, 1768 bp, Zea mays
  unsure (1)..(1768): unsure at all n locations
  Clone ID: TF_ZmC10010_1
ggccgctttttttttttttttttaaacccagcaagcaacataganaatgtgcaacgagcagtagtccttatccctctacgtcaatcgcagggaaaacaatctcaagtcagacaagaagccggccgggttggaagacacatacatatattctccctcgctctcaaacccttttccactcacgaagagcagagctgttgctagagctggtcgtcttcctcttcctcttcctcctcctgcctcgatctgacgagagctcagccttgccttagtctcgccatcgcagaaggcagaagcactagttcctgacagccacaaaaccaaccaaaggccaagctaccgtgaggcgagggaaagggaaagatcacatatcgcctattcgcctacctctgcgtgcatcagaagatgatccccttcataaagatgaaacattcccattccctccactagaagctccgggaggacgcagcaagctcaccgaagccagcaaccgatggatcagaggcgcgtcacggcgaggttcggcagcaagacgagctcggagcggaggatgctgcggcgagtgaggctccccttctggtcctgccctccaaaccggcctccaggcacctgagcgcctcaaatcctcgatagaacagctggtctcgtgctcccctcccccctgtctctctactctgactttctttctttctttctccgctccgctccccgtgcccctcctgctccttggaccctgcctgttctgtcagtcagtctccctccctagaacggcatggctctgcgttttgtgtgatctcgtcgcgagcctgtccgccggtgccggtgcctcaatccccttgggagaagcaagggctcctgtctggtccgtgttcttgggaaccagggccttggtactgctgctgccgcgtgcttcactgcttcctggctgcctccgatcctctcgtctcgtgtgtgaaagaaacattccggacccacgcgtccgcccacgcgtccgccgcaacttgctggatgcaagagctgccctgtccctgccctgagcccctgtttccatcggaaaaggcaacagctcttgcgtgcttggcacctgccgagtaattcgttatatatacagtgctcccacgaagcactagttggcagctgctgcgctgttatgttcttgtgcctcgtggatcgtccccgtcggcctcgaagctttccacgacgaaatggacgacatgggctccgtccccttcgccgacgccgggctcctcgacgggttctacggcggtagccatggacatggtggtgactacgagctgctcgctagccagctgggagcgggagcgtcgtcgacgtcgcctgccatcttagacggcagcgtgccgctggtcgacgccgcggcctccgcggaggaggcgacgaggagtaagggagaccacctccaggatgacaaggcggcgatggcgctcaagagccacagcgaggcggagcggcgccggagggagaggatcaacgcgcacctcgccacgctccggaccatggtgccctgctccgacaagatggacaaggccgcggtgttggctgaggtgataacccacgtgaagaagctcaagtccaccgcggcgcacatccgagaccgctgcgccgccgtcccggccgacgcggacgacgtcgtcgtcgagctggtccatggcggcgcggcgccgccgtcggccggaggcggcgtcctcgtcagggcgacgctcagctgcgacgacggcgcagacgtgttcgcggacgtcaggcacgcgct

SEQ ID NO: 2153 - DNA, 1393 bp, Zea mays
  Clone ID: TF_ZmC18771_3
cgctgtcaggccacagattcgtcatccgactccgatgaggctgcatcctgtcgtcctcgactgttgactgctgtcgaggtatgctgcgcccgccatggagaatcagtgaacttttaccagagcgtcgacgcgtcctccatggagaatgctgcgcccgcggcggcagcgggggaggcaagaagaaagggatgccggccaagaacctcatggccgagcgccgccgtcgcaagaagctgaatgaccgcctctacatgctgcgctcggtggtgcccaagatcagcaaggcttctgtaacacgggcgcttaagaaaggcactacacttgattctgtcatagagatgctgaagggggttacacctgagctttcttgccccattgttcttttcacatactataatccaattctgaaacgtggtgtgggaaacttcatgtctactatcaaacaagctggcatacatggacttgtagtgcctgatcttcctttggaggagacagcgttgctgaggagcgaggccattatgcacaacatagagctggttcatacccactctcatctttgcatgcaccacttgcacaaagtttgttgcgtacttgtgttgctatctgggtgctaactaaattcttactcgagatgggacctatcaaatcttcagcttgggctctgcccattccagacctgcaaatatacacagttgcaaaagatcttctgggcctttgcagcaacccagccctagaagcgggtctagctacttgggctcacacatgtcaacggggtttgtccagtccactaaattcaggataggttacatcaaggccttttttatttctttttgtaacctggtttggtaccacacctaatagctttgcttattaatcatggtggaccaatcaacagaatagatatcttgagtgtaatgtacttggtattgttataaaagcttcctttatcgaagaaaatcttgagtgtcagccatataccattttttattttgcatgattgcttgcaggtgctgcttacaacgccaaccacgccgacagatcggatgaagggaattgcacaagcttcagaaggatttctctatcttgtgagcgctgtaggggttacaggtgcacgctcaaatgtaaacttacgtgtagaacaccttcttagggagatcaagaaggtatattttttggtgtctatgacatgtggggccagtggcatacaaatggttatcttcctggctttacaggttacagacaaaccggtagctgttggtttcggtgtatcgactccagagcatgtgaaacagatcgtgggctggggagcggacggtgtgattgttggcagtgcgattgtgaggcagttgtgtgaggctgctactcctgaagagggtctggaaaggctcgagga

SEQ ID NO: 2154 - DNA, 1539 bp, Zea mays
  Clone ID: TF_ZmC252_1
ctgagggcgggcatggccacggcggactccctcgcaggtagcggtagcaggctaaagggccagctgagcttctcgtcacggcaggggtcattgatgtcccagatctcagagatggacagcgaggaggtcggagggagcagcccagaggctgccggcggaggcagggggtacatccctgggtacccaatgggctggttctgggtgggaggactcatcggctctcatgtcagacaatttgtctggcatgaaacgcccccgggactcgtcggagcctggccagagcggccttacgcaccagttcagcgtgcccaagacgtcgtctgagatggcaactattgagaaattcctccagttccaggacgccgtgccttggaagatccgtgccaggcgggggtgcgccactcatccacgcagcatcgctgagagggggaggagaacaaagatcagtgagcgaatccgaaagctgcaagaactcgttccaaatatggacaagcaaaccaacacatctgacatgctggatttggctgtcgactacatcaaggatctccagaagcaggttaaggtgctaaaggagagccaagataattgcacctgctcagcaagcaagaaccagcagcactcctgctgaaaccgtaatgctcactgtacatgacctcgaaagcatgtccactcgggaaagaaaaagatgtaagacagctctcatgcatgttgtttcatgaggttttgaactgcagcagttgagaggctttatctaccaggcagtgtagcttttgtatgagcgaagggggatggagcaatggcatcatcaagcattcaagtgattgggagaagggtaaaaaaagtggggagagatatatatataggagaaacaactgtatagtttggctgtagcttttctatatatacacacacgcactaccctttcagtagaaagtggttaatttacctatgttagagcatctccaagagaggctctaaacatggtcctattttaaatatagggctcaaaaccataaaacatccttccaacagcggccctattttataaaatttcatcaaatggttataaaaaaaaaaaaaaaaaaaaaaaaaaaaaaaaaaaaaaaaaaaaaaaaaaaaaaaaaaaaaaaaaaaaaaaaaaaaaaaaaaaaaaaaaaaaaaaaaaaaaaaaaaaaggggggggcctttttaaggaaccaaattttacttcccggggctggcaaaataaaaattttttttaggggcccccaaattaaaattccggggcggtggttaaaaaacttggagcggggaaaacccctgggttacccaaaataatgcccttggggcaaatcccccttttgccaggtggggaaattaaaaaaaaggcccccccgatccccctttcaaaaaagtgccccaccctaatgggaaaagggaccccccctttaccggggcaataaaccgcggggggtgggggggtttccccccaggtggccccttacattggacggcgcctaagcccccgttcttttggttttttttccttttttttttttg

SEQ ID NO: 2155 - DNA, 626 bp, Zea mays
  Clone ID: TF_LIB4729-044-R1-K1-F12
agatctgccgacttcacaacttttcagaaagggtaggtaggttgttatcgtcgaccacgcgcgtatgatacgtgtggacgacggatcgtgcatgaccctgctgtgggcgtttgatctcgtgtttaatttgtctagaacacttgtagaggagaagggacaggatcaacgagaagctgagagcgttgcaggagcttcttccaaactgcaccaagaccgacaaagtttccatgctagatgaagcgatcgactacctaaaatccctccagctacagcttcagatgctggtcatggggaaggggggaggaatggcaccggtggttcctcctgagctgcagcagtacatgcactacatcacggccgaccccgcccaccagatgatgcctccgccgctgcggccctccgccgggcagctgcagcccgccgccggccggcagtttcagataacccaagcagcagcagcagcagccaacaacgacaacgacccccagcgacgacgacagtccaacgtcgagtcggacttcttgagccagatgcagaacctgcacccctccgatcagccgcctcatcatcacaacttcctcaggccgccgagattgcagctctttacgccggaacagaggggcggc

SEQ ID NO: 2156 - DNA, 1816 bp, Zea mays
  Clone ID: TF_ZmC2238_1
caggctctccctaggtccctacctctccaatcttctccttccttgaccccagcggaggaggagccagggcgtgcgagtgcgaactgcgaacgcagcagcagggggttaggcgcgcacggcacaccagtgagtgccatcccctctcgcctcggcgccgtctccctataactaatggcgccactcccccctagcgccgcctccggtcccgtgtcctcctcccctcgttcccttgtcccggacgcctgcgccgagccgatgcgccgcgcctcgccgccgcaggagctccccgtcgccaggggcgagatccaggcggcgctggcccccgccaatgcctcctccgcgggcgcccacggaggcggaggctccttcacggcgctgctgggactccccacctcgcaggccatggagctgctcctcccccgcacgacgccccccgccctagccacagcgcccgcgccaaccttcccctccgacccgcacctcgtggaccgcgccgcgcgcttatccacgttcgcgcccccgtccccgtccccatcctccacgatgacggaccagcccctccccgccgccgctaacgccggcaagcgcaaggccgaccccgtcgaccgtgcccccaaggggaaggcggcgaagaaggggaagacggcggaggagaagctcgcgggcggcgacggcgacgacgagaagccggcgtacgtgcacgtgcgggccaggcggggccaggccacggacagccacagcctcgccgagcgggcgagacgcgagaagatcaatgcgaggatggagctgctcaaggagctggtccccggctgcagtaaggtatcaggaacagcattggtgctagatgagatcatcaatcatgttcagtctctccaaaggcaagttgagtacttgtcaatgaggctcgcagctgtaaacccaagggtcgattttggtgggctagacagctttctgaccacagagtgtggaaggatagcaggcttcaactgcaagaacggaatcgacttggagcaggtaacctggccagaaatgggtgttcatggagcaaggcagctgatgcaacttcaacagcagttctggcatggcgatttagcacatccacaccaagtggcttcacagtgggaaaagcgtggggatggccatcctcccgtgtttagcaactccagtccctctctcttcggctatgatctaacaagctctggagcccagcaaaccccggcgagcaagctaaagacggagctttgagcgacgatggatggtagatagcattgtcaggagagcaggctgaacatatgcggtgggggcgcagcagcgacatgatttcagcaagttgaccaggtcaggctacaaacgggctgggaatgttgatgtgaagcgcatggagaccaacattttcagagacagagaggatgtacatatagcgatagagaatactattggtgttgagctgaagacgggaataccatagttgtattgtagagatgggcacgccctgctgctatcgctgaagagatgggagggcgagcgatactccggtctagttgctggtattcttggtgtatttcttactataatggcccaatcttaaggttatatgagcagcaatttttatgaaccaaaacccaaaaaaaaccatcatgggtcatcatatacccttctcgaatgcatttcaacaaaacatgaatgtagcacagtataactacatgtaacacacgtgcttgttacaatcctactgttccaagccattctaggttttctttaaggcatacggattttgttacatatttatatatggcttttgttatgtactttcaga

SEQ ID NO: 2157 - DNA, 1211 bp, Zea mays
  Clone ID: TF_ZmC2238_3
cccccctgggtcgacccagcgtccgcgccaaccttcccctccgacccgcacctcgtggaccgcgccgcgcgcttatccacgttcgcgcccccgtccccgtccccatcctccacgtccccggccccgcccctccccgccgccgctaacgccggcaagcgcaaggccgacgagaagccggcgtacgtgcacgtgcgggccaggcggggccaggccacggacagccacagcctcgccgagcgggcgagacgcgagaagatcaatgcgaggatggagctgctcaaggagctggtccccggctgcagtaaggtatcaggaacagcattggtgctagatgagatcatcaatcatgttcagtctctccaaaggcaagttgagtgtggaaggatagcaggcttcaactgcaagaacggaatcgacttggagcaggtaacctggccagaaatgggtgttcatggagcaaggcagctgatgcaacttcaacagcagttctggcatggcgatttagcacatccacaccaagtggcttcacagtgggaaaagcgtggggatggccatcctcccgtgtttagcaactccagtccctctctcttcggctatgatctaacaagctctggtaaaccttgcacgcagtcctatatcaccttcctgaatgaatttagttgtttgtcgcttacttcacatatcacagcctggcttgccccacaacttttgtctcttagtttgtcccgccagtgctctcttgagaacaaagtgtactgataggtaaatttaaaaatttgctgtccaaaacctgaggtgaatattttctactatctaggggaagtttctgaagtatacaaagctatttatagtcatggccaaatcttgaatatgctagcatagtagcattgctgttatattggcccagatagcaaatagacacagaaacacaggtgaagcaaaagacatacagaagcatgtggcagtacagtgaccaagtgttttgcattagctaataaacgtgatagagagccagagatcccaactaggagtccctctgtttgcttatggaatttggaaacaacacagatatctaatttgagttgccgcgccctttttcagaggaaaacttctatttccactgcttcagaactatcagcattatccacttttcatactaacaaaaaccatgagcccaggacttcgctagaaagattagcagattagagtgt

SEQ ID NO: 2158 - DNA, 1502 bp, Zea mays
  unsure (1)..(1502): unsure at all n locations
  Clone ID: TF_ZmC18277_2
gccggccggtccgggactctcacttcctgccagtgccaacaagtcccctcttcttcgtctccaaagagacaaaacccaagagaggatcgtacgtcgtagggatcttgttcaatggcggacgcggacctgacaccaaaccactcgctcctcctcaagatgcctgcggcttcggcccacgcccactccccaagcctctcgagcctcctgttatacggccaggagagccatggcgaagcagcgcctgcaaacgcaaatgcaaatgcggcagcagcaacggtggaggacgccgcctcacttgagacctcttctgcagtggttgacagtgcatctccaatggagaggaagaggaaggctacagcagaagacagtgctgcaatcagctctcctcaaccaaaggactgcaagcaggagagcaagagcaggagggggaagaggccccgaaaggagaccgaggagaagagcagcactgatgaagacgaggcctccaaggggtacatccatgtgagggcgaggaggggccaggcgacagacagccacagcctcgcagagagggtgaggagagagaggatcagcgagaggatgaggatgctgcaggcactggtccctggctgcgacaaggttactggaaaggccatggttttggacgagatcatcaattacgtgcagtccctgcagaaccaggtcgagttcctttccatgaggattgcctccatgagcccagtgctgtacgggttcggaacgaacagtgaaggccttcatgatcatcacgcaccanagatgggaggcgtgtcgttccaggaagccgccattgcagtgccagcaggtccagcggcagcggtgagccaagctagcagtaggccggctccatctgaagccaccatgaacaccgcttgcactaccacgccctactcagtctcactgcaggcccaggcttccatctcattctctccctctcaggaaaacggcggcacttattacctggtgcagcaagcggtgggggagcaggcaacgaggcaggaggagctgctgctgagccagttggtgttcagcaacatgtgctcgttccagtaggggggcagggcaggcaagagtgtttgcgcgagcggaagcgaggaaagagacccccacccacacacccatgcacattgagtcattgacaataggtactgttgcaagctaagtttcattgattgggaggccgacgactgaaaggaggaaatgatgctgcaagatttggctagtaggagcgccagatgagtttcagatccgagcggcaagcggagcctgctgtttgtttgcacattttgagagactttgtagtttgtaatgtttctagctcctgtatgacgattttctcggcggctgcacctgacctgcccaccgtcaccagctcaccgttgtagtagtctccgatgagcaaatcggttgttaatacgtaagagaggagagctatttttgttcttaggcaaacaatgcttaactgtttcattattcaacgaccc

SEQ ID NO: 2159 - DNA, 400 bp, Zea mays
  Clone ID: TF_LIB3356-049-P1-K1-D8
tatgaacacaggcaagtgtttagaggatggcaaaaggaagggttctggagaggacagttcatcactacgttctctagtaaggaagctagaagcttccattgctttctctcatcggatccactccctctatttcatcctactgtacatgtaaatgtattactgcaggggaaaccagtgcattgcagcgagaagtcagcatggagtgtgctgatgagaaggcgggtgatgctagagccaagagagaggactacgtgcatgtccgggcaaagcgcggtcaagccaccaacagccacagccttgcagaaagatttcgaagggaaaagataaatgaaaggatgaagcttcttcaagaccttgtcccaggttgcaacaagattacaggcaaaggcatgatgcttgg

SEQ ID NO: 2160 - DNA, 1240 bp, Zea mays
  Clone ID: TF_ZmC25915_1
aaatcccctctcgctccataaaccaaccctcccaccatcaccaaagatatatactattactacatagttaacaaactttatctgcctcctgtcctgctaatctatatatcccctctccactactgctaccttctctcgcgcgtctctgctcaaagaataatgtcagcgtagcctagctagctcatagggattcctctttcatccctcctgagatcgacgatctcaccaattaagaacacacgcgcacacagcagctacgtacgtacctagctagctagcatgatggaccatcagctgttcgacgaccccttcgggagcagcatctcgtcgctggaggcggaaatcttctccgccgccgcccagctgccgccgtcgccgccgtggccagacatcgacctcgacgacgactacgacatccacgacctctccgcgccggccgccaacgccgctacgtcctcgggcggcggctacggctccggcggctccggcggccacaggaagctcagccacaacgcgtacgagcgcggccgccggaagcagctcaacgagctctactcctccctccgctccctgctcccggacgccgaccaaactaagaagctgagcatccccaccaccgtgtcccgagttctcaagtacatcccggagctgcagaagcaggtggacaacctggagaggaggaagaaggagctgaccaacgccaactgcaagccgggagttctgaaaaccaccaaggccgtaactcccattgtttctgctacctgcctcaacgacacggagatcatggttcaggtcagcctgcacagcgatgtggccgccacagctctccctctctccaagtgcatcaaggtgctagagaacgaaggccttcatctcgtcagctcatcaacctactcctccgcctttgagaacaagacattctacagcctccatcttcagagaagtcaaagaacgatgaaggaggagtgcccggcattctgcgagcaactggagaagatcgtcaggaagaaagcaggggcgtagccagctgcagcctgcaggaggagtgtgctggcgcatgcgttcaccattcctctgcgtgctactccagccataagcacacacagctagctaattaaggtattttagtctgtaaataatggactgtgtagtcgtgtgtgtgtgtgtgtgtcgtaactgtgaaagtcgccgatggatgcataatatatatgtggtttttcccttaaaaaaagaacaaaac

SEQ ID NO: 2161 - DNA, 1255 bp, Zea mays
  Clone ID: TF_ZmC1916_1
cattgacttccccagcagagcagggaaaccgctcccagtcccagtctctcacctgaggtgactggcgtctcttgtcgcgagccgccagaagcttcggcccctgacgcgtgggggccccgtccgcccccgcccccgtccccacgttgccggccatggcggggcagccaccgccgtccggggcctccgaggacgacttcctcgagcacttcttcgccttcccctccgcggcctccgccggcgctgccgggggccacgcgggcgccggtgttggcggggaccaccccttccccctcgccctcagcctcgacgccgccgccgaggccaagccggaccgtgatcccgtgcagctcgccggcctcttcccgccggtgttcgctggcgccggcggcgtgcaccagccgcacctccgcggcccaccgcctccgcagatgttccaggcgcagccgaagccgggcgagggaggcatggcgccgcagccgccagccccgcggcccaaggtgcgcgcgcggcgggggcaggccaccgatccccacagtattgcggagaggctaaggagagagagaattgcagaaaggatgagggcattgcaggaattagtccccaacacaaacaagacagatagggcagccatgctagatgagatccttgattatgtgaagtttcttaggcttcaagtaaaggttctgagtatgagcagactgggcggtgctggcgcggttgcgcagctggttgctgatattccactctcagtcaagggcgaggcaggcgacggcgggggcgcgccgcagcagcagcagcagcagcacgtgtgggagaagtggtcgacggacggcacggagaagcaggtggcgaagctgatggaggaggacatcggggcggcgatgcagttcctccagtccaaggcgctgtgcatgatgccggtctcgctcgcgatggcgatctacgacacccagcaccccctggacggccacggccactcgctgaagcccgagcccaacgcgtcatcctagtacagtaacgtcgtccttagcgtgccttccaattccaacacccaccccccttctccctaaaaagtactgttaggcgccgatattatccggaagaaaaaaagaagtgtatgatataccgagcgtgcgtttccagtgtgctgacccgtgggataggaaaggaccgaaaattgttggtatatgatgatgtagcctcctgtttgcctgttctgtttcaaatcaaagcaatgctcatgcatccaggttcc

SEQ ID NO: 2162 - DNA, 610 bp, Zea mays
  Clone ID: TF_LIB3587-269-Q1-K6-D12
ccccgcgtccgcaagctgtttgtttcatggggtgcggggaacgaggaggtcggggagctcgactccatcgacgcaatgaccatggagcagctcgccaaatccctcgccgacgagctctgggatcagcctgctactactactcatcatcaagaacagcagcaagtagaattatcggatgcaggggcggcaactcacgaacacgacaggattcccctttctcggagacatgagccgcaggtcgtacgccgaggctgacgagggcttcctcccgacgacggcggccatcagcgcaggcggcaacgacagcttgttctccttcaccggcggcaagtcgaagcagctgagcttcgcttctcgagagccgaagcacgaaagcaacggcggcggcacaactgcagctgggacaccgatggagagcagtaaaggagggcggagggcgagctccggcgtgcatgagcacatcgtcgccgagaggatgcgccggcagaagatgaatcaccagttcgcggctctggcgtccatgatccccgacataaccaagacagacaaggtgtctctcctggggagcactattgagtacgtgcagcacctcaggggcaggctcaaggcc

SEQ ID NO: 2163 - DNA, 826 bp, Zea mays
  Clone ID: TF_ZmC39148_1
ggccgcttttttttttttttttttaagtaagaaagtaatacgcgttcttgcgatggagcacatgtagtaagctaggtccaggcttcatgatatggctacaagttgtggaaggagcatgcaaaacagggcgcaggctgttaggacattggaatctaaacgggagatggctttgatttgatgccggggactgcactgcgtcgttgagccagccgtctaggatccggacacttcatctcccatggattggacttgctaggggcttcaccgcgcgcagcatttccttggcgcccccattctccggctggaccgccgcggaggacgcccccttctggcccgatatcgccgacgccagcgcgacgggcatgaggcacaggcccttgctctgcaggtactgcatcgccgtcgtcatgtcgctctccatcagctgggccacctcctgctcgaacgctgcgccgtcccggacctcggacgacgacggcggcaggctgcctccgcgtgcctgctgctgcctgcctgagcctgacctaggggacagcagaagaccaccaccggagttctcggtctgagactgtgtaaggagcgggacgacggcttccgtcgcgcccagcctgctcatgctgagaaccttcacttgcagctggagaaatttgacgtattcgatgatctcgtcaagcatggatgccttgtcagtcctgttggagttcggaacgagctcctgtagattcttcatcctgtcagagatcttctcccttcggagcctctccgcaatgctgtgtggatcagttgcctggccccggcgagccctgacgcgcggcttaggagctcc

SEQ ID NO: 2164 - DNA, 621 bp, Zea mays
  Clone ID: TF_ZmC693_10
tactttcttggacttatctgatgctaaccaactctccacaattctctcatctcaatcttattctctagccttatcccagctaatcttaatcttattctctagccttatcccagcttggctgttgcctctcgctccctatgatgcccatgacagaagccaatctgacatcgagccctgggcgtattcccttggcgtttgtgggtccaacgtcaggctaggagcagtattatatggcgcaacaccaaaatctttggttggaaaagctacagttgcattgctcacatgagcattaatcgcttcaagtttcatggacaaaaactctacttgacgctgtaaagactggatgtaatttattatctcatcaaggactgatgctttcccgataaccttgttgcatccagggacaatatcttgaagaactttcatccgttcacttatcttctctcgtcgtgctctttctgcgaggctatggctgtccgttgcttgacctcttctagccctcacatggatgtagtcttttggtggctctttaggtgcaggctttttatcagcagacttgctagcgttccctgaatttgtttcagcttctgtccttctgtcatttttttcactaggtgtaga

SEQ ID NO: 2165 - DNA, 827 bp, Zea mays
  Clone ID: TF_ZmC253117_1
gacgtcgtggccgcggcatttctctccgccgctgctgctcgtggtgcttgaggcggtggagtactgcgggaagctgaagaagccggcgaacgggggggagcagctggcgccgcctgctgctggccgccgctcccggctctgcttcaggctcttttggacctccagcgactggagcagctgctccagctccctcacgtagttgatcgcgccacccacgatcgatgcttggtcacccctgtgcgcgtgcgacggcggcatgagggagcggagcacggcgaggtactcgttcatctggcgccggcggttgcgctcgacggcaatgtgggtgatccgctggctctcgatctcctccttgttcttgacgaccttggtgcgcctccgcttcctcctccccgccgccggctcgggcgccgccttcctgctgccgtggtccgtggaggcggcgtccgaggaggagtggtcccgcgagagcgcctccccccagtccctgtcgtcccccacggtgggcgcggcccagcaggtgtcgaggtcgtgctggtcgacccactcacccgcggcgcagacatcgccaaaccctcctcctcctcctccccctccctgcagcaggtcgctccacggcaccgcgtacggcgagtccccgcggccgcagccgaagtggcccgcctggggctgggagaacaccacggcctccagcgccattgcttgctactcgatcccagacccagatagacacgcccgcgcgggttggtggtggtggtgtgcgtgtgacggatggacggatggatgcgaacgaacggctaggtggcgcgcacgggcacgggggcgag

SEQ ID NO: 2166 - DNA, 522 bp, Zea mays
  Clone ID: TF_LIB3595-016-Q1-N6-F5
atgttgaagtggattaatgtgaaatttaaactaaaatccacactaaactactctaacacatgtaaatcaagatgaatacatgtgcaatctaaacgtacattaactgacgcagctatcactaacatgcgaggcctactctgcctgctaatgaacttgttgcatgtacagactagctactatcgtctcaattccaatatatacctcctcgatcagtcctcaccatgtaacgtaacgcaactatgcgagctgaactggcccccctgagaaaaagtggcgcggctcctttttaacgggtgaactggccctgcagctcgccggcggagcaggtgcagctggcgcggccgtcgttcagtaccttgacctgcttctgaagatccttgatgtagtccacggccagatccagcatgtcggcagtgttggtttgcttttccatgttgggcacgagctcctgcagcttccgtatccgctcgctgatcttcgtcctcctcacccgctcggcgatgctgcgcgggtgggtggcgc

SEQ ID NO: 2167 - DNA, 2896 bp, Zea mays
  Clone ID: TF_ZmC848_2
cggggaaggatttttccccgtttacatccccgcgggggggagaacctttcccccaccccatcccctaatggaggaattccccgcggggattcggggatcggggccccattgccatctctaatcccttgtgttccggggtgttgggggtggtgatcgccgttgaaggacctgaacctgccagcagccctgccgcagccgaccaggacgccaccgcagcagcagatgggctccccgggactgctgcggtacaggtcagcgccgagcacgctgctcggcgaggtgatgtgtggtggtgatcaggacttccccgcggctggcggcgcagggcacggaccaccggaccacgccgccgcggacaacgtcctcgcgcgctttctcgccgggcaccactccgagacccgcgactgcaagcctccccgccccgccgccgccgctcacttcatggacgaagctgccgtcgcgtccatggccgcctcacagcagcagcagctcatgtaccagtcgcagcaggagcagcagatggccgccatggaggggctgtaccgcaacgtcagctccggcggcacggagcacggtgcagccgttggcgctggtaacaacagcctgatccgccagagcagctcccccgccggcttcctcaaccacttgaacatggacaacgggtacgggagcatgctccgggtgggcatgggcggcggcgggttcaggaacggcgtcagcgacgcgcggctcaaggggcagctgagcttcccgtcccggcaggggtcggtgatgtcgcagatctcggaggtgggcagcgaggagctcgacggaggcggcggcagcggcagccccgaggcggccggcagcaacgccagcggcgcggcgcgtgggtacagcggcatcccggggtacccgatgggcggcctcgcgtccggcgcctggccggacgaggcgtcgccgtcgccgacgtccggcgcgaagcgcccccgcgactccggccccgcgctgcagcagccgctggcgccgcagctcagcctgcccagcggaaagaacaagggcggcagggcggcctcggcggagatggcggcgatcgagaagttcctccagttccaggacgccgtcccctgcaagatccgcgccaagcgcgggtgcgccacccacccgcgcagcatcgccgagcgggtgaggaggacgaagatcagcgagcggatacggaagctgcaggagctcgtgcccaacatggaaaagcaaaccaacactgccgacatgctggatctggccgtggactacatcaaggatcttcagaagcaggtcaaggtactgaacgacggccgcgccagctgcacctgctccgccggcgagctgcagggccagttcacccgttaaaaaggagccgcgccacctttttctcaggggggccagttcagctcgcatagttgcgttacgttacatgttgagacctcgcaagagaagagccaagctctggcgctttggcatacgagacctgttgatccaacacatactggtatcagaaaataggcaacagtcagctgaagaaggttcatcagaggaccatgaggacaacacaggattacttgatctagtgctatgggctgcagttgaaggtgtatcatcatcatcagacgatgaggacgaggacgacgacgaggaggaggaggcggcggcctctgatggctctgaatagtagtcaaccgatctttcagggttgtttcaaaattgtaaatatacaacaataagccatcactcttctcatgtattatataatagaactatgatttattagcttgtcaaaaaaaaaaaaaaaaaaaattccccgtcttccttgtttaccattcctccccaaaacacatcctgcgatcctcgaagcctccgccgagcatcgatcatgtcggcctactgcggcaagtacgcggatgagctcatcaagaatgctgcctacatcggcacccctggcaagggtatccttgctgctgatgagtcaactggcaccattggcaagcgcctttccagcatcaatgtcgagaacgtggaggagaaccggcgggctctccgtgagctcctgttctgctgccctggtgccctccagtacatcagcggtgtgatcctcttcgaggagaccctctaccagaagaccaaggatggcaagccttttgtcgatgtcctcaaggagggaggcgtcctccctggcatcaaggtcgacaagggcacgaggttgttggcaccgacaaggagaccaccacccagggccacgatgacctcggcaagcgctgcgctaagtactacgaggccggtgcccgctttgccagtggcgtgctgttctcaagatggccccaacgagccgtcacagcttgccattgacctgaatgctcagggtctggctcgctacgccatcatctgccatctgccaaggctggatatgttgatcgctgcgcttactgttgctctcttaagcaccggccgggccggcagtccccatcggtccccggcggctgggtagcacgctcccctacacagctagtgcagcaaagatggaccccccccaaggcctggacatggacctgactgagaccgagatagagaggaaccccgccatcgtttgcagtgcatgcgcgcgagcagcatgtacagcgccggagcgatcgagggaggctcgctggactgctggatcgagcagtgtggcatcatcaagtattcaagcgactggaggaaggaaggaagaatcgagtcatgggaccgaggaggaagaacgaatgaattgtacagtgctgtttcccttctttttttcttttttttttgctgtaacacttttgctacatctgtgctgctgctgctgcagcatatgccgttgcccattgtttactacgttaagaatcccagtgagagtagatcgagg

SEQ ID NO: 2168 - DNA, 1070 bp, Zea mays
  Clone ID: TF_ZmC3763_1
cgcgtacgtaatgctcggaattcggctcgagatttaccagtgatgatgagagagatggaatggtcggggtaccaggggtctcaggaaatattttccaggagatagatgggaggcagttcgacagcccaatactggggagtagaaagcagaaaggtggatttggcaaaggcaaaggaaaagctaactttgcaactgaaagagagaggagggagcagtttaatgtgaagtatggggctttaaggtcactgttcccaaaccctactaagaatgacagggcctctatagttggagatgccattgaatacatcaatgagcttaatagaacagtgaaagaactgaagatcctacttgaaaagaagaggaacagcgctgacaggaggaagatactgaagttggatgaggaggcagctgatgatggggaaagttcttcaatgcagccagtgagtgatgatcaaaacaatcagatgaatgggactataaggagctcctgggttcaaaggaggtccaaggagtgtgacgttgatgtccgcatagtcgatgatgaaataaatatcaaattcacagagaagaagagagccaactctttgctttgtgctgcaaaggttctagaggagtttcatcttgagctcatccatgttgttgggggaatcattggagatcaccatatattcatgttcaatacaaagatacctaagggctcttctgtgtacgcatgcgcggtggccaagaagctcctcgaagctgtggagataaagaagcaggcttataatatcttcaactagacataccaatcataatgtttatccagacaacttagcatgctggtctgctctttagcatctaataaggtgcttgcttatcacttatcagagactgaccacattgataagacttctttgatgaatgctgcaaactttcttgatagcttcttcatgctgaacttcttgtcttcttttttgtacactttaacagtcatgttggaatatgtggtgcttctgatttgctggcattgccactctttgctgaataacgtaaaaaaaaaaaagaagggcggccgacgagaaaacagc

SEQ ID NO: 2169 - DNA, 1134 bp, Zea mays
  Clone ID: TF_ZmC1926_1
cggacgcgtgggacggcggcgagatggggttccttgacgtcgtcgagcccaaggcggcgtcggcggcactggtggacggcgccgcgggcctcggggcctgcaaggtggagcccggcctggcggagagcggcggcgcgttcggcgctggcgctggcgctgcgccgccgccggccctggcgtccaagaagaagagggtcgaggggatgccgtccaagaacctgatggccgagcgccgccgccgcaagcgcctcaacgaccgcctctccatgctacgctccgtcgtgcccaagatcagcaagatggaccggacgtcgatcctgggcgacacgatcgactacatgaaggagctgctggagaggatcaagctgctgcaggaagagatcgggcagcagcaggaggaggcgccaggcatgctcagcgtcttccgggagctcaaccccaacgagatggtggccaggaacacccccaagttcgacgtggagcggaaggagggcggcgacacccgggtggagatctactgcgccgccaagccggggctgctgctgtccacggtgagcacgctggacacgctagggctcgacatccagcagtgcgtcgtcagctgcttcaacgacttcggcatgcacgcctcctgctccgagatgcagagggaaatgatcagcgccgacgcgataaagcaggagctgttcaagaacgctggctatggcggaggctgcttgtagaggggcatgtcatcatggcatgggaggaagaagaagaagaggcagcaataaattaatcttaagcagctgtgggagcagcagtagtagtatcagttcaggtccagtagcggaaaaggcaggcagggcaaagatttgggaggcctttttgcaatccatctcccccatcataacccacttcgatctatccatgttagcagtacgtgtccgtccgtcctatagcatcatgcaggatgcaaaggttgccctgtgctgctgaatctttctcctatatactattctatttaattaacaagagcaaagctcgctgcctttcttctgatgaaagaaaaaaaaaggggtgcatctggcgactagctctcttcttatctgcagggttctatattcataagcatgttgttgcaccacacaacct

SEQ ID NO: 2170 - DNA, 1492 bp, Zea mays
  Clone ID: TF_ZmC7965_1
cacggccatcgtggcgagggcaaccaagctgagcgctactcgcagtcgcagttgttgcctgcccagcatgcagctctaactcaccccgtgcagcagacgccgagtcgtggcaggtagctaggaaggagggccggagggaagggaagggcaggccatggcgctggaagccgtggtgttcccgaaggagcacctagcgggcactgccaaggcgcgctcggcgtcgtcactggcctgcggcttccgcaccgaggaggtcgaggacaacggcggtgtggttctgcaaggagaggccggcgcggccaccacgtgggagtactgggacgcggcgctctgcccgtgctccactgcacctgctggtgccgtggaggagtgctgggacgtgcggcaccggctctccgcgtccccaccgccgccggcgccctccgccgccgtcgcagcgccatcgtccgggcacggcaaggcagctgccgcggcgcggcggagacggcggcaacgcccgaaggcggtgaagaacacggaggaggtggagagccagcggcgcaaccacattgccgtggagcgcaaccggcggcggcagatgaacgagtacctctccgtgctccgctccgccttgccgccctcctacccgcagcggggtgaccaggcgtcgatcgtggccggtgccatcaacttcgtcaaggagctggagcacctgctgcagtcgctggaggcgcagaagcggcggcgccaggggtgcaccgagccaccggcgccggcgccgttcgccggcttgttcacgttccctcagtactccaccgccgcgacgggtgtcgtcgctggctctggtgacggtgctggctgcggcgcagcgggggcgcggcgtggcgtggccgacatcgaggtggccgtggcggagagccacgcgagcgtgaaggtggtcacgccgcggcggcccaggcagctgctgaggatggtggtggcgctgcagtgcctcggcctcaccgtgctccacctcaacgtgaccaccaccgccgaccagctggtcttgtactctctcagcctcaagatggaggacgagtgccggctgtcgtcggtcgacgacatcgccgccgcggtgaacgacatactcgccaagatctccgacgagcgcgccagccgtcacctagtagccgcgtagtgtagcggcaactctgttttagcaggtgtcatgtattgttgttgcaacaccaccaattcgatcctagtacatggaaaacgcactggcaagtcgcaattggcgccactgtcacgcggtgctaccacgcgctccatacgtcgtttgcgtgaaattaaacatgtatcggttggaccagctcagtctcttgcagcgctacttttttagtagtagtatataaaaaaaaaaagtgcctcctgggattcagaatcattcacgtcgatctcgcatcggaccagcgctaattattagcgcagatctgtcgagatgcctgcgactgcgtgtgcacacgggtgacct

SEQ ID NO: 2171 - DNA, 1405 bp, Zea mays
  Clone ID: TF_ZmC11694_1
ggcgccaacaaaagaggaagagtcaggccgaatgttctgcaagtcaagacgatgtaagcagaggatctgagatagggagtcggtggtatgtggctacgcacaccttgtacttactgctaacaattcgtaaaaaaatggttttgttcaggatcttgatgatgagtctggtgggatgcgaggatcaggcggcagaggtacgaagcgcagccgcaccgcggaggtgcacaatttgtccgaaaggaggagaagggacaggatcaatgagaaaatgcgcgccctgcaagagctcatccccaactgcaacaagattgacaaagcctccatgctggatgaagcgattgagtacctcaacacccttcagcttctaggtaagatgaaggccgtgagaaatagacggtgcactcctcccatggtgttaccgcgcgccatgcagctttgaatcaattcattgactcaggcccatcgtctttgtactgaaagagatcatggctggtgattttcaggtctcgactaccaagctgccgtgtctgaacatccgctcccactcaccatggaagagcttaacgagtttcatgattcgccaaccagatgtatcacttgaaaaaggtccaatcaatcaagatggatttggtggcgggatgtttaggcttagcgagctaagatgctccatagttttgtgtaatttgtagatggaacgggtcttcctgttaggccaaacctggcacctcaagtcccagccgtcatggctaacatggtgcaggagcaacagcaaggcgtagcgactcagcagcagcagagtctgaataatgaagctcaacagaaagcaaataccggagatccacaaatactacaaaaatagatgaagagatcttcgccagtaatcagtttctggatggtggtggcaacaggactaatactatagggagaaatgaggctgaaacataaaaacggtcagcaagtgccagtgtgtaacctgactcgagctaaacttgacacaaatcatggaacttggcagagcgttattatcctaatagataacatggctgatgattttcaggtctcgactaacaagctgcaggtgtgaatatcagcaccaactcatcatggaagagcttaacgagtttcatgattcacgaagcagatctatcacttgaaaaaggtccaatcaatcaagatggatttggtggcgggatgtctagcttagcgagctaagatgctccaaagttttgtgtaaaatgtagatggaaccttgttacaagtaacatttcttggcagcgatgccgttttcaggtgttttttttttttgttgcttcactgaagttttcttgagtcaatatatcttattttcccagcccttaagtgatcatatgcccaaagatatctgtgtggctctgctttaactcct

SEQ ID NO: 2172 - DNA, 912 bp, Zea mays
  unsure (1)..(912): unsure at all n locations
  Clone ID: TF_ZmC223756_1
cccagcgtccgcacctcgcgnattgcgatccctttccaacaanatcaccggcaccaccacttgcattggagtcgtgtgagccacatggacatggaggaacagttgctgcacctggagcacttcatgcccagcagcccgggcttctttgacgtcggcagtggccacgaccccgcccacttcccgaacggcgggttattcgtcgagcaggtcggcgccaccgacgacggcgggtgggtggaggaactcatgcagctgggcgaggagctgttcggcggtccgggcgatggcggcatcatgggcgacgccgacgaccactaccagcagtggcagtgcgacgacgacgtcgacggcggctccccagacggcggtccgccaccgagcgtgtccttggacggcgacgacgcgagcccaggggagcaaggcgccggggagctcgcctccgagccgcaccgcgaggacggcgacgacgtgtcgggcgcgacgcggaagcggagggaccggtccaagaccatcgtgtcggagcgcaagcggagggtccggatgaaggagaagctctacgagctcaggtcgctcgtccccaacatcacaaagatggacaaggcgtccatcatcgccgacgcggtggtgtacgtgaagaacctccaggcgcacgccaggaagctgaaggatgaggtcgccacgctggaggcccggccgagatcgcctacccgacaggaccagccgcagcacggccggcgcgcggggcccggccgacgacgccagcagcagcagcagcaggtggagcgccgcgacgcggggagcgcgggcgccggcgcccgggtgacgcacgtgggcgcggcgcaggttggcgacggcaggttcttcgtgaccgtggagtgcgagcggcgggacggcgtggcggcgccgcnctgc

SEQ ID NO: 2173 - DNA, 1244 bp, Zea mays
  unsure (1)..(1244): unsure at all n locations
  Clone ID: TF_21212345
ccacgcgtccgggctacacggcctatattccgtactcgtgaacctcgtgctgacgtgctcacacagtcactccgtttagctcaaatccttatcggcgactcggcgtcggagctcacgaccacgaccgcttccacgccctcgaccccgaacccccaatcccggacgcgaccgctgaaccctagcatactccggccatctgccgccggccccggcgatcccccgccatggcctcccccgagggcacaacgtgggtcttcgactgtccccttatggacgacctcgcggtcgccgccgacttcgcggcagcccccgcgggaggatttttctgggcagcgccgccgtcgctgcagccgcaggcgccagtgcagtctgtcgttgccgcgtcggctcccaacccatgtatggaaatcagtagctctgtggactgtggtcaggaaaaagaacagccaacaaataaacgtccaaggtcagaaagtactacagaatcaagcacaaaagcatccagggagaaaattagaagggacaagctgaacgagagattcttggaattgggtgccattttggagccagggaaaactcctaaaatggacaaaacagctatattgagtgatgctattcgtgtagtaggtgaattgcgtagtgaagcaaaaaagctcaaggattcaaatgagaatctccaagagaagattaaagagctgaaggccgagaagaatgagctgcgagacgagaagccaaaggctgaaggccgaggaaggagagcctggagcatcagatcaagttcctgaatgcccggccaagcctcgtaccacaccacccagtgatcccagcctctgcgttccctgctccccaggggccagcaaccgccaggcacaagctgatgatgcctgtgattggctaccctggattcccgatgtggcagttcatgccgccttcagatgttgacacctctgatgaccctaggtcttgtcctcctgtggcgtagaagccgtgcgaaatcctgttggaaagaggcgatgctgccctccattgattcaaatcttgatcggtccgcatgttgttggtgtagttgaattccagaactgaaggggatgttacatgtgtcnggacggtgacatggggtgatctgatgatccctttgtatattatatatggtatgggtataaatnaattccgcgaaccanaanctnatgtngatcggtggattaacttatgttctattcttgcctgtttgtcctataacccac

SEQ ID NO: 2174 - DNA, 1128 bp, Zea mays
  Clone ID: TF_ZmC2546_1
cggccgggagctcaatccttatcggcgactcggctgggcggcgtcggagctcacgaccacgaccgcttccacgccctcgaccccgaacccccaatcccggacgcgaccgctgaaccctagcatactccggccatctgccgccggccccggcgatcccccgccatggcctcccccgagggcacaacgtgggtcttcgactgtccccttatggacgacctcgcggtcgccgccgacttcgcggcagcccccgcgggaggatttttctgggcagcgccgccgtcgctgcagccgcaggcgccagtgcagtctgtcgttgccgcgtcggctcccaacccatgtatggaaatcagtagctctgtggactgtggtcaggaaaaagaacagccaacaaataaacgtccaaggtcagaaagtactacagaatcaagcacaaaagcatccagggagaaaattagaagggacaagctgaacgagagattcttggaattgggtgccattttggagccagggaaaactcctaaaatggacaaaacagctatattgagtgatgctattcgtgtagtaggtgaattgcgtagtgaagcaaaaaagctcaaggattcaaatgagaatctccaagagaagattaaagagctgaaggccgagaagaatgagctgcgagacgagaagcaaaggctgaaggccgagaaggagagcctggagcagcagatcaagttcctgaatgcccggccaagcctcgtaccacaccacccagtgatcccagcctctgcgttccctgctccccaggggccagcagccgccgccaggcacaagctgatggtgcctgtgattggctaccctggattcccgatgtggcagttcatgccgccttcagatgttgacacctctgatgaccctaggtcttgtcctcctgtggcgtagaagcgtgcgaaatcctgttggaaagaggcgatgctgccctccattgattcaaatcttgatcggtccgcagtgttgctggtgtagttgattccagaactgaaggggatgttacatgtgtcggacggtgacatggggtgatctgatgacccctttgtatattatatatggtatggtataaataaattccgtgaccagaagctaatgtct

SEQ ID NO: 2175 - DNA, 1400 bp, Zea mays
  Clone ID: TF_ZmC2546_2
acgcgtccgggtttttaccaaaacaattcttatagaagcggactgaaaagctggggcgtttggcagtccgcaacagattttggtggccggaagttgaaaaaagcccaaacaaacagggccacagtatggaaatcagtagctctgtggactgtggtcaggaaaaagaacagccaacaaataaacgtccaaggtcagaaagtactacagaatcaagcacaaaagcatccagggagaaaattagaagggacaagctgaacgagagattcttggaattgggtgccattttggagccagggaaaactcctaaaatggacaaaacagctatattgagtgatgctattcgtgtagtaggtgaattgcgtagtgaagcaaaaaagctcaaggattcaaatgagaatctccaagagaagattaaagagctgaaggtctatactatttcatgtggccaagttataaatggtgctgttcagatgggaggtggcacgtgatgtgttgtttaggcacttcatactattccattttcttgatttatgatccccttttccatttggtcattttttttcttatctagatttaattcatccagtcaaataacatgggaataattattagtacacctgtcattctccctccagtttgtggtttagtttattttgggttgcttgcattagcaactttatatccacataatgcgtttttttttcttaaatggttaaaccctgcagctgtataacaatatggacatttgtcaattcttttctctactgtatacacttctttgctacgtgttccataaaatatatagaggtttatgattcagcatctcatgtgctgcaaaaggctttggccttcgattttgctggttgttcatcagaaaaacaatctcaccctgaaatactttccttttgcaggccgagaagaatgagctgcgagacgagaagcaaaggctgaaggccgagaaggagagcctggagcagcagatcaagttcctgaatgcccggccaagcctcgtaccacaccacccagtgatcccagcctctgcgttccctgctccccaggggccagcagccgccgccaggcacaagctgatggtgcctgtgattggctaccctggattcccgatgtggcagttcatgccgccttcagatgttgacacctctgatgaccctaggtcttgtcctcctgtggcgtagaagcgtgcgaaatcctgttggaaagaggcgatgctgccctccattgattcaaatcttgatcggtccgcagtgttgctggtgtagttgattccagaactgaaggggatgttacatgtgtcggacggtgacatggggtgatctgatgacccctttgtatattatatatggtatggtataaataaattccgtgaccagaagctaatgtct

SEQ ID NO: 2176 - DNA, 1319 bp, Zea mays
  Clone ID: TF_ZmC1313_1
ggcaaaggccgggtgaaaaaagatgagtacatagctaggtacaggcacccagtcctgtcatgacgtaaaagcttatagaattcagatggcataaatactactatgcagggccaaaggttggtgggacgaacggaccagcaggctagcaggtcatccagaaagctttcgtgctcctccatttctaggctagctagcttagctggggctggacgacctttcaggcatacgcatgcaagtacctgcagtcggttcataagaggaggaggaggaggccatgtggacgacgaaggagccaagtagaaaaggcaggcaccgcaaccaacggtaaagctggtgatcgagcaagttttgtcaagagcgagctcatggaggatggcagcagtgctccaagacgggctactccggcccccacccgcaggagcagatctgccgacttccacaatttttcagaaaggaggagaagggacaggatcaacgagaagctgagagcgttgcaggagcttcttccaaactgcaccaagaccgacaaagtttccatgctagatgaagcgatcgactacctaaaatccctccagctacagcttcagatgctggtcatggggaaggggggaggaatggcaccggtggttcctcctgagctgcagcagtacatgcactacatcacggccgaccccgcccaccagatgatgcctccgccgctgcggccctccgccgggcagctgcagcccgccgccggccggcagtttcagataacccaagcagcagcagcagcagccaacaacgacaacgacccccagcgacgacgacagtccaacgtcgagtcggacttcttgagccagatgcagaacctgcacccctccgatcagccgcctcatcatcacaacttcctcaggccgccgagattgcagctctttacgccggaacagaggggcggcggcggcggcctgcctaacacgagccacaacgccggctggatttccgggaggagttcctcgtataattttatggagtgacgtgtgtgctcctgatgatgctgccaaaattaatttgaaacaaccgttctcatcttgaactcagaagacggcgtcagcgcactctgggaccttcagctagcgtgtggtggtgtccatgcatgaatgaatgcagtagtagttatatatatattagcaagctagttgtgtcattaaataaaggaacgctgtgtgactgtgatgctgctgctgctgctcgttttgctatctgaatcgcacaccgttcaattcctcccaaaaaaaaaaaaaaaaaatttgcggcgatcgtacgtgttcgattcatgcaaa

SEQ ID NO: 2177 - DNA, 1148 bp, Zea mays
  Clone ID: TF_ZmC3246_2
gggtaccctcgaggccggccggggcaaagcgcgcgcccggacggcccggttcgttctcgacctctcgtctcgctcatccgcccgccccccgaggaaggaaccctagcctagccttgctccgaccggtcgccgcggcgactgcgacgatgatggactgcgctggaggccgagaccccgtggaggacttcctcctcggcggcgccggcgccggcgacgacggagatctcgtcgccgtcttctgcgacgacggaggacttgggattgagggtatccatggagatgcttgtggatttgagcaatctaatttggggaaaaggggtagagatgaaccatgttcatctggcccaacatccaaagcttgtcgtgaaaaaatgaggagggacaagctgaatgacaggttcctggaattaagttcagttatgagtcctggtaaggaagcaaagttagataaagcaaatatattgagtgatgcagcccgtatggtggcacaacttagaggtgaggcagaaaagcttaaggaatcaaatgagaagctgcgggagaatatcaaggatctgaaggaggagaagaacgagctccgtgaagagaaagtgagactaaaggtagaaaaggataggctggagcagcaagtcaaagctatgagtgtagctcctacaggatatgtaccccatctccctcatccagcttcataccatcctgctgcgttcactccatttgcgccgcctccagccaacaaaagtgctccaatcccagcaccgttccctgggatggcgatgtggcagtggttgcctccgaccatcgtggacacaactcaagatccaaagctctggcccccaaatgcttaggggcagctaccttggaatgttgactcattgtgccttttcatgcatttggtgggcaaatcagtgccagttaggtccctggagactggagaggaatcaagttcgcaactcgcgccatgtttatgctgtaacagctggtttccagcactagttatgaacttactttgttctactgaagggtggtgcctgtaattaatatatggatcttaaccctctagttggcatgtatatcatttgttctattcgagagctgcattttaaggaccaaaaaaaaaaaataaaaaaaaaaaaaaaaaaaggccccta

SEQ ID NO: 2178 - DNA, 2357 bp, Zea mays
  Clone ID: TF_ZmC21109_1
gcccttcagagctcaggtgtggatctgtcccaaaccagcatctcgctccagatcaacctcgaagcgaagccagggcaaggtcgtcggagccggagagggaggaaggtggagaacctctacctgcgtcacgtgacaactgtctcctgacccacaggagcggcggactccctctgctcgccgcgcgcggcctgttccggttcggtcggcggccgacggccggcggcggaggcagcaggaagctactgtaccaaccggcccaagagaattgcgggtccagaggcagtgatggcggggcgctacgattgacgtgctacgagactggacgctctctcttggattggttgcacatcgcgtgctcggcgatgggctgagaccccggctgtggattctttttgatttgatcgctcccgccgccatcccctgtctagcccattgtctttacgtagtttccgattgaagacggaagattcccagtgcgcattgtgtagccgctcgtgttggacaccggcttccattcagctgagcagctccttcgcgtagatgaggcactagccgcaccatcaggacctcgtcgcgaaccagcacgcgctgcccctgcccggcggcgtcggcaccttcagcatcagccccgcgcccgtgtccgtcgcgctgccggcggccgtcgtcaagtcggagccgccgttcgtgctcaggggccaggatgcagagaccgaccacatggctagcgcagggcaccagcagcagtgggcgctccccttcgccggctccttgcaggtcagtccgccgccgcagcaggcgcctccggatagaaagggccgcggcggcgccggtggcggggtcatggagtctggctccagatccagcggcggggcggggttcgacgacgacgacggcctcaccacgcgccgcgaggtctcctcttcgctccaagatttggcagtaagggtggaccggaagggtgggagctgcagcgatggcggtacggatcaggggccaaacacaccacggtcaaaacactcggccacagagcagcgcagacgcagcaagatcaatgataggtttcagatacttagggagctgttgccacacaatgatcaaaagagagacaaagcaacatttctcttggaggttattgaatatatacgttttttgcaagagaaagcgcaaaaatacgaggcaacattcccagaatggaaccaagaaaatccaacgatgcttccgtggagtaaaggccaaatcccaggagattccccgcctgacccttcacatttcgatgagaaatggatcctcccctggatctaatttcactgggaaacttgatgataatcacaacatagtgacatctgcagctgcatcaggggcacaggatcaggcagaaaccgaccacatggctagcggatgctacagatcagcagaaactacggcgaattttacaaataatgctatgtctcagtcccaacctcaatggactggtccgtcccctgtggatgactctgcagtgaacagtgagacgcttaacaaccagcagttggtgattgatgaaggaacaatcagagtgtccagtaactattcccaagagttgcttaactcgttgactcatgcccttcaaagctcaggtgtagatttgtcccaagccaacatctctgtgcagatcaacatgggaaagcgtgccgccaagagacccgctgctggtgtatccagcaactccaaggaaccagctgatccggcatctagcaacgaattagggcatcagttgacgctgtcgggtgccggtgccgactgcctctctcacgcaacaaagcggcataaacggagcaacagctgatggccgctctccctcacctcgctccccgaccgacggacggacggatgacggattggtgacattcttcttttccctcccagccaacggggaggctcgtggattggctggctggctgtacattgtgtgctgtgcttggtgacaagctgagacctccggcgtattctttgattcgatcacccccgcgcccgccatcccattgtttacgtagagaagaggaaccgtggagcttttcatcgcggattgtgaagccgctcttgtacacaggcttccattcaatgtgagaagcttccccctccttgacacatctccgtgttgtagacctgtagccacctgtaagatatgtgatgatgcccaacaatcaactctgccagaccactggctagtcgagttgttgggttactttatgtacggtgttctgttatgctgggagtgtaattgccccgccgtctcagtgaactgttcgtcagttgtgtgcctgttgtgccaaaaaaaaaaaaaaaaaaaaaactcgagactagttctctcctcgtgc

SEQ ID NO: 2179 - DNA, 2332 bp, Zea mays
  unsure (1)..(2332): unsure at all n locations
  Clone ID: TF_ZmC1877_1
cctttttctcctcccccctccccaaaccgccgcctcctctccccccctcgacctctccggtgctcatagtctcacccgagtcacctccacacacacacacacctcgaggcggcgacactctcggacacacacacaccgatacacggacacatacacgcgctctccctcctcctcctcctcctccagtcccggcaacggaaggtccactgcggcgccggcctcactggcatcaccatattgccaaccgcgcatattttcagtttgtagaagccatcttttaaagaacattttgggcagagattgccagtactattacttgtggttaacatggacttctcagctggttcctacttctcatcatggcctgtcaattctgcttctgagagctacagtttggctgatggttcagttgaatcctatggaggagaaggaatcatgccaccttcaagctacttcatgacagccagatcagatcacaatttaaaattcagtgtgcatgaacaggattccactatgcttccaaacgaccaattgacctatgctggcgctaggcagactgatctattacctggcgagactccatctagggataagctttgtgagaatcttctggagcttcaacgactgcagaataacagcaacctaccgagtaatttagtgcccccaggggtacttcagcacaattcaacacctggggcctttcatccgcagttgaatactcctggactttcagaactgcctcatgccttatctagttcaattgatagtaatggaagtgaagtttctgcttttctcgctgatctaaatgctgtttcttcagcctcagctttgtgttccacattccaaaatgcttcttcattcatggaaccagtaaatctagaagctttcagttttcaaggggcacaaagtgattctgttttgaacaaaacaacccatccaaatgggaatatctcagtatttgacagtgctgccttggcatcactacatgatagcaaagagtttatcagtggtaggctcccctcatttgctagtgtccaggaaacaaacgtagctgctagtggtttcaagactcagaagcaggagcaaaatgcagtgtgcaacgttcctatccctacgttcactgcacgtaatcaaattgcagttgctgcaatgcccggatcactgatccctcaaaagattccttcatggatcaatgaaaacaaaagtgagggtcctgttagccatccttctgatgtacaaatccaaccaaattcagttggaaatggtgttggtgtgaagccacgagtaagggctcgtcgtggacaggcaactgatcctcatagcattgctgaacgacttcgcagagaaaaaatttcagataggatgaaaaatctacaagatcttgtcccgaattctaataaggcagacaaggcatccatgctggatgaaatcattgattatgtgaaatttcttcagcttcaggtcaaggtgttgagcatgagtaggctaggagctccaggagcagttcttccccttctcgcagaatctcagactgagggttaccgcggtcaacttctgtcagctccaaccaacgcacaaggattactggacacggaagaatcggaagacaccttcgccttcgaggaagaggttgtgaagctaatggaaaccagcatcacaagcgcaatgcagtaccttcagaacaagggactctgcctgatgccagttgcccttgcttccgccatatccacccagaagggcgtctccgccgcgtcaatccctcccgaacagtgaaataaagacatgctgctgctcccatgagtacgaggaaacaactgcagaagacagaaaactcaagatggctgaagaatgcagcaaagcccgtatagagtacagggtaggaagttagtctgaccagtgttcatgacctcatctactaatttgcttttcagaatcagctttttggtatctattgcgcataagttggtttttccttttcccttgctctgtctctctctctccctggggccgtatccgggtgctccgtggatagttgcgtttcagaaacttgaactgtatctggatgatctatctggtttctcttttgtgcatagaaaaaactgtaaaatcttctggttctgttctgctagatgagataaaagcccggaccgggctctcctcccccccaatccccaattccccattgtcttcgtcctgcatccggacctgtggccccttttccggctgtcagtttgttagctgtagccatctaccatcagtttccaaggatctgctgtaaagcgttggcagggaacgtctgccttctgtnnnnnnnnnnnnnnnnnnaaaaaaa

SEQ ID NO: 2180 - DNA, 784 bp, Zea mays
  Clone ID: TF_ZmC1877_4
ctgatgtacaaactcaaccaaattcagctgttaatggtgttggtgtgaaaccacgagtaagggctcgtcgtggacaagcaactgatcctcatagtattgctgaacggcttcgcagagagaaaatttcagataggatgaaaaatctgcaggatcttgtcccaaattccaataaggcagacaaggcatccatgctggatgaaattattgattatgtgaagtttcttcagcttcaggtcaaggtcttgagcatgagtagggtaggagctccaggagcagttcttccccttctcacagaatctaagactgagggttaccacggccaacctctgccacaaggattactggacgcactagactcggaagacagcttcgtcttcgaggaagaggtcgtgaagctaatggagaccagcatcaccagcgcgatgcagtaccttcagagcaaggggctctgcctgatgccagtcgcccttgcttccgcaatatccacccagaaaggtgtgtccgctgctgcagtccctcctgaacggtgagataaagacacgctcctcccccatgagcacgaggaaacagccgcagatgacagaactcagacggctgaagaatgcagcaatgcaaagcccgtagagtgcagcataggaagttagtctgtgaccagagcgcatggcctcgtctactaatttcgctctcagaatcagctttttttttcgtacctattgcgcatcagttgattttgcctttttgccttctctcttttctttttggccgatttcatcaggttgcatat

SEQ ID NO: 2181 - DNA, 576 bp, Zea mays
  Clone ID: TF_ZmC178986_1
aagaaatgtatggaagcctgaccaccaggtacacaacagtgcaatggacgagctcgtctgccccgccgcctcatcatgcagctctccctcgcccacctccttcttcgcggccggccacgtaccggagctcgagttcgtgtcctgggatgtcccggaggaatggatggagggcaccgactggttcgatgaacctttggatggcgacgagggctcgcgctcggcgggcaacgacctgtccggcgaaccgccggcgcctgcgccgaagcggcggcgtggccggaagcccgggccccggaccaacggccccactctcagccacgtggaggccgagcggcagcggcgggacaagctcaaccgccgcttctgcgagctcagggccgccgtgcccacggtgtcccggatggacaaggcgtccctcctcgcggacgccgtcacctacatcggggagctgcgcgaccgcgtcgagcagctagaggctgaggcgaagcaggcctcggccgctgtcaccaccgcggtggcagcggccagccactcgttcgcccccctgcacgagaagctggggctggaggtgcggat

SEQ ID NO: 2182 - DNA, 1085 bp, Zea mays
  Clone ID: TF_ZmC9134_3
gaaagcgttttttgaagcccgcgaacgggcgcgaggagcgggtgaaccacgtggaggcggagcggcagcggcgggagaagctgaaccagcgcttctacgcgctgcgcgccgtggtgcccaacgtgtcgaagatggacaaggcgtcgctgctcggcgacgccatctcctacatcaacgagctccggggcaagctgacgtcgcagcagcccgccgccggaggcgaccacgtggagacggacccgtccatgctatggctcgccgacgcgccggtcatggacatcaaggattccttgtcgcacccgtcggccgagatctccgtctccaagcctccgccgcatccgccgcagatccattttgacggcgggagcgggatcatggggctggaggccctgatccgcgtgcagtgccacaagcgcaaccacccgtcggcgcggctgatgacggcgctccgcgagctcgacctggacgtgtaccacgccagcgtctccgtcgtcaaggacctcatgatccagcaggtcgccgtcaagatggccagccgcatgtactcgcaggaccagctcagcgccgcgctctacagccgccttgcggagcccgggtctgtcatgggcaggtaatcaggcaggagagctcatcagctcacctgtgcctgccggatagggacgataccgatacactgctacccaccacggggactgtcatcgcggtcaccatggttacaaaacacacacacgcacgataggccttagagattcaggaggtggaggacggcggcgacgatgatgatgctggtgttgttgaaaactctagaaggatggatggatgatgacacctagcttccggctgctgttcatcatcctcttgtgtttttgctagtagcctggtaattagcaggattaagcagccgtcaagcgtcacccccgttgttgttaattaagtacctgttgttgtgagctgtgacgacgaaggatcgaccgatgttttagcgttggttgaatccaaagctgtatataggatgtatgtattattacagcaggaattcgcttgcaactgaaaaaaaaaaaaaaaaaaaaaaaactcgagagggg

SEQ ID NO: 2183 - DNA, 1092 bp, Zea mays
  Clone ID: TF_ZmC13338_2
gaattttcggggcgacccacccgtccggtttgtccagttcggcctgtccaactcatccctggagctgcctttcatggacgactacctgcagctgcagcaggggtccgtttcctgcagagtgcgtgcgaggcgtggctgcgcgactcacccgcggagcattgccgagagggaaagaaggacgaggatcagcaagaggctgaagaagctgcaagaccttgtgcccaacatggacaagcaaacgaatacgttggacatgttggaccttgctgtggattacatcaaagagctcaaggaccaagtcgaggtacgtacgtatcgcttggtgtgcaaacaaaaataacactatctcttaccatgctaaaaataatactatctcttacctaggcaaaaataatactatctcttaccatgctaaaaaacatggatccttgcagaagctaaaacacgaccaagcaaactgttgttgcctaggcaacatgagctgctgctgatgctggagaagcagacgggggagggtttttacgccgtaacaatgtaacttgtggagcggctttcatgacttaacttccttttttttttggttgttcgggaaagaaggacgaggatcagcaagaggctgaagaagctgcaagacctcgtgcccaacatggacaagcaaacgaatacgtcggacatgttggaccttgctgtggattacatcaaagagctcaaggaccaagtcgagaagctaaaacacgaccaagcaaactgctgttgcctaggcaacaagagctgctgctgatgctggagaggcagacggaggagggtttttatgccgtaacaatgtgactgttaaaccagagctgttgcttcaggagaccaggccgcgggcagaagtgcgtgacatgtggagcggcttccatgactcagcttcctcttttcttggttgttccacggactagcgaccggggtgccaacggcttgaagactaggagataacaagtaggacgatgttgtaatttagttaccgcgacgcggtggctctggctttcgtgtaaagaagtcctcccttaaaacgcgactgggattgttgttgctggtaaaattgttgta

SEQ ID NO: 2184 - DNA, 838 bp, Zea mays
  Clone ID: TF_LIB4758-026-R1-K1-A7
caggccggccgggacatttttcgcggatctgaaaccggcaacgagcgcgccatggatggttgcagagctgtccttactggagacatgcaatggcacgaggcgacgatgagtaacagcagctgcgactctgatcatcttcaccgcgagaggggagagcaaggcttgatgagctcgcagcttcagcagcagctggaacagatctacatgctgatggacatggagctagagcatgagctgcacctgcaccacaacgtgccaccgcagggctgtagccagcggcagctgtcgtcgccgttcctgcctttcgccgtcagctccgatgtgacctcgtcgcccgtgctcacgtcgtcgagcaccacaaccttttgtcaacagccagccgaggcctcaccctcacccctggacacgccattttccccactcccctacagctactctgacacgatcccggacctggaagagatcatgagccgaccacggcacaaggacggccacgcggagtccagcatcagtgcattcaggcagtgcgtccggcacctccgccccaagaagaagctaaagcagggcggctgcgggcagagggcgatcaagacggccatgtcggtcttggcgagaatgcacagctcaaggctttcccagtggcagagacagatctcctcgacggagatggcggcggcagtgccgtccgacgagagcaaaaacgtccagcttctgcacgtccggtcggagcgcaagcgccgtgagaagattaacgacagcttcgaggctctcaagaatgcgttgcccccttcctgctcgcagcgagataaacatccatactgatgaggggcagggacta

SEQ ID NO: 2185 - DNA, 2276 bp, Zea mays
  Clone ID: TF_ZmC3765_1
cctttgcctacaagcccctctctctctctgtctctctccctctccctcccgtatggtctatgccctcccaccctctttcgtagcgcttcttcctatgcctctcgccggaacggaacagcagatagcatctcaatctccagtggctgtgggcatctttccttttcctgccataggctctaggccgtgacgggagctagcttctcgcttgcgtgcgtgcttgctccggctatcatattgcctgcctgcctgcctatgaacctctccggccaatggaggagctacttcttcttctctagcctttctcgtctctgatccacccattgaccttcggtgcgcccggccactctgcgccggcctctcgcgtgcgtctctcgtgtgagtgctacaggcaagcgaagcgatggacatgaacgagagcggcgagaaagggatggagggcaacgcgtcctccggcatcccggtggactggcagacccaattcagcgccgccgccttctcgtgcgcgccgccgccgcagcagcagcaggttcccatgatggactccgccttcgcgtccgccggcctgtgggcgtccacctcccaggccatggcgctctccgacgcgggcggaaggtcggccgcgcgggccggcttcttggcgccggtccccggtttcctcccgcagggcctcgcccatttccccgtggactccggcttcatcgagcgcgccgcgcgggcttcctgcttcgcggcggcggcggcggcggggtgatggctgccttcggcgcagcagctgatcatcaacccatgaacagcgcgttcagtggatcctcggaggcgctgctggaccaccagaggacgaaggacggcagcgacaagggcgagccggagctcggccggaacggccacgacggggttctgagctcggaggcggctgctgcgggggactgctcgtccaaggggacgtccgactccaagaagaggagaaggcctaacgaggtgatgggaggcgatcaggtccagtcgtcgaacctgcccgccgactcagcgaacgagagcgtgcacagcaaggacaagggcgaggagagcagcctggcaacaaccaccaccggacccggcaagtcgaaaggaaagggggcgagagagacctccgagtcccagaaggaagactacatccatgtccgagctcggcgcggacaggcaaccaacagccacagcctagcagaaaggttgaggagggagaagattagcgagaggatgaagctgctgcaggacctcgttcctggctgcagcaaagtcactgggaaggcggtgatgcttgacgagatcatcaactatgtccagtccctgcaaagacaagtcgagttcttatcaatgaagctcgcaacggtaaacccaaggctcgacctcaacatagaagggcttctatcgaaagatcttctccgcttccctggcgttccttcgtcttcccttggattctccccggaaatgatgcacccacagctgcagctctcgcagccaggcctgatccagggcggcgctgccggcatggccaatccggacgtgttcaggagaatcatgcaggcacagttaagcgcaaaggacgggtctcagatgccgccccacgcattgaatggggcattcagtgacgtcgcgcagcagcagatggcgtacccgtcgtcccaggacctgagcatcgggccgtcgcaggacgggtttcaaatgtgactgaacatgcccagctgcacatactagtaaaagatgcaaaaaaagggcttcttccatctgaggagtatctgatcggcgaacgtgcgggcgcgcagggggccgcgtatagctgcctgctggtgccgggagcagcagcgcctgctcagcgcgacgccttgaaccgcgtcgacccacggctgtgcctgtgctgctgcatcggtcaggtttttttatcgtgttcagaaggaactgaggaaaagctcgtggcgctggcctgtggcgttgcctggatagatggctggaaattctgtctgtttcggcggtcgcgtgcattcatggcatggcgcgcagtgcagtaacagtgggctgcgtgttggcacttggcacagcgaccaaatgagctgctgcaggatgtgatgcaacgcgaggagccttgttttgttagtagtttccaatgctttttttttgtttttgtttgcataatagctaagggtgcaagaaaacactcataaatttgggggtggggggcggcggtccggcgatgtctatgttgaaacatcatacatttggcaaatttctccttgcgccac

SEQ ID NO: 2186 - DNA, 1310 bp, Zea mays
  unsure (1)..(1310): unsure at all n locations
  Clone ID: TF_ZmC848_4
cccagcgtccgcggacgcgtgggcggacgcgtgggcggacgcgtgggcgagcgccgccgacaacgtcttctcaaggttcctgcccgacgaccaccacatccgggacgacaagccgtcgcctgcccacttcccgagtgcggccgacatggcctcccaccaccagcaggagcaaatgatgttgcactcccagtcccagtcccagcaccagcaggagacgggtaggtccgggggcggcctctaccgcaccgtcagctctgccatggaagcgggcggcactggcgtcggcgccgccagcagcctgattcggcagagcagctcccccgccgggttcctggaccatttcggcatggacaacgggtacggggcgatgctgagggcgagcatgggcatggggttccaggaaggtgttgccagtgactccctcgcgggcggcggcggcggcggcggtagcggcaggctcgggggccagctgagcttctcgtcgcggcaggggtcgctcatgtcccagatctcggagatggacagccaggaggatgtcgtcgtcggagcgagcagccccgacgctggcggcggcggggacgccgcctacatgccggggtacccgatgagctccggcgggtgggacgactcgtcgtcggcgctcttgccggacagcctgcccgcgacgaataaacgcccgcgggactcgttggagcacggcggcgggctggcgcaccagttcagcctccccaagacgtcgtcgtcggaggtggccgccatcgagaagttcctccagttccaggacgccgtcccctgcaaggtccgcgccaagcgcgggtgcgccacgcacccgcgcagcatcgcctggcgggtgaggaggacgaagatcagcgagcggatacggaagctgcaggagctcgtgcccaacatggaaaagcaaaccaacactgccgacatgctggatctggctgtggactacatcaaggatcttcagaagcaggtcaaggtgctgaacgacggccgcgccaactgcacctgctccggcggcggcaagctgcaggacccgttcaccagttagaaggagcagcagccggcgcgtagcagtgcgcggccatgcatggcccgccgcaaggccggcctgactgacgcctccgtgccggccggcggctaagctcgcttcgagcgctcctcctcgattggagtaagagtcgtcgaagtatagtagtatcagtgtacgtgttcggctttacatagttaactgaatgagtagtacgtagtctgttatacatgcaagttncttnnnnaaaaaaaaaaaaaaaaaannncccccc

SEQ ID NO: 2187 - DNA, 2755 bp, Zea mays
  unsure (1)..(2755): unsure at all n locations
  Clone ID: TF_ZmC21109_2
cccagcgtccgcccacgcgtccggtagtatactagaagaggaggaggagagggagaagacgaagcgaagccatagcaaggtcgtcggagccggagagggaggagggtggggaacctcttcctgcgtcacgtgacaactgtctcctgacccaccggagcggcggactccctctgcgcgccgcgcacggcctgttccggtgcggtcgcaggccgacggccggcgacggaggcagcaggaagctactataccaaccggcccaagagaattgcgggtccagaggcagtgatggcggggcgctacgattgacgtgctacgattatgggcatccaagggaacaaggcggcgacgcacgagcacgacttcctctcgctgtacgccgccgccgccgccaaggacgctcctctcctgctacacgactccaaggcgccgcctccttctcaaggtaatttcctcttgaagacgcacgacttcctgcagccgttggatcagaagccgggagcgccgccggagccgtcgccgctgcccgcttccgccgcggagagcaggcaccagccgcagcagcaggtcgtcgtcgcgaaccagcacgcgctgcccctgcccggcggcgtcggcaccttcagcatcagccccgcgcccgtgtccgtcgcgctgccggcggccgtcgtcaagtcggagccgccgttcgtgctctggggccagcctgccgcgacgctccatccgggcgcgcgagggcaccagcagcagtgggcgctccccttcgccggcgccgggcaggtcaggctgccgccgcagcaggcgcctccggatagaaagggccggggcggcgccggtggcggggtcatggagtctggctccagatccagcggcggggcggggttcgacgacgacgacggcctcaccacgcgccgcgaggtctcctcttcgctccaagatttgacagtaagggtggacaggaagggtgggagctgcagcgatggtggtacggatcagcggccaaacacaccgcggtcaaaacactcggccacagagcagcgcagacgcagcaagatcaatgataggtttcagatacttagggagctgttgccacacagtgatcaaaagagagacaaagcaacatttctcttggaggttattgaatatatacggtttttgcaagagaaggtgcaaaaatatgaggcaacatttccagaatggaaccaagaaaatgcaaagatgcttccatgggtaattgcttcattctccaaagctccaatgcttgctagttgctactgctgtcagggaaggaacagtcaattcttgattgtctgtgtctgaatgtagttatacatttttgcagtcaaatatgtattttcgatcattctggaaaaatgcacaggcaagtgtttgttgctaacaatgcatttgccttactgaatcgttaatgatgtatcaataatttccgaccaacaccttatgcattcttgttatccttgtgctgcagagtaaaggccaaatctcaggagattccccgcctgacccttcacatttcatgagaaatggatcttcccctggatctaatttcactgggaaacttgatgataatcacaacatagtgacatctgcagctgcatcaggggcacaggatcaggcagaaaccgaccacatggctagcggatgctacagatcagcagaaactacggcgaattttacaaataatgctatgtctcagtcccaacctcaatggaccggtccgtcccctgtggatgactgtgcagtgaacagtgagacgcttaacaaccagcagttggtgattgatgaaggaacaatcagagtgtccagtaactattcccaagagttgcttaactcgttgactcatgcccttcaaagctcaggtgtagatttgtcccaagccaacatctctgtgcagatcaacatgggaaagcgtgccgtcaagagacccgctgctggtgtatccaccaactccaaggaaccagctgatccggcatctagcaacgaattagggcatcagctgacgctgtctggtggcggtgccggtgccgacggcctctctcacgcaacaaagcggcataaacggggtagcagctgatgtccgctgtccctcacctcgctccccaacggacggatgacggattggtgacattcttcttttccctcccagccaacggggaggctgtacattgtgtgctgtgcttggtgacaagctgagacctccggcgtattctttgattcgatcacccccctcgctcgccatcccattgtttacgtagagaagaggaaccgtggagctttccatcgcggattgtgaagccgctcttgtacacaggcttccattcaatgtgagaagcttcccccctccttgacagatctccgtgttgtagacctgtagccacctgtaagatatgtgatgatgtccaacaaacaactctgccagaccactggctagtcgagttgttgggttacttatgtacggtgttctgttttgctgggagtgtagttgccccgccgtctcagtgaactgatcgtcagttgtgtgaaaaaaaaaaaaaaaaaaaaaaaaaaaaaaaaaaaaaaaaaaaaaaaaaaaaaaaaaaaaaaaaaaaaaaaaaaaaaaaaaaaaaaaaaaaaaaaaaaaaaaaaaanaaaaaaaaaaaaaaaaaaaaaaaaaaaaagggggggcggcttttaagggaacccaagtttacttccccggggcttgcaaaagaaaaagctttttttttaggggccccctaaaata

SEQ ID NO: 2188 - DNA, 1237 bp, Zea mays
  Clone ID: TF_ZmC21109_4
aattcggcacgaggcaccaccagcagggcaccagcagcagtgggcgctccccttcgccggcgccgggcaggtcaggctgccgccgcagcaggcgcctccggatagaaagggccggggcggcgccggtggcggcgtcatggagtctggctccagatccagcggcggggcggggttcgacgacgacgacggcctcacgacgcgccgcgaggtctcctcttcgctccaagatttgacagtaagggtggaccggaagggtgggagctgcagcgatggtggtacggatcagcggccaaacacaccgcggtcaaaacactcggccacagagcagcgcagacgcagcaagatcaatgataggtttcagatacttagggagctgttgccacacagtgatcaaaagagagacaaagcaacatttctcttggaggttattgaatatatacggtttttgcaagagaaggtgcaaaaatatgaggcaacatttccagaatggaaccaagaaaatgcaaagatgcttccatggtcaaatatgtattttcgatcattctggaaaaatgcacagagtaaaggccaaatctcaggagattccccgcctgacccttcacatttcatgagaaatggatcctcccctggatctaatttcactgggaaacttgatgataatcacaacatagtgacatctgcagctgcatcaggggcacaggatcaggtagaaaccgaccacatggctagcggatgctacagatcagcagaaactacggcgaattttacaaataatgctatgtctcagtcccaacctcaatggactggtccgtcccctgtggatgactctgcagtgaacagtgagacgcttaacaaccagcagttggtgattgatgaaggaacaatcagagtgtccagtaactattcccaagagttgcttaactcgttgactcatgcccttcaaagctcaggtgtagatttgtcccaagccaacatctctgtgcagatcaacatgggaaagcgtgccgccaagagacccgctgctggtgtatccagcaactccaaggaaccagctgatccggcatctagcaacgaattagggcatcagttgacgctgtcgggtgccggtgccgactgcctctctcacgcaacaaagcggcataaacggagcaacagctgatggccgctctccctcacctcgctccccgaacgacggacggacggatgacggattggtgacattcttcttttccctccc

SEQ ID NO: 2189 - DNA, 1105 bp, Zea mays
  Clone ID: TF_ZmC252_2
ttgaaaaaccggctcgaccgcacgcgtccgcggacgcgtggggctcaggtgaggagaacaaagatcagtgagcgaatccgaaagctgcaagaactcgttccgaacatggacaagcaaaccaacacatctgacatgctagatttggctgtcgactacatcaaggaactccagaagcaggttaaggtaagcaatccagtaagttctctgcagatgagcacttgtcaggccctgtttggaacctaggtctaatagttagccggctaacaaattgttagctgggctgagccaactaatgagctctagaggttccaaacatggccttatttagaaagacaaccagccctaagcagtaaggtctaaaaccaaactatacttacttgttgcccttcaactgaaaggagaaagtcacatacagcgttctgttaaacttatctgaaatagacactctaaaacagactttgagagtccctttctgttctgtggtctgttcattgaaggtgttaaaggagacccaagctaattgcacctgcccagcaagcaagagccagcagcactcttgctgaagccctgatgcacgctatacatgacctgcagaactcgaaagcatcttcacttgggatagaaaaagatgtaagacagctctcattttttttgtgggtttgaactgtagcatttgaggcttatctaccagacagtgtgtagctttatatgagcacaggggaatggaacaatggcatcatcctcaagcattcaagtgatagggagaagggtaaaattggggagatatataggagaaacaactgtatagtttcgttgtagctttgctatatgtatactacactttcggtataaagtggttaatttacctctattgctagttgtagcagctgtaaatgtgccgcagataagttgtagaaaaacttggatgcgttcaatgcgagcgatagtgtttcgactcaaaaaacatatcatcgttgggttaaaaaaaaaaaaaaaaggaaaaaaaaaaaaaaaaaagggggctcttaaacctaaaattttggttccttttaaaaaaggtgaatccctcgctctccaaattttggtccttttagggagccttaat

SEQ ID NO: 2190 - DNA, 849 bp, Zea mays
  unsure (1)..(849): unsure at all n locations
  Clone ID: TF_LIB5116-009-A1-PF1-D8
agatttaagggaagcaggatattctattgctgggagtagaacttgggcggcatggatcagcttgacgagcaatcgttcctggacgagctcatgtcgctgcgccgggaggaggcgccgtcgccggctccgtggcaggcgtatccgggcagcggcatgatgacgacgagcgacctcctcttctacggcggcgagggcaccaccgaggcgagcagcggcatggactttgccgggccgtttcagcagcccatggcgccaccgccggccacatctccgcaccggccgcacgagaagttcaacttcgactgcctcagcgaagtatgcaacccttacggcagctgcgtcggcggcgtacctaagcctggggtcgtccacgcggctggccaggcgtatgccctccaggatgccatggcgcagaacggcacgagtggcggcaagctgcatcacggtggtggcaggcgtcgtcgtccccggcgccgttcgtgttcgcaggtgtcgccggggagagctcggagatgaccaggggcgccttctccggcgcccacgctagaagcaagctcaacggtggcactacgtccaagaacctcatggcggaaaggcggcgccggaagcgtctcaacgaccgcctctccatgctccgctccatcgtgcccaagattaccaagatggataggacctcgatcctcggggacaccatagactacgtgaatgagctaaccgagcggatcaaacccttcgagggagagatcggcgccacgcccggaggatctgaacctgctngacaccacgaagaatttctccagcgggtacagtgaggagatgccgatgaggaatccaccaagtttgtcatcg

SEQ ID NO: 2191 - DNA, 2605 bp, Zea mays
  Clone ID: TF_ZmC13586_1
cccaaggttcgtggcatatctgtaggcatctaccccgtcttcgtcgtccgctcctcactagctaccaagaggtcgccattattgccaacatagagtgtacgtggatgtctatatatatgcctacttgcacccatatggcataggcgttcgatccccttagcgcggaggagagctcctccggttcttctctacccttcgcatggaagttcttgcattgcttcgttgcttctctagtttcttccttctacgtctttccagcatacgcatgcccctcgtccgccggttcacgaggcatcgtctgatgatcagtagataataagcaatataatactgatctagaatcgagttgttgtactcttcgcagataggcgcgtgatggcgctttcagcttcccgagttcagcaggcggaagaactgctgcaacgacctgctgagaggcagctgatgaggagccagcttgctgcagccgccaggagcatcaactggagctacgccctcttctggtccatttcagacactcaaccaggggtgctgacgtggacggacgggttctacaacggcgaggtgaagacgcggaagatctccaactccgtggagctgacatccgaccagctcgtcatgcagaggagcgaccagctccgggagctctacgaggccctcctgtcgggcgagggcgaccgccgcgctgcgcctgcgcggccggccggctctctgtcgccggaggacctcggcgacaccgagtggtactacgtggtctccatgacctacgccttccggccaggccaagggttgcccggcaggagtttcgcgagcgacgagcatgtctggctgtgcaacgcgcacctcgccggcagcaaagccttcccccgcgcgctcctggccaagagcgcgtccattcagtcaatcctctgcatcccggttatgggcggcgtgcttgagcttggtacaactgacacggtgccggaggccccggacttggtcagccgagcaaccgcggctttctgggagccgcagtgcccgagctccagcccgtcaggacgagcaaacgagaccggcgaggccgcagcagacgacggcacgtttgcgttcgaggaactcgaccacaataatggcatggacgacatagaggcgatgaccgccgccgggggacacgggcaggaggaggagctaagactaagagaagccgaggccctgtcagacgacgcaagcctggagcacatcaccaaggagatcgaggagttctacagcctctgcgacgaaatggacctgcaggcgctaccactaccgctagaggacggctggaccgtggacgcgtccaatttcgaggtcccctgctcttccccgaacccagcgccgcctccggtggacagggctaccgctaacgtcgccgccgacgcctcaagggcacccgtctacggctctcgcgcgacgagtttcatggcttggacgaggtcctcgcggcagtcgtcgtgctccgacgacgcggcgcccgcagcagtagtgccggccatcgaggagccgcagagattgctgaagaaagtggtggccggcggcggtgcttgggagagctgtggcggcgcgacgggagcagcacaggaaatgagtggcactggcaccaagaaccacgtcatgtcggagcgaaagcgacgagagaagctcaacgagatgttcctcgtcctcaagtcactgcttccgtccattcacagggtgaacaaagcgtcgatcctcgccgaaacgatagcctacctcaaggagcttcagagaagggtgcaagagctggagtccagtagggaacctgcgtcgcgcccatccgaaacgacgacaaggctaataacaaggccctcccgtggcaataatgagagtgtgaggaaggaggtctgcgcgggctccaagaggaagagcccagagctcggcagagacgacgtggagcgccccccggtcctcaccatggacgccggcaccagcaacgtcaccgtcaccgtctcggacaaggacgtgctcctggaggtgcagtgccggtgggaggagctcctgatgacgcgagtgttcgacgccatcaagagcctccatttggacgtcctctcggttcaggcttcagcgccagatggcttcatggggcttaagatacgagctcagtttgctggctccggtgccgtcgtgccctggatgatcagcgaggctcttcgcaaagctatagggaagcggtgaaggggcagctggaaatttggacatcgacgggcatggaaggcttcatgggatcgaagcaaagatgtatttcttgtttctttagataacagacatgaatcggacctctatatcaacaattatatgggcatgaatacttaagactccagcccttaacacgtagaaactcaaaaaagaagagaggaagctaaagactaagcgtaaggtatatttggaagtaaattatttttatagtttctaagcaatcccatggtttataggaatactagagtgtttatggcataaggtgtttggttgcattcataaaacctatattttcaaagtcatagcattctagataccatgatatttttgtaatattggaaactacactccaacgcaaagtttttatgacatggct

SEQ ID NO: 2192 - DNA, 1785 bp, Zea mays
  Clone ID: TF_ZmC12850_1
ccccgcgtccgccccgcgtccggccacgcgtccgcccacgcgtccgcccacgcgtccgcccacgcgtccggcctcgttcgcttcgctttcccccaaatccaccgcgggctcgagctcggaggagaggagacgagacgacccaagactttctcacccccctttgcttcctgcgcaattcctgcggcagcgcctttctctctttcaatggacagcgactacgttgccagcctgctcatgggcatgggctcatccgcccctgcgctcgacttcgccgcgctggacgccgggttcctcgaaacgctctgcggcggcggcggcggcctcttcggggtgtccggggtcgccgcgggggccgggtgtggcggcgtgtccccggaggggtcgtcggtgtccgacccggcgtgggcgcgcgccagggacgatgacaatgtcaggaagcgcaaggcgccgcccacggggtccgccggcggcaaggaagcctgcccgggcaaggctgcggaggccaagggtccggacgggaagaggtgcagagtgggcggcagcgacagcccggtgaagccgaaggtagaggaggtggcggcgagcgacgcctcggttgaactcaaagcgcagaagaagggcaaggggaagaccgccaagccggcagtcgaaccgcccaaggactacgtccatgtccgggcgcggcgagggcaggcgactgacagccacagcctcgcagagagggttagaagagagaagatcagccagaggatgaagtttctgcaggacctagtgccaggatgcaacaaggtggttggcaaggcactcatgctcgatgagatcataaactacgtccagtcgctgcagcagcaagtcgagttcctgtccatgaagctcgccactgtgaacccacagcttgacttcagcaacctgtcgacactcctacacaaagacatgtaccaaccatgtggcccttcggcaaattcggtctttccactggaaagtgacggtgcagctttcccattctgtgaccaagcggatcttttccacagctttggttcgggttcggctgctatggaggatcagtgctctctaagcctgctagacacggctctgccccacgcggccaacccacagtttgcttttcaaaagcagcagagggacttctgggaggatggcctacagaacgccttgcctaccggtagtgagcaaagacaggaggaggatgggcttttagtacccaactttgatggccagttacatgctgaccagacaaaggttgagttctagtccctggtgatcctcccaaggttgatatttttgtatataggtggggtaccaagacctgtggcaagcaaagcgtctctctctctctgtgtgtccgaagctgaccatcattagagtctaggcctgcgaactgatttcgttccgtgataatgctgcatgtatggcatctcggttcttcccacagagatcatgtgatgtgatcgacctcgagaaattaaaagtagattgtgtactagatatggcgcaaatattacatgcgccatcttctaaagttgtactgattggtatgtaagggcgctgggtggtgttggaacggataccgtgtactgtttgttgcttttttttccctctagtattaatgattatgatgacgaaagtccaagtataaaaaaaaaaaaaaaaaaaaaaaaaaaggcctcgaaaaattagttgactcctctcagcttgttgcaattgtgtctgtgtcctggtaccttttttttctgcaggtgttgtaataaaatgtaaaaagctgatctg

SEQ ID NO: 2193 - DNA, 1878 bp, Zea mays
  Clone ID: TF_ZmC12850_2
gtgctgacgggcctgtatacgctatccttcgtgagcgctgccgtagtataacccggtggtaacccactggcgtaagcattccaccgtgccgtgctacgcgacggacgcggcgcgcggcccacaacccaaccgcagcggcaacaaccgctctataaagcaatccccaccgacctaccggctccggggccaaaaaaaaaaacggctcggtcgcttcgctttcccccaaatccattgcagactcgagctcgcagtagacgagacgacccaagacctcctcaccctccctttgcttcctgcgcaattcctgcggcagcgcctttgtttgtttcaatggacagcgactacattgccagcctgctcatgggctcatccgcccctgcgctcagcttcgccgcggtggacgccgggttcctcgacacgctacgcggcggcggcggcggcgggggcctcttcggggtgcccgcggaggcagggtgtggcggcgggtctccggaggggtcgtcggtgtccgacccagcgtgggcgcgcgctagggactacggcaatgccaggaaacgcaaggcgccgcccacggggtccgccggtggcaaggaggcctgcttgagcaaggttgcggaggccaacggtccggacgggaagaggtgcagagtgggtgccagcgacagtccggtgaagccgaaggaagaggaggctgcggcggcggcggcggcgagcggcgccttggttgaagtcaaagcgcagaagaagggcaagggaaagagctcgaagccggcagtcgaaccgcccaaagactacgtccatgtccgggcgcggcgggggcaggcgactgacagccacagccttgcagagagggttagaagagagaagattagccagaggatgaaatttctgcaggacctagtgccaggatgcaacaaggtggtcggcaaggcactcatgctcgatgagatcataaactacgtccagtcgctgcagcagcaagttgagttcctgtccatgaagctcgccactgtgaacccagagcttgatttcagcaacctatcgacactcctgcacaaagacatgtaccaacagccatgtggtggcccttcggcaagttcggtctttccactggaaagcgccggcgcagcttttccattctgcgagcaggcggatcttttccacagctttggctcgggtggtagcggtagcggtagtggtatggaggatcagtgctctctaagcctgctgctagacacggctctgccccacgcggccagcccacagtttgcttttcaaaagcagcaaagggacttgtgggaggatggcctacagcatgctttgcctacccctactaccggtagcgagcaaaggcaggaggaggatgggcttttagtacccgacccttgatggccagttgcaagctgatcaggcgaaggctgagttctagcccgtccctggtgatctgcaagggctggtatttttgtacataggtggtggtggtaccaagacctgtgtgtgggctgtgtgtttcaagcagagctctcctctgctaagctgaccatcattagagtttaggcctgcgactgcgactgcgagctggaattcattccgtgatactgctgcacgtatgtcacatggcgactcgattcttgccccccatagagatcgtgcgacccatctcgtgaaaaattggagtaggtcgtgtgctaggtagatatggcgcaaatattacatgcgccatcttctgaagctgtactgattattactcctatgtaagaccgctggtggctggtactggagcgatactgtgtcctgtttgttgctttttttttgatcttacgattatgacgaaagtgcaagtatatgaggtttctctcctttagcttgctttgctgc

SEQ ID NO: 2194 - DNA, 542 bp, Zea mays
  Clone ID: TF_LIB3607-057-Q6-N6-A4
cacatgctggcattatatatgttttccctaaaaaaggtagtacaaagctatgatcagttgggaagagaagatcgaagctagtagcgctaatatattgatttgcctccttatttatcttcgaacgaggtggttcgttattctttctttcggatcattaaacgttcgatccagagcgctgtgttctctgctagctaattcagctgccccctctgagactgcgacgccgacgacaatatggcgtcgagcgcctccctcacttgggagatctccggcgccttccctccctgtgccggccagaattcgtctgttgccagaaccttgacttgcaactggaggaacttaacgtagctgatggccttctcgagcatggtgaccaggtcgaccttggtgccgttgggcaccagctcctgcagcgcccgcagccgctcgctgatccgctcgcgccggttcttggccgcgaggctctggggatctttggttggggctgtggacgcgagcttggccttgctcgccttcctgcccgcgccgcagtgcttcttgtt

SEQ ID NO: 2195 - DNA, 2563 bp, Zea mays
  Clone ID: TF_ZmC13586_2
taggcgttcgatccccttagcgcggaggggagctcctccggttcttctctacccttcgcatggaagttcttattgcattgcttcgttgcttctctagtttcttccttctacgtctttccagcatacgcatgcccctcgtccgccggttcacgaggcatcgtctgatgatcagtagataataagcaatataatactgatctagaatcgagttgttgtactcttcgcagataggttcgttccttcacatagaagcgagtacagactacagaccacacagtatcagctggcacgaaacgaaaatggttacttgcaaattgcatgcacgagctagaattatattcttctaatcttcttcgttgactttctggcttcagcaggcgcgtgatggcgctttcagcttcccgagttcagcaggcggaagaactgctgcaacgacctgctgagaggcagctgatgaggagccagcttgctgcagccgccaggagcatcaactggagctacgccctcttctggtccatttcagacactcaaccaggggtgctgacgtggacggacgggttctacaacggcgaggtgaagacgcggaagatctccaactccgtggagctgacatccgaccagctcgtcatgcagaggagcgaccagctccgggagctctacgaggccctcctgtcgggcgagggcgaccgccgcgctgcgcctgcgcggccggccggctctctgtcgccggaggacctcggcgacaccgagtggtactacgtggtctccatgacctacgccttccggccaggccaagggttgcccggcaggagtttcgcgagcgacgagcatgtctggctgtgcaacgcgcacctcgccggcagcaaagccttcccccgcgcgctcctggccaagagcgcgtccattcagtcaatcctctgcatcccggttatgggcggcgtgcttgagcttggtacaactgacacggtgccggaggccccggacttggtcagccgagcaaccgcggctttctgggagccgcagtgcccgacgtactcggaagagccgagctccagcccgtcaggacgagcaaacgagaccggcgaggccgcagcagacgacggcacgtttgcgttcgaggaactcgaccacaataatggcatggacatagaggcgatgaccgccgccgggggacacgggcaggaggaggagctaagactaagagaagccgaggccctgtcagacgacgcaagcctggagcacatcaccaaggagatcgaggagttctacagcctctgcgacgaaatggacctgcaggcgctaccgctaccgctagaggacggctggaccgtggacgcgtccaatttcgaggtcccctgctcttccccgcagccagcgccgcccccggtggacagggctaccgctaacgtcgccgccgacgcctcaagggcgcccgtctacggctctcgcgcgaccagtttcatggcttggacgaggtcctcgcagcagtcgtcgtgctccgacgacgcggcgccggcagtagtgccggccatcgaggagccgcagagattgctgaagaaagtggtggccggcggcggtgcttgggagagctgtggcggcgcgacgggagcagcacaggaaatgagtgccaccaagaaccacgtcatgtcggagcgaaagcgacgagagaagctcaacgagatgttcctcgtcctcaagtcactgcttccgtccattcacagggtgaacaaagcgtcgatcctcgccgaaaccatagcctacctcaaggagcttcagcgaagggtgcaagagctggagtccagtagggaacctgcgtcgcgcccatccgaaacgacgacaaggctaataacaaggccctcccgtggcaataatgagagtgtgaggaaggaagtctgcgcgggctccaagaggaagagcccagagctcggcagagacgacgtggagcgccccccggtcctcaccatggacgccggcaccagcaacgtcaccgtcaccgtctcggacaaggacgtgctcctggaggtgcagtgccggtgggaggagctcctgatgacgcgagtgttcgacgccatcaagggcctccatttggacgtcctctcggttcaggcttcagcgccagatggcttcatggggcttaagatacgagctcagtttgctggctccggtgccgtcgtgccctggatgatcagcgaggctcttcgcaaagctatagggaagcggtgaaggggcagctggaaatttggacatcgacgggcatggaaggcttcatgggatcgaagcaaagatgtatttcttgtttctttagataacagacatgaatcggacctctatatcaacaattatattggcatgaatacttaagactccagcccttaacacgtagaaactcaaaaaagaagaaaggaagctaaagactaagcgtaaggtatatttggaagtaaattatttttatagtttctaagcaatcccatggtttataggaatactagagtgtttatggcataaggtgtttggttgcattcataaaacctatattttcaaagtcatagcattctagatacca

SEQ ID NO: 2196 - DNA, 3081 bp, Zea mays
  Clone ID: TF_ZmC2137_2
atggcagcttcagcgcctccaatctacttctgcgccgcccccgctttctgcccttgccggccccacgccaagcctgacagcaaggatgtcgatgaggcccgcgtgacgatggctcccacaactccaatctgccttcgcgtcgccccagctccccgtccatgtcgagttcgagtaggacgaggacgaggagggcagcgccaacaaagtggaagggacgggctcgacaccttcatgctcttctacaccgtcttctccgtcatcgaccccaagtgcgacgcccgcgactcacacgtcccgatgagcaccaaccaacgataccgtctcttcccacgtcgccaattccacaacacactccacctcctcaacgactcacgcctgctccgcgaccttcggttcagattcttcatcgccaagtgcccgcacccccattggccactgccgctctgccagggacatggaagagaggaaccaatttcttcagcatggtctaaacacaggcaagaccccatacaagagggccagtccatcggcgtcatcgccaacgacgttgacaagaacggcaagccacacaaggtcaggctctactccatcgccagcagcgctaacggcgactttggcaactccagacaggttttgccgtcgctggctggattgcctgatttgctttgcagattttcctgccatttgatttgcttcagtgttcttctagcatttctattggagttgtatgtgttcctgaaactgacacctgtgaaaaggcgtctgttcaaccggggctgcaaagaacaacactgtgaatcgtattcatgtataattgccattgtttctgtagtccatcctgacggctggagaagcaaatggcaaattaagctttgctatgtgcctacgttacctgggtgccatgttttcattagaggaaagggttccatcaaagatccagggaagattcttggttacagtctcaatgaagcacatcagctgctgcaggagtgtaggcagcagcagatgaacctcgacgagctcctagagaagaagtgctccactctggctaacagaggtgatggcggctcagatcagtccggcaccgccccttcgtcccccccacacgtcttcggatctgcaacccccctacgcgcaggtaccagtgggcagtggcacacacatcataaggatgaagatttgaaccaagatgagaagtgggagcagctcgttcatctcttgaaggggattgcggtcgaaacagagaagttccaagcgacaccactatctcaggaagtgctgattgtatggggagaccacgaccaactgttcccggtggagaaggcgtttgcagttcatagttcttttaaagactcctctgagtgttgctgctttccagtgacaaaaaagattccaagaaaccacttcttgtcttcctccactggctgcctgtcatcttgctctaaaacaatcgcagtcttgcaagttgttgttgctgctcctacccctgcctctgcaattgggtttgagggatatgagaagcgcctcgagatcagcttctatgaggcacctatcttcgctgaccccaacggaaggggattgaatcgtttggctggagttgctgctgggcttcctcacgaccttggccttgcatctcaaacaaggcataaggctgaaaggtcacccggtttggcgaagatctttcggaaggatttgaaccttggtcggccttcagtcgggctggtggtcggtgtatctaagtgtggatgagaggacatgggagcagaggagtgctgttggtggaacctcattgctaccgagtgtccagaaaggtttgcagaattttagttggagtcaggctcgtgggctgaattcccatcagcagaagtttggcaatggtgtgttgattgtgagcaataatgaggctgcacaccgcaacaacggagcagtggacagccctagcacagcccagtttcagcttcaaaaggtgcctcagcttcagaaactgcaactccagaaattgccggttgttcagaagacaccgcagctagggaaccagcagcctatgcagacacaggtacctaggcaaattgactttagcgctgggagcagttccaagcctggtgtgttggttacaagggcagctgtcctggatggagagagtgcagaggtggatggcttgtgcaaagaggaaggggcgccgcctgttatagaggaccgacgaccaaggaagaggggaagaaaacctgccaacgggagggaagaaccacttaaccatgtcgaggctgagcggcagaggagggagaagctcaaccagcggttctatgcgcttagagctgttgtgccgaacatatcgaaaatggacaaggcgtccctgctgggcgatgcgataacgtacatcactgacctccagaagaagctcaaagagatggagacggagagggaaaggctcctggagtctggtatggtggacccaagggagcgtgcgcctaggccagaggtggacatacaggtggtgcaggacgaggtccttgtacgagtgatgtctccaatggagaaccatccagtcaagaaggtcttccaagcgttcgaagaggcagaagtccgtgtgggcgagtcaaaggtgacgggcaacaacaacaagggacagtggtgcattctttcatcatcaagtgtcccggcactgagcagcaaacgagggagaaggtgatagcggcaatgtctcgcgcgatgagcagttgagcatagcagctgtaggatcagactggcacggtagaaggtggccggtttatccaggttgcgaacaagaggcggcggcggcggctgaagcagcccgtcgattgttgataggagagttgtaggtggagagaagcaagataagattcttctgacttaagcaatgcagcagcaaccaaaaaaaaagaattggggctctagttaagcagccattctacggtaggtttcttttggttgtggtccgaccccgaccgtttagttctgatgtttttgctttggaaggatggataccgtgttcgttgtgtaagcctgatgatgcagcagaaccataaacagcaatacatgtttttcttattcttcttcttc

SEQ ID NO: 2197 - DNA, 831 bp, Zea mays
  Clone ID: TF_ZmC579456_1
cattgggtacctcgaggccggccgggaagcctgctcatggaatgggcgatggacacgctgctgcaggaggaggagcctgcggcgctctacgacggctgcggcgaggcagtagccgtcttcccctcgttgcaagggctccgcgacgcctcccacgcggcggagatggtgcgggagctgatggccgccgtcgaaaccgacgacgcggcaaacagctggacaacgagcggttctggcggcgaggtcaccgacggcggcagcagcggggccactgaccctgcagcccccgcggctgcggaggccgcggatttctacggcggctccgggccgccacactcgcccaactcgttcccgagcggcaaaaccaacaccagtctgcccacggtgagggtgagctggaacttcgtcaccggctcggcggcggcgcagcctcgcagcgacggcgtgctggagaaaggcgccgtcccgatacgccgcgtgccgccggagctggcccaccgccgccggtcgccgccaccgccgccgagaagagcccaccacccaacacgcggcatgggagccgcgtcgtgcacgccggaacacatcgtcgcggagcgcaaacgccgggagaagatcaacaatcgcttgatcgagctctccaccgtcatcccaggactcaagaagatggacaaggcgacgatcctctccgacgcagccaagtacgtgaaggagctccagcagcggctcaggcccctggaaagagctgccgccgccgccgccggcagcagcaggaccaaagcgccgacgacgacggacgagaatggcggctcccggtcgccgacgtcggcatcgtcg

SEQ ID NO: 2198 - DNA, 552 bp, Zea mays
  unsure (1)..(552): unsure at all n locations
  Clone ID: TF_ZmC944_3
gtttttagttgggccagctttgcttcgtatatatttttttctatctaattatacatccgcttatattattctgtgtttcgttgcagaaacgaagggacaggatcaaccagaagatgaaaacgctgcagaagctcgtcccgaactcgaacaagacagacaaggcgtcgatgctggacgaggtgatcgactacctgaagcagctgcaggcgcaggtgcagctgatgagccggatgggaagcatgatgatgcccatggcgatgccgcagctccagatgtcgatgatggcccagatggcacagatggcgcagatggcgcagatggcccagatgaacatgggctccctcggccagccgggctacgcaggcctcacgccgcccatgatgcacccgccccccttcgtccccgtgtcctgggacaccaccgncaccgtcaccaccttcctcgccccgcaggccggcagcggcacggtgccagcggacgccttctacgccttcctagcttgccaagcgcagcagaacgggcagcagcaaccgggtagcatggaggcgtaca

SEQ ID NO: 2199 - DNA, 1373 bp, Zea mays
  Clone ID: TF_ZmC28831_1
gaaaaaaaaaaaggaagactggaaaagcatcggcacgggcggtaggataaagtagcatagcataccacaaaaggtgctgcttgacagatggcaagcttcccacacctcacgcagatggagcatggcctagccagtggtgcctcccatggcacgccgagcttcttcttctgccatggcacagccacggcggattcagcctcgctggagacctcgtctggtgttctcgacacctccccacgaggcacttcttctgacgacaacaaggcctgcaggaagcacaaggaagatagtggtgccagcttcagctctgctcgctccaaggactcaaactcaaaggaaagcagcaaaaggagcggaggaaaaagagacagaagcagcaagaaggtggacgaggaggagcccaaggggtacatacatgtcagggcgaggagaggacaagcaacggacaaccacagccttgcagagagggtgaggagggagagaatcagtgagaggatgcgggtgttgcaggccctggtccctggctgtgataaggtcactggaaaagccctcattttggacgagatcatcaattatgtgcagtccttgcagaaccaagttgagttcctttccatgaggattgcttccctgagccctgtgctgtatggttttggcatggacagtagtgatgctttcagtgaccttataactcagaagatcgaagggatggcccaccatgaggcgttcgcgatgcctagcagctctgtcctgaacggcactccgtcggaagctctcgtggacacgcacacctccagctcctccccgtcctacgaggtccacggcgacggcggcaccgccagcgtctctttccctcaggacagtggcagctacatggtgcaaacagtaggtgagccaaggcaagagctgttcagccaagtggtgttcagtaaccacatgtgccctttccagtagggagagagcgagaggatggaaggacgacaggaagcaataatgttgagatcctatggaggtggaggccaccaccagacgagtttgtgatgttggacgcaatccatcccctcgtcggtggccgtaacgggaacccctgcggtagctagcattagcagtagtaataatagtaggctgttggttacatcatcctgttagatctcaaggtctctgtcggtaccgcatcatctagtaggcattgttgctgcttagcttttgggctctcttattaccaagggttgcatgcatgccattgtattgtactctccaattggaaaaaaaagaaaaaaaatatcatttgttcataaaaaaaaaaaaaaaaaaaaaagaaaggccgctctcttattatcaagttggtggcatgcatgccaggtatttagcaccaa

SEQ ID NO: 2200 - DNA, 619 bp, Zea mays
  unsure (1)..(619): unsure at all n locations
  Clone ID: TF_ZmC178000_1
gcgagcgagtgagtcagtgaggctgggatagcagcagcagtgcgccgcactcaacttctcttcttgccgtgcggtgcggcgcggcgcggggaggcaccgcacggccgcaagcaatgccgcgccggcagaggacgcgcagcagcgaggagctcaaggcggaggacttcgtcgactcggtgctcaacttcggcggcgaggaggaggatggggaagaggagaagcaggaggccggcggggacggccagccggcggcggagttcaagtccaagaacctggaggccgagcggaagcggcgcggcaagctcaaccgcaacatcctcgcgctcagggccgtggtgccgaacatcaccaagatgagcaaggagtccaccctctcggacgctatcgacctcataaggaagctccagaaccaggtccttgagctgcagcgccagctcgccgactcgcccggagaggcctgggagaagcagggcagcgcgtcgtgctctgagtccttcactgccacggaaaacatgccgtatcagggtcagatcgagctggttcctctggggccatgcaagtaccacctcaggatcttctgcaagaaaggcnncggcnngtcttcacncaaggggtgctg

SEQ ID NO: 2201 - DNA, 406 bp, Zea mays
  Clone ID: TF_LIB3245-506-P1-K1-G5
gggcaaggaggggtcaagcaactgatagtcatagtcttgcagagagggtaagtggaatgtaacattttctgttgtaaaaatgctattgtatgaatttcaagtggtctaaaacggtaggagcatcacttctgtaagttacatacaacatgaacttgaccacttaaagatcttgttgttttaacaggcacgtcgtgagaaaataagtgaacgaatgaaagttctccaagatcttgtgcctggatgcaacaaggttattggcaaagcatcagtacttgatgagataattaattacatccagtcgttgcaatgtcaagttgagttcctgtccatgaaactagaggcagtgaatgcccaggcaaaccagggagttgaagtatttccagccaaagattacggttctcagaca

SEQ ID NO: 2202 - DNA, 1080 bp, Zea mays
  Clone ID: TF_ZmC238625_1
cctccatagtataaaatgctcagatttttgaagtacttttcgaaagagtgtttttaaaaaccgctgtttggcaggctctggttttttttccggtgccaaagccctgaccctaatgcgactcaagaatcatctgccgcttgctctgaaagggactactcccgtatgccgtttctggggaagcaacccttgctaacgcctgcctgacagcctccttcagagacctgaggcttgcacctgcacttccccagccgtcctccatgcacagcacgaacacatgccgcgcccttcctcctaacgaggtcatgttggccctcaccgtcttcagcctcaggccatggaacgcctgggcgagcccggcgacgaggtccggccggtcggcgcagcttatcgaggcccttatgtagacggacctgtcggcgccggcgtcgccggtgtggagctcgatggagacctcgtcggtctccgggggcaggggcgtgctctgggtggtggtggtggcggcctcgcttgctttcctcttcaggagcttcacttgctccaccactctggcaagcaaggtggccttgtccatctgcctggtatcaggaaccatcctcctgagcgtagccagatgagcgttgatcctctcccggcgccgccgctcggcctcgctgtggactttcagggccctcgcctccgtcgcactcctccccgaccccgacgacgacgacatgtccggcggcggcgctacccgcacggccggtggagcggcgctttcctgctgccggggcagaagaactggactacccccggccccgagcgctgaagggtcacggccatcgtatggctgcagctcctgcttcccttgcagaggttggcgcgcagccattgaaccaggcatcatcctcacctgcagtgcaggttcgtttcaaataaaagtggtgcaacaacgtcttgtcatctcattctctggaatgagtgatatgcatatgcttgtgtgcgagatgtgatcatcttcttatgatatgagtgatgacagacaggcgtactgcggtgtatagtgtgctcgttgatttttcccggccggctcgaggtaccaat

SEQ ID NO: 2203 - DNA, 1386 bp, Zea mays
  Clone ID: TF_ZmC16354_1
ggagcagatggcggagctggtgatggcgcagtgcggggtgccgagcggcggcgaggggggcgcgtggccgccgggattcgcgtgggacggcggcgccgcggacgcgtcgcgtgggatgtacggcgatgcggtgccgccgtcgctcagcctgttcgacgccgccggcagcgtcgcggcggacccgttccaggcggtgcagcaggcgccgggcgccggtggtggtggggtggacgacgtcgccgggtggcagtatgctgctgcggctgggagcgagctggaggcggtgcagctgcagcaggagcagcagccgcgcgatgcggactcggggtccgaggtcagcgacatgcagggggacccagaggacgacggcgacggcgacgcgcaggggcgtggcggcggcaagggcggcgggaagcggcagcagtgcaagaacctcgaggcggagcggaagcggcggaagaagctcaacgagcggctctacaagctcaggtcgctcgtcccgaacatctccaagatggaccgcgcggcgatcctcggggacgccatcgactacatcgtgggcctgcagaaccaggtgaaggcgctgcaggacgagctggaggacccggcggacggcgccggcgcccccgacgtcctcctggaccacccgccgccggcgagcctggtggggctggagaacgacgagtcgccgcccacgagccaccagcacccgctcgccgggaccaagagggcccgtgcggcggcggaggaggaggaggaggagaaggggaatgacatggagccgcaggtggaggtgcggcaggtggaggccaacgagttcttcctgcagatgctgtgcgagcgccggcccgggcgctttgtccagatcatggactccatcgccgacctgggactggaggtcaccaacgtcaacgtcacctcccacgagagcctcgtcctcaacgtcttccgcgccgccaggcgggacaatgaggtggcagtgcaggcggacagactgagggactcgctgctggaggtgatgcgggagccgtacggcgtatggtcgtcgtcggcgccgcccgtggggatgagcggcagcggcatcgccgacgtgaagcatgacagcgtggacatgaagctcgatggcatcatcgacgggcaggcggcaccgagcgtcgcagtgggggtttcagaggatcactacggcggctacaaccatctcctccaatacctcgcttgatcattatttaattgcgttcgttcatgttgaaagttcgatcaaactatcaaaggatggatcaactaataaaaacgggatccatatataagtaactgtgaattgcgatcattaattgtatgcatacaagcatatggtcgtggattaaagtttgttaattgggttttctc

SEQ ID NO: 2204 - DNA, 545 bp, Zea mays
  Clone ID: TF_ZmC222321_1
cgggccctaggccgtcggcgcggcgggggcgggcgcggagaggccccggcggaagaacgtgcgcatctcgagcgacccgcagacggtggcggcgcggctgcggcgcgagcgcgtgagcgagcgcctgcgcgtgctgcagaagctggtcccggggggcagcaagatggacacggcgtccatgctcgacgaggcggccagctacctcaagttcctcaagtcccaggtccaggcgctggaaaccctaggcacgacgacggcgaccaacgccaacagcagcgcgagcgccaccaccagcaggagcagcgcggcgagcaggtcgccgcagtacaactattacggcggcggcggcaataataataatcctgccggctttcttggattcagtaacgttatttctccggctgggtatgtaaatccgggtggatcgtcgtcgaatactggcagcaacaaactgctgttttagtgactgttcttgtgtgattgttgtttgtcgtccggagcggacgatgcacatacacatgcatgcatgcatgttgctgtttcac

SEQ ID NO: 2205 - DNA, 797 bp, Zea mays
  unsure (1)..(797): unsure at all n locations
  Clone ID: TF_LIB4976-045-A1-K1-G9
acttctctccacttcctgccaagtgccaacaagtcccctcttcttcgtctccaaagagacaaaacccaagagaggatcgtacgtcgtagggatcttgttcaatggcggacgcggacctgacaccaaaccactcgctcctcctcaagatgcctgcggcttcggcccacgcccactccccaagcctctcgagcctcctgttatacggccaggagagccatggcgaagcagcgcctgcaaacgcaaatgcaaatgcggcagcagcaacggtggaggacgccgcctcacttgagacctcttctgcagtggttgacagtgcatctccaatggagaggaagaggaaggctacagcagaagacagtgctgcaatcagctctcctcaaccaaaggactgcaagcaggagagcaagagcaggagggggaagaggccccgaaaggagaccgaggagaagagcagcactgatgaagacgaggcctccaaggggtacatccatgtgagggcgaggaggggccaggcgacagacagccacagcctcgcagagagggtgaggagagagaggatcagcgagaggatgaggatgctgcaggcactggtccctggctgtgacaaggttaatggaaaggccatggttttggacgagatcatcaattacgtgcagtccctgcagaaccaagtcgaggtaataaaaacacaaaccatgaaccaagtcgaggtaatacaagcatggttttggattaactgctaaaaatctgccacttcatcagacagtntcagacggncattaatctgcaaatcacac

SEQ ID NO: 2206 - DNA, 680 bp, Zea mays
  unsure (1)..(680): unsure at all n locations
  Clone ID: TF_LIB3689-245-Q1-K6-D2
nganaatctataatcttttggaaaaataaaagagagagagaaagagaaaagctcgcgtttttattcggtgtccgttcgtcgttccagggaggagaagccgcaggcgtcttcggcggttccttcgccggatcgctccaccaccaccagcagcagcagcagcattttcaatcacatccgcagcaaacggcgccgttgccggggcagggcttcggtggaggcgcgggcgcgtccggcggcgtgtcgcagccgcaggccggcgctgcgtgcggaggcgccgccgcgccgcccaggcagcgggtacgggctcggcgcggccaggccaccgacccccacagcatcgcggagcggctccggagagagaggatcgcggagaggatgaaggcgcttcaggagctggtgcccaacgccaacaagacggacaaggcgtcgatgctggacgagatcgtcgactacgtcaagttccttcagctccaagtcaaggtgctgagcatgagccggctaggtggcgccgctgccgtcgcgccgctggtggccgacatgtcctcggagggtcgaggcggcgtggcggtcgcggccgggagcgatgatgggctggcggtgacggagcagcaggtggcgaagctgatggaggaggacatgggcaccgccatgcagtacctgcaagggaagggcctgtgcct

SEQ ID NO: 2207 - DNA, 1725 bp, Zea mays
  Clone ID: TF_ZmC6843_1
gcttgtctttcctttctccctccccttcgagccaccaacccgggatgcagcccactacgcgggaaatgcaggccatggccgccgccggccagcagatctccctcgacgacctccgcgcggcagcaggcggcgtgcacgacgacttcctggaccagatgctcggaggcctgccgccgtcggcatggccggagctgtcgtccgcggcgggagggaaggcgccggatggcggcgcgcaggcggagcagatgcagcaccagccgcagcacttgggtgggggtgggggcctgtacgacgactccgccttgctggcgtcgcggctccggcagcaccaaatcagcggcggcggcggcggggaggccgtgaagcagatggtgctgcagcagctggccgatctgaggcaggaacaccatgtgttgctgcagggcatgggccgctcgacctcgacgggcggcagcagagacggcggcctgctcctcccgctctctctcggcagtggcggatcgggcggcgacgtgcaggcgctactcaaagctgtagccgactccgccggaggagaagccgcaggcgtcttcggcggttccttcgccggatcgctccaccaccaccagcagcagcagcagcattttcaatcacatccgcagcagcaaacggcgccgttgccggggcacgggtccggtggaggcgcgggcgcgtccggcggcgtgtcgcagccgcaggccggcgctgcgtgcggaggcgccgccgcgccgcccaggcagcgggtacgggctcggcgcggccaggccaccgacccccacagcatcgcggagcggctccggagagagaggatcgcggagaggatgaaggcgcttcaggagctggtgcccaacgccaacaagacggacaaggcgtcgatgctggacgagatcgtcgactacgtcaagttccttcagctccaagtcaaggtgctgagcatgagccggctaggtggtgccgccttccttttgtggaccgtgcgtgtgtgtgttgtgcagggtcgaggcggcgtggcggtcgcggccgggagcgatgatgggctggcggtgacggagcagcaggtggcgaagctgatggaggaggacatgggcaccgccatgcagtacctgcaagggaagggcctgtgcctcatgccggtctccctcgcctccgccatatcctccgcgacgtgccacatgcgacctccggtgggaggaccgggcctcggggtcgccgccgccgccgcgcaccacatggccgctatgcggttgccgccccacgccatgaacggcggcgccggagccggagccgacgccgtgccggcctcacccagcatgtccgtgctcacggcgcagtcggccatggcgcccaacggcgccgggggtgggactgatggcgagggctcgcactcgcagcagcagcagcggcatcatcccaaggacgccgcgtccgtgtcgaagccgtgatccgctcgtgaacgtgaaggcaacggccgccgtgacactaacggcgcaaccatgacatgacactcggagctgacaaagtgggctctttggcgggcccacccacgggctctcggcactgcagctggccctccgaccttcccccttttcgcattttattcccagtgtaaccattgtttttttttccttgtttaatattaatcccatgtattatcgattcgcaaatgcaaggctggttctcctctgcttgctttgcgccaaaaaaaaa

SEQ ID NO: 2208 - DNA, 1290 bp, Zea mays
  Clone ID: TF_ZmC32276_1
gccggccggttccgggtaagaacagtctgtcgctgcggtggggaaagctgctggcgacaggtggaaatccctgagcgagtcggacaaggctccctatgtagccaaggctaacaagctcaagctcgagtacaacaaggccatcgctgcctacaacaagggcgagagcactgcagctaagaaggctcctgccaaggaggaagaggaggaagatgaagaggagtctgacaagtccaagtcggaggtcaatgacgaggatgatgaagagggtagtgaggaggatgaagatgatgacgagtgatggagctcctcgagacaatggaccgtgcttcatccaacaatggagctggctacgcaaggccccgtggatgactccttaaaggagcctatatccatggactagaaatattctctttcatgtccacattgggacctcgaggccggccgggacacgctacgtgtgtaatctcgcttcggcgaagcgcggggcattccttttcctcctccccctttgcggcttctcgcagcgctgcgaatcccaatccgcaccgatccgacgcgaatcgatcgagaggcagggggcagcactaatcgaatcgagactagcgccatgaacccgagaggccatcgtagcaacagaacttctctcttcgatggcattgaggagggtggaatccgagcaacatcctattcttctcatgagatagatgagcaagaaaatgatggagctattgatggactgcaggatcgtgtcagcattctcaagcggttgtcaggcgatatccatgaagaggtggagactcataacagaatgctggaccgaatggggaacgatatggatacttcaaggggttttctgtctgggaccgtggacaaattcaagatggtatttgagaccaaatcaagccggaggatgggaaccctcgtcgcatcattcgtcgccctttttctgctggtttactacttgaccaggtagaagacatgacatgctggaaatggtcatctcatcatctgcgtgccgtgccgtatagatagataccttgaaaacccaccgtcctgagtgccaaagtatatgttgatgtgggtgtttcgtcaactctgcactgtacaacacgactacagcgtgcgtgctgggtcgatcctatgttctcttgttgcgggattcaagtttgttgtccgttccttccctttggcatgtcatgtgtatggtatttagtagcataacaacaacaaaaaaactgtataaagaagctttgattgagcactaaaaaaaaaaaaaaaaaacccgagcat

SEQ ID NO: 2209 - DNA, 960 bp, Zea mays
  Clone ID: TF_ZmC1672_5
tttttaaccgtttgagactgcagttagttgtgatgtgctttgttgttcttacgatgaatgtgccggtctagtttcgtctgggttggcccctctgcttggccgcgtttgtcgtttagatctatccaaatatcatcgtttgttgatttcgaaattggggctgttttgctcatgatttcagttcaaacttcaccatgcttcatgttttggaattgtaattggtggctatgttaattgtctagacaattgtttagacttcagttcagatttgtggacttgctgctgcgtaatgctatcctctgacactggcggtttggttcaataagttgtgcgggcttactattttgttgaattcgatgttgaaatctgttcgttcctagaagggttttgttcaacttgcatattcacttcaacgctccgatgcagtatacgtttgttcccttgcccgccctttgacgttgtgcagtttctgaatcgcaggagaaggctccctacgtatctaaggccgagaagctgaaggttgagtacacaaagaagatggacgcctataacaacaagcagtctggaggaggacccacattgtctggtgattctgacaagtccaagtccgaggtcaacgacggggacgaggagggtgatgagtgatggatgacgggtgaaactctgggctgcccaagtgcttgcagtcagcagggaaatctcatcgtcgttgggcctaaccgggctttgctgctccgtagcgtctggaagctgtctgtcttttgagatgctgtagactagtagtgcctgctctgagttagtaattgaaagtgttgtccctgaagtgatgctgtttagttggtagtgtgttcgcttcttcggcacttatacttacccccaagcatcaacgctgcctgttttaaatctcaataggtgctgttttaaatctcagatctcaatatatgactactgatcgctgaatag

SEQ ID NO: 2210 - DNA, 360 bp, Zea mays
  Clone ID: TF_LIB143-063-Q1-E1-G12
aaacgttttcgtgctcaaacaaccaaaccttaatccccattaaggcccaagggctccagaataaatccatggcacagtccaacggctggcaacccaggctctccgttaaggaaaaaaaggttgaaaaggacccaacaatcccaaaaaggcccccaaccccttcctcctcctcaagggagaatttaaggaaggattccaaggaaaaccaccccaagttaaagcaagtctccctgattggcaaggctggttgtgacaagtgaagtcctgtccgattccgagaacgctcactacgtgtctaaggcagagaagctcaaggctgagtacaccaagaagatcgacgcttacaacaacaagcagtct

SEQ ID NO: 2211 - DNA, 814 bp, Zea mays
  unsure (1)..(814): unsure at all n locations
  Clone ID: TF_ZmC677_15
ctggtncgcctgcgagtaccggtcggnattccggggnaacgaggtttctctttttccttgtgatagttgngacggtgctcttggttaagctattatgcggctgttgttgcaggctccgggcgggcggcgccgccggaaagcgcaagaaggccgccgcgagcggcaagcccaagcgcccgccctccgccttcttcgtcttcatgtctgaattcaggcaggagtatcaggcgctgcaccctggcaacaagagcgttgcgaccgtgagcaaggcagcaggnggaaaagtggcgtgctatgtcagatcaagagaagcaaccatatgtggaccaagctgggcagaagaagcaggactatgagaagactaaggcaaactttgataagaaggagagcacaagctcaaagaaggctaagactgaggatgaggatggctcaaagtgagtacgtgaggacgaggatggcagcagtgacgaggaaaacgatgacgatgagtaaacactgtctccaaggccacgaggtagcaaatcaagtgttaggtccccaattagcttactgttttgctgcctttaaatgttaagttgtttcaaacaggtgtttatgaaggggatctattagtttcgcgatgtcgttagtttagtgcattagcaaagaaaaagccaaatgctgctagctgttctgttgcttttcttttgctaaccacttgtgtcacaactttctgtacctgcttcattgactaatctagtgactagtcagttattggttaaaaaaaaaaaaaaaaaaaaaaaaaaaaaaagtactctgcgttgttaccactgct

SEQ ID NO: 2212 - DNA, 589 bp, Zea mays
  Clone ID: TF_LIB4742-022-R1-K1-E8
ctcgaggctttggccgggatcgcacaacacgccgctcccggacacgaaaggcaaacctaccaccatcacgaccagccaggaacagacatgtgtgattagagctacggtcgcgatgcgaaagcacccatgctatccagtagcaaaaccgtaggtgcagcccaccatgaagggcaaggctagacacctccaaaaaggacgagggcaggctcctgacgaccaggagcccacggaaagcgcaagagggcgggcgcgagcgccattgttaagcgaccgccctgcgctcttatcgtgctgatgtctgaatttaggcaggaacattaggcgctgtacactgacaacaagagcgtggcgaccgcgagcaaggcaccaggggaaaagtggcgagctatgtcatataaagagaagcatccatatgtggaccaagtctgctcagaagaagcaggactgtgaggagactagggcaaactgtcacaacaaggagagcacaagctcagagaatgctattactgaggatgatgatggttctaaggacatgttgaagactaggatggcatgactgacgagcaaaacgatgactaggaggaaacag

SEQ ID NO: 2213 - DNA, 293 bp, Zea mays
  Clone ID: TF_700354730H1
ccgtattcgtgctcacacacacaaaccgtagacgcgatcaggctcaaacgtctcaagctgcgatcgaaggacaggtacaccacaggcgactcaaggctctcggtgatgaagcccaacgctgagtaggacccatacaagcgcaagatgcctcagagcgcgttcttcgtcttcatggaggagttctggaaagactacgaggataagcaccctcatgagaagcaagtctccctggttggcacggctggtggtgccaagtggaagtcactgtctgatgacgctgatgctccctaagt

SEQ ID NO: 2214 - DNA, 335 bp, Zea mays
  Clone ID: TF_LIB4729-108-A1-K1-F3
gccggccggagtcccaccaccccaccctctgtcttcgcctccgctgccgattcgaaagcacccgtcctgtcccctcgcaaaaccctagctccagccaccatgaagggcaaggctgacacctccaagaaggacgagggcaggctccgggcgggcggtgctgccggaaagcgcaagaatgccgccgcgagcggcaagtcctagcgcccgccctccgccttcttcgtcttcatgtctgaattctggtaggagtatcaggtgctgcaccctgttttcaagagcgttgcgaccgtgatccaggcagcaggcgaacagtgccgtgctatgtgagatcaaga

SEQ ID NO: 2215 - DNA, 419 bp, Zea mays
  unsure (1)..(419): unsure at all n locations
  Clone ID: TF_uC-zmflteosinte92e09b1
cttcngttctcccagnagccaccgcggcattttttgcttcttttacgaatcgtcatcctcctgtcgaccggacctccccaaaacgttcgcccgcacgccgttttccccgccgtgaatccttcctcctcccgcgatggagacattcccgccaagggcaggaaggggaaggccggcaaggaccccaacaagcctaagagggctcccagcgctttcttcgtgttcatggaggaatttcgcaaggagttcaaggagaagaaccctaagaacaagtctgtcgctgcggtgggaaaagctgctggcgacaggtggaaatccctgagcgagtcggacaaggcttcctatgtagccaaggctaacaagctcaagctagagtacaacaagggcattgcagcctacaacaagggcgagagcactgcagc

SEQ ID NO: 2216 - DNA, 838 bp, Zea mays
  Clone ID: TF_ZmC677_11
ccgggagattttcgtgggcggataagcacattcacgcacatccacccgccgccacgcatcgcacgaactcccggtccgaaaggcaaaccagccaccagtcccaccaccaccaccctctgtcttcgcctccgctgccgattcgaaagcacccgtcctgtcccctcgcaaaaccctagctccagccaccatgaagggcaaggctgacacctccaagaaggacgagggcaggctccgcgagcggcaagcccaagcgcccgccctccgccttcttcgtcttcatgtctgaattcaggcaggagtatcaggcgctgcaccctggcaacaagagcgttgcgaccgtgagcaaggcagcaggggaaaagtggcgtgctatgtcagatcaagagaagcaaccatatgtggaccaagctggacagaagaagcaggactatgagaagactaaggcaaactttgataagaaggagagcacaagctcaaagaaggctaagactgaggatgaggatggctcgaagtcagaggttgatgatgaggatggcagcagtgacgaggaaaacgatgacgatgagtaaacactgtctccaaggtcacgaggtagcaaatcgagtgttaggtccccaattagcttactgttttgctgcctttaaatgttaagttgtttcaaacaggtgtttatgaaggggatctattaatttcgcgatgtcgttagtttagtgcattagcaaagaaaaagccgaatgctgctagctgttctgttgcttttcttttgctaaccacttgtgtcacaactttctgtacctgcttcattgactaatctagtgactagtcagttattggttcc

SEQ ID NO: 2217 - DNA, 1448 bp, Zea mays
  unsure (1)..(1448): unsure at all n locations
  Clone ID: TF_ZmC677_3
tcgggnatcacgcacatccacccgccgccacgcatcgcacaaacgcgctcccggtccgaaaggcaaaccagccaccagtcccaccaccaccctctgtcttcgcctccgctgccgattcgaaagcacccgtcctgtcccctcgcaaaaccctagctccagccaccatgaagggcaaggctgacacctccaagaaggacgagggcaggctccgggcgggcggcgccgccggaaagcgcaagaaggccgccgcgagcggcaagcccaagcgcccgccctccgccttcttcgtcttcatgtctgaattcaggcaggagtatcaggcgctgcaccctggcaacaagagcgttgcgaccgtgagcaaggcagcaggggaaaagtggcgtgctatgtcagatcaagagaagcaaccatatgtggaccaagctgggcagaagaagcaggactatgagaagactaaggcaaactttgataagaaggagagcacaagctcaaagaaggctaagactgaggatgaggatggctcgaagtcagaggttgatgacgaggatggcagcagtgacgaggaacgctatgcgcttccccacccaaaaggcaaaccaaccaccagtcccaccaccctccgcctccgcctgcgccacagctgccgattcgaaagccctcgtcctgacccctcgcaaaaccctagctccaaccaccatgaagggcaaggccaacgcctccaagaaggatgagggcaggctccgggccggcggcggcggcgccggaaagcgcaagaaggccgccgcgagcggcaagcccaagcgccctccctccgccttcttcgtcttcatgtctgaattcaggcaggagtaccaggcgcagcaccctagcaacaagagcgttgcggccgtgagcaaggcagcaggggaaaagtggcgctctatgtcagagcaagagaagcaaccctatgtggaccaagctgggcagaagaagcaggactatgagaagactaaggcaaatattgagaaggagagcacaagctcaaagaaggctaagactgatgacgacgatggctcgaagtccgaggtcgatgatgaggatggcggtagtgacgaggaaaacgacgacgacgagtaaatagtatctccgctgtcgtgaggtagcaaatcgattgttaggtccccaattagctcactggtttgctatctttaatgttaagttgtttggaacaggtgtttatgaaggggatctattagtttcgtgaggttgttagtttagtgcattagcaaagaaaaagccgaatgctgctagctattacgttgcttttcttttgctaatcacttgtgtcacaactctctgtacctgtttcattgactaatctagtgactagtcagttatgggtttaatgtttggttttggttttatatatttctttgttgcatccgaaaaaaaaaaaaaaaaaagcggcc

SEQ ID NO: 2218 - DNA, 948 bp, Zea mays
  unsure (1)..(948): unsure at all n locations
  Clone ID: TF_ZmC677_4
naacgcgctcccggtccgaaaggcaaaccagccaccagtcccaccaccaccaccctgtgtcttcgcctccgctgccgattcgaaagcacccgtcctgtcccctcgcaaaaccctagctccagccaccatgaagggcaaggctgacacctccaagaaggacgagggcaggctccgggcgggcggcgccgccggaaagcgcaagaaggccgccgcgagcggcaagcccaagcgcccgccctccgccttcttcgtcttcatgtctgaattcaggcaggagtatcaggcgctgcaccctggcaacaagagcgttgcgaccgtgagcaaggcagcaggggaaaagtggcgtgctatgtcagatcaagagaagcaaccatatgtggaccaagctgggcagaagaagcaggactatgagaagactaaggcaaactttgataagaaggagagcacaagctcaaagaaggctaagactgaggatgaggatggctcgaagtcagaggttgatgacgaggatggcagcagtgacgaggaaaacgatgacgatgagtaaacactgtctccaaggccacgaggtagcaaatcaagtgttaggtccccaattagcttactgttttgctgcctttaaatgttaagttgtttcaaacaggtgtttatgaaggggatctattagtttcgcgatgtcgttagtttagtgcattagcaaagaaaaagccaaatgctgctagctgttctgttgcttttcttttgctaaccacttgtgtcacaactttctgtacctgcttcattgactaatctagtgactagtcagttattggttcaatatttggtcttggttttatatatttctgtgttgcattctgtttgccctacggaagttgaggtgattcgttccttatgaatgggtcaatagctgcttctgactcttcggtgaatttgtgattcggttaattt

SEQ ID NO: 2219 - DNA, 884 bp, Zea mays
  Clone ID: TF_ZmC677_5
cacgcacatccacccgccgccacgcatcgcacgaactcccggtccgaaaggcaaaccagccaccagtcccaccaccaccaccctctgtcttcgcctccgctgccgattcgaaagcacccgtcctgtcccctcgcaaaaccctagctccagccaccatgaagggcaaggctgacacctccaagaaggacgagggcaggctccgggcgggcggcgccgccggaaagcgcaagaaggccgccgcgagcggcaagcccaagcgcccgccctccgccttcttcgtcttcatgtctgaattcaggcaggagtatcaggcgctgcaccctggcaacaagagcgttgcgaccgtgagcaaggcagcaggggaaaagtggcgtgctatgtcagatcaagagaagcaaccatatgtggaccaagctggacagaagaagcaggactatgagaagactaaggcaaactttgataagaaggagagcacaagctcaaagaaggctaagactgaggatgaggatggctcgaagtcagaggttgatgatgaggatggcagcagtgacgaggaaaacgatgacgatgagtaaacactgtctccaaggtcacgaggtagcaaatcgagtgttaggtccccaattagcttactgttttgctgcctttaaatgttaagttgtttcaaacaggtgtttatgaaggggatctattaatttcgcgatgtcgttagtttagtgcattagcaaagaaaaagccgaatgctgctagctgttctgttgcttttcttttgctaaccacttgtgtcacaactttctgtacctgcttcattgactaatctagtgactagtcagttattggttcaatatttggtcttggttttatatatttctgtgttgcattaa

SEQ ID NO: 2220 - DNA, 854 bp, Zea mays
  unsure (1)..(854): unsure at all n locations
  Clone ID: TF_ZmC176449_1
cccaaaatcggcgattgactcactcgaggccggccgggatacaattctcccacccaaattcgtctctacactcaacacgcctcaatacgtctttgtgactacatcaacaccacaaatccctttcttctaaattcatccctcagagcacaatcaaaatgcctaaggctgctgctcccgccaagcgtgcgaccagaactaagcgggccaagaaggaccccaacgctcccaagcgcggcctgtctgcctatatgttctttgccaacgaacagcgtgagaacgtccgtgaggagaaccctggtatctctttcggtcaagtcggcaagctcctcggtgagcgatggaaggccctcaacgagaagcaacgtgctccctacgaggctaaggctgccgctgataagaagcggtatgaggacgagaagcaggcctacaatgccgatcaggaagaagaggagtcttcttagaatggagcctccgatgtcaaacccaagcgtcgctcgcagaagaagtctgaatcggattagtcccagcaccagcgccgtgttgtagattctggccaggaagtccttcctctttgcattttggtctgggcggtgttgtatgatggcacaggaagagtgccttgttttttactaggaattttctcgggttaaggccgtccccgatgttatgatncttgagggcgatcgattgagctactggctttctatttcagtgtccttggccatgggnaaacagatcgtggaactcgnaggatcatggggacgagggaaacgcaatgcntttgtacaattaaagggaactcccgacccanataantcgaaactacgnnaaaaaacataaacgtcatnctacca

SEQ ID NO: 2221 - DNA, 406 bp, Zea mays
  Clone ID: TF_ZmC176449_2
cccaaaatcgcctctgcactcaatacgcttctgtacgtcttcgtgactacgtcaacaccacaaattactttcccccaagttcacctcccagaaatcaatcaaaatgcccaaggctgctgctggtaagcgcggtaaggccgagaagaccaagcgcggcaagaaggaccccaacgcccccaagcgtggcctctccgcctacatgttcttcgccaacgagcagcgtgagaacgtccgtgaggagaaccctggtatctctttcggtcaagtcggcaagctcctcggcgagcgatggaaggctcttaacgagaagcaacgagctccttatgaggccaaggctgccgctgacaagaagcgatacgaggatgagaagcaggcctacaacgccgaccaggaggaggaagagtct

SEQ ID NO: 2222 - DNA, 684 bp, Zea mays
  Clone ID: TF_4995920
ctccgctccccagtccccccgcaccctagccctcagcaaaccctaaccgctcgtcgccatgaaggacacctcgttcaaggccaccggcgccaagcgcaagaaggtcggcggcgccaagcgcgggctcacccccttcttcgcgtttttggctgagtttaggccgcagtacctggagaagcaccctgagctcaagggcgtaaaggaggtgagcaaggcggctggggagaagtggcgctctatgtcggatgaggagaaggcgaagtatggcagtagcaagaagcaggatggcaaagcaagcaagaaggagaacactagctccaagaaggccaaagctgatgttcgggagggagatgaagcagaaggttctaacaagtcaaaatctgaggttgaggatgatgagcaggatggtaatgaggatgaggatgagtaaatagtacgatggggaacagcagctttgcaattgagtgtttgctgctttacttatttttctatatgctgttccttttgatgttatatgctgtaaggaaaatctgtacatgatggtaccttagggtatggcatgctggagttcccctttagggtccgttcggttgacacggaatgggctaccggaactgttcctagccggattgcttcactaatttgtataagttttgatcagcaggaacaaaaaaaaaaaaaaaa

SEQ ID NO: 2223 - DNA, 828 bp, Zea mays
  Clone ID: TF_1845196
atgaagggcaaggccaacgcctccaagaaggatgaggccaggctccgggccggcggcggcggcgccggaaagcgcaagaaggccgccgcgagcggcaagcccaagcgccctccctccgccttcttcgtcttcatgtctgaattcaggcaggagtaccaggcgcagcaccctggcaacaagagcgttgcggccgtgagcaaggcagcaggggaaaagtggcgctctatgtcagagcaagagaagcaaccctatgtggaccaagctgggcagaagaagcaggactatgagaagactaaggcaaatattgagaagagcacaagctcaaagaaggctaagactgatgacgacgatggctcgaagtccgaggtcgatgatgaggatggcggtagtgacgaggataacgacgacgacgagtaaatagtatttccgctgttgtgaggtagcaaatcgattgttaggtccccaattagctcactggtttgctatctttaatgttaagttgtttggaacaggtgtttatgaaggggatctattagtttcgtgaggttgttagtttagtgcattagcaaagaaaaagccgaatgctgctagctattatgttgcttttcttttgctaatcacttgtgtcacaactttctgtacctgtttcattgactaatctagtgactagtcagttatgggtttaatgtttggttttggttttatatatttctttgttgcattctgtgcggtctacggaagtcatctgtgctgtatgaatgatgaatatctgcttgtggctcgtttcagtttagtgagtttttgtttaaaaaaaaaaaaaaaaaaaaa

SEQ ID NO: 2224 - DNA, 914 bp, Zea mays
  Clone ID: TF_ZmC677_10
gccgccgccgccggcccggagcctggcctcatccttcttggaggcgttggccttgcccttcatggtggttggagctagggttttgcgaggggtcaggacgagggctttcgaatcggcagctgtggcgcaggcggaggcggcgccggaaagcgcaagaaggccgccgcgagcggcaagcccaagcgccctccctccgccttcttcgtcttcatgtctgaattcaggcaggagtaccaggcgcagcaccctggcaacaagagcgttgcggccgtgagcaaggcagcaggggaaaagtggcgctctatgtcagagcaagagaagcaaccctatgtggaccaagctgggcagaagaagcaggactatgagaagactaaggcaaatattgagaaggagagcacaagctcaaagaaggctaagactgatgacgacgatggctcgaagtccgaggtcgatgatgaggatggcggtagtgacgaggataacgacccacgcgtccgaatttttttttttttttaatatgggcacaagagctttatttatgtccccaacacacgacgatgatgagcgaattgaaataaaggataatggaggatggaggtagtgacgaggataacgacgacgacgagtaaatagtatttccgctgttgtgaggtagcaaatcgattgttaggtccccaattagctcactggtttgctatctttaatgttaagttgtttggaacaggtgtttatgaaggggatctattagtttcgtgaggttgttagtttagtgcattagcaaagaaaaagccgaatgctgctagctattatgttgcttttcttttgctaatcacttgtgtcacaactttctgtacctgtttcattgactaatctagtgactagtcagttatgggtttaatgtttggttttggttt

SEQ ID NO: 2225 - DNA, 863 bp, Zea mays
  unsure (1)..(863): unsure at all n locations
  Clone ID: TF_ZmC677_14
cgaaagccctagtcctgccccctcgcaaaaccctagctccaaccaccatgaagggcaaggccaacgcctccaagaaggatgagggcaggctccgggccggcagcggcggcgccggaaagcgcaagaaggccgccgcgagcggcaagcccaagcgccctccctccgccttcttcgtcttcatgtctgaattcaggcaggagtaccaggcgcagcaccctggcaacaagagcgttgcggccgtgagcaaggcagcaggggaaaagtggcgctctatgtcagagcaagagaagcaaccctatgtggaccaagctgggcagaagaagcaggactatgagaagaccaaggcaaatattgagaaggagagcacaagctcaaagaaggctaagactgatgacgacgatggctcgaagtctgaggtcgatgatgaggatggcggtagtgacgaggataacgacgacgacgagtaaatagtatctccgctgtcgtgaggtagcaaatcgattgttaggtccccaattagctcactggtttgctatctttaatgttaagttgtttggaacaggtgtttatgaaggggatctattagtttcgtgaggttgttagtttagtgcattagcaaagaaaaagccgaatgctgctagctattaatttgcttttcttttgctaatcacttgtgtcacaactttctgtacctgtttcattgactaatctagtgactagtcagttatgggtttttttgccaaaaaaaaaaaaaaaaaaaaaaaaaaaaaaaaaaaaaaaaaaaaaaaaaaaaaaanaaagggcggccgccgactagtgagctcgtcgacccgggaattaattccggaccggtacctgcaggc

SEQ ID NO: 2226 - DNA, 575 bp, Zea mays
  Clone ID: TF_ZmC677_21
tctcccacgcgtccgcgaaagccctagtcctgccccctcgcaaaaccctagctccaaccaccatgaagggcaaggccaacgcctccaagaaggatgagggcaggctccgggccggcagcggcggcgccggaaagcgcaagaaggccgccgcgagcggcaagcccaagcgccctccctccgccttcttcgtcttcatgtctgaattcaggcaggagtaccaggcgcagcaccctggcaacaagagcgttgcggccgtgagcaaggcagcaggggaaaagtggcgctctatgtcagagcaagagaagcaaccctatgtggaccaagctgggcagaagaagcaggactatgagaagaccaaggcaaatattgagaaggagagcacaagctcaaagaaggctaagactgatgacgacgatggctcgaagtctgaggtcgatgatgaggatggcggtagtgacgaggataacgacgacgacgagtaaatagtatctccgctgtcgtgaggtagcaaatcgattgttaggtccccaattagctcactggtttgctatctttaatggtaagttggctggaac

SEQ ID NO: 2227 - DNA, 905 bp, Zea mays
  Clone ID: TF_ZmC677_6
accaccctgtcccgcgtccctgccttttcccgttcacgtacacacacgcgaccaaaaaccgcacaaacgcgctcggcgcttccccacccaataggcaaaccaaccaccagtcccaccaccctccgcctccgcctgcgccacagctgccgattcgaaagccctcgtcctgtcccctcgcaaaaccctagccccaaccaccatgaagggcaaggccaacgcctccaagaaggatgagggcaggctccgggccggcggcggcggcgccggaaagcgcaagaaggccgccgcgagcggcaagcccaagcgccctccctccgccttcttcgtcttcatgtctgaattcaggcaggagtaccaggcgcagcaccctggcaacaagagcgttgcggccgtgagcaaggcagcaggggaaaagtggcgctctatgtcagagcaagagaagcaaccctatgtggaccaagctgggcagaagaagcaggactatgagaagactaaggcaaatattgagaaggagagcacaagctcaaagaaggctaagactgatgacgacgatggctcgaagtccgaggtcgatgatgaggatggcggtagtgacgaggataacgacgacgacgagtaaatagtatttccgctgttgtgaggtagcaaatcgattgttaggtccccaattagctcactggtttgctatctttaatgttaagttgtttggaacaggtgtttatgaaggggatctattagtttcgtgaggttgttagtttagtgcattagcaaagaaaaagccgaatgctgctagctattatgttgcttttcttttgctaatcacttgtgtcacaactttctgtacctgtttcattgactaatctagtgactagtcagttatgggtttaaaaattggttttggtttt

SEQ ID NO: 2228 - DNA, 506 bp, Zea mays
  Clone ID: TF_ZmC190193_1
attcggctcgagtcaaccgcaaacctcaccgttctggtcgtaggaagaaaaacaaaagaaggtgggaccccaattatccaaagccgaataggagtggctataacttcttctttgctgaaaagcattacactctcaaaactctctacccaaacagagaaagggagtttaccaaaatgattggccagtcatggaacagtcttagcccagaagaaagaatggtttatcagaacattggcttaagagacaaagaaaggtacaagagagaattgacggagtacaaagagaagatgaagcttaggcagacctcagaagttggacgtccatagaatctcattggtacccgtttgtggaggcgaaagaatggcttagaaaatttttataatctgttgacttttacgtgcatattgttgtggataatggtccactggactgtggtctacagaactattgtttttttcttttcaaaagagaaaactagtgtctattgttagtcagagaccctttca

SEQ ID NO: 2229 - DNA, 664 bp, Zea mays
  Clone ID: TF_ZmC518120_1
atctccccccggcgagcccacccccaagcacacgcagcgcccgcctccaccaccccacccctctctccgatctcaaggttggcggccggcggcaggatgaaggccaaggcgggctcccgcgccggcgactccaggctcgcggtgaagaagagcaaggccgagaaggaccccaacaagcccaagcggcccccgagcgccttcctcgtcttcatggacaccttcaggaaggagtacaaggagaagcaccccgacgtcaagcaggtctccgtgattggcaaggccggtggtgagaagtggaagtctctgagtgatgctgagaaggctccctatgctgccaaggccgagaagctcaaggccgagtacgccaagaagatcgacgcctacaacaacccgcaggcaggagaggcgtccggcgactctgacaagtccaagtccgaggtgaacgacgaggatgacggcagcgagggcgacgagtgaagcggcacgccaagcagccgcagcagggggagggggtctctggaacgtggccgttgctgctcattgctggtgtcactgatcgatgatggatgttcgctgctagtttagctccatggtagtccctccctctctttcaggttgctgctgctgatggcgatgatagaaatggtagctctagtcccatcta

SEQ ID NO: 2230 - DNA, 641 bp, Zea mays
  Clone ID: TF_LIB5116-064-A1-PF1-E12
tttcaaacattctccccctttcgttgtccttccccgtcccattccctccgcttcccagtccgcagcagttccgcaccgacaccctcaccctccccaaagccctaaccgctcgcccgctccgccgccatgaggtccaaggccaacggagacaccgcgttcaaggcctccggcaagaacaagacggccaccggcggcgtcgccaagccgaagcgcgcccccacccccttcttcgccttcctggctgagttcaggccacagtacatggagaagcaccccgaggcaaagggcgtcgcggccgtcaccaaggcggctggggagaagtggcgcagcatgtcggatgaggagaaggcaaagtatggcggcaagaaggcagatgccccagcaagcaaggcggtgaacaagaaggagagcaccagctccaagaagaccaagactaacgctgacgaagaaggttctgacgttgaggatgatgaggaggatgaggagtaaatagtagatgagggaacagcagcggtgcaaatcagcgtttgctgcttagggtttagattgccatgtcgatgtccggattatgtaatgttatgtaaggagaatgtttagatgcgtactcctgggctgtggcatgctggagatgtctttgtttg

SEQ ID NO: 2231 - DNA, 1550 bp, Zea mays
  Clone ID: TF_ZmC677_2
cccacgcgtccgcccttgcgtccgccgggccgggccgggacacgcccaaccaccaccaccaccctctctgtcttcgcctccgctgccgattcgaaagcacccgtcctgtcccctcgcaaaaccctagccccagccaccatgaagggcaaggctgacacctccaagaaggacgagggcaggctccgggcgggcggcgccgccggaaagcgcaagaaggccgccgcgagcggcaagcccaagcgcccgccctccgccttcttcgtcttcatgtctgaattcaggcaggagtatcaggcgctgcaccctggcaacaagagcgttgcgaccgtgagcaaggcagcaggggaaaagtggcgtgctatgtcagatcaagagaagcaaccatatgtggaccaagctggacagaagaagcaggactatgagaagactaaggcaaactttgataagaaggagagcacaagctcaaagaaggctaagactgaggatgaggatggctcgaagtcagagcttgatgatgaggatggcagcaccgcgagcgaaccgggaaacgcgctcggcgcttccccacccaaaaaggaaaaccaaccaccactcccaccaccctccgcctccgcctgcgccacagctgccgattcgaaagccctcgtcctgacccctcgcaaaaccctagctccaaccaccatgaagggcaaggccaacgcctccaagaaggatgaggccaggctccgggccggcggcggcggcgccggaaagcgcaagaaggccgccgcgagcggcaagcccaagcgccctccctccgccttcttcgtcttcatgtctgaattcaggcaggagtaccaggcgcagcaccctggcaacaagagcgttgcggccgtgagcaaggcagcaggggaaaagtggcgctctatgtcagagcaagagaagcaaccctatgtggaccaagctgggcagaagaagcaggactatgagaagactaaggcaaatattgagaaggagagcacaagctcaaagaaggctaagactgatgacgacgatggctcgaagtccgaggtcgatgatgaggatggcggtagtgacgaggataacgacgacgacgagtaaatagtatttccgctgttgtgaggtagcaaatcgattgttaggtccccaattagctcactggtttgctatctttaatgttaagttgtttggaacaggtgtttatgaaggggatctattagtttcgtgaggttgttagtttagtgcattagcaaagaaaaagccgaatgctgctagctattatgttgcttttcttttgctaatcacttgtgtcacaactttctgtacctgtttcattgactaatctagtgactagtcagttatgggtttaaaaaaaaaaaaaaaaaaaaaaaaaaaaaaaaaaaaaaaaagaccataaggacccacaagctcccgccttctgttccctttcactgagtgtgaattgcttcgattggagggacccggcccctcgctcgcctcctgcctgtgtttggtttccggtcgctatttctcaccccttgcctagccca

SEQ ID NO: 2232 - DNA, 715 bp, Zea mays
  Clone ID: TF_LIB5025-006-R1-XP-E8
gccggccgggccgggctaataataaataaaaaatgtcattgagcaagttattcagcaatttaacgattcaaacgcgtagcattagcagctacagacatatgcaccctaccaaatttgttagcattttgcaaaatgtaccaatgaaaccccgtagtgcttggcaagtctatatcagggagcacctcaaaggcacaaagacaacccaagagggattgaccaaatcttcaaccgaattatctgccaagtggaaagctttatctgaacatgagaagcagaaatattacactatatatgaatcagaaaaggacgcttatgaaaaagcctttgctgtagctgtgaacaatgcttcgcctaaacaattttaccaagaaaatttgttgagaaaaaaatacaagttgcccttgttggttgatcccaaaaaaccaaagagaccacttaatgcatatttatcttactatcaagcacttagagattccaaacatgcttcaatggaaggacaacctgttgctgaacaagctaaaattgttggacgtttgtataaggagcttcctgaatcagaaaagaagatttataaagacaaggctaatcaagcaatggaacaatacaagaagcaagtagctgaatacaacagagaagctggtatacatgcctaagaatgaactttaatttttttttttttttttgggaaaataaaccttttttgtcttttattttt

SEQ ID NO: 2233 - DNA, 748 bp, Zea mays
  Clone ID: TF_ZmC37456_1
gggtacctcgaggccggccggggaaaaccgaccaccatctccacctcgccgccgccgctcggatttccctctacctcaccctgtccggctccatggcgaccgccgcggtggagagcaagaggggcagcgcccggggccgcaaggcgctcgtggccgtgctcgacaacgaggctaacatctccgccgggaaggctgcccaggccgccgatctctcgtcctgctcagcgcagaagaaggcgaagcgggcgccgtcaaggagcagcaaggccaaggccgccgcggcgtcggcggtcgtggtcgtggacgacatagccgagctgcaggggatgctggagcgcctgcggctggagaaggagaaggcggaggagatggttagggagcgggatgaggtcatccggaagaaggaggaggagatcgagaccagagacaaggagcaggagcgtctccaggccgagctcaggaaggcgcaacgcgccaaggagttcaagcctaccgtgagcttccccctcgtcaagtcgttgctggagaaagagcaagaagcagacgacaagggaaagaagaagaaggggaagggcggccacgagaggaagaagccgtgcccggcgtacgtgctctggctcaaggaccagtggaccgaggtcaagaaggagaaccctgagcccgacttcaaggaggtgtccaacacgctgggcgccaagtggaaggctctgggcgccgaggagaagcagccctatgaggatcgataccg

SEQ ID NO: 2234 - DNA, 1033 bp, Zea mays
  Clone ID: TF_ZmC137_2
aactgaactttaaccaaacaccgccgaaggcaaccagcccaaccttcacgcaccgcatttcccaagggaaccataccagagcggcagagccttcccctccgctccccagtcccacccgcaccctagccctcagcaaaccctaaccgctcgtcgccatgaagcacccctcgttcaaggccaccggcgccaagcgcaagaaggtcggcggcgccaagcgcgggctcacccccttcttcgcgtttttggctgagtttaggccgcagtacctggagaagcaccctgagctcaagggcgtaaaggaggtaagttgcttcttctcaccctaggcatgtagctgggtttcgcttaggtggctggtatatgcctttgctcgtcggtgactttgcttataggtgagcaaggcggctggggagaagtggcgctctatgtcggatgaggagaaggcgaagtatggcggtagcaagaagcaggatggcaaagcaagcaagaaggagaacactagctccaagaaggccaaagctgatgttcgggagggagatgaagcagaaggttctaacaagtcaaaatctgaggttgaggatgatgagcaggatggtaatgaggacgaggatgagtaaatagtacgatggggaacagcagctttgcaattgagtgtttgctgctttacttatttttctatatgctgttccttttgatgttatatgctgtaaggaaaatctgtacatgatggtaccttagggtatggcatgctggagttcccctttaacccgaagagccggatacttttgccagcctcgtcagcatgtgtaaacagttgttttcttgttttatcgacttattgggtgactacccaagagttggtttgtagtcaatgaggtatgctgccccctgtggtgctacgcagctgcagcaacatcagatggtcaggctaaaatcatgttgtgggatctgattctaatgatgcttatttagtactattacaaatatctatcgttgcttatataaatttgttaaaccttgagatatttttacc

SEQ ID NO: 2235 - DNA, 877 bp, Zea mays
  Clone ID: TF_ZmC677_13
ctatagaagagctatgacgtcgcatgcacgcgtacgtaagctcggaattcggctcgagccaccctccgcctccgcctgcgccacagctgccgattcgaaagccctcgtcctgacccctcgcaaaaccctagctccaaccaccatgaagggcaaggccaacgcctccaagaaggatgagggcaggctccgggccggcggcggcggcgccggaaagcgcaagaaggccgccgcgagcggcaagcccaagcgccctccctccgccttcttcgtcttcatgtctgaattcaggcaggagtaccaggcgcagcaccctggcaacaagagcgttccggccatgatgtcttattttttcgtgttggtggatcaggtgagcaaggcagcaagggaaaagtggcgctctatgtcagagcgagagaagcaaccatatgtggaccaagctgggcagaagaagcaggactatgagaagactaaggcgaactttgagaagaaggagagcacaagctcaaagaaggctaagactgatgatgacgatggctcaaagtctgaggttgacgatgaggatgacgaggacgatgagtaaatactgtctccgcagtcatgagatagcaaatcgagtgttaggtccccaactagcttaccggcttgttatctttaatgttaagttgtttggaacaggtgtttatgaaggggatctattagtttcgtgaggttgttagtttagtgcattagcaaagaaaaagctgaatgctgctagctgttctgttgcttttcttttgttgctgctagctgttctgttgcttttcttttgctaaccacttgtcacaactttctgtacctgtttcattgactaatctagtgactagtcagttattggttt

SEQ ID NO: 2236 - DNA, 709 bp, Zea mays
  Clone ID: TF_ZmC1209466_1
ttttttttttttttttgaccttcgtatccttttttttctactttatttcgtagccaatgaagaaaacaacaacaaatgtaatcaagaacagatagagtagcagtaatagtagtacacatttagaagaacaagacagaaacagttgtacacaaaaaaatagagagaaagagagagaaaaagagacaagcacgagttttatgtgttcaaatatctcttttttcacatacaaaacaagaatgtcattctacaacaatataacaagtagtatatagaaaaaaaattctgaactcgacaaaggaaaaggataaggaacggttagagatttaattttattttagtttatttattcttcatcgtcttcatcttcatcatcgtcatcatcatcatcatcattatcttcatcggatgatttcgattttgctgcaggtttctttttaccacctttagctggtgcagcctttttgcttccacctttagcagcacctttaccgcctttggcaggtgaactactagcaccaccaccaccgcttttcttgtattcagcaacacgtacttcatacttttgcttttcaacagcggctttttgttcataacgttttctaacatcatcactaacttttttccatcttgcaccgatttcttttgaaatatcaccaacggataatgatggactttttttcttatatctggtcgtcatcttgtgaaaaga

SEQ ID NO: 2237 - DNA, 520 bp, Zea mays
  Clone ID: TF_LIB3067-045-C4_FLI
ccaacgcctccaagaaggatgagggcaggctccgggccggcggcggcggcgccggaaagcgcaagaaggccgccgcgagcggcaagcccaagcgccctccctccgctttcttcgtcttcatgtctgaattcaggcaggagtaccaggcgcagcaccctagcaacaagagcgttgcggccgtgagcaaggcagcaggggaaaagtggcgctctatgtcagagcaagagaagcaaccctatgtggaccaagctgggcagaagaggcaggaccttcaaagggtggtgccaccagagcgagaactgcatcaccgtctgcaagagcgagggcaataccggcgggttctgcaagctcggggcttgcatgtgcaccaaagagtgtgtcgggagtactggcgctgctggtgctaataaagccccacagcagcatttgagttgatgagtagtaatgaagaacgcttttgttatgccagcgcaagctctagaatttgaggccgagatgaccaaaaataaatgattttgtt

SEQ ID NO: 2238 - DNA, 689 bp, Zea mays
  Clone ID: TF_LIB4729-127-A1-K1-B9
accctccgtctccgcctgcgccacagctgccgattcgaaagccctcgtcctgacccctcgcaaaaccctagctccaaccaccatgaagggcaaggccaacgcctccaagaaggatgagggcaggctccgggccggcggcggcggcgccggaaagcgcaagaaggccgccgcgagcggcaagcccaagcgccctccctccgccttcttcgtcttcatgtctgaattcaggcaggagtaccaggcgcagcaccctagcaacaagagcgttgcggccgtgagcaaggcagcaggggaaaagtggcgctctatgtcagagcaagagaagcaaccctatgtggaccaagctgggcagaagaagcaggactatgagaagactaaggcaaatattgagaaggagagcacaagctcaaagaaggctaagactgatgacgacgatggctcgaagtccgaggtcgatgatgaggatggcggtagtgacgaggaaaacgacgacgacgagtaaatagtatctccgctgtcgtgaggtgtttatgaaggggatctattagtttcgtgaggttgttagtttagtgcattagcaaagaaaaagccgaatgctgctagctattacgttgcttttcttttgctaatcacttgtgtcacaactctctgtacctgtttcattgactaatctagtgactagtcagtta

SEQ ID NO: 2239 - DNA, 1008 bp, Zea mays
  unsure (1)..(1008): unsure at all n locations
  Clone ID: TF_ZmC677_7
cattgggtacctcgaggccggccgggctccgcctccgcctgcgccacagctgccgattcgaaagccctcgtcttgtcccctcgcaaaaccctagctccaaccaccatgaagggcaaggccaacgcctccaagaaggatgagggcaggctccgggccggcggcggcggcgccggaaagcgcaagaaggccgccgcgagcggcaagcccaagcgccctccctccgctttcttcgtcttcatgtctgaattcaggcaggagtaccaggcgcagcaccctagcaacaagagcgttgcggccgtgagcaaggcagcaggggaaaagtggcgctctatgtcagagcaagagaagcaaccctatgtggaccaagctgggcagaagaagcaggactatgagaagaccaaggcaaatattgagaaggagagcacaagctcaaagaaggctaagactgatgacgacgatggctcgaagtccgaggttgatgatgaggatggcggtagtgacgaggaaaacgacgacgacgagtaaatagtatctccgctgtcgtgaggtagcaaatcgattgttaggtccccaattagctcactggtttgctatctttaatgttaagttgtttggaacaggtgtttatgaaggggatctattagtttcgtgaggttgttagtttagtgcattagcaaagaaaaagccgaatgctgctagctattacgttgcttttcttttgctaatcacttgtgtcacaactttctgtacctgtttcattgactaatctagtgactagtcagttatgggtttaatgtttggttttggttttatatatttctttgttgctttctgtgcggcctacggaagtcatctgtgctgtatgaatgatgaatatgtgcttgtggctcgtttcattttaaaaaaagaacccganggaaaaatataccaactgatattgttttgggacaaggactattctgggaaggggctttnggtcagattacactcaagaattaacatgacatg

SEQ ID NO: 2240 - DNA, 1387 bp, Zea mays
  Clone ID: TF_ZmC4984_1
taccggtccagaattaccgggtcgacccacgcgtttactcagggttctccttcttgacctccgtccacttcaaggaggtttccaaaacgctgggcgccaagtggaaggctctgggcgccgaggagaagcagccatatgcggaacggtaccgccaggagaaagaggcctacctgcaggtggttggccaggagaagcgcgaggccgaggcgatgcagcttctcgcgcagcaaccgatgcagtggaccgccaaggagctgctgggtcagtacctcaagttcaggcaggaggccgaggagggtgactgcaagaaggggaggaagaagaagagcaagaaggacaaggacccctccaagcccaagcagcccatgtcggcctacttcgtgtactcgcaggagaggcgtgccacgctggtcgcggagaagaagagtacctgagattggcaagatcaccggggaagaatggaagaacatgacagaaggtcagagggctccctatgaggaggtcgcgaggaagcagaaggaagagtaccacaagcagatggaggtgtacaagcagaagaaggctgaggaagctgctagtcttgagaaggaagagcaggagcataagaaaatcatgaagcatgaggctctccagctgctcaagaagaaggagaaggcagataatatcatcaagaaaaccaaagaaaagcgccagaagaagaaacaggagaacgctgatcccaaccggcccaagaggccagcctcttcctttcttcttttcagcaaggaagagaggaaacagctgatcgaggaacgcccgggcatcaataactcaaccctgaacgcgctcatcacggtgaagtggaaggaactgagcggcgaggagaggcaggcctggaatgcaaaggccgcgcctgccatggctgcgtacaagaaggagatggaggagtacactaaggcccaaagctcatctgcttgacagaataactaattcctgcgagtgagctttggttacaaggatcctcatctctgaatcctggtgtggtagattacttcgtgtgatctttagctttgtgtgaccttattagtcgcagcaatcagtgtaatggcggttcatatggtttagtggcagtttatattgttgccacgagcccaggaattgagtaatctttcagttctgacagaataactaattcctgcgaatgatctttggttacaaggatcctcatctctgaattcctggtttggttagattacttcgtgtgatcgttagctttctgtgaccttattagtcgcagcaatcagctgtagtgccccccaccccatggttttctgatcctgttttattgttgccgcgcccccccgaattgagtaatctttcagttctgacaaaaaaaaaaaaaaaaaaa

SEQ ID NO: 2241 - DNA, 689 bp, Zea mays
  unsure (1)..(689): unsure at all n locations
  Clone ID: TF_ZmC4984_2
ggccgagctcaggaaggcgcaacgcgtcaaggagttcaagcctaccgtgagcttccccctcgtcaagtcgttgctggagaaagagcaagaagcagacgacaagggaaagaagaagaaggggaagggcggccacgagaggaagaagccgtgcccggcgtacgtgctctggctcaaggaccagtggaccgaggtcaagaaggagaaccctgaggcagatttcaaggaggtgtccaacacgctgggcgccaagtggaaggctctgggcgccgaggagaagcagccctatgaggagcggtaccgccaggagaaggaggcctacctgcaggtggttggccaggagaagcgcgaggccgaggcgatgaagcttctcgaggagcagcagatgcagtggaccgccaaggagctgctggatcagtacctcaagttcaggcaggaggccgaggagggtgactgcaagaagggngaggaagaataagagcaagaaggacaaggacccctccaagcccaagcagcccatgtcggcctacttcgtgtactcgcaggagaggcgtgccacgctggtcgcggagaagaagaatgtacctgagattggcaagatcaccggcgaagaatggaagaacatgacagaaggtcagagggctccctatnaggaggtcgcgaggaagcagaaggaagagtaccacaagcag

SEQ ID NO: 2242 - DNA, 706 bp, Zea mays
  Clone ID: TF_ZmC13336_1
aagaaggaccccaacgcccccaagcgcggtctctctgcttacatgttcttcgccaatgagaaccgtgagcgcgtccgagacgaaaacccaggcattgcctttggtgcccttggtcgtaagctcggtgagctgtggaagggattgagcgacgccgagcgcaagccatacgaagacaaggccgccgccgacaagaagcgttacgaggaccagaaggccacttacttggctggtggagatgacgatgaagaatcttcctaaatatctttttcaatatttctttcaactccaaagagacgagaaagaaaaaaaaatcatccctcagtgtatgattatatttcattaggaattttttcctctggtcgtcggtctgatggttcttgtcttgctcttacctatgatatcgcttgcatagcctatgctaatggctatctctttgacacgtttctcttttattaatctctggttcctacggtatgggctgacggggttctttgtattctttccacgtggttgttacttctttttatgtgatgccagttcgttttcttagttacggttgcgcgaggggtttttagtcaaatatggaaaatctttgtgcttttcgtctgatctcatcgtccgattcatgtaattcgattgcacgcctacgaaaactaagtgtctaggaaaataggagacaaagtcagaagaaagcagatgaaattat

SEQ ID NO: 2243 - DNA, 1066 bp, Zea mays
  Clone ID: TF_ZmC1672_1
gctcgtatcggggagcattgggtacctcgaggccggccgggcgggcactcgcatcagagcggcgccggcctacaaccgttttcgtgctcacacacccaaaccttagtcgcgatcaggccccaaggactcgagatgaagtcgagggcacggtccaccgccggcgactccaggctctcggtgaggaagaccaaggctgagaaggacccaaacaagcccaagaggcctccgagcgcgttcttcgtcttcatggaggagttcaggaaggactacaaggagaagcaccccaatgtgaagcaagtctccctgattggcaaggctggtggtgacaagtggaagtccctgtctgatgccgagaaggctccctacgtgtctaaggcagagaagctcaaggctgagtacaccaagaagatcgacgcttacaacaacaagcagtctggagaccccacggcgtctggtgattccgacaagtccaagtccgaggtgaacgacgaggacgaggagggtgacgagtgatgtatgacggatgaaactctgtccaagtgtttgcagtcagggaaaaaatctcgtcgttgtcggcctaaccgggttttctcgaaggactttctagatgcagtagattagtgccgtcttctgagtagtttccttgcaagtgtcgtcccgtccctggagtgaggcagtttagtttgtagtttcttcgcttcatcggcactcgaccgttgttggattgggatgtttagcctgcagtctgtacttaccccaagcatctatggtgcctgttttaaatctcagatcacaatagacgtttgttttaaatcacaaaaaaaaaaaataataaattctcagatcacaatagacgtttttcctaaaaagtaaaaaaacgtccctggagtgaggcagtttagtttgtagtttcttcgcttcatcggcactcgaccgttgttggattgggatgtttagcctgcagtctgtacttaccccaagcatctatggtgcctgttttaaatctcagatcacaatagacgtttgttttaaaaaaaaaaaaaaaaaaatccgtagggcctctaaa

SEQ ID NO: 2244 - DNA, 1182 bp, Zea mays
  Clone ID: TF_ZmC1672_3
acgccacgataaggccaaacaagcggtaaccttgaacaagggaagagaattgacttcctgggtcagtcatagcaaatgcatcggcagctgcgcatgcaatgaagtccagggctgccaactgagatgagaagttcctacgtgctcacacacccaaaccttagtcgcgatcaggccccaaggactcgagatgaagtcgagggcacggtccaccgccggcgactccaggctctcggtgaggaagaccaaggctgagaaggacccaaacaagcccaagaggcctccgagcgcgttcttcgtcttcatggaggagttcaggaaggactacaaggagaagcaccccaatgtgaagcaagtctccctgattggcaaggctggtggtgacaagtggaagtccctgtctgatgccgagaaggctccctacgtgtctaaggcagagaagctcaaggctgagtacaccaagaagatcgacgcttacaacaacaagcagtctggagaccccacggcgtctggtgattccgacaagtccaagtccgaggtgaacgacgaggacgaggagggtgacgagtgatgtatgacggatgaaactctgtccaagtgtttgcagtcagggaaaaaatctcgtcgttgtcggcctaaccgggttttctcgaaggactttctagatgcagtagattagtgccgtcttctgagtagtttccttgcaagtgtcgtcccgtccctggagtgaggcagtttagtttgtagtttcttcgcttcatcggcactcgaccgttgttggattgggatgtttagcctgcagtctgtacttaccccaagcatctatggtgcctgttttaaatctcagatcacaatagacgtttgttttaaaaaaaaaaaaaaaaaagcggcctcgagctctgatggagacagaagggtttctttagttactaaagcaggataaagacgacttatggcagccatcctatccttccctccataaatttcagcacctgcaacgtatatatttgtgctgcgcttgaaaccaatagctgctagcataagcacagcctcttcaggtgcaaggggacatttgccttcggaccgtaagaaagcagcagagggcaactttgtcatcttcttgagttctgacaacacaggaaagtgaatttggcgataagcttctagttcgtccggacgcgtggg

SEQ ID NO: 2245 - DNA, 928 bp, Zea mays
  Clone ID: TF_ZmC1672_4
ccggccgggatcacgtagtcctagcggagggcagtagcaagcggcgcgccgcgcggccaatgggaggcgagtggccggatcggtgacgtgcctaaaaaatttcagatcccgcgcaaatgcccaccgccccttactttaaaagccgcccccttgtgggcctcggttgcgactcgcatcagagcggcgccggcctacaaccgttttcgtgctcacacacccaaaccttagtcgcgatcaggccccaaggactcgagatgaagtcgagggcacggtccaccgccggcgactccaggctctcggtgaggaagaccaaggctgagaaggacccaaacaagcccaagaggcctccgagcgcgttcttcgtcttcatggaggagttcaggaaggactacaaggagaagcaccccaatgtgaagcaagtctccctgattggcaaggctggtggtgacaagtggaagtccctgtctgatgccgagaaggctccctacgtgtctaaggcagagaagctcaaggctgagtacaccaagaagatcgacgcttacaacaacaagcagtctggagaccccacggcgtctggtgattccgacaagtccaagtccgagggtgacgagtgatgtatgacggatgaaactctgtccaagtgtttgcagtcagggaaaaaatctcgtcgttgtcggcctaaccgggttttctcgaaggactttctagatgcagtagattagtgccgtcttctgagtagtttccttgcaagtgtcgtcccgtccctggagtgaggcagtttagtttgtagtttcttcgcttcatcggcactcgaccgttgttggattgggatgtttagcctgcagtctgtacttaccccaagcatctatggtgcctgttttaaatctcagatcacaataaaaagaaaaaaaaaaaaaaaaaagcggcc

SEQ ID NO: 2246 - DNA, 381 bp, Zea mays
  Clone ID: TF_ZmC146668_1
cgccggcaagcgcaagaaggccaccacgagcggcaagcccaagcgcccgccctccgccttcttcgtcttcatgtctgaattcaggcaggagtatcaagttcaacaccctggcaacaagagcattacggctgttagtcaccttgcactctgctctccctttattttttggtgcgtttgcagatgtgattctttgttcgtattggtggatcaggtgagcaaggcagcaggggagaagtggcatgctatgacagattaagttgcattgtacaatcatatatggaagcagctcaaggatgcaccaaaatgatcaacttccaaacgtatggaacatgtgaaacctgtagtctgtagatgcaaaaatgatctgatgataccataatt

SEQ ID NO: 2247 - DNA, 742 bp, Zea mays
  Clone ID: TF_LIB4738-132-A1-K1-D9
agctccctctcctctggctgccgctctccacagtcctcgggctccaagccttgcgtaaaccccgacccccacgcgcatagatgaagactaggtcgcagacgtcgccgaagcctctcaagacggtggcgatggctcccaggccgagcagcaccaagcggaagccgaggcccaagccggcggggaagggcgacccccgcgcacccaagaagccacccaccgccttcttctacttcatggaggattttcgcaagatctataagcaagaaaaaccaagtgtaaaatcaatgcaggaaatagggaaggcatgtggcgaaaaatggaatacaatgacatttgaggaaaaggtcaagtattatgatatagctactgagaaacgtgcagaatttgagaaggcgatgattgaatataacaagaaaaaggaaagctgaacatttgtctgttccaaattcccgatggttcactgtaactggatgaatcaatcagctgtatattacagaactgtgatttttagtggaatttataaataccactagttggaaccgtcagctcacgcagatatgtatcttttgtagtcgacttgcacattttgatgacaccgagtcttctacccggtgtttttcatctggagataatttgtgtttcgtgctaactgctcgttaaattgcttattatagagttgtatgtatgattgtgtatataataatgtcctccaacgcaaaaaaatatatatattatcacagcg

SEQ ID NO: 2248 - DNA, 743 bp, Zea mays
  Clone ID: TF_ZmC2000_1
cgagggcggcctcgaggcgggactgggctccctctcctctggctgccgctctccacagtcctcgggctccaagccttgcgtaaaccccgacccccacgcgcatagatgaagacgaggtcgcagacgtcgccgaagcctctcaagacggtggcgatggctcccaggccgagcagcaccaagcggaagccgaggcccaagccggcggggaagggcgacccccgcgcacccaagaagccacccaccgccttcttctacttcatggaggattttcgcaagatctataagcaagaaaaaccaagtgtaaaatcaatgcaggaaatagggaaggcatgtggcgaaaaatggaatacaatgacatttgaggaaaaggtcaagtattatgatatagctactgagaaacgtgcagaatttgagaaggcgatgattgaatataacaagaaaaaggaaagctgaacatttgtctgttccaaattcccgatggttcactgtaactggatgaatcaatcagctgtatattacagaactttgatttctagtggaatttatagataccactattggaaccgtcagctcacgcagatatgtatcttctgtagtcgacttgcatattttgatgacaccgagtcttttactggtggttttcatctggatataatttgtgtttcgtgctaactgctcgttaaattgcttattatggagttgtatgtatgattgtgtataaaaaaaaaaaaaaaaaagcggcc

SEQ ID NO: 2249 - DNA, 603 bp, Zea mays
  Clone ID: TF_LIB3078-029-Q1-K1-F11.R2
cccacgcgttcgcctttctccttgtctccgtctctcggcaggcggaccgtcagaggcaattttgccctgaattctaccccggtgagcgggaccgccaccgggattccctgctccaagcgcggatctgagcgctgcgcttcgagtccgcggtcgaatgcgccaagaagggggccaaatacaagggcgccgccaaggtcgatgccaagatggcggtgaagaacaagggggccgagaaccccaacgggggcacgaaagggaacgccgacaaggaccccaactagcctaagagggcttccagcgctatgttagagttcatggaggaatttcgggaggagatcacggagaacaaccctctgaacaagtctgtcaatgctgtggggaaagcttgtagccacaggaggaaatccctgagcgattcgtataaggctacctatgtaaccaaggctaacaagctcaagctggagtacaataacgacatcagtgactacagcactggcgatagcactgctgctaacaaggctcatgacgaggaggaagaagaggaatatgaagaggactctgacgagttcaatgacgaggacaatgacgagggtcatgaagagg

SEQ ID NO: 2250 - DNA, 260 bp, Zea mays
  Clone ID: TF_LIB3151-003-Q1-K1-E11
tcgatccaagtcacatactaagagtgccaagctatccgcgaaattccaagctggaaagaaatgggagaaagcttcccaggatccaaacaagccaaaaagaccccctagagccttctttgctttcatagaagagttccgtgagcaatacaagaaggatcaccctaaaaacaaatcccctgcgggtgtcggaaaagcttgtggagattaattgaagagcttgtcttaaactaaaaaagcaccttatgtatctaaagcataaa

SEQ ID NO: 2251 - DNA, 1001 bp, Zea mays
  Clone ID: TF_ZmC137_1
ttgggtacctcgaggccggcgggtacctcgaactgcacccgggcccgggaacaaatcccgccgaaggcaaccagcccaaccttcacgcaccgcatttcccaagggaaccataccagagcggcagagccttcccctccgctccccagtcccacccgcaccctagccctcagcaaaccctaaccgctcgtcgccatgaaggacacctcgttcaaggccaccggcgccaagcgcaagaaggtcggcggcgccaagcgcgggctcacccccttcttcgcgtttttggctgagtttaggccgcagtacctggagaagcaccctgagctcaagggcgtaaaggaggtgagcaaggcggctggggagaagtggcgctctatgtcggatgaggagaaggcgaagtatggcggtagcaagaagcaggatggcaaagcaagcaagaaggagaacactagctccaagaaggccaaagctgatgttcgggagggagatgaagcagaaggttctaacaagtcaaaatctgaggttgaggatgatgagcaggatggtaatgaggacgaggatgagtaaatagtacgatggggaacagcagctttgcaattgagtgtttgctgctttacttatttttctatatgctgttccttttgatgttatatgctgtaaggaaaatctgtacatgatggtaccttagggtatggcatgctggagttcccctttaacccgaagagccggatacttttgccagcctcgtcagcatgtgtaaacagttgttttcttgttttatcgacttattgggtgactacccaagagttggtttgtagtcaatgaggtatgctgccccctgtggtgctacgcagctgcagcaacatcagatggtcaggctaaaatcatgttgtgggatctgattctaatgatgcttatttagtactattacaaatatctatcgttgcttatataaatttgttaaaccttgagatatttttcaaaaaaaaaaaaaaaaagcggcc

SEQ ID NO: 2252 - DNA, 1033 bp, Zea mays
  Clone ID: TF_ZmC15996_1
tccctcgcgtggcgtgtctattgggtatctcgaggccggccgggccgggatccatcaatcctcatcgccacccaacccgccgagtccccaagcaagttgagcatccatccatccatggcgggaggcaagtccaccggcaatgccgcgcgcagcaggaagcgcgtcgaggcaaccgtcctcaagcgctccagggacgggagcgccttcaccagatgcgaggcctgcaacaaggacgtccccgtcgtcctcatcgacatgcacagctgcagcctcgacgagaagatcaggatgacgctcgaggcgcaggtcgtcgagaagaccgtcgaggtcgccagtgcggaccgcaagaagtcctccgccaagggaggtggtaacaaggacgccaagcgcaagcgctcgcccaccgccttcttcctcttcatggacgacttcaggaaggagttcaaggccacccatcctgacaacaagagtgtcgctaccgttgcaaaggaaggaggggagaggtggaagtccatgacagacgaggagaagaagccttacattgaaaaggccgcggagctcaaggctgaggccgagaatggcgagggcagtggtgagaacaatgttgccactaagaaagccaagacagatgaccaggaggtggatcagccagcaaagaagctcagaaagtgcaaggctcttcacgaggacgaggatgacgatggtgaccaggaagacgaggatgagaagaacgagttggatgacgacatgtagatggcagaggccactctcccatctctgtaaatggatggcagatgtgagcgtcttgttagaaatgtcacttgtttcaagctagagggaagagggagagtagtcagtagtgaatatcccccgttatcgttgctacatgaatgaactattctatgatgcagttctgtctgctttcatctccatccaacacatgtactcaatgcctttttcttttctggattttctatattacatccattgctccaaaaaaaaaaaaaaaaagggcggccgccaccgcggtgga

SEQ ID NO: 2253 - DNA, 1002 bp, Zea mays
  Clone ID: TF_ZmC15996_2
cggacgcgtgggcggacgcgtgggcggacgcgtgggcggacgcgtgggctgacgcatgttctccacgcgtccgcgccacccaacccgccgagtccccaagcaagttgagcatccatccatccatggcgggaggcaagtccaccggcaatgccgcgcgcagcaggaagcgcgtcgaggcaaccgtcctcaagcgctccagggacgggagcgccttcaccagatgcgaggcctgcaacaaggatgtccccgtcgtcctcatcgacatgcacagctgcagcctcgacgagaagatcaggatgacgctcgaggcgcaggtcgtcgagaagaccgtcgaggtcgccagtgcggaccgcaagaagtcctccgccaagggaggtggtaacaaggacgccaagcgcaagcgctcgcccaccgccttcttcctcttcatggacgacttcaggaaggagttcaaggccacccatcctgacaacaagagtgtcgccaccgttgcaaaggaaggaggggagaggtggaagtccatgacagacgaggagaagaagccttacattgaaaaggccgcggagctcaaggctgaggccgagaatggcgagggcagtggtgagaacaatgttgccactaagaaagccaagacagatgaccaggaggtggatcagccagcaaagaagctcagaaagtgcaaggctcttcacgaggacgaggatgacgaaggtgaccaggaagacgaggatgagaagaacgagttggatgacgacatgtagatggcagaggccactctcccatctctgtaaatggatggcagatgtgagcgtctagttagaaatgtcacttgtttcaagctagagggaagaggaagagtagtcagtagtgaatatcccccgttatcgttgctacatgaatgaactattctatgatgcaaaaaaaaaagcttaaaaaaaaaaaaaacacatgtactcaatgcctttttcttttctggattttctatattacatccattgctcc

SEQ ID NO: 2254 - DNA, 1384 bp, Zea mays
  Clone ID: TF_ZmC1306_1
gagattttggctgagaagtacaaggataggcttgagagctcttataggggtctaatacatgaggtattctccaaggtccttcgtggcctgtctagtgctaaagtgacacggccaagtacattccgcagttgcctagatggatatgcagtcaaatcatcacttaaagctgaagatggtttgctttatccactcgaaaagggcttcttctttctgccaaagcccccaacactaattcctcatgaagagattgagtatgttgagttcgagcgtcatggtgctggaggtgcaagtatatcatctcattactttgaccttttggtcaagctgacaaatgatcaagaacttctcttcagaaacatccaaaggaatgaataccataacctcttcaacttcatcagcggtaagcatttgaaaattctgaatcttggagatggacaaggtagaactagtggtgttactgctgttcttcagagcactgatgatgattctgttgatccacatctggagcggataaaaaatcaggccggtaatgaggaaagtgatgaagaggatgaagattttgtggcagacaaggatgatagtggatctccaaccgatgattctgatgcagaaggctctgatgctagtatgagtggaggagaaaaggagaaaccttccaagaaggaagctagtagctcaaagccgcctgtgaagaagaagcagaagagtgggccagatgaaggttctcaaaaaaagaagccaaagaagaagaaagatcccaatgcccctaagagagctatagctccattcatgtacttctcaaaggctgagcgagctaatatcaagagcagcaatcctgaactggcgaccacagagattgcaaagaagctcggagaaaggtggcaaaagatgacagcggaggagaggcagccatatgtggagcagtctcaggtcgacaagcaacgctatgcagaagagtctgcagcctaccgtggtgcagccgctcagcagggctctggtgctggatcggaatgaaggtttaatcgtctcgacagttaacttgcaaggctggatgattgagtcgtcagaataaagctggaatacccaaaaacctaagctgaatgtcatcgtttgacctgttgggttgttccggaattcaaccaggattcattctagttcatcaatgcttatattaattaggcaagcaatctggtctggaatcgatcgaggccgttccctggaaccgaacatacccctaagcaaatcctgccaggtaggacaaaatgtagcagcaggtttaaacaaatttcagagaagtacaagtattttttgcataagaagtacacaattacaactgttttgacatgtatcatagaactacaattaattcccttttggcgccatg

SEQ ID NO: 2255 - DNA, 1187 bp, Zea mays
  Clone ID: TF_ZmC1306_2
aaccattgtagccaacatgtttttatgaatctgatatagcatcttgtcccttcataatttttttaagcggtaagcatttgaaaattctgaatcttggagatggacaaggtagaactagtggtgttactgctgttcttcagagcactgatgatgattctgttgatccacatctggagcggataaaaaatcaggccggtaatgaggaaagtgatgaagaggtattgcttcccttagttaacgactcaatataagtttactttctgtcgattgcatgtacatttttgtgtaacccctcttcaaagtaggatgaagattttgtggcagacaaggatgatagtggatctccaaccgatgattctgatgcagaaggctctgatgctagtatgagtggaggagaaaaggagaaaccttccaagaaggaagctagtagctcaaagccgcctgtgaagaagaagcagaagagtgggccagatgaaggttctcaaaaaaagaagccaaagaagaagaaagatcccaatgcccctaagagagctatagctccattcatgtacttctcaaaggctgagcgagctaatatcaagagcagcaatcctgaactggcgaccacagagattgcaaagaagctcggagaaaggtggcaaaagatgacagcggaggagaggcagccatatgtggagcagtctcaggtcgacaagcaacgctatgcagaagagtctgcagcctaccgtggtgcagccgctcagcagggctctggtgctggatcggaatgaaggtttaatcgtctcgacagttaacttgcaaggctggatgattgagtcgtcagaataaagctggaatacccaaaaacctaagctgaatgtcatcgtttgacctgttgggttgttccggaattcaaccaggattcattctagttcatcaatgcttatattaattaggcaagcaatctggtctggaatcgatcgaggccgttccctggaaccgaacatacccctaagcaaatcctgccaggtaggacaaaatgtagcagcaggtttaaacaaatttcagagaagtacaagtattttttgcataagaagtacacaattacaactgttttgacatgtatcatagaactacaattaattcccttttggcgccatgaaaatacagcacctttgatacttgactaatactatgagaatagcttt

SEQ ID NO: 2256 - DNA, 1572 bp, Zea mays
  Clone ID: TF_ZmC677_1
cccacccgggcggcgcgctcccatccgccggccgggatcgcacaaacgcgctcccggtccgaaaggcaaaccagccaccagtcccaccaccaccaccctctgtcttcgcctccgctgccgattcgaaagcacccgtcctgtcccctcgcaaaaccctagctccagccaccatgaagggcaaggctgacacctccaagaaggacgagggcaggctccgggcgggcggcgccgccggaaagcgcaagaaggccgccgcgagcggcaagcccaagcgcccgccctccgccttcttcgtcttcatgtctgaattcaggcaggagtatcaggcgctgcaccctggcaacaagagcgttgcgaccgtgagcaaggcagcaggggaaaagtggcgtgctatgtcagatcaagagaagcaaccatatgtggaccaagctggacagaagaagcaggactatgagaagactaaggcaaactttgataagaaggagagcacaagctcaaagaaggctaagactgaggatgaggatggctcgaagtcagaggttgatgacgaggatggcagcagtgacgaggaaaacgatgacgatgagtaaacagtctccaaggtcacgaggtagcaaatcgagtgttaggtccccaattagcttactgttttgctgcctttaaatgttaagttgtttcaaacaggtgtttatgaaggggatctattagtttcgcgatgtcgttagtttagtgcattagcaaagaaaaagccgaatgctgctagctgttctgttgcttttcttttgctaaccacttgtgtcacaactttctgtacctgcttcattgattaatctagtgactagtcagttattggttcaaaaaaaaaaaaaaaaaaaaaaaaaaaataaaaggtgcattccaaggcggcaggggaaaagtggcgctctatgtcagagcaagagaagcacccctatgtggaccaagctgggcagaagaagcaggactatgagaagactaaggcaaatattgagaaggagagcacaagctcaaagaaggctaagactgatgacgacgatggctcgaagtccgaggtcgatgatgaggatggcggtagtgacgaggaaaacgacgacgacgagtaaatagtatttccgctgtcgtgaggtagcaaatcgattgttaggtccccaattagctcactggtttgctatctttaatgttaagttgtttggaacaggtgtttatgaaggggatctattagtttcgtgaggttgttagtttagtgcattagcaaagaaaaagccgaatgctgctagctattatgttgcttttcttttgctaatcacttgtgtcacaactttctgtacctgtttcattgactaatctagtgactagtcagttatgggtttaaaaaaaaaaaaaaaaaaaaaattaaaaaaaaaaaaaaaagggcggccgccaccgcggtggatgtgctgtatgaatgatgaatatctgcttgtggctcgtttccagtttagtgagtttttgttttgtgactcaggttaatttacatgagtttgtttgtgactgttaaaaaaaaaaaccacaccc

SEQ ID NO: 2257 - DNA, 1006 bp, Zea mays
  Clone ID: TF_ZmC677_12
cccacgcgtccgcccacgcgtccgcccacgcgtccgggccaacgcctccaagaaggatgagggcaggctccgggccggcggcggcggcgccggaaagcgcaaaaaggccgccgcgagcggcaagcccaagcgccctccctccgctttcttcgtcttcatgtctgaattcaggcaggagtaccaggcgcagcaccctagcaacaagagcgttgcggccgtgagcaaggcagcaggggaaaagtggcgctctatgtcagagcaagagaagcaaccctatgtggaccaagctgggcagaagaggcaggaccttcaaagggtggtgccaccagagcgagaactgcatcaccgtctgcaagagcgagggcaataccggcgggttctgcaagctcggggcttgcatgtgcaccaaagagtgtgtcgggagtactggcgctgctggtgctaataaagccccacagcagcatttgagttgatgagtagtaatgaagaacgcgtgggcggacgcgtgggcggacgcgtgggcggacgcgtgggcggacgcgtgggcgcgctcggcgcttccccacccaaaaaggaaaaccaaccaccactcccaccaccctccgcctccgcctgcgccacagctgccgattcgaaagccctcgtcctgacccctcgcaaaaccctagctccaaccaccatgaagggcaaggccaacgcctccaagaaggatgaggccaggctccgggccggcggcggcggcgccggaaagcgcaagaaggccgccgcgagcggcaagcccaagcgccctccctccgccttcttcgtcttcatgtctgaattcaggcaggagtaccaggcgcagcaccctggcaacaagagcgttgcggccgtgagcaaggcagcaggggaaaagtggcgctctatgtcagagcaagagaagcaaccctatgtggaccaagctgggcagaagaagcaggactatgagaagactaaggcaaatattgagaaggagagcacaagctca

SEQ ID NO: 2258 - DNA, 256 bp, Zea mays
  Clone ID: TF_700351302H1
ggaagaccgaggctgagaaggacgcagacatgcccaagatgcctccgagggcgttcttcgtatttatggaggagttcaggaaggactacaacgagcagtaccccagtgtggagcaagtatcgctgattggcaacgctggtcgtgacgagtggaagtccctgtctgatgccgagaaggctcactacgtgtctaaggcagtgaagctcaaggatgagtacacgaagaagatcgacgtttacagcaacaagcagtctgg

SEQ ID NO: 2259 - DNA, 2522 bp, Zea mays
  Clone ID: TF_ZmC26216_1
acctcgaggccggccggtgaccatttcgctgtggctctatttggggatgtcgtcgctgcgccgcgcgctccgctctaccgcctccgcaccgcagagccgcagccaagcaagctgcgcccctggacttggcctcaccggtgaagcggagcttgaggataggcggtgctcgggagataccaagcggtcggccgcaggcgccacgtcggcggagatgacggacggtcaccacttcaacaacatcctcctcggagggcgcggcggcacaaaccctggtcagtttaaagtgcattctggtggacttgcatggaagagacaaggtggaggaaagaccattgagatcgacaaagctgatgtaactgcagttacttggatgaaagtccccagagcatatcagcttggagtcaggattaaggctggcctgttctacagatttattggcttccgtgaacaggatgtaagcaacttgaccaacttcatacaaaagaatatgggtgtcacaccagatgaaaaacagctttctgttagtggccagaattggggagggattgatatagatggaaacatgctaacctttatggttggttcaaagcaagcatttgaggtgtccctaccagatgttgcacaaacccagatgcaaggaaaaacagatgttctcttagagcttcatgttgatgatactactggagccaatgagaaagactccctcatggatttgagttttcatgtgcctacttcgaatactcagtttgttggggatgagagtcgccctccggctcatattttatgggagaccatattgaaatttgctgatgttggttcttctgaagaaccagttgtcacatttgaaggaattgcgattcttacaccaagaggacgttatagtgttgaacttcatctgtcatttctgcgactccaaggacaagctaacgattttaaaatccaatacagcagtattgttcgcctctttcttttgccaaagtcaaacaatcctcatacatttgttgttatcactcttgacccaccaatccgtaaaggacaaacattgtatcctcacattgttattcagtttgagacagaggcagtagtggaaagagatctggcattgagtaaagaactgttggttgaaaaatacaaggacaggcttgaggaatcttacaagggtctaatacatgaggtatttaccaaagtccttcgtggtctatctggtgctaaagtcacaaggccaggttctttcagaagttgccaagatggatatgcagttaaatcatctctcaaagctgaagatggactgttgtatccacttgaaaagggtttctttttcctgccaaagccacctacactcattcttcatgaggagattgagtttgttgagtttgaacgtcatggtgctgggggtgccagtatatcatctcactattttgacctccttgtcaaactgaaaaatgaccaagagcatctcttcagaaacattcaaaggaatgaataccacaacctcttcaatttcatcaatggaaagaacattaaaataatgaaccttggaggagatggtcaaggtgcaagtggtgtagttacagatgttctacgagacactgatgatgatgctgttgatccacatctagagcgtattaagaatcaggccggggatgaggaaagcgatgaagaggatgaagattttgttgcagacaaggatgatagtggatctcctactgatgactcaggtgatgaggaatcagatgctagtgatagtggtggtgaaaaggagaaatcatccaagaaggaagcaagcagttcaaagccagttcagaaaagaaagcataaggccagggatgacgaaggacaagagaagaaaaagccaaagaagaaaaaagatccgaatgctccgaaacgagccatgaccccgttcatgtatttctcaatggctgagcgaggaaacatgaagagcagcaacccagatttgcctacgactgagatcgcaaagaagcttggggagatgtggcaaaagatgtcaggcgaagagaaacagccttacatccagcaggcccaggtcgacaagaaacgttatgaaaaagaatccgctgtctatcgcggtgaagctacagtcgatgtggattctgggaacgagtctgactagagatccaagctcttgggctggcatggtggcacgggatgaaagtctagtgccatgtgtgctattgttatgtcagcaaccgttgcctccaacattgctgacagtaaagagagtttctctcgcagcttacctctgcagggcaaaagaatgtacgagtgtagtctagtgattttgtgtaaaacaaccaacatacgtggttttctgagagatggtaagacgtcagtttaactgttgtcgattggctgttttgccccctctcaaaaaaaaaaaaaattataaaataaatcaaatatagggaagggaaataatttaggggcgtccttttttaaggatccaatcttacctcactcttgcatgcaacgttatagcttcttttataggggctcctaatttt

SEQ ID NO: 2260 - DNA, 790 bp, Zea mays
  Clone ID: TF_LIB4742-042-R1-K1-D11
attgggtacctcgaggccggccgggactcccgtttacgtgcacacctccaaaccctcatcacgatccggctccaaggtctcgagatgaagtcgagggcgaggtccggcggtggcgactccaggctctcggtgaggaagaccaaggttgagaaggacccaaacaagcccaagaggcctccgaccgcgttcttcgtcttcatggaggagttcaggaaggactacaaggagaagcaccccaatgtgaaacaagtctcagtgattggcaaggctggtggtgacatgtggaagtccttgtctgatgccgagaaggctccctacgtatctaaggccgagaagctgaaggttgagtacacaaagaagatggacgcctataacaacaagcagtctggaggaggacccacattgtctggtgattctgacaagtccaagtccgagggtgatgagtgatggatgacgggtgaaactctgggctgcccaagtgcttgcagtcagcagggaaatctcatcgtcgttgggcctaaccgggctttgctgctccgtagcgtctggaagctgtctgtcttttgagatgctgtagactagtagtgcctgctctgagttagtaattgaaagtgttgtccctgaagtgatgctgtttagttggtagtgtgttcgcttcttcggcacttatacttacccccaagcatcaacgctgcctgttttaatctcaataggtgctgttttaaatctcagatctcaatatatgactactgatcgctgagtaaaaaaaaaaaaaaaaagcggccctcga

SEQ ID NO: 2261 - DNA, 1243 bp, Zea mays
  Clone ID: TF_ZmC1672_2
agggttttgttcaacttgcatattcacttcaacgctccgatgcagtatacgtttgttcccttgcccgccctttgacgttgtgcagtttctgaatcgcagggccgggccggccgggccgggactcgcacgttaacgctacacactcccgtttacgtgcacacctccaaaccctcatcacgatccggctccaaggtctcgagatgaagtcgagggcgaggtccggcggtggcgactccaggctctcggtgaggaagaccaaggttgagaaggacccaaacaagcccaagaggcctccgaccgcgttcttcgtcttcatggaggagttcaggaaggactacaaggagaagcaccccaatgtgaaacaagtctcagtgattggcaaggctggtggtgacatgtggaagtccttgtctgatgccgagaaggctccctacgtatctaaggccgagaagctgaaggttgagtacacaaagaagatggacgcctataacaacaagcagtctggaggaggacccacattgtctggtgattctgacaagtccaagtccgaggtcaacgacggggacgaggagggtgatgagtgatggatgacgggtgaaactctgggctgcccaagtgcttgcagtcagcagggaaatctcatcgtcgttgggcctaaccgggctttgctgctccgtagcgtctggaagctgtctgtcttttgagatgctgtagactagtagtgcctgctctgagttagtaattgaaagtgttgtccctgaagtgatgctgtttagttggtagtgtgttcgcttcttcggcacttatacttacccccaagcatcaacgctgcctgttttaaatctcaataggtgctgttttaaatctcagatctcaatatatgactactgatcgctgaatagatttcatgctctcttgattgactgcgtgaaaaagtgatgtatgacggatgaaactctgtccaagtgtttgcagtcagggaaaaaatctcgtcgttgtcggcctaaccgggttttctcgaaggactttctagatgcagtagattagtgccgtcttctgagtagtttccttgcaagtgtcgtcccgtccctggagtgaggcagtttagtttgtagtttcttcgcttcatcggcactcgaccgttgttggattgggatgtttagcctgcagtctgtacttaccccaagcatctatggtgcctgttttaaatctcagatcccaatagacgtttgttttaaaaatc

SEQ ID NO: 2262 - DNA, 1092 bp, Zea mays
  Clone ID: TF_ZmC1258051_1
cctccttggcaggagccttcttagctgcagtgctctcgcccttgttgtaggcagcgatggccttgttgtactcgagcttgagcttgttagccttggctacatagggagccttgtccgactcgctcagggatttccacctgtcgccagcagctttccccaccgcagcgacagacttgttcttagggttcttctccttgaactccttgcgaaattcctccatgaacacgaagaaagcgctgggagccctcttaggcttgttggggttttttttttttgactttcgatgatatattctgtgcttggaaactgattcgatgtgagattcgcatgatcgttgccacacggtaaacgtacactgactcctagtgctcctaatttacttagttctaatgacggccaattaacacatgccactaatcgctagcttcacattacagttcactgctgcgtttccacgcgagagacgtgcggttcaaggcacccgcacacagaaagcagaacctgcctggcccagtggggcccgccacgcctagacatacgactcgccgccacaagcaaccactctgctctagcctctagcagagtagtcagttaataattaataaaaaaacaacactagtactagctttttactccgattcgatgccgccacacggcagcccacgcgtttcccgccctgagcatccgaaagggcgccacggcacgacgacgaggcccgagcacctaggggggtaaaaggtaacgccgttatatgacgctgacggctgcaccggctgacgccgtgaggcctgtcactgtcacgaagtcctcgccctcccaccacggcaggcagtcgaactccgccgccaccgccttcgatggcgccgtcgctgtgccgaggtcgccgagctccccaagccccgaatagaggaactcgaacgccggcagggcgggtgcggccggcgtctcgtcagcggcgtgacggagaacagagatcggagacgagaacgggcagaccagggcggtgccgtccaccgcctgcgaatccagtgacgcgggcgctgccgccgggaccagggccgatgcgagggcctctccgtgtcgtgccgaatc

SEQ ID NO: 2263 - DNA, 490 bp, Zea mays
  Clone ID: TF_LIB3597-037-Q1-K6-H11
ttggtgatcggcgacagtggtatctgttaaagatggcgcctcaaacctgtatctcggcgctgagactccggctgtgcgtgacgggattccagcccagcttctgccaccaggtcggcaatgacgcgccgaagctgaaggtcaggccgaccgtgtacgaaagggagcggaggtgctcgtccgccgggagcccgacgtcgagcggcaccaggaagcgcgtcggtggctggagatgtcggccgggagcggcagcggcgacgaggacgacgacgagggcgatctcaagaatctgggtctgtccaaggaccatgccgccgtgctcgaggagtgcttcaaaacgcaccacaccttcacttcgtaacagaacgcaggactggccagccgcctgggcctccgggcgcggaaagtgtaggtgtggttacaaaaccggcgcgcccgaaccaaactgaagcagacggtagtcgactgcgaatacctcaggcgctggtgcgag

SEQ ID NO: 2264 - DNA, 1453 bp, Zea mays
  Clone ID: TF_ZmC2781_1
gcacgagcaaagccgaagcaaacaaatctctcgtgcttagccctagctagctactggtccttttcttctcctctcccgtcttcgttactcggatcacgaaatctatagctactaattactggcgatggaggatctctcggatcttggaggccacggccacccgggtgctgctgcctggcggcccgcggcgccatcattggcgtcctcttccaaggtctcggtgcaagtctacaccgtcccaagctcagctgctaccggccgtgaagcccgaggtcaaggtgttgcaccaatgatgcatgcgtctagcgtcgctggccatggcggccgcgctgctgatctagaccccgtcaaggccaagatcgtctcccaccctagctaccaccgcctgctcgccgccttcttggactgccacaaggtcggctgcccgccggaagcggccgaggagatcgcggcggtggcgcgggagcgcgaggcgtggcagcgtgcagccgcgggcgacgtcgcgcacacaaggccggacccggagctcgaccagttcatggagtcctactgcgagctgcttgtgacgtggaaggaggagctgacccggccgctccgggaggcggaggagttcctgacgacagtggaggcgcagctcaactccattaccaacaccgggccaaccatgggagctttcatctcttcagctgcagctgcagataaaactggagtcgtcgatatgtccgacgatgaacaagaagaaggcagcggcatggaggcagaagtagccctgggcatcgatccttgctccgatgacaaggagctcaagaagcagctcctcaggaaatacagcgggtgtttgggcaacctgagaaaggagctgtgcaagaagaggaagaaagacaagctccccaaggaggcccggcagaagctgctcagttggtgggagctgcactaccgatggccctacccctcggagatggagaagatcgcactggcggagtcgacggggctggagcagaagcagatcaacaactggttcatcaaccagcggaagcggcactggaagccgtcggaggagatgcagttcgcggtgatggatgggttccacccggccccgcccaacgccgccgcgttctacgtcgacgcacgcctcgtgggagcaacgccggcgatgttctacgcccggccggatcatggggctcatcatggcctctggcacaattgattcagcccacgcacgctaccatgaagtattgaagtgtgcgcctgaaaacctgcatgcatgccgtagcttaattagcctataaatatgaatgatctgcacaatgaactggagatcgagaaagaaccctactgcattactgtacccccgttgttgcaccaagaaactttacatgtcatgaacagcaaagactgtgcctccttaatgctacaggtttgcggcattttgcataaaaaaaaaaaaaaaaaa

SEQ ID NO: 2265 - DNA, 615 bp, Zea mays
  Clone ID: TF_ZmC44427_1
acaagcacattctagcgcgccagacaggactgtcaagaagccaggtttccaattggttcatcaacgccagggtgaggctgtggaagccgatgatagaggagatgtacacggaagaagtgaacccgaaaccggccgacgacacaagccaaaaccctagcgccggtggcggcgtcggcgtcggcgtcgccatcaaacctgagcagcaggtgagcacagctgcggcgggagccaccatcggaggcggcggcggcggcgaccatctgttcggtcctagttatcccagcatgtacgggagccacggcggcgccgtgtcgcttaccctagggctccagcagcagccgtttgcgtcgacgatgatgcaccagcgacgaccactgatgacgtttcaaggtgacgagcaagagccggcgctgccgtacagagaccttatgggctctcagttactgcatcatttcgctgggtagcttgttacctacacatgcttgctagctagctaggagggtgggtatacggtggctaaatttttatatatattaaagacaaggtaaattttgtttaaatttcttgtcgactaaacgatcgatatatataccaaattaagcacacagattgttt

SEQ ID NO: 2266 - DNA, 504 bp, Zea mays
  unsure (1)..(504): unsure at all n locations
  Clone ID: TF_jC-zmXLIB3552003af03b1
cccacgcgtccgccgcaatcaaggttgtcacgcccgacgaggatggctgccagtcaccgcacggccggtccgggccccagcgacggctccagcgcaggcgcgaggaagaagctccaactcaccaatgagcagtcgacgctgctcgaggactccntccgcgcccacaacatactctccaacgcgcagaagcaggagctcgcacggcaggtggatctcagcgccaggcaggtggaagtgtggttccagaacacacatgttcagataacatgttttgcatgaactaccctctgtatctaacaaaaagaagttcaagtttgcaggaaacaaccacaatcgaattgttgcaagtgcgtcccacgatctgaagacaaaaagatctgttgtccattagcaacaaagtgctacagaggctgtgttctgtgtaccagtacttgatagtgagtttcagaatgaacctataactatttccaacatcgacaagaaggatggtgaaaattttcatga

SEQ ID NO: 2267 - DNA, 1480 bp, Zea mays
  Clone ID: TF_ZmC1681_1
cctcgaggccggccgggccctctctctctctctctccaaccacaacggaatcgaaggcaaaccaatagacatccttattaacttggcctgatgcactcctccattcctcagacaatcaaatatccccagatagctaggtggttggcacgcatggagaagcagctgcctgctcttaccggtggctcaaaggcggccaccacgacgcccttctacctcgccttagatcacagagccgccgccacgtcgtcttcaccgccggcggaggcgccaacactgccgccgtctgctgcggctgtctcagatccttctagacagtccaacagcgataggggatccgagataatcaaagccaagatcatgtctcaccctctctatccggctctcttgagagccttcatagattgccggaaggttggagcgccgctcgagattgtcggtcggctttctgccctcgctgatgacgtcgaaacgaattcagacggcagacaagaagaacaaccagcagacccagagctcgatcagttcatggagatctactgtcacatgttggtaaggtacagacaggagctcacaaggccaatccaggaagcggacgaattcttcaaaagcatggaggcccagatcgactcattttcattagatgacaatggctatgaagaaggaggcggttcctccgacgaagatgagcaagaaaccgtcgacttgggcggccttccggtccctgagaccggcagcccgtccggagagggcaaggagctgaagaaccacctcctgaacaagtacagcggctacctgagcagcctctggagggagctctcgaggaagaagaagaaaggcaagctgccgagggacgcccgccagaagctcctccactggtggcagctgcactacagatggccctatccctcggagctggagaaggcggcgctggcggagtcgacggggctcgacgcgaagcagatcaacaactggttcatcaaccagcggaagcgccactggaagccggcgccgccgacgatggcgctaggcacaccagattacaggatgggccagcacggcggcggtgcttctagcagctcggcctccgctggtctccgcgtgcaggggcagtacttcaccggcggaagctcgtatccccgtggcccgtgacgatgcatgcgtcgcctgcaggctgagcgcgtgaggtgtcgacatggattgttgccgtgcatgcatgcatatcagcatacgtatacatacatacgtgatcattatttgggtatagatggtgtggacgtgtcgtgtttcctatacagaaatttgattgtctccttacttgcattgctcatacgcatacatatctacatatatgcagctgatgccagagttataaagttgtaactatatattattattatttgtcttactaacatgagagcagttgtacacgtaaaaaaaaaagaatgcatggatgttccttctaaaaaaaaaaaaaaaaaaa

SEQ ID NO: 2268 - DNA, 592 bp, Zea mays
  unsure (1)..(592): unsure at all n locations
  Clone ID: TF_LIB3606-036-Q1-K6-E1
gtctaactttcagttcctgaagggatgataatgagccaattacggaacacaagcaaggtcgctgccagtgatggtattggcaaggatgatatggcaaactttgcgcttatgggtggtggagcagaccacctgaggggaaacagcgtgaacacgttcagccaggctcacaacatttggaggcctcaaagaggcttcctgagcgtgcagtgtctgttcttcgctcatggcttttcgagcacttcctacatccgtacccaactgatagtgacaagcagatgctggctaaacagacaggcctaacaaggaaccaggtgtcaaactggtttatcaacgcaagggtgcggctctggaagcccatggtggaagagatccacaacctggagatgcggcagcagntgcagaagaacacgtcggcggtggacaagacccaactcggcatgcagcagctgatccagcactcgtcggcaaactcccggcagcgggggcaaagcagcggcggcacgacgagaaaccaagacgagctgcccccgnggatgccccacgacatggnaggccagggccagcagcagcagcagcnagtgagcttcgctta

SEQ ID NO: 2269 - DNA, 2396 bp, Zea mays
  Clone ID: TF_ZmC2191_1
ccggccgggaatgatctttgcggccaggacggaacctttgcagaaagaaaggcgcccggaggtaggggtagaggtagagcccgagagcccaacacctccaccagcagcaaagcaccaccaccagagccgagcgcacaaaagcgcgcggccgagacgcgggacaaagcaacgggcagcctgtactgcccgcttctagctgcagctaccctccagtcccagttccagccccggccaggcgctcgcaaagtgcggagccgccctctcttcgagtcttcgctcgtggtctctctctccaggtcgtgcagtacgatccatatcccggagctcttgcgcgagcgacatgtcctcggcggcgggcggtggatacggggctgcgggcggcgccgagcaccagcacctgttgctggggcaggcctcggggcagctctaccacgtgccgcagcacagccgccgcgagaagctgcggttcccgcccgacccggccgactcgcccccgcccactgcctggccggcgcctccacccttctactcctacgcgtcctcgtcgacgtcgtcctactcgccgcatagcccaacgctggcgcacacgcagctagtggcgcacgcgctacctgccggcgccggggcccaaatcccgagccagaactttgcgctctcgctctcttcggcgtcctcgaaccctccgcccgcgccgcggaggcagctcgccgcgggggtagccgctgggccgtacggcccgttcacgggctacgcggccgtcctcgggcggtccaggttcctgggccccgcgcagaagctactcgaggagatctgcgacgtgggcggacggcccccgcacctggaccggcgctccgacgacgagggtatgctcgacatggacgcggcggggggcgtggaccacgagatggacggcggtgactcctgcgctaccgctgaggcgggcgccggtctcgggcgccgagcagcagtggaggaagacaaggctcatctccctcatggatgacgtctgcaggcgatacaagcagtactaccagcagctgcaatccgtgatctcctcgttcgagactgttgcagggctgagcaacgcggcccccttcgctttcatggctcttcggacgatgtcgaagcacttcaagtgtctgaaggggatggtgatgagccagctacggaacacgagcaaggtcatcgccaaccatgggattattgccaaggacgatatggcgaacttcgcgctcatgggtggtggagcaggcctcctgaggggaaacagcgtgaacgcgttcagccagcctcacaacatttggaggcctcaaagagggcttcctgagcgtgcagtgtctgttcttcgctcatggctgtttgagcacttcttgcatccgtatccaactgatagtgacaagcagatgctggctaaacagacagggttaacaaggaaccaggtgtccaattggttcatcaacgcaagggtgcgtctctggaagccgatggtggaagagatccacaacctggagatgcggcagctgcacaagaccacatcggtggaccagaatcaactcggcatgcagcagcagaaccaccactcgtcggacggcagcgggaggccttcctccgacccttcgaactcccagcggggccaaagcagcggcatgacaagaaacctcagctctcgggcaccacgccacatccaggacgacgagctctcccagatgccccacgacatggcaggacaggtgagctttgcgtacagtgggctcccccccgcgcaccacggtctcgcgctgtcacaccaccaccacccccagcaagcgcaagctgaggcggttggtgttggcggcgtggccgccagcagcggcggcggcgtttccctcacgcttggccttcaccagaacaacaacaacaacaacagggcctatatcgccgagcccctcccggccgcgctcccgctcagcctcccgcaccggttcgggctggaggacgtgagcgacgcctacgtgatggggccgttcggcggccaggaccgccatttcagcaaggggatcggtggtgggcacaacttgctccatgactttgtcggttgatcaaattcgtccctggaagtgtttgtcggcatgtattgtattgttaggggtagtagggcagtggaagagagacgaccgtttggtccatctgcatccaagaacgctgtcgatatttgccaactcgaggtctatagagtggttgacgacataccgttgaagatgtgttccagttgtatgttgtagagttgaacgaaccctatctgttctaatcccagctggtgtggcgttaacacatgtaccgctgttccttcgacatggcaactgaaggtgaaggttgaaaactgtgtggttattaaaaaaaaaaaaaaaaaagcggcc

SEQ ID NO: 2270 - DNA, 477 bp, Zea mays
  Clone ID: TF_LIB3067-032-F8-R1A
cggacgcgtggacggacgcgtgggcggacgcgtgggcggacgcgtgggcactggcggagtcgacggggctggagcagaagcagatcaacaactggttcatcaaccagcggaagcggcactggaagccgtcggaggagatgcagttcgcggtgatggatgggttccacccggccccgcccaacgccgccgcgttctacgtcgacgcacgcctcgtgggagcaacgccggcgatgttctacgcccggccggatcatggggctcatcatggcctctggcacaattgattcagcccacgcacgctaccatgaagtattgaagtgtgcgcctgaaaacctgcatgcatgccgtagcttaattagcctataaatatgaatgatctgcacaatgaactggagatcgagaaagaaccctactgcattactgtacccccgttgttgcaccaagaactttacatgtcatgaacagcaaagactgtgc

SEQ ID NO: 2271 - DNA, 702 bp, Zea mays
  Clone ID: TF_LIB5117-049-A1-PF1-F11
acttccacggtcaccagttccagcggcctgcacgtacgtagctactgttactcgtagagagcaggaacgacagatccaacaaggagatcaatggagatgactgttaacgggagggacaccgagcaccaccaccaccttggtcttgccctcggcctcggcctcgggctcagtctcggcatgtctggtacgacgtctcctgtggagccggcggcaccccagaccgctgctgcgccgtcgtcgaagctggggctggggcagcagtcctggaatggcgccggccttttctttccggcctcctccggcgagcaacgctcgcatgcagatgaccggaggcttgcggcgttggcgtgccacgagatgccgttcctgcgcgggatcgacgtcaaccgagcgccgaccacggggggcgcgaggggcagctgcggtgccagcgaggacgaggagcccggcgcgtcgtcgcccgacagcacgctgtccagcctcagcggcaagcgcggcgcgccaacgaggagcgccggcggcgagcaggagcgtaccggcgcgggcagcgacgacgaggacgactccggggccggcggcggcgggtcgcgcaagaagctccgcctgtccaaggaccagtccgctgtcctcgaggacagcttcaaggagcacagcaccctcaaacccaagcagaaagcggcgctggcgaggcagctggggctg

SEQ ID NO: 2272 - DNA, 439 bp, Zea mays
  Clone ID: TF_LIB3066-028-Q1-K1-E9
cccacgcgtccgcccacgcgtccgcccacgcgtccgatcactacgttctgcaaaacggtgttctagaagagcaccagctagggagcagaataatgaacatactcagagtgagcagcttcatggttctgcaagtgagcagcaagctagagagcaacttcatggttctgtaagtaaacagcaaactgaagttcttcgctccaatgtcagcagtggcgatgcctcaaaatgtcattttggccctatagttactcagaagctgaaggaacattttgaaaaagatccatatccttgccgtgcaacaaaagagggtctggcacaagagctaggactgacatttaatcagatcagtaagtggttctctgccacccatcattattcaagagatgctgttgccaagaaccaaaaatacccaggagaaaatactactgagaataatagt

SEQ ID NO: 2273 - DNA, 2480 bp, Zea mays
  unsure (1)..(2480): unsure at all n locations
  Clone ID: TF_ZmC1775_3
ccggcctggccgggggagaaggttttccctgaggcagcttcaattgccaacggttctaaacaagttgatacttctgatctgctgccagatcatataaagcacagtgacaaccctgcattggttgaagggctgatggtgaatgaagtcaggctttctgcagaggatgacagcaaaggggatggtgacttcgatccgtcaggtccagattctagtgaagaccaaaaagatggattgaactcagaagagtcagatttcacatctgactctgatgatttttgtgctgagattgccaaatcttgtggccaggatgaagtctcggcatctccattatcaaatgtgataaaccatacttatagaatgaaactcagggccagcaacaaccgctctaatgaagaaaaccatgatcatgtatttatggacatggagctagggcaagacatggtgctaccagtttcaagcaggcggcaggtggaacggttggattacaaaaaactatatgatgaggcatatgggaaagaatcatctaattcaagtgatgacaaagagtggtctggaaaagaactattagaaggcagngaaacagattcacttagtgagcgacctcatcctgtaaaacggtgctctagatgagcacaagcagagcagcagaataatgaacatacaccacagagtgagcagcttcatggttctgcaagtgagcagcaagctagagagcaacttcatggttctgtaagtaaacagcaaactgaagttcttcgctccaatgtcagcagtggcgatgcctcaaaatgtcattttggccctatagttactcagaagctgaaggaacattttgaaaaagatccatatccttgccgtgcaacaaaagagggtctggcacaagagctaggactgacatttaatcagatcagtaagtggttctctgccacccatcattattcaagagatgctgttgccaagaaccaaaaatacccaggagaaaatactactgagaataatagtagcacaatctttgatggtatacaagtaatagaacccaattttggtttgatagataaaccagatgcagatacaaatgacatgatttctgaaaagttgatggtacaaattaatcttaacgaaggcattgaagaggatatcccaccgagccaatatactaccaggtgtgaagagaaattaactatgactcaagctgccatctcaagggaagctggacctccaggttatggtcctggagaaaactttcttcaggtcagttcaaggattactagctgtgagcagagtgtgataatggctcctagcgctatcgcaagaggagttggtccaccaggatatacgcctggagaacaccagggcaatggggctccatggaatacaagctatgagcgaagaccgtttacgagtcctgcgactagctcaagagaagtcggacctccaggatatgggcctgaagaaaaccaaggcagtggcatttcctgtaatacaagcagagagcaaatattgtttatgagccctacaaccatctcgagagaacttggtccaccaggatatttgcccagagaaaaccagcgcagtgacacttcatggaatacaagctgcgagtcgggactatttatgagtcctgcgaccacctcaatagaacatggtccaccaggatatgggcctggagaaaaccaggagaatgacagtacaagctgcgagttgagaatgtttacaagtcctacaatcgtctccagagaagttggcccaccaggataccagcagggagtgtttatgagtcctaaaaccatctcaagagaagtctgtcctccaggatttgggtctggagagaaccagggcaacgacactacatggtacaaacagagcgcgtttacaagtcctacaaccatctcgagagaagtcggtccgccagggtatggacaggaagatcagggcaatggtggttcttggaacacgagttgtgagcagggagtgtttacgagtcctactagaggcatctcaagagaagtcggtccgccaggatacgggcccggggaaagtcagggcaataccacttcgtggatttcgacctgccagcagagaatgcttgcaggaatccagagaactggtggctcaaggagtatggacttggaagcctttccaccgggatacggacctggtggtgcttcagggagtgtcataagcccccaagctcggtctgcagagaatgtagaattttcggacgaggctagaaaaaaggctatacagcgggagctgagacggcggcagaagttcaggtgaaggcaatatatccagtcttcaagacaagacaatatatccagtcttgatggctgaatgagtgggcgaccttagttgccatcaagcaaaacccttgttgtatcagctgcttatcttccttttacagacttgcttggtttgtcaaggatttcttatgtgaaccctcttgaacctgaagtattcaatgcgctgtgaatttgtgc

SEQ ID NO: 2274 - DNA, 436 bp, Zea mays
  Clone ID: TF_LIB3067-036-Q1-K1-B12
cagcaatggcatggcgtcctcaccctcgcccttcttccctccaaacttcctcctccaaatgcggcagacgccctccgatcatgacccccaagaacaccaccaccttcctgctcctccccttcatcttcaccacaaccccttcctcccctcctctcaatgcccctccctgcaagacttccgaggtatggcgccaatgctgcggaagcgcccgacgatgtactgcggcgcggacgacgtcggcgtcggaggcgaggaggcgaactgcggcgcgacgaacgaggacgaggtgtcggacgacggctccctgcaagccggcgggcccggggagaagaagcggcggctgaacgtggagcaagtgcggacgctggagaagaacttcgagctcgggaacaagctggaaccggagcgcaagctgcaactggcgcgcgcgcttggc

SEQ ID NO: 2275 - DNA, 575 bp, Zea mays
  Clone ID: TF_ZmC115778_1
atataccaattaattcgtgttcaatttgtttgtccactacgtttttaattacgtacaaattaagcatatacctacctttttacatacatgcatgcatgcacagtacactatacgccattgatgaggtgagagctagttttttccatcggcaccacccgtacgtacgtatcacgaggtcgtcgccgacggctgccggcggagcagtggggggacgacgacggtgaagggtccgaaatgaggaggccagctggcgaacaaggtggatggcggtggtgccgctgctgatggagcgccactgatagcagcctcgctgacgtcgttatcgcatgagctagggcacactcgggctgtggccacgccgaaccctgctgctgcaccgtaaaacgggtaggcggcggagcaaagacgccgcagatccgccacctccctctgcagcctccggttctcctgcgctagcttctcgcaccaacgcttcaggtactcgcagtccacctccgtctgctttagcttacttcttgctcttctgttctggaacaagacctccacctggcgcggtcgaagtttcagccgcttcg

SEQ ID NO: 2276 - DNA, 2206 bp, Zea mays
  Clone ID: TF_700221310_FLI
tattttctaatcaagataaaactggagcagaatttgctagatgcttactctggagatggatggaatgggcaaagccgagagaaaataaagccagagaaggaactgcaacgtgccaggaaacaaatcataaaatgcaaaattgctatacgtgatatcatccgccaacttgatttgtatacttctactgggagtgttgatgacccactaatgcctacagatcagtccaccaatcccgaacataccatgtgctcaacatgcaagtctcatgaatcatttcccagcaataaaattatcttctgcaaagggccctgcaaaagggcatgtcatgagaaatgtttggaacctcccttaaacaaaagcgtacttccaacaagtagccatgggtggctttgcaaattctgtttgtgcaaggtgaggattttagaaactattaatgcacatctagggacgagttttacagtgaagtgccactttgaagatatattcaaggaaactactgaactaatagactctgaggatgcactagatgaagattggctttctgagtattcaggtgatgaggactatgatcctgatgaaaatgaggccagtggcgactgtatggacagcggggagaagattatgtctgatgattccaatggttcaggaagccccctttattctccaaatgacgatattcctgacttcatatcagcagacttaaatgttgtggaagggttttgtcataccaatttagatttaggcattgatgccgttgaagatgattttgcacagatcctcacctaccaaaggccaagaagagatgttgattatagaaggcttaacgaggaaatgtttgggaaaataaccgggaatgaagaacagagcgaggacgaagattggggccatgaaaggagaaagaaaaggacgcattcaggtgttgctggggataattctgttggtttcttgaacgttatatctgatgaaaagagccagaagaaggggagaaaacttttcaggattcctcctgcagctgttgaggtacttcgcagagcttttgctgaaaatgagcttccaccccgggatgttaaagaaaatctctcaagagaattgggaatttcttttgaaaagattgataaatggttcaaaaatacacggtgtgctgctctcagagatcggaaggctgaaggaaacagtcataatacagctcccagcaaaagctcaaaaaataaaggaaaagctggaatctcaggcaagactggaaggaatggtcatgttactggtccctgcaataatttgagaacaaatgaagaaaaaacaggtatatcggggaagtttgattcaggagacaactcttgtttggttcccttctctgaagtcatcaatgtgcctacgcgattgccacacaactttgagatgaggaagatggaatcaactagaagtcctgcgaggctacacaataaaggagggtgcctgtctgcaacaatccaaattaaggagagtacattgttacccacaggcaagccttgttggcagtcagaaatgagccatccaacaactaatgaagtgagcacttcagcgcaagctactacttggatcgacgcgggggcgtgtgccgaggagcaagaacctactccttgggtggacatcggggcctcagactaccagcctttcctggatgtgatcgacgacatgtgcggacttgagtggaggctgcagagactgaaggagaacatgctctcatctagcatagacggccaaaccgccgccagtgagagtgacaaaagaaaccagaccgtggtgctcgtgccaactgccgagctcaaggaaaaactgccgcatgacggtttattcgggcattattgcccataggtcttatatacatagcggataaactgtacagagaaccaagaagaagaagaaaacaaaagggaaacagcaaacagacaggtgcccgcttacataccggtccatactgtcaggcactgctctcctttcttgggcctcgacacgactaatactgtgctagtccagaacagatgagccatagccattacctgtgtgcctcggaggttcagttcatatgttgtatgtatatcagaagagtcgtgcttagtagtagcaagaacctagtcctgatccagaccgtgaatctggatcatcttgtcgtgtggttgtaccgtgcagaacagacagatgtcggctagtcgtttggttcttaaggaag

SEQ ID NO: 2277 - DNA, 2899 bp, Zea mays
  Clone ID: TF_ZmC1207_1
atgggccccttcttttccgcgtccgctgctttggcttcgcctcgcggtcgcccagtcgcagcagcaacaccgcccccggcctcgctttgcagccccctccctccaccgcctcctccacgccctagcgctccggcccccgccccgagctcgtcgtggccggctgcgctgcggtgcccgcacctgtgggggcgtgcgggccggtggtgaaacgacccgcgacctcggtgcctctcgacgtctgcccgcttcctcgccggcgccattttgttcgtctaaatcccctgtgataagcaccactgctcgtgatgcattcttcggaaaataaactgggttggaatgagacctctatggggttggttcctgtaccaaaaagaccagctagacctgatgcttcccaccaatgcaaatctgattcctttatgaagcgatcaccaaggaaagttagaaatgctactctggcaaaaagcataaagagcaagtaccactatagtcccctcaaacagcggaagggttcagattctgttcctgggaaaatcgtaacaggactaaccgcaaggaaaaagaagaaaaggaaaatccaaattacagacgaggcaactcgtttggaacgaagagcgagatattttctaatcaagataaaactggagcagaatttgctagatgcttactctggagatggatggaatgggcaaagccgagagtaaataaatctagagagggaactgcaacgtgacagaaaattaatcataaaatgcaaaattgctaaacgtgaaatcatcctgcccaatcgatggccatgaagagatgttgattattgatggctcactgatgacaagagagcagaccaccaatcccgaacataccatgtgctcaacatgcaagtctcatgaatcatttcccagcaataaaattatcttctgcaaagggccctgcaaaagggcatgtcatgagaaatgtttggaacctcccttaaacaaaagcgtacttccaacaagtagccatgggtggctttgcaaattctgtttgtgcaaggtgaggattttagaaactattaatgcacatctagggacgagttttacagtgaagtgccactttgaagatatattcaaggaaactactgaactaatagactctgaggatgcactagatgaagattggctttctgagtattcaggtgatgaggactatgatcctgatgaaaatgaggccagtggcgactgtatggacagcggggagaagattatgtctgatgattccaatggttcaggaagccccctttattctccaaatgacgatattcctgacttcatatcagcagacttaaatgttgtggaagggttttgtcataccaatttagatttaggcattgatgccgttgaagatgattttgcacagatcctcacctaccaaaggccaagaagagatgttgattatagaaggcttaacgaggaaatgtttgggaaaataaccgggaatgaagaacagagcgaggatgaagattggggccatgaaaggagaaagaaaaggacgcattcaggtgttgctggggataattctgttggtttcttgaacgttatatctgatgaaaagagccagaagaaggggagaaaacttttcaggattcctcctgcagctgttgaggtacttcgcagagcttttgctgaaaatgagcttccaccccgggatgttaaagaaaatctctcaagagaattgggaatttcttttgaaaagattgataaatggttcaaaaatacacggtgtgctgctctcagagatcggaaggctgaaggaaacagtcataatacagctcccagcaaaagctcaaaaaataaaggaaaagctggaatctcaggcaagactggaaggaatggtcatgttactggtccctgcaataatttgagaacaaatgaagaaaaaacaggtatatcggggaagtttgattcaggagacaactcttgtttggttcccttctctgaagtcatcaatgtgcctacgcgattgccacacaactttgagatgaggaagatggaatcaactagaagtcctgcgaggctacacaataaaggagggttcctgtctgcaacagtccaaattaaggagagtacgttgttacccacaggcaagccttgttggcagtcagaaatgagccatccaacaactaatgaagtgagcacttcagcgcaagctactacttggatcgacgcgggggcgtgtgccgaggagcaagaacctactccttgggtggacatcggggtctcagactaccagcctttcctggatgtgatcgacgacatgtgcggacttgagtggaggctgcagagactgaaggagaacatgctctcatctagcatagacggccaaaccgccgccagtgagagtgacaaaagaaaccagaccgtggtgctagtgccaaccgccgagctcaaggaaaagctgccgcatgacggtttattcgggcattattgcccataggtcttatatacatagcggataaactgtacagagaaccaagaagaagaagaaaacaaaagggaaacagcaaacagacaggtgcccgcttacataccggtccatactgtcaggcactactctcctttcttgggcctcgacacgactaatactgtgctagtccagaacagatgagccatagccattacctgtgtgcctcccaggttcagttcatatgttgtatgtattaatgtatatcagaagagtcgtgcttagtagtagcaagaacctagtcctgatccagaccgtgaatctggatcatcttgtcctgtggttgtaccgtgcagaacagacagatgtcggctagtcgtttggttctgaagtaagaaactataagcatgcgtgattttggcccgtgcgtgacaaaaaaaaaaaaaaaaaaaaagggcgg

SEQ ID NO: 2278 - DNA, 2970 bp, Zea mays
  Clone ID: TF_ZmC295_2
tttttactcgtcaagtcattgctttggttgtctttttcattttttttttggtcatctgaggtagcgttatgtgtttataacctcttcgattcttgttcttcctctttgggcttgcaggcaaaaccacctgcttacgatcttgcagtcatcatcacgctattagttgaggataatttcgcgcacaagagcaattcggcacgaggatggagaggatgtggcccgcgcctcgctgtcctgctcgctctcgccgtcttcaccgccgtcgccgcagcggccacggacgaggtgcgcgcgcagtccacctacatcatccacctcgccccaggccacccggcgctgtaacccgccaccggggcggattggaagtgggaggtgggtatccttcctccactgtcctttttcatctctctctctctcttttctctctctaaaagactttgctaattggcctgctagccggtctccctcccccggcctctttccctttcagctggaggagatagatgagagagaggatcagaggaagcaggaaggagagagggatatataggccggtgtcttctgtagagagagagattgagagcaaaagggaaataaaggagctctcgcaggcactcggtactgacatgagtgatctcatgctcttgataccttggtactcttacatcaccccttcttcaccttcttcttgttcttgctcatccctcctctccggccctctcttcctcctgcctctctctagctaggacgatcttcaacaaccctctccccctctaattctctttccccatatagagagaataaaggagagagagaggcgaaggcaggcagctaattttcttttgttcaagggaaaggacagcacgtgccggagctcataagctggtagctgcatcagttcctgaggcaaaaccacctgcttacgatcttgcagtcatcatcacgctattagttgaggataatttcgcgcacaagagcacgacaagccgagatttttgggggcgtcggcgtcgacctgtaggcgatggcggcgtactaccacggtggcgccggcacggacatccaggccagcaccgacggcctgcagacgctgtacctcatgaacccgagctacgccggcggctacgctgacgacggcggcgcgtccacgccgggggcggccaacatgatgctcctcaactcggccgtgaccaccatgacgccggcgtccttcgcgcaccaccaccagcagcagtcgccgccggccgcgcagcagcacttcgtcggcatcccgctccaggtccaggcgccgccgccgtcgggctacaacctgtggaccccggccatggctggcggcgccgcggacatgtcgccgcaggcgcaggcgcagactcccggcgccgcgggtgctgctggggtcagcgccgtgctcagcctgtcgtcccgcgaggcgccgccggtcaccgtggccgcggtggccgcctgcaccgacgagggcaagtacctgggcgtgtcggccacgccgcaggggcagatggtcatgagctccaagtacctcaaggccgcgcaggagctgctcgacgaggtggtcagcgtcagcaagggcgtcgaggacgctaagacggccgctgccgccgcgaccaagagcctggccgcggtgaagaagaaggaggactcggagggcgcgtcaggtggcggcaccgacgacggtgccggcgcaaagagcggcggtggtgccgcgccagagatgtccacggcggagcggcaggagatgcagatgaagaagagcaagcttctcaacatgcttgacgaggtggagcagcggtaccggcagtaccacgggcagatgcaggcggtgtcgtcgtcgttcgaggcggcggcgggggccgggtcggcgcggacgtacacggcgctggcgctgcgcaccatctcgcggcagttccggtgtctgcgggacgcgatcgcgtcgcaggtgcgcgcggcgagccgggcgctgggcgaggacgcggacgccgccgtcgccgggggccgcaccgtggggtcccgcctccgctacatcgaccaccagctccggcagcagcgcgcgctgcagcagctcggcatgatgcagggcggcgcctggcggccccagcgcggcctccccgagcgctccgtctccatcctccgcgcctggctcttcgagcacttcctgcacccataccccaaggattcggacaagatcatgctcgccaagcaaaccgggctcaccaggagtcaggtgtccaattggttcatcaatgcgagggtgcggctgtggaagcctatggtggaggagatgtacctggaggagacaaaggaccaggacgctggaggcggcggcaacgacgagggcaagtccggtggcggcggcagcaagagcagcgacaccgtcgacggcgtcatgccgagggcggacgtgatgtccaagtccgcggtgcgcgtgggaggcggcggggcgggggcggagagcgcgtccaccaacaagggcatccatggctcctccctgctcgagctcggcggcggcgatcaccagcagtcccacgcggggttctacgacgacgatgaagacgacggcgacgacgtgatggggcggaggctcaagaaggcgcgcggcaacgagccggcgccggcgttccaccacgtgcacgacatagccacgctgcacgcgcaggccgcggcggccgccgactagaggtctcgcaggataggtaactagttgatacccaaacattgtacaagattttatatgtagatcatagggattggggggtatacagtaaagtatgcgaaaagggtatattggaactggacttagtgtatgctgtagaaattggcctactagtattatctgcagcaattcagtatttgttttgcttactgtaaacatagcacattgtgattcattggcagccccatgtgttgttagatgacattgtggaaaatgctgctccagtgagatgtttgttggtgccc

SEQ ID NO: 2279 - DNA, 580 bp, Zea mays
  Clone ID: TF_ZmC106001_4
ggcggccccagcgcggcctcccctagcgctccgtcaacatcctccgctcatggctcttcgagcacttcctccacccgtacccgagcgacgccgataagcacctgttggcgaggcagaccgggctgtccaggaaccaggtctccaactggttcatcaacgcccgtgtccggctatggaagcccatgatcgaagagatgtatcagcaggagtgcagagagctcgacggctcctcggccggcggagggggccccgagtccgtcaacgacccctccggcgccgacgactcgcactccccgaccaccaccggcgcagcgcagctcccgcaacagcaacatcacctcggcacggtgcctggggtgatgccccacaagcccgacccgggcgccgccggtccctcggctgcggacgcggcgttcgtcgggatcgaccctgtggagctccttggcggtggcgcggacgacttgtacgggcggttcgagcccggggtgagggtgcgctacgggcccgctgcggcaggcgctgcagccggcgacgtgtcgctgacgctgggcctgcagcacgccggcgccggcaacgccgc

SEQ ID NO: 2280 - DNA, 1271 bp, Zea mays
  unsure (1)..(1271): unsure at all n locations
  Clone ID: TF_ZmC11178_2
cctcgaggccggccgggcccctcttctcctctagcttctccttctctctccttcctggacattctctctctctcctctctctctaccatactcagacgagcagaagcagctagggacaccataggcaaactacttcagcaagaaattaaactatctcctacgcaagatcagaagaaactgtgtatggagcaagaagaggttggcctcgccctgggcctctccctcggctctggccaccaccaccaggagctcaagccccaacatccgtcgcatccgtgtgcggcgttgttggagccttctctgtcgctcggcagcccggcgaccaaggatgatggcccgaccgcaccggtgaggaggttcgctgccgtgaaaagggagctgcagacgatggaggggaacgacgacgaggccaccggcagggtacttgtctactcagtggcgtcgtcggcggtggttactgccgacgacgacgaagggtgcaacagcagccggaagaagctgaggctgtccaaggagcagtcggcgctgctggaggaccacttcaaggagcacagcaccctcaaccctaagcagaaggctgctttggccagacaactgaacctgagcccaaggcaagtgggaggtttggttccaaaacagaagagccagaaccaaactgaagcagacagaagtggactgcgagattctcaagcgctgctgcgagacgctaacagaggagaaccggcgtctccaccgcgagctccagcagctccgcgcctttttcatgcccaccgccgccgccgccgcgctctccatctggtcctctgncagcgccttgttgccaccggagcatctgccgccgccggagccaccgccggtgcagaaaataagcctaaggcgggcggccccggcggccgagcgccacacgtgttcagccctttcaccaattctgccgcctgctgaacacgcatacatatgtatatacatgcatgcgcacacatatatacgtatgtggtgcttagcgctagcggctagccacgctctatcattcatcgatggtcatctactagctagatagtaattggttcactagctagatggcatatattcctgtcccctccccccttaattcattagctttgttttttcacaagctaattaatgaattgatagcggcgtcgcgtgaggacgaaaaaaaaaaaaaaaaaaaaaaaaaaaaaaaaaaaaaaaaaaaaaaaaaaaaaaaaaaaaaaaaaaaaaaaaaaaaaagggggggcccgttttaaaagaac

SEQ ID NO: 2281 - DNA, 615 bp, Zea mays
  unsure (1)..(615): unsure at all n locations
  Clone ID: TF_LIB4735-005-R1-K1-G6
agcagtggtaacaacgcagagtacgcggggatggaaatgatggatcagacggtatgggctttggccccctaatactgacagagggtgaacggtccttagttgagcgtgtacggaaggagctgaagaacgagcttaagcagggttacaaggaaaagcttgtcgatatcagggaagagatcatgcgcaagcgcagggctgggaaacttcctggagataccgcatctgtactgaaagcttggtggcaagctcattccaagtggccgtacccaactgaagacgacaaggccaggctggtgcaggaaacggggttgcagctaaagcagatcaacaactggttcattaaccaacgcaaacggaactggcacagcaacccaacatcctcggctgaaaagaccaagaagaaaaggtgatgatggcccagagcaatcttggcaaaagctagagatgtccactatactttattatggcgaagtacattctccctcacttcgtaggcaagagggaaaggtatcttgggtgacttgagtggccacctaatgcgcaagtttgaccacgtgtggngctggggttgggtagtgaccctcacagtatagcattcgctaacgtgatgtgggt

SEQ ID NO: 2282 - DNA, 1122 bp, Zea mays
  Clone ID: TF_ZmC1104_1
gggagggccgtccggcggggaggagctcgacctcttcatgacgcactatgtattgctcctttgctcatccacgcgtccgcccacgcgtccggcagcatgtacgtgttcatgcaatggaagcagtgatgggttgctgggagcttgaacaatctttacaaagcctaacaggggcatctcctggtgaaggcactggagcgaccatgtctgatgatgaagacaaccaggtggatagcgaagccaacatgtttgatggaaatgatggatcagatggtatgggctttggccccttaatgctgacagagggtgaacgatccttagttgagcgtgtacggcaggagctaaagaacgagcttaagcagggttacaaagaaaagcttgttgatatcagggaagagattatgcgcaagcgcagagctgggaaacttcctggagatactgcatctgtgctgaaagcttggtggcaagctcattccaagtggccatacccaactgaagacgacaaggcacgactggtgcaggaaacgggattgcagctaaagcagattaacaactggttcatcaaccaacgcaaacggaactggcacagcaacccaacatcctcgggtgaaaagactaagaagaaaaggtgatattgatccagagcaatcttgacgatgctaaacgtccactgtgtactttatggcgaagtacattaccctccctccgtagccaggagcggagatgtgcatcttgggtggcccagtggtcacttaatgccccaagtttgaccacgttgtgggactggtgctagtagtgacctctgcagtatagtaatattcactaatgttgtgggaatcatgtggtgtataaccggcgaacgggagggagtaatttatgttttattgtaattgtctatctttaccttgtaatgatattttagggagaatcccaagatctcagaatggccgttcactgtattgtcggtggtaaaagtggtgggcaatcatcgtgttcagattacctccagaagggtatgcaatggctcgaatgttccatgtcgtgtttagctggttgtcgtttgtcttacttcctgctgagttggatacttgattccttcgaagatgtaaagcacccatcgatgcc

SEQ ID NO: 2283 - DNA, 925 bp, Zea mays
  unsure (1)..(925): unsure at all n locations
  Clone ID: TF_ZmC1104_2
caaggaacagctgcagcagcatgtacgtgttcatgcaatggaagcagtgatgggttgctgggagcttgaacaatccttacaaagcctaacaggggcatctccgggtgaaggcactggaggaaccatgtctgacgatgaagataaccaggtggatagtgaagccaacatgttcgatggaaatgatggatcagacggtatgggctttggccccctgatactaacagagggtgaacggtccttagttgagcgtgtacggaaggagctgaagaacgagcttaagcagggttacaaggaaaagcttgtcgatatcagggaagagatcatgcgcaaacgcagggctgggaagcttcctggagataccgcatctgtactgaaagcttggtggcaagctcattccaagtggccgtacccaactgaagacgacaaggccaggctggtgcaggaaacggggttgcagctaaagcagatcaacaactggttcattaaccaacgcaaacggaactggcacagcaacccaacatcctcggctgaaaagaccaagaagaaaaggtgatgatggcccagagcaatcttggcaaaaagctagagatgtccactatactttattatggcgaagtacattctccctcacttcgtaggcaagagggaaaggtatcttgggtgacttgagtggccacctaatgcgcaagtttgacgacgtggtggggctggagttggtagtgacctcagcagtatagcattcgctaacgtgatgtgggtgaatcacgtgttgcagtagaaccggcgagcgggaggggggtaatttatgttgtattgtaattgtgttttttattaccttgtaatgatattttagggagaatcccaagattcatattcgcaaaaaaaaaaaaaaaaaaaaacaacccctntcgctgttaccactgct

SEQ ID NO: 2284 - DNA, 750 bp, Zea mays
  Clone ID: TF_ZmC1104_4
gcttgtcgatatcagggaagagacatgcgcaaacgcagggctgggaaacttcctggagataccgcatctgtactgaaagcttggtggcaagctcattccaagtggccgtacccaactgaagacgacaaggccagactggtgcaggaaacggggttgcagctaaagcagatcaacaactggttcattaaccaacgcaaacggaactggcacagcaacccaacatcctcggctgaaaagaccaagaagaaaaggtgatgatggcccagagcaatcttgggaaaagctagagatgtccactatactttattatggcgaagtacattctccctcacttcgtaggcaagagggaaaagtatcttgggtgacttgagtggccacctaaggctttgtttgggtactctagcattgaccccaatccacatgtgttgaggtggattggggtgtaaattagtttaagttacacctcaatccacctcaatacaagtggattgaggtcaataccagagtacccaaactaagcctaatgtgcaagtttgacaacgtggttgggctggagttggtagtgacctcagcagtatagcattcgctaacgtgatgtgggtgaatcacgtgttgcagtagaaccggcgagcgggaggggggtaatttatgttgtattgtaattgtgttttttattaccttgtaatgatattttagggtgaatcccaagattcatattcgcaaaaaaaaaaaaaaaagcgggcgcttggg

SEQ ID NO: 2285 - DNA, 1736 bp, Zea mays
  Clone ID: TF_ZmC895_1
ggagagccaggggttgttagaacaagtccagtctagagagggagcgaaccaaaagggagaaataacaaaaaaaagaatagagacacacacacacagctctgttcttcttattccaatcctctctcatcttgctggttcatccttgggatcggctctgtcgtcccctagctagttcgttcggtgctgtggtttctgccgctgtatccaagaactcttgctcttgctgagtctgggacttcagttccttgcagagccaggctttacatatcttgggtgccgcacacagtatctatgcacctttgacaacaccaatctgattctgatgacaacaacagccactatctcccgtcatccttgcatcgatctgtcagctggcgtcgcctcgtgcttctgaagacgatggccacattcttctccacttccacgaaccagagggacctcgccggaggcggcggcgacatgtcgtcgttccaccactacgcctactcggacccaccagccggcggcctcatgcctttccccgccaccatcgtgtcgtcggaaggccacgtcgcgcacggcggtgacgacggcggcaggggcgcgttcgtggacgtgaacgcgagggacgggccgacgggcggcgccgagatgggcctgcagacgcagctgctcatggcgaacgccgcgtcggcggtgcagcaccaggggctgtcgcttagccttggcacgcagggggtgccggtgtctctttaccagtaccgccaggcgcaggcaggcatggccgccgccgcctttctaagcccggaccaggcgtcggcggcggcgagcaggagcgcgcagagcatctacgtccagaactccaggtacctcaaggccgcgagggagctgctggacgaggtggtcaacgtccaggacgcgatcaagcggaagggggacaagagccagcagggcaaggattccggcggcggcggcggtggcggcgagggcaaggacgccgagacgagcgacgagaaggctggcgagcacgaggggaactcctccgcgccggagctgtcgccgtcggagaggcaggacctccagaacaaagtgtcggcactgatggcgctgctggatcaggtggaccgcaagtacaggcactaccaccaccagatgcagatggtgatgtcgtccttcgacgcggtggccggcgccggcgcggcgaggccgtacacggcgctggcgctgcagaccatctcgcggcacttccggtcgctgcgcgacgctgtcggcgcgcaggtgcagtcgctgcggcggagcctgggcgagaaggacgggtccgcgcagggaggcgggctgccccggctgcgctacatcgaccagcagctgcggcagcagcgcgccatgcagcagttcggcatgatgcagcagccgcagcacgcctggcgcccgcagcgcggcctcccggagtccgccgtctccgtgctccgcgcctggctcttcgagcatttcctccacccgtacccgaaagattccgagaagctgatgctcgctaggcagacaggcttgtctaggggtcaggtgtccaactggttcatcaacgcgcgcgttcgactgtggaagccgatgatcgaggagatgtacagggaggagttcggggcggagatggactcgcactcgtcgtcggagaacgcggcgggcaacaagggcaaggacgaggcgatatcctcggaggaccacgaggagttccagagcccgtcgagcgccgccgcggccgc

SEQ ID NO: 2286 - DNA, 760 bp, Zea mays
  Clone ID: TF_LIB4757-069-Q1-K1-F12
cctcgaggccggccgggttagtgtttcaggaagaaacttggagaggatgacgatgcatctggcaaagagggcaaactaattcgccttcgttatatcgatcagcaaataaggcaacagcgagctttccaacagtatggtatgctacagcaaaatgcttggaggccacagagggggctacctgaaaattcagtctcgattctccgggcttggctttttgaacacttccttcacccgtatccaaaagactctgaaaagctaatgttatcgagacaaactgggttaacaagaagtcagatttcaaattggttcatcaatgcccgtgtccggctgtggaagccaatgatcgaagacatgtacaaagaagagataggtgaggcagagctagactccaactcctcctctgacaatgtgcagccgaacaaggacaagccaccatcttccgaagaaaaggaccataagacctcaacaagccaggtttgccaaaccagccagcttggcgaatccaaagccaacattggtggagtggtgagcttttgtggagcgccagccggcggcttccacaacgatgccaaccccgatgacagcttcatgagcctgatgctgaaggcccagagaccgggcgaaaccgatggcagcggtctcctccatgatgccgtcgctcatcactccgatgagagcgcgcggttcatggcgtacacctgacagagtttgggaggtatgggaacaacaacgtctcactgactctggggttgcagcacgc

SEQ ID NO: 2287 - DNA, 2943 bp, Zea mays
  Clone ID: TF_ZmC352_1
cgactacttttccgttgggtgctggtgtttgttgcagctagtgggtggtggtgcaggaattttttattccgggggcaggaagacggaggacgaggaggaggaacaagcgagagatagagagagcgctctcctatcttcttttgcttttggtattgttatcttgggatctgattttgtccccatacataccgagcgggagggaagggggcttgggttttctttctcctctcttctcttcttctcccctctcaccctcttctcctcccaaggctgactggccgtcggctcgggtctggggacagcaatccctgccgtcttgccatgctccccacgaggagcacaccgtcagagtgattctgcagaagtattcattctactggcgtgctgagcaggtgcaggagctctaataagcctagtgcgcacttcagtcatcagccaagtgattgaaaagggcaagtcagctgaaatattggttccgagggctctgtagttgcttatccacgctcgcctatgcctttgcgctgatcttgacaactcaaagcttggatatggctacttattactcgagccctggcagtgaaagagattcacaaacaatgtactcagcagagtcaggcaatgtatcatatcccgtgccatcagccctagggaactttctttatacgaacaatgcatcttctggaccttatacagaatttagtggaattgtccagcctcagcagaatttcatggaacttactggccatccttcagcaatgtcacatgattcgtcatccaatgaagctaccaacatgggcagttcactcactgaacagcgctcttttggtcctttgaaagatatgagaaatgagatgttgatgcatttgatggatggagcacacagcagtggcagtgatctcatccacaatgatgctcatagcactgtacagctcgaatttggcatgttaaacaaccacaactcaacaagtgttccattagcaccaggccaagggctgtctctgagcctcaatacacatatcttggcgccttcctatccacactggtctgcaaagcaagacttactaacaccaaattcttaccagggtgatgacaacagaatgaagaatatgcagtctgaggcctcacaggcaatccgtaactctaagtatctgaaggcagcacaggagttgcttgatgagattgtcagtgtttggaagagtgttaaacagaaaacagataaaggcccttctgaagcaggaaagtcttatagatggaagactgatggggggactaaaagtgagggagtatcttttgatccgcaagagtctggtgccaatacagcagctgagctttcaactgctgagaaacaagagctccagaataagatggcaaaacttatgactatgttggacgaggtggataggaagtacaaacactattatcatcggatgcaacttgtaatgtcatcgtttgatatggttgctggtgctggagctgccaagccttatactgcagttgccctccagacaatctcacggcatttccgatgtctaaaggatgctatcaatgatcaaattagtgttatccggaagaaacttggagaggatgacaatacatccggcaaagagggcaaactaacccgccttcgttatattgatcagcaaataaggcaacagcgagctttccaacagtatggtatgctacagcaaaacgcttggaggccacagagaggactacctgaaaattcagtctcgattctccgggcttggctttttgaacacttccttcacccgtatccaaaagattctgaaaagctaatgttatcgagacaaactgggttgacaagaagtcagatttcaaactggttcatcaatgcccgtgtccggctgtggaagccaatgatcgaagacatgtacaaagaagagattggtgaggcggagctagactccaactcttcctctgacaatgtgcagcggaacaaggacaaggcaccatcttccgaagaaaatgaggaccataagacctcaacaagccaggtttgccaaaccagccagcttggcgaatccaaagccaacattggtggagtgatgagctttagtggagcgccagccggcggcttccacaacgatgccaaccccgatgacagcttcatgagcctgatgctgaaggcccagagaccgggcgaaaccgatggcagcggtctcctccatgatgccgtcgctcatcactccgatgagagcgcgcggttcatggcgtaccacctgacagagtttgggaggtatgggaacaacaacgtctcactgactctggggttgcagcacgccgagaacacccagccgggcttccccggcgtcagagaccaagacatctacaactccacagctcctctcaacgtcacctccacatcttcagagtatgattcggcgagccaaatagatcaacaacaacggcagcggtttgaggtgtcacctctgatgcatgatttcgtggcctgaatttcagctgacgcactggaaaacgtggggaagtgacttgtcatttgtagtgccaggacgaacaatatgcctggactgaattttcaggcgtggaaatgtagctgtagttgtaattggggggtacagaatggacgaggtatatagcataaatgttatgtaaatttagtgggggcaggggtgatagtggtaaagaaatcctgtaaagatggaatacattttatacgtgtaaaatacgagtatttaagggccacgctgtaaaaatagatttacatgtaactgtaacgagtgtttgtaatgagtgtaaagaactgccacatgccatattttcgatgggtgagaagatatagaaatattattttctttgttaaaaaaaaaaaaaaaaaaaaaaaaaaaaaaaaaaaaaaaaaaaaaaaaaaaaatataaaatgtgcacgttgttttgttgaaaatttgaattaattttggtgcg

SEQ ID NO: 2288 - DNA, 565 bp, Zea mays
  Clone ID: TF_ZmC114837_1
cccgggcggcggcggcgtctttgcggcggccgggttgatggccaagggggggggggcgcccaggctgcgggtcatcgaccagtgcctgcggcagcaccgggcgtaccagaccggcgtcgtcctcgagagccagccgtggagaccgcagcgcggcctgccggagcgcgccgtctccatcctccgggcgtggatgttcgagcgctgggggggcccgtatccaagcgacgtggacaagcacatcctggcgcgccagaccggcctgtcacgcagccaagtctccaactggttcatcaacgcgagggttaggctgtggaagccgatggtggaggagatgtactcggaggagatgaaggaccccaaggagggcgcctgcagtaacgcgaacagcagcgtgaacactggcgccggctacgcctccgaggagctagggcagccgctggggcacgggggcgcctgtggtggcgtggacgagcagaagccgacgcgggcgcagctggtccacgacgccgggtcgctagcatcagtcgtcagcatcggcagcagcagggaccagcagcagatcagc

SEQ ID NO: 2289 - DNA, 1215 bp, Zea mays
  Clone ID: TF_ZmC32595_1
gtcgtaagctgatccttagagcggcgcgcggaggggtgatagcggcagctgctcaagggggagatcgcggtgcacccgctgtgcgagcagctagtggcggcgcacgtggggtgcctgcgcgtggccacgcccatcgaccacctccccctcatcgacgcccagctcgcgcagtccagcggcctcctccactcctacgccgcccaccaccgccccttcctctccccgcacgacaagcacgacctcgactcgttcctcgcgcagtacctgatgctgctgtgctcgttccgggagcagctgcagcagcacgtccgggtgcacgccgtggaggccgtcatggcgtgccgcgagatcgagcagtccctgcaggacctaaccggggcgacacttgaggaagggacgggggcgaccatgtcagaggacgaggacgaggcgccgatgctggaggtgggcctggatatgggctccgacgggcacgacatgatgggcttcggcccgctcatgcccaccgactcggagcgctcgctcatggagagggtcaggcaggagctcaagatggagctcaagcagggtttcaagtcgagaatagaggatgtgcgggaggagatcctgaggaaaaggagggccgggaagctgcctggggacaccaccagcatcctcaagcaatggtggcaggagcactccaagtggccataccccacggaagacgataaggctaagctcgtcgaagagaccggcctgcagctgaagcaaatcaacaactggttcatcaaccagaggaagaggaactggcacaacaactcccagacgtcaaccctcaaatcgaagcgtaaaaggtgatggaggagagctagctgcaccgtatataccgtgtatgtaacgcacacctgctgacacacatgtacacatgtataccataccaacacgctaatcaaacggagctctgcatggcgactgtactcacggaaataaagaggaccatatcgaccggttcaactgtatatctagccattagtctgaccactggcatatttgtttgctgcggctgatactttgagctgatgatgtgtgggctcacagcatactttattcttgttcttattgtgttgacatagtttgtcccccataatattgaggattaaaaaaaaaaagaataaaccgaaagggagggcaacggtacccatgggcctatgggggaggggattacgcgcgctgact

SEQ ID NO: 2290 - DNA, 2219 bp, Zea mays
  Clone ID: TF_ZmC13862_1
ccgccgcgcttttgctgatccgtgtgctctgtgtgtgtgtgcgggcgcgcgcgcgcgcttcaacttgaagaagcgcgggcgatcaagatggcgcacgaccccagcctgggcttcgcggactacttctcggcggcggcggcggcggcggcggcgggcgccacggcgatggacgacgacgtcggggcgtcggagctctatggcctgcatgccgacgacatggagttcctcggcatgcgtgggctggccgccatgccccccgccgcggcacaccaccagcaccaccaccatcacggccacagcaaggccggtgcgctcctcgacgacgacgacgcgggggtggggccagacgtcagcggctccgcggacgacgccaccatgcgcttcctgagcgagcagcagcagcagcagcagcaccaggcgccgctgtcgctgtcgctgtgccggccggacgtgacgacgacgttgcacgagcagcaccacctcgccggcggcggctcctcgtcccggtaccatcaggagcagcagccggcggcgtgggtgcagcagcagcagcacgactactcgccgtcgccgcagatccaggccatggacgcgctggagctgcagcggctcaaggacaagctctacatcatgctggaagaggtggaccggagataccggcggtactgcgagcagatgcgggcgctggcgggcgggttcgaggcggtggccggggagcgcgcggcggcggcgtacacggcgctggcgtcgcgcaccatctcgcggcacttccggagcctccgggacggcgtggtggcgcagctgcaggcggcgcgcagggcgctcggggagaaggacgtggcggtgcccgggatgacgcgcggggacacgcccaggctcagggtgctcgaccagtgcatccgccagcacaaggcgctcacccaggccgccggcatgatggagagccacccgtggcgcccgcagcgcggactccccgagcgcgccgtcaccatcctccgggcgtggctcttcgagcacttcctgcacccgtatccaagcgacgtcgacaagcatatcctggctcgccagacgggcctctcacggagccaggtgtccaactggttcatcaatgcgcgggtcaggctctggaagccaatggtggaggagatgtacgtggaggagatgaaggccgagggccagcaggacggcgggggccagcagcaggcaggcgtcgccaacaaccctaaccctagcagcgccgcccacgcccacgcctccgaggcggctgaggacgatgggcgcggggacagcggcggcgcagcagccgtcgtcgaccggaagccgacgcgggcgcagctcctgcacgacgccggctcgctcgcctcggtcgtcaacatcggcggcggatcgcgcgcgggattcggcatcatggaccacctcgacttcgacgcctacggcggccaccacgccggcgccgtgtccctcacgctgggcctgcagcagcacgactcccacgccgacaccggcggcgtcaacatcgcgttcggcgcgccgccgcccgcgcaccaccacgggtacctgttcgctccgacgacggcggcggcaggccatcagatgggcgccggcgtgcacccgggaatacaccaccacgtccagttcagcggcgccggcgccggcatcgacggcggcgaggcggcgcacgggcaggagcactaccggggcctgcagggcggcggcgggttccacctcctgcgtgacctggccgggtgatctgctccatccaccaccgcccgtgcatccgcggtcggccgcacgcgagctctagctgcgactccgagtgagctgagcgatggggacgtcgtgccggcgcctagctagctaccgggtgtccgccggattcatggcacgcactcgatcgcgcgtgcgctcatccggccacagcggatttgtttggcttgttgcttgcctggctcgtgccggtctccatcggtctcgatcgccgccggcggcggcttggccgggcccgggtctagctggctagctagctgccctagttatacataatatatgtatttgtagcgtgtacagatcgggtcgcgatcgagcagtttggacgcgcgcaggtgcagctagtactagtagctagcccgccggaactgcgtagttgatcaaacacgcattgcatgcaggttaattgcattgtttatcaaattcttgaaggattcgacgacgtacggccc

SEQ ID NO: 2291 - DNA, 1551 bp, Zea mays
  Clone ID: TF_ZmC2618_1
ctgcgtccgccacttgactcccatcccctctcgcgtggtccttctcctgctcccgctcccgctgctcctcatcttctcgcgccgcggcccccagcctttccccgccgctacctctctctaattgggcggcggcctgccggtccgatggcgttcaactaccacgaccacgcgctggcgatggaccccgcggcggccgccgcggttggggcggccgcgaaccctagctttgtctccggaggtggcatggccggggggcccggctgggagagggagaaggcggccatcgcggcgcacccgctgtacgagcgtcttctcgaggcgcacgtcgcctgcctccgcgtcgccacccccgtcgaccagctcccgcgcatcgacgcgcagatagcggcgaggcccccgcccatggaggccgcggctgcggctgctgcggcgggcggagcacactcgggaggcgaggagctcgacctcttcatgacacattatgtgttgctcctctgttcattcaaggaacaactccagcagcatgtgcgtgttcatgcaatggaagcagtcatggcttgttgggagctcgaacaaactttacaaagccttacaggtgcatctcctggtgagggcactggggcaactatgtctgacgatgaagacaatcaggtggacagtgagagcaacatgtttgatggaaatgaggggtcagatggaatgggatttggcccattaatgttgactgagggtgagagatccttagttgagcgcgtccggcaggagctaaagcatgagcttaagcaggggtacagagacaaacttgtggatattcgggaagagatattgcggaagcgaagagctgggaaactccctggcgacactgcttctaccttaaaagcatggtggcaagctcattctaagtggccgtacccaaccgaggaagacaaggctcgactggtgcaggaaacagggctacaactgaagcagatcaataactggtttatcaaccagcgtaagcggaactggcacaacaattcggcgtcatcctcgtcggacaaaagcaagagaaaaaggaacactgcaggtgatgggaacgcagaaccagcctggtagggcatggtcggggaacgaagtttatgtaaataatgcttctactgtgaagagttccatcatatttgttgctccagaaaagaccctcagaccggtgtttcctgaacccatattcatacaaagacatcagacgatgaataatgttgcgagtagtcaaataaaataaataacttgtatagtgaataactagaaactagcattcatcgttttggtattgtatagcgctagagtgtaattgtttggtcggactgtcttgtataatggtgtaaggttcaaatgcattttgacctagcattcgatattgtattttgtgatgttaaaaaccattggattcgttttgtgttttatccgtggaatagggacactgtttagtgttgccctcaattcggccatgtcgtgttgtcaactaaaaaaaaaaaaaaaaaaaaaaaaaaaaagggcggccgtcgcgcctagaac

SEQ ID NO: 2292 - DNA, 689 bp, Zea mays
  unsure (1)..(689): unsure at all n locations
  Clone ID: TF_ZmC32595_2
cccgggcaagatagagntgtgagggaggagattctgaggaaaaggagggccgggaagctgcctggggacaccaccagcatcctcaagcaatggtggcagcagcactccaagtggccataccccacggaggacgataaggcgaggctcgttgaagagaccggcctgcagctgaaacaaatcaacaactggttcatcaaccagaggaagaggaactggcacaacaactcccagacgtcaaccctcaaatcaaagcgtaaaaggtgatggagagctgcgccaccatgtactgcacacctgacacgtataccaattaccaacacgctaatcaaacgacgtacggccatgcatggcgactcacaagaaataaagaggatcgatcgattcaactgtatatttctagtcattagtcactagtcagagaggtgacaggttcatgacacacacaaacacacgtacactagtctgaccactggcatatttgcttgctgctgtgattaatatattttgagccgatcatgtgctcggagcatactttattcttgttattattgtatagcatagtttgtccaccccaccccctgtgcacatatatacagtgacctgatctgaccatctcacctgctggcaggaagagatcgaagaacagagaggttaattgcatgtaccatgacaatgccaaaaaatctaaa

SEQ ID NO: 2293 - DNA, 475 bp, Zea mays
  Clone ID: TF_ZmC105851_1
ggccaacaagctggagccggacgcaaggcgcagctggcccgcgcgctggggctgcagccccgccaggtggccatctggttccagaaccgccgcgcccggtggaagaccaagcagctggagaaggactacgacgcgctgcgccgccagctggacgccgcccgcgccgagaacgacgccctcctctcccacaacaagaagctccagacagagatcatggcgctcaagggaggcggaggagggaggcaggaggcggcgtcggagctcatcaacctcaacgtcaaggagacggaggcgtcctgcagcaaccgcagcagcgacgagaacagctccgagatcaacctcgacatctccaggccgcctcgggccgccgacgagagccccgccgccatggacagctaccgcggcatcccgttctacgcctgcgcccgcgccgacgacgtcgaccagctccagctcctgcacagcgggggccacc

SEQ ID NO: 2294 - DNA, 1043 bp, Zea mays
  Clone ID: TF_ZmC311845_1
ccgggctcgagtttttttttttttttttttttgatcggaattttaaggttaaataaataacaagaaatcttagttccactcgaccaacagcatgcaagcgccaaattaaatgaactggcgatgatccggcttcactaccggcacgggattcagactccggcagttctatataaacacgccagggagattacaaatatatatgggtagatcgcagggtggcatgcagcgatgcttgtatctggaaacagccatcttatctttatatacctgcatccctgctgctgacttaattgttcaggcctccattattcctgcggaggccttcttgagatcctcgtacatctcctctatcatcggcttccacagccgaacgcgggcgttgatgaaccagttggagacctggctcctgctcagtccgctcctggctgctaacatctccttctccttgtctctcgggtacgggcggaggaagttctcgaacatccaggctttgagcacggccacggacttctccggcaggccgcgctgcgggcgccacgattgctggtcgccgcgcctgagctgccgcagcgcccagtgcttctggatgaaggccgactcccagctgcgctccctgtcggccagcgacagcgacgacgacgacgacggctgattacctccccgcgtggccgccgcgatctcgccggtgatccgcgccctgagcctccggtgcgtcgctgacaccgcgcgctgcgcaaacagcgtcgagagggcgccgccgccgccgcccgggcgcacaaggctgccgtacttcgacgccgcattctggatctcgtccaggcattgcttgcaccgttggtccattatctgtagcagtttctggaagtcgttcttgagctcattgtggtgctcttccgagctaacaaacaccgacgggttcgggttggatgacgtcgtcttggagcaataacttgacgatggcagcgggcagctcgcctcaccgccgccggcgaacccggccacgtcttgcagcaggcggatgacgaactcgtccaacacctgct

SEQ ID NO: 2295 - DNA, 1192 bp, Zea mays
  Clone ID: TF_ZmC74_263
ggccaaatcacaagcttttacacgtatagtatagtgtgtttcatctttacaagatcctttcccttttccttttcacccctatcaccccaacccacctacgctacattacatttcctgctataccaccaatctgtgtatacaattgaaaaactacaggctactacaacccaatgcttcctttcaggcacatatgtaacacatatataatcatctgaggtactctcttccgttccaaattataaaacgttttgggtatatatctaaacacatcttatatttggtatagcagaggccatgaatttagaaaagccaaaaaaaaaacgtcttgcgatttggaacggagagtgagtataggcaaacgaacaatcacgccacaaaatcatggagaaggggcgactgctcgaaccgttgccgctgatccatctggctcatggactcgtagtccggcgacgccacgctgacaccgagaggagcggcggtggcattgtagatgtcgtcgtctccgacaccgattccgacaccggggaagctctgctgagcgtgcggaaccgagaggctgctgctggagcgctgcagccccagggtgagcgacacgttgccgttgccgtacctgcccagctccgccaggtggtacgccatgaaccgggcgttctcgtcctggtgctgcgccacggcgctgtggtggaggaggaggccgccgccgccgtcgttcggtcgctgctccttgagcatcaggctcatgaagctgtcgtcgtggtcgtggtcgtggccaggctcgttctggaataaccccatgggcgctccagcggcggcggcggcgacgctcatggccctcatgctggctcctcctggtggctcgctcagctggctgctgctctcgcagacggcccgcggcgtgcagcagcttctcgccaggtggtcctccttgtctcgcgaagacgccgtcttggccttgcttcctgctggcgcgttgtcggaggaggagttggagtcttgctcgatgtctccggtctcttccttgtacatgtcctcgatcatgggtttccagaggcggacgcgggcgttgatgaaccagttcgaaatctgactcctcgtcaggcctgtttgccttgccagcatcagcttttcagaatccttagggtacctgcaggacagtgccatcagccatgacaagatggtgaggaggaacccg

SEQ ID NO: 2296 - DNA, 1392 bp, Zea mays
  Clone ID: TF_ZmC30025_1
ggcacgagcggatagatgtggttagttgctctactgtttatgataactttctgccgtttaggatgtctgtgggtaccagttcataaataggcgtgcgtgccgtggaccttggtgttgctacttgctaccaatggtcatggcgaagcagcagcatgacaaggggttgccgaagcaagctcgcaatgagcccgcgccgttccggctcgagcagtgttgccgctgcgacgatgcccaccgtcaggccgacgacgagtccatggatgctgctgggtctgctggcccgctgcacctgactctcggcccgctcggctcggccgccggcccccgctgctcgtgcggtgtcgcgccggcgccggcgccggcgctggcggcgcccgcaacggtggccgtcctccgcgggtcccggtacatgcggccggcgcaggagctgctgggcgaggttgtgcgcgtggccgacctggcggctgccgacgacgaagacgaggaccaggcgacggagcggctcgagggcggcggtcaccgggcagcgcgtcgggcggccgggaacgacggcgacggcgtccaggccaagctcctctacctgctcagcgagctggagagcaggcgggagcgctacttcggcgagctggagcgcgtggtgtcgtcgttcgagccggcgctgggcggcggcgcggcggcggcctacacgaccctgatggcgcgggccatgggccgccacttcggcaacctgcgccgcgccatactgcgcaggctcaggctccaagccgccgccgcggcgaggaggtctctgcggcgcggcggcgaggaccaggacgacgacgacgacgacgacggcgacagcgacggcgaggtgaccgaggagctggtggacaggttggctcggcggacgaagctggccgcggcggcgcgggcggagcaagcgtggcggccgctgcgtggtctgccggatggctccgtggccgtgctccgggcgtggctcttcgaccatttcctccacccgtaccccaacgacggcgagaagctgaggctggcggtgaccaccggcttgagcaggcgccagatatccaactggttcatcaacgcgcgcgtgcggctgtggaagcccatgatcgaggagatgtacaaggacgagttctccgacggttccgccgtctccagctacgacgacgccagcgccagcggcgcctcctcatcctcctgagtcttgaccacctcgccctcgagaaagtttatctagctaattcatcactcggttgattggtcctgttgctttgggattatattaatttatttatatccatgcttaatcatgtgcctctcttgtatttttttttagaaaaggacatactccttcaaaatctagcgacttttcgaaaaaaaaaaaaaaaaaaa

SEQ ID NO: 2297 - DNA, 1452 bp, Zea mays
  Clone ID: TF_ZmC352_3
caaaacttatgactatgttggacgaggtggataggaagtacaaacactattatcatcagatgcaacttgtaatgtcatcgtttaatatggttgctggtgctggagctgccaagccttatactgcagttgccctccagacaatctcacggcatttccgatgtctaaaggatgctatcaatgatcaaattagtgttatccggaagaaacttggagaggatgacaatacatccggcaaagagggcaaactaacccgccttcgttatattgatcagcaaataaggcaacagcgagctttccaacagtatggtatgctacagcaaaacgcttggaggccacagagaggactacctgaaaattcagtctcgattctccgggcttggctttttgaacacttccctctcccgtatccaaaagattctgaaaagctaatgttatcgagacaaactgggttgacaagaagtcagatttcaaactggttcatcaatgcccgtgtccggctgtggaagccaatgatcgaagacatgtacaaagaagagattggtgaggcggagctagactccaactcttcctccgacaacgggcagcgaaacaaggacaaagcaccatctcccgaagaaaatgaggacctgcagaccccaacaagccaggcttgccaaaccagccagctcggccagtctaaagccatcgttggtggagtgatgggctttagtggagtgctagccggcggcttccacaccgaggccaaccccgacgacagcttcatgagcctgatgctaaaggcccagagacctggtgaaaccgaaggcaccggtctcctccacgatgccgtcgctcaccactcggacgacggcgcccggttcatggcctaccacctggcagagttcgggaggtacgggaacagcagcaacgtctcactgacgctgggcttgcagcacgccgagaacagcctcgcagtcccaccaaacactcagccaggcttccccggcgtcagagaccaagacatgtacaacgccacagctcctcctctcaacgtcgcctccacgtcttcagagtatgattcggcgagccaaattgatcaacaacagcaacggcagcggttcgagccgtcacctctgatgcatgatttcgtggcctgaatttcagctcgcccactggaaaacgtgggggaaaattactgccaatttgtagtgtgtgccaggacgaataacttgcctggactgaattttcaggcgtgggacagtagctgtagttaacgattggggattggggggtacagtacaggaggtatatagcgtaaatgtgatgtaaatttagtgggggtgatagcggtaaagaaatcctgtaaagatggaatgcatttatacgtgtatttaagggccatgctgtaaaaatagatttacctgtaatgagtacttatgatccaggtaatatatatactgtgcacgctgttga

SEQ ID NO: 2298 - DNA, 1385 bp, Zea mays
  Clone ID: TF_ZmC352_4
gggctgtgcgggcatacctggtctctccgaattgtccagttttttggtgtctgtccgccgggttcttgagctggcttggggatctgtagctttgagagcttcatcggggaattcctgcggcttgggggggttcttgcggttgtgttgagtggcctttcttgtggaagtgcagagtgattctgcagaagtattcattctactggcgtgctgagcaggtgcaggagctctaataagtctagtgcgcacttcagtcatcagccaagtgattgaaaaggtgcaggcaagtcagctgaaatattggttccgagggctctgtagttgcttatccacgctcgcctatgcctttgcgctgatcttgacaactcaaagcttggatatggctacttattactcgagccctggcagtgaaagagattcacaaacaatgtactcagcagagtcacgcgttcgttttccttcacccgtatccaaaagattctgaaaagctaatgttatcgagacaaactgggttgacaagaagtcagatttcaaactggttcatcaatgcccgtgtccggctgtggaagccaatgatcgaagacatgtacaaagaagagattggtgaggcggagctagactccaactcttcctccgacaacgggcagcgaaacaaggacaaagcaccatctcccgaagaaaatgaggacctgcagaccccaacaagccaggcttgccaaaccagccagctcggcgagtccaaagccatcgttggtggagtgatgggctttagtggagtgctagccggcggcttccacaccgaggccaaccccgacgacagcttcatgagcctgatgctaaaggcccagagacctggtgaaaccgaaggcaccggtctcctccacgatgccgtcgctcaccactcggacgacggcgcccggttcatggcctaccacctggcagagttcgggaggtacgggaacagcagcaacgtctcactgacgctgggcttgcagcacgccgagaacagcctcgcagtcccaccaaacactcagccaggcttccccggcgtcagagaccaagacatgtacaacgccacagctcctcctctcaacgtcgcctccacgtcttcagagtatgattcggcgagccaaattgatcaacaacagcaacggcagcggttcgagccgtcacctctgatgcatgatttcgtggcctgaatttcagctcgcccactggaaaacgtgggggaaaactactgccaatttgtagtgtgtgccaggacgaataacttgcctggactgaattttcaggcgtgggactgtagctgtagttaacgattggggatttggggggtacagtacaggaggtatatagcgtaaatgtgatgtaaatttagtgggggtgat

SEQ ID NO: 2299 - DNA, 848 bp, Zea mays
  Clone ID: TF_ZmC437205_1
cctcgaggccggccgaattcggcacgaggcccacacgaattgccgccaccaccccacacgacatcctacaaccccagcctcattccaccgggcccgcacctcagaccacaggtggacgaggccacctgccggccagcttctccggccaccaccgtcgaccgtgtaaaacttgcactgacgaagcctaccttcttatccggcggcggggccatggggttctcgctgtaccccaccaagtcgtcgacgcgcacgccgttgagcaccagcttcttccgccacaagttcccggccgccgcggtgtccttctgatcaggctagctccggccgcccggcggtcgacctcgctccgcgcttcaagaagaggtggaggagcgtacatacagacacgagcgccgccgttggtgggtggtgcggcggacgggcggcgcaagcggccgttccagctgacggcgcacgatgagctgcagctgcagctgcagctccagctggacgacgagctgtgcggcctggactacgagctccatgggccgcagcaggagcggacaacgaagcggcggctgacggcggagcaggtgcgggagctggagctgagcttcgaggaggagaagcggaagctggagcccgagcggaagagcgagctgggcgcggaggctcggcatcgcgccgcgccaggtggccgtgtggttccagaaccgccgcgcgcggtggaggagcaagcagctggagcaggacttcgaccgcctcagggccgcgcacgacgacctcatcgccggccgcgacgcgctcctcgccgataacgatcgtctccgctcacaggtgatcacgttaactgagaaactgcaaacgaa

SEQ ID NO: 2300 - DNA, 1082 bp, Zea mays
  Clone ID: TF_UC-ZMFLMO17002E04_FLI
ccggcgggtgtcctttttgtcttcgagcagaagcagaaaatcgcgttggcgaagcaactgaagctgaggccacggcaggtggaggtgtggttccaaaacaggcgagcaaggacgaagctgaagcagacggaggtggactgcgagctgctgaagcgctgctgcgagtcgctgagcgaggagaaccggcggctgcagcgggagctacaggagctccgcgcgctcaagctcgccggcccgcacccacaggcgccgtcgtcgtcgcccgccgccgcgacgcagggcgtgccggtgccggtgccgccgccgttgtacgtgcagatgcagatgcagctcagcagctgccgatgctgccggccgccacgctgagcctctgcccgtcctgcgagcgcctgcgcggcgggcccgccgcgcccaaggccgagcccgacaggccccaggcagccaaccaccgtttcttcaaccccttcacccactccgccgcctgctgatgatcatgatgatgttgcttgcgcgcgcctgcgctgcgcaccagcaccagcacgcgcatctaccttggcggcttggcgtacgtgcgcgtgcatgatgcaagagcaagcaacacgcagcggcggcagcgaacagatagcggcaccgcccaccaccgcagatactagctaccacgtatacactccgacgatccatccacctcgcgatcgcgtacgtcacaagtaacatgtgatcctccgatcctctggctattttcttgatccggaggggttaaagttacttgtcagtgttcccatcagctaatcgatcgatcgatcgatccaccatagattcataggcttgataggaggaggtagtagtcaaaatagccggtccgtccatccatccatgtatatttttgcgcatgcatgctgtaattctgtccctctcgatcggtcggccgatctactggaaatttttttttgctgcagcatgaggatagacccatttgcaaatcaataacacaactaaaacgttacttggtggacttgtaggtagggtctatcctcttttttatgaggggctacaaacatcctaatttagagctgggttgcaac

SEQ ID NO: 2301 - DNA, 1615 bp, Zea mays
  unsure (1)..(1615): unsure at all n locations
  Clone ID: TF_ZmC2618_2
attcggctcgaggctcccgctcccgctgctttttatcttctcgcgccgcggcccccagcctttgcccgccgctacctctctctaattgggcggcggcctgccggtccgatggcgttcaactaccacgaccacgcgctggcgatggaccccgcgaaccctagctttgtctccggaggtggcatggccggggggcccggctgggagagggagaaggcggccatcgcggcgcacccgctgtacgagcgtcttctcgaggcgcacgtcgcctgcctccgcgtcgccacccccgtcgaccagctcccgcgcatcgacgcgcagatagcggcgaggcccccgcccatggaggccgcggctgcggctgctgcgcacgagggagcacactcgggaggcgaggagctcgacctcttcatgacacattatgtgttgctcctctgttcattcaaggaacaactccagcagcatgtgcgtgttcatgcaatggaagcagtcatggcttgttgggagctcgaacaaactttacaaagccttacaggtgcatctcctggtgagggcactggggcaactatgtctgacgatgaagacaatcaggtggacagtgagagcaacatgtttgatggaaatgaggggtcagatggaatgggatttggcccattaatgttgactgagggtgagagatccttagttgagcgcgtccggcaggagctaaagcatgagcttaagcaggggtacagagacaaacttgtggatattcgggaagagatattgcggaagcgaagagctgggaaactccctggcgacactgcttctaccttaaaagcatggtggcaggctcattctaagtggccgtacccaaccgaggaagacaaggctcgactggtgcaggaaacagggctacaactgaagcagatcaataactggtttatcaaccagcgtaaggggaactggcacaacaattcggcgtcatcctcgtcggacaaaagcaagagaaaaaggtaatatcacaagaaactagactaagcttctgcttccacatccttgacacctttctggtttctgtttgctgtatgcttatgcttgtaataaaggaacactgcaggtgatggaaacgcagaaccagcctggtanggcatggtcggggaacgaagtttatgtaaataatgcttctactgtgaagagttccatcatatttgttgctccagaaaagaccctcagaccggtgtttcctgaacccatattcatacaaagacatcagacgatgaataatgttgcgagtagtcaaataaaataaataacttgtatagtgaataactagaaactagcattcatcgttttggtattgtatagcgctagagtgtaattgtttggtcggactgtcttgtataatggtgtaaggttcaaatgcattttgacctagcattcgatattgtattttgtgatgttaaaaaccattgtattccgttttgtgttttatccgtggaatagggacactgtttagtgttgccctcaattcggccatgtcgtgttgtcaacttcatattaaacttcaaagttgtttgtatttaataaacttcaaacttcatatataacacgaggttgtggtatagtttcccgattt

SEQ ID NO: 2302 - DNA, 929 bp, Zea mays
  Clone ID: TF_ZmC32182_1
aacacttcctgcacccatatcctactgatggagacaagcaaatgcttgctaaacaaacgggtttaacacggaaccaggtatccaactggtttataaatgcaagggttcgtctttggaaaccaatggtggaagagatccacaaccttgagatgaggcaggtgcacaaacaccctgttctcgacaagggccagcacgtgctgcatcaccaaacccagcattcgttcgagagcagtggaaagccttctgacccttccgactctcagcttggccaaagcagcagcatcacgaggaaccacaacatccctgcgtcccagggatttgccgatgagctctccgagatgtcccattctattcagcaggggcaggtaaccttcgcatacaatgggatgtcggcgccacaccacagcctcgcttcgtcacagcaccaccagcaggccgggccgatgagcggcattggtggcgcggggaacggtggcgtctccctcaccctcggcctccaccagaacaacagagtctgcatagccgagccactcccggcgtccgtccctcccaacctcgctcaccgttttgggttggaggaggtcagcgacccctacatgatgggctctttcgggaaccaggaccggcatttcggcaaggagattggcggccatttggtgcatgattttgttggctgacatggcagctgctgctgcattgttgcttctggtcagctgatctgatctcagcttgctgatggtgcacaagcatgtatttgtaccactactagtatgttagaatggtatataagtgtatcacttggtggctttggcttgatcagtttgaatcaattcctgaggatggagaaaaaaaaaaaaaaaaaaaaaacaaagggcggcggacgcgtggccacaccctaacatactacaacattcaaaaagagagcaccc

SEQ ID NO: 2303 - DNA, 1048 bp, Zea mays
  Clone ID: TF_ZmC1389_7
gtctcggcctgggcgtggcggcattccagcccagcttctgccacccggccggcaatgccgcggcggagcgggaggccagcccgaccgcggcggacgagagggagcggaggtgctctcccgccggcagcccgacgtcgagcggcagcggcagcggcagcgggaagcgcgtcgcggcggagaggtcggccggcagcggcgacgaggacgacgacgggggtgctcgcaagaagctgcggctgtccaaggaccaggccgccgtgctcgaggagtgcttcaaaacgcaccacaccctcactccggtaagggcgtaactaaggcttcatccttcgatccgacagacgtcgccgttcctcgccgtctgtcggtcggctgatttgatcttggcggtggccggtgggtgggtgggtggctgaccaaggttgtgtccgtctcggcgctgcagaagcagaaggcagcgttggccagccgcctgggcctccgggcgcggcaggtggaggtgtggttccagaaccggcgcgcccggaccaagctgaagcagacggaggtcgactgcgagtacctcaggcgctggtgcgagcagctcgccgaggagaaccggcgcctgggcaaggaggtcgccgagctcagggcgctgagcgccgcgcccgcgccagcggcccctctcaccgccctcacaatgtgcctctcctgcaggcgcgtctcctcttcatcctgctcatcctcgccgcctaacacgcacgcgcatgccgctgcagctggcactggcaggagcgtggcggcggcggcggcgacgacgttgcccgcccaccggcagttcttgtgcgggttcagagacggcgggccgccggattggactgcggacggccgggtgcagaaaggaagtgctgcgatagagttcattaacctcagtagcatcgatcatgttttgttaccttgctatctatcttggcgtcaatataggccttgaaatccgaagttaccctgatgatgatgaaatgggtggtgtcaccaaaaaaaaaaatctttctataaataaaaaaaataaata

SEQ ID NO: 2304 - DNA, 3336 bp, Zea mays
  Clone ID: TF_ZmC354_4
aattcggcacgaggtcgccgctagctttccggttccccctgctgctcctcccctccgtcctcctcctcaccctccccgcgggccgcgcgactcggcagccaagcaagcaacagcacaacacccccgcaccgccgccactcctctctctctctctctctctctctctctctctctctctctcgcaccaccaccatggcgtcgggcggctgcgctctcgccccgaggctatgactcggcgccgcccgtggccgtggctctccgtattctccgtctccccgcgacgacgacaacccctcctcctccgactccgactcctccctgggcggcggtgctagccagatgtcgacggcgctggcggtggtcgggggcggcaaggaccggccgtcgcccggcggcggcggggcgccgcaggtggacacgggcaagtacgtgcgctacacccccgagcaggtcgaggcgctcgagcgcgtctacagcgagtgccccaaacccagctcgctgcgcaggcagcagctcatcagggagtgccccatactcagcaacatcgagcccaagcagatcaagggtctggttccaacccgctctgccagatgaatgccttcttcctgttcattcttggtttatgccaatcaagaactacaagggaatccccggaatccactgtttgctagctgtttgcttttttaggcgtgcctgccactaaatcgtgtttccatcgtcgttggtagatgccgggagaagcagcgcaaggagtcctctcgtctacaaaccgtgaaccggaagctgagtgcgatgaacaagctgttgatggaggagaatgaccggctacagaagcaggtttcccgtctcgtctttgacaacgggtatatgaagaatcgactccacagtccttctgtagccaccaccgacacaagctgtgagtccgtggtgacaagtggtcagcacaaccaacagcaaaacccagcagttctgcatcctccacaaagggatgcgaacaacccagcaggtctactcgctattgctgaggagacattggcggagttcatgtccaaggcgaccggaactgctgtcaactgggtgcagatggttgggatgaagcctggtccggattccgttggaatcatcgctgtttcgcacaactgcagcggcgtagcagcacgagcttgcggccttgtgagcctcgagcccacaaaggttgccgagatccttaaggatcgcgcatcgtggtatcgcgattgtcggcgtgttgatatcctccatgttatccctacgggtaacggtggaacgattgagctgatctatatgcagacttatgcactgacaactctggcggaaccgcgcgacttttggacactacgatacactagtggtcttgacgatggcagtcttgtgatctgcgaaaggtcattgacccactccactggaggtccttctggacctaaaactccagattttataagagctgaggtgcttcctagtggttatctgattcgaccttgtgatgggggaggttccatgatttacattgtggatcatgttgatctgaatgcttgtagtgtccctgaggttcttcgaccgctctatgaatctcctaagatactggcacaaaagatgactgctgcggcgttgcgtcacattaggcaaattgcacacgaatcaagtggtgaaacgccctatggtgctgggcgacagccagctgttctcagaactttcagtcaaaggctcagcagaggcttcaatgatgctgtgagtggctttccagacgatggctggtcttctttgttgagcagtgatggtgctgaggatatttcaattacaatcaactcatctccaaacaaacttattgggtctgatgtcagcccttccccattcttttctgccatggggggcggcatcatgtgcgcaaaagcgtcaatgctactgcagaatgtgccacctgctctacttgtgcgatttttgagggagcatcgctctgaatgggctgaccctggtgttgatgcttattccgctgcctctctgagggccaacccatataatgttccgggtttaagggctggtgggtttatgggcaaccaggttatactaccccttgcacgcaccgtggagcatgaagagtgcttggaggttattcgacttcaaggacatggctttagccatgacgaggttcttatgtccccggatatgtttcttctgcagttgtgcagcggcatcgatgaggatgcgccgggtgcttgtgcacagcttgtcttcgctcctatcgatgaatcttttgctgacgatgcaccgttgctaccctctggcttccgtgtgataccgcttgatgctaagacggatgtgccatctgccacacgtacccttgaccttgcttctgcgctcgaggtcggatcaggcggaggtctgtgtgctttaagcgatagcgggtcaggcacgcgcagcacgaggtcggtcctgaccatcgccttccagttctcgttcgagaaccacctccgcgagagcgtggcagcgatggccaggcagtatgtcagggcagtgatggcgatcgtgcagagggtggccatggcgatttctccctctcgccttggcccgcatgtcgaactgaagcatccgccaggctctcccgaggcactcgcactagcttcgtggattggcaggagctacagggcgcacactggaacggagatccgctggtcggacactgaagacgcggcgggctctcccctgacgctgttctggaagcacagcgacgccataatctgctgctctctaaagccggctttcacactcaagttcgccaacagcgccggcttcgacatactggagacgacggtcgcgaacgtccaggacctgcagctggaggcggtccttgatgacgggggacagaaggccctggtcgcacagctccccaagatcatgctgcagggcctggcgtacctccccggcggcgtgtgcaggtcgagcatggggcggcaggcgtcgtacgagcaggcggtggcgtggaaggtggtgggcgacgacggcgcgccgcagtgcctggcgctcatgttcgtcaactggaccttcatctgatcctcctccgctcttgacgttcacagcctcgatgcctcactcggcagcgtcagatcggttgccgcctttatcctatcctactacgtattactagttgctttccgttgcacctgtgtactacaactgctcgagacaatgcccccctgctgtctgtttatggcctaagtctactgtggtggatcgggagttggagaacaatgcccctgctgtctgtttatgtgtgagacttaaccctattactactgctgttatcattgaatctttgtgatc

SEQ ID NO: 2305 - DNA, 373 bp, Zea mays
  unsure (1)..(373): unsure at all n locations
  Clone ID: TF_uC-zmflteosinte017a09a1
caacccgaaactgtatatgggcggatgagaaggagcaatcagttcaatcactactacacctcaacaatcaccgtcgtgctggcacacgtgcttagcttttaccgtgcatgccggccctcacgaccccagccggtacatcccgccgtccgccatgaacggcggcgccggcctgtccatgtacagcgctgcggtgccctgcgcgacgtggaacccgccctccatcatcgcgaacggcatgtactttgacnccngtttccagtgccgcttccgatggttgatgaaccagttggtgatctgctttggagccagcccggtcgtctctgccagcgccatttttttcgtctcagaagggtagggccacttgtagtgcagc

SEQ ID NO: 2306 - DNA, 796 bp, Zea mays
  Clone ID: TF_ZmC13584_1
tcttccccacgcgtccgcaccttccatcgacaaaatggaggtaccgcgcctcccccagggtgcccttccatccatggcgttgccgcggccgtccccgcaatcaactcccagatctcgtgctcacctccccgcaatcaaggtcgtcacgcccgatgaggatggccgcgagtcgccgcacggcggtccgggccccagcgatagctccggcgcaggcgcgaggaagaagctccggctcaccaatgagcagtcgacgctgctcgaggacaccttccgcgcccacaacatactctccaacgcgcagaagcaggagctcggacggcaggtggatctcagcgccaggcaggttcatatcgtcttctgcgtgtatgtagttgtttcttcttcaattctctttgtggggaaaacattaattgggattttcccagcaatcagcttgataggcgacatcatcattgtcgggatcttctacttcattggatttgcattgttctgcttggaggcttttctgaacatgtgggtcattcagcttttgcacccttctgatcaattcagaagagaacccggagaaccatgcacttgtggagttgttcatctggaaagtgacaccattattgaatatgattgatcgactttggggtcaatagtggcacaacaaggttctccatcgactcaagaaccaagctgttaatgaggacacctttcggtgttcatatgagtttggatggaaacctcgggttgctttgttgtccaattcctgttaatgttatctacacttacaaataaacgttgttgttgc

SEQ ID NO: 2307 - DNA, 806 bp, Zea mays
  Clone ID: TF_ZmC1202393_1
gaatacgggcagcagctgctcaccataggttccgacagtccccaccatcatctcgctgggaggcaatggaggcggaagcacaggtggcggcggccctatgactgggacgctaacctcctcgtcccttagctgcctcttggccggcggtttccggtccttgagccggcggtggcagaaccacatctgaagctgcctgtctgtgaggttcaactgcaccgacagctccgcccgcttcgtctcgttgggatacgagtcctctgcgtacgtcctctcgaggacctccagctggtagggcgtcttcatgacgcgcttcaccggcggcttcccgccggatccagacgcgccaggagcgctactcgcaccgccaacggctgcgggggccgacggagggccgggactccctgccgccggcccggagcccccgtcgtcggaggactccattcccgactgaccgttaccctagattcgcctccgccagacaacaaaacacaacacgcgaagaccaggccgacacagaagaacaacaaaacctaatcacacgctacggcgaattccgagatatatacagaggcgccaagcccgaatcgagcccgcggctcgatccgcgcgacgaattccaccaccgacgggcgacagcagcaggtaacgtcgcagcgcagacgcgaggtagaacaggatcggtgggcgcgccgcgccccagcacggacgcggagaagtaatagggacgcgggcgcgaggaggagcaacacgggaggccacggatgcaactccatcctccgcccgacagcaacggaattcgagctcgg

SEQ ID NO: 2308 - DNA, 5354 bp, Zea mays
  Clone ID: TF_ZmC1775_1
gagaagccggtccgccaggttatgggcctggggaaagtcagggcaagactgcctacagatgcaaatcagtaccaggcgtgctctccgtgagctctacgcctctacctgtgtcttggcgacgactgggcgaccgacgacgcagccgtaggacaggcgaccgacgacgcagccgtaggataggcgaccaggtcttcctgttggctcttgcccttcgccggcgacgagcacccgccaggccacaacgacattgggaacaagtgtatgacatacaaacccccaagctcggtctgcagagtcagaagtatcaccaagcaaaaggtatcccttgaggtctgcacacagtagtggtagagttcttcgctctgccttagccaataataataaggacagtgagcctctgaatgcagctgctgctacccaagctactgtgaaagaaagaagtggcaaccagctagatagtcctaatagcactgtcaggctacttcgttctacgtcaaatattaaggacgaggcacatagcgggcctcttaatgacaggatcattgataagccagctgcaaataaaagaaaacgtgccaatccctcacaggttggaagtcccagcagcagtgtcagggtgcttcgctctgcaataaaaaataaagatatggcgcgcagtgagcctcaaagtgacaggaccgctggtgaggcagctacaaataaaagaaaaaacgccaattcctcaaaggtggggagtctgagctctggtctcagtgtgcttcggtctgcttcaaaagctaaggatgagacatgtatcaaacctttaaatgatagtcctgctgttgaaccagcttcaagtaaaagaaaatgcaccagtccgtcaaaggtgggaagtcccagcaacagtgtcagggtgcttcgatctacttcaaaatataagaatgagacatgtaccgagcctttaaatgatagtggtgctgttgaaccagctgcaaataaaaggaaaggtgtcagtcgttcaaaggagggaagtcccaatagcagtgtcagggtgcttcgctctgcctcaaataataagattgatgtatctattgagccactgaataatagtactactggtcaacctgctgcgaaaagaaaaaaaaaaaacagttcctttaagagcagtgccagggtgctttgctctacctcagaaaggaaaaatgaggcatctagtgagcctttaaatgatagtactgctgctcagccagctgcgaggaaaaagaaaggtggtgcaatgccaaagactgataacccaaagattggtgtcagggttcttcgctctgcctcaggaaagaagaatgagacatgtactgagcctgtaaatcggagtacttctcgtgaaccaactgtgacaaaaaaaagaaattgcaagccttcaaaggatcgcggtcccaagaaggactacttaaaaatttgtcaaagaattaaatatattttgaatcgaatgaagtatgaacaagcctttattcaggcttatgcaagtgaaggttggaaaggccaaagtttggaaaaaataagacccgagaaggagcttgaacgagccaaggcagaaatccttcaatgcaagttaagaatccgggaagcttttcgaaatatggactctcttttatcgaaggggaagcttgaagaatctttgtttgattccgcaggagaaatttcaagcgaagatatattttgtgctgtatgtggctcaaaggatgttactttacaaaatgacatcattctttgtgatggagcctgtgacagaggattccaccagaattgtttgagccctcctttgctaactgaagaaattcctccgggggatcaaggatggctttgccctgcatgtgtctgcaaagcagactctatagatgcattaaatgaacttcaaggaagcaaactctccattcatgactcatgggtgaaagttttccctgaggcagcttcaactgccaatggttctaaacaagttgatgcttctgatctgctgccagatcatataaaggacagtgataaccctgcattggttgaagggctgatggtgaatgaaatcaggatttctgaagaggatgatagcaaagcggatgacctcggcttgccttcggaggactcaggggatggtgacttcgatccgtcaggtccagattctagtgaagaccaaaatgatggattgaactcagaagagtcagatttcacatctgactctgatgatttttgtgctgagattgccaaatcttgcggccaggatgaagtctcggcatctccattatcaaatgtgataaaccatactgatagaatgaaactcagggcctagcaatagacgctctaatgaagaaaaccatgatcatgcatttatggacatggagctagggcaagacatagtgctaccagttgcaagcaggcggcaggttgaacggttggattacaaaaaactatacgatgaggcatatgaggaagaatcatctaattcaagtgatgaagaagagtggtctggaaaagaactcttagaaggcagtggaacagattcacttgatgagccttcgtcctgtaaaaggctctctagaagagcaccagcagggcagcagaataatgaacttacaccacagagccggcctcatggttctaacagtgagcagaaaactgaagttcttcgctccaatggcagtagtagcacaggacggaagtatgatcctgaagttacccagaaattgaaggtgcattttgagaaagatccatatcctagccgtgaaacaaaagaaaatctatcagaagaactaggcttgacatttaatcaggtctccaaatggttctctagtactcgtcactattcaagggttgcttctgccaaaaaagaaatgcatcctgacagccatacttgtgagaataatgatgagacaactgtagacagcatgcaagcaaaacaacccaatgctggggtgatggaaaagttgacgggggatagaaatgacattgtttctgagaaaccgatggtgcaggacaatcttaaccaaggggcgatggaaaagttaactagggatagaaatgacattgttcctgagaaacaggtgatgcagagcagtcttaaccaatgtaataatgaagatatcccgctttctggaacagaaattgagatggagtcttacgaacaagaatcatctgaaagcagtgatgaagagtggtccacacttagcacaccacgaaaaacaaaattacaagaccatggaaaatcatcagttactgaatcacttcgttctgcaaaacggtgttccagaagagcaccagctagggagcagaataatgaacgtattcagagtgagcagcttcatggttctgcaagtgagcagcaaactgaatttcttcgctccaatgtcagcagtggcaaggtctcaaaatatcattttggccctatagttagtcagaagcttaaggaacattttgaaaaagatccatatccttgccgtgcaacaaaagagagtctggcacaagagctaggactgacatttaatcagatcagtaagtggttctctggcactcgtcattattcaagagatgctgttgccaagaatcagaaacgcccgggagaaaatactactgtgaataataatagcacaacctttgatgacatacaagtaatagaacccaatgttgggttgatagataaaccagctgcagatgtaaatgacatgatttctgaaaagttgatggtccaaattaatcttaacgaaggcattgaagaagatatcccaccgagccaatatgccaggtgtgaagagaaaataactatgactccagctgccatctcaagggaagctggtcttccaggttatggtcctgggagaaaactttcttcaggtcagttcaaggaatactagctgtgagcagagtgtgataatggctcctagcgctatcgcaagagaagttggtccaccaggatatgcgactggagaaaaccagggcaatggggctccatggaatacaagttatgagcgaagactatttatgaatcctgtgaccagctcaagagcagtcagtcctccaggatatgggcctgaagaaagccgaggcagtggcatttcctggaatacaagcagtgaacaaatattgtttatgagccctacaaccatctcaagagaacttggtccaccaggatatgggcctagagaagaccagtgcagtggcacttcatggaatgcaagctgcgagttgggagtatttatgagtcctgtgaccacctcaagagaagacagtccgccaggatatgggcctcgagaaaaccaggagaatgacaatatgagatgcgagttgagaatgtttacaagtcctacaaccatctccagagaagttggcccaccaggatatgagcttactggaaaaaacaagggcaacggcgcttcatgtactacgaattaccagcagggagcgtttacgagtcctgaagccttcccaagagaagcctgtcctccaggatttgtgtctggagagaaccagggtaacgacactccatggtatatgagcagcaaacagatggcgtttacgagtcctacgaccaaccctagagtaggtccgccagggtatggacaggaaaaccagggcagtcgtgtttcttggaatacgagttatgagcagggagtgtttatgagttctacaaacatctcaagagaagccggtccgccaggttatgggcctggggaaagtcagggcaatatcacttcatggatttcgacaggcgggcagagaatgtttacaggtccttcaactatcccgaacgaagtcgggcagcaaggatatggcccttcaggaatcccgggaacggatggctcaaggagtatggacttgaaagcctttccaccaggatatggacctgctggagaaaaccagggcggtggtgcttcagggagcgtcataagcccccaagctcggtctgcagagaacgtagagttttcagacgacgctagaaaaaaggctatacagcgggagctgagacggcggcagaagttcaggtgatggccgtgatgcgaacttctgatcctgctcatcgaattttgactacggattactactttttaagactacatatccagtcttgatggctgaatgagtgacgaccctagttgtcgagacgcaaaaccttttgttgtatgtgttccttttacagacttccttggcttgtcatgaatttctaatgtgaacttgtgctgtgaacttgttgcaaaacctcttgaacctgaagcattcaacatgctgtgaacttgtgcagttgctcttcttctgcatgagttcatgttatctgggttgcacggcatgcaatttcccattgctagaagggtcagataacactgactcgggcccgg

SEQ ID NO: 2309 - DNA, 1448 bp, Zea mays
  Clone ID: TF_ZmC508_4
gccggccgggctgcgactgcccagctcgcaataactccttcctccccatctccccgttctcccatccgccgttcccctccgcttcctcctaccatggcgtcttcttcctccccgagatctcgccatgctagctctcccgccttctgctagccagctgcgagcacggagcgctcgttttcgggcttcctgcatgcgatatcaccgacgaaacgtgtctctggaagaaggcatcacaggccgggatcggagaatgaaagctgacgatatagatgagctagggtttgcgaggcactagctgggaccgtacgtaccgtgctgccattgttcatgactccggcaaggcgcatgccggcgatgatcggccggaataatggcgtcgcgttcgggtcctcgtcagcgctatctttaagccaggtgattattccggctgacttcctagacagccatcatctgcagcaagcgttcgagcagcaactctttgaacagatcccatccaccgcagtggatagcagcgacaacattatccacggtcgctccgacgcgctggtggacgagtttgagagcaagtcgtgcagcgagaatcccgatggcaccgcctccggcgatgatggccagggggacgaagaccctaaccagcggccaaacaagaagaagcggtatcaccgccacacccagcaccagatcgaagagatggaggccttcttcaaggagtgtccacacccggatgacaagcagcgaaaggagctgagccgggagctcggtctcgagccgctgcaggtcaagttctgttcccagaacaagcgcacacagatgaagaaccagcacgagcggcaggagaacgcgcagctgcgcgcggagaacgacaagctgcgagccgagaacatgcggtacaaggaggcgctgggcacggcctcgtgccccagctgcggcggcccggctgccctcggcgagatgtccttcgacgagcaccacctccgcctcgagaacgctcgcctccgtgacgagatcgaccggatctcgggcatcgccgccaagcacgtgggaaagcccatggtgtccttccccgtgctctccagcccgctcgccgccgccgccgccgccgcccggtccccactcgacctcgccggcgcctacggcgtccagtcagctgctgcgggcctcggcgccgaccacgtgctgttcggcgccggtgccggcgatctgctgaggagcgtgtcggccgggcagctcgacgcggacaagcccatgatcgtggagctggccgtcgcggccatggacgagctcctccggatggcgcggcctgacgcgctgctgtggggtggcggcgcgtcggcaggggcgcagcagcagcagctggacgaggaggagtacgtccggacgttccccgctgggctcgggccgaggcagtacgggctccgtccggaggcgtctcgggacagcgccgtcgt

SEQ ID NO: 2310 - DNA, 610 bp, Zea mays
  unsure (1)..(610): unsure at all n locations
  Clone ID: TF_LIB3591-095-Q6-K6-G2
cttcctcctctcgcccagcagcctagctacttgagcgagnagagctccagctgaggaagtgagaggtcgtggtccgagaggcgtgcgtgcgtggccatggacggcgccgaggacgacgggacggagtggatgatgcatggtgccggagggaagggaaaaggcggcggcgcgctcgacaagaacaagaagcgcttcagcgacgagcagaccaagtcgctggagtccatgttcgcgacgcaggccaagctggagccgcgccagaagctgcagctggcgcgggagctcggcctgcagccgcgccaggtcgccatctggttccagaacaagcgcgcgcgctggaagtccaagcagctggagcgcgagtactcggcgctgcgcgacgactaccacgcgctcctctgcagctacgagtccctcaaggacgagaagcgcgcgctcctcaagcaggtcagggatcaggatgatgcaaataaagctcatgcatcatgcatgccctccatcgatctcccatgcatctctcgttcgttcgttcgttcgcgcactgcactgcacgcgccccatgctgatctatatatatgtatgctcgaactcagaagatcatgcatatatg

SEQ ID NO: 2311 - DNA, 1591 bp, Zea mays
  Clone ID: TF_ZmC254_1
gcgcccgcgctcccccccccctcctgcctccctccctccctccccccgccccccagcctacttacccgagcgagcccccccccagggaaggaaggggccgggcccgggccgcggggcgtgcgtgcgtgccaaggcaagaaaaaaaaaaaacaaaacgagcgcaggccgggctggctctggcagtccggctggcaggagagaattggcgagggattgggatcgggagcgaattcccagccagcccctgtctagagagggacaggccgcgcgcgcacgcacgccaccgcgttccattggccgcgtcgttgccatcacgccgacgactaaactagtcgatcacaccaagctcacaggctctcgatcgcctgtgatcgggctgccctgccgcctcttgctcccttcctcctctcgcccagcagcctagctacttgagcgagacgagctccagctgaggaagtgagaggtcgtggtccgagaggcgtgcgtgcgtggccatggacggcgccgaggacgacgggacggagtggatgatgcatggtgccggagggaagggaaaaggcggcggcgcgctcgacaagaacaagaagcgcttcagcgacgagcagaccaagtcgctggagtccatgttcgcgacgcaggccaagctggagccgcgccagaagctgcagctggcgcgggagctcggcctgcagccgcgccaggtcgccatctggttccagaacaagcgcgcgcgctggaagtccaagcagctggagcgcgagtactcggcgctgcgcgacgactaccacgcgctcctctgcagctacgagtccctcaaggacgagaagcgcgcgctcctcaagcagctggagaagctggccgagatgctgcacgagccgccgcagggcaagtactacggcggcaatgcggacgacgtgcgctcgggcggcgtcggcggcacgaaggaggaggaggagtccacagacgcctgcgccggggccgcgctctactcgtccgagtgcgctggcggtggcaggttcatcgcgcacttcttggcggacgacgacgtgggagcagccctcttccggccgccgtcgtctccgcagccgaccgctggcttactcacgtcgtcggggccgccggagcaccagccgttccagttccactccggctgctgctggccgtcgtcgtcggcggagcagacctgcagcggctcgcaatggtgggagttggagtccctcagcgagtgacgtacgatgatcacaagcggccgggggtcactcggttccaagcacacgtaactggccgggccaatacgagttcgttcgtagcggtctcgtcactcgtcagctagccctgcagagcaacggtgtacatagcttcagtagatcgaagtccaggtccaggtctgcccatcaagcagtttcttcttctcgccatcgatcatcgatcatgcatgcaaaagattttttttctctctcccttgctaccagatcatgtaatccagcaggaacatgtagagaaagatcaaacgaggttatagatcgagaaggtcgcctgcatatgcgagctagtctattcttttccgaatgcatggcggctttcttcgttc

SEQ ID NO: 2312 - DNA, 1349 bp, Zea mays
  Clone ID: TF_ZmC3817_2
cattggacccttcgggccggccggggggcctctgatgaggccaatggccagcaatggcatggcgtcctcaccctcgcccttcttccctccaaacttcctcctccaaatgcagcagacgccctccgatcatgacccccaagaacaccaccaccttcctgctcctccccttcatcttcaccacaaccccttcctcccctcctctcaatgcccctccctgcaagacttccgaggtatggcgccaatgctgcggaagcgcccgacgatgtactgcggcgcggacgacgtcggcgtcggaggcgaggaggcgaactgcggcgcgacgaacgaggacgaggtgtcggacgacggctccctgcaggccggcgggcccggggagaagaagcggcggctgaacgtggagcaggtgcggacgctggagaagaacttcgagctcgggaacaagctggaggcggagcgcaagctgcagctggcgcgcgcgctgggcctgcagccgcggcaggtggccatctggttccagaaccggcgcgcgcggtggaagacgaagcagctggagaaggactacgacgcgctgaggcgccagctcgacgccgtcaaggccgacaacgacgccctcctctcccacaacaagaagctccaagccgagatactggcactgaagggcagggaggcagcaggggggtcgtcggagctgatcaacctgaacaaggagacggaggcgtcctgcagcaaccgcagcgaggacagctccgagatcaacctcgacatctcgcgcacgccgccggcgtccgagggccccatggaccatccgccgccgccgccgccgcaccacgccgccggcggcggcttgatccctttctacccttccgtcggcggccgacatagtattgccgccggcgtgggtatggaccaactcctgcacgcctccaccccgaagctggagcaacacggtgacggctgcgccgtcgccgtccaggccgcggagaccgccggcagcttcggcaacctcctgtgtggcgtcgacgagacgccgccgttctggccgtgggccgaccaccaccacttccattgatcgatcatcgtccatcacaaacgatggcgatcgacactgtagtgagtagaaatatcggaggaaaggaatttatttggacaattctggcgagtgcatgcagcaagggaggagagaaaaaaaaggtcgtgtactcgtgtgtgatatctggtccatattggcggggtaggcgggtagctgcctgcctagctggtcatgcatggtgggaactgggaaggggttgtaaatggggaataagtggagaggcggtgtaatttaattaggtagattttggtctgagttc

SEQ ID NO: 2313 - DNA, 1685 bp, Zea mays
  Clone ID: TF_ZmC3817_3
ttgggtacctcgaggccggccgggccgatcctccgatgaggccaatggccagcaatggcattgcgtcctcactctcgcccttcttccctccaaacttcctcctccaaatgcagcagacgccctccgatcatgacccccaagaacaccaccaccttcctgctcctccccttcatcttcaccacaaccccttcctcccctcctctcaatgcccctccctgcaagacttccgaggtcacgcgcagatccatccctatagcgagctagctagctagctagtcaacagcctccgacgcctaatccgatcgatccatcggctggtcctgacacatgcgctggcgcctgtggttgatgcgtgcaggtatggcgccaatgctgcggaagcgcccgacgatgtactgcggcgcggacgacgtcggcgtcggaggcgaggaggcgagctgcggcgcgacgaacgaggacgaggtgtcggacgacggctccctgcaggccgtcgggcccggggagaagaagcggcggctgaacgtggagcaggtgcggacgctggagaagaacttcgagctcgggaacaagctggaggcggagcgcaagctgcagctggcgcgcgcgctgggcctgcagccgcggcaggtggccatctggttccagaaccggcgcgcgcggtggaagacgaagcagctggagaaggactacgacgcgctgaggccgcagctcgacgccgtcaaggccgatcactgattacgcgatcatctcctctccggatacttggcatatcaacagaacattttggttgggcgggccagaacatttgtacactgatatatactaacagccagcgattaatcaatcgatcgcttctgatgcatgcagatactggcactgaagggcagggaggcagcaggggggtcgtcggagctgatcaacctgaacaaggagacggaggcgtcctgcagcaaccgcagcgaggacagctccgagatcaacctcgacatctcgcgcacgccgccggcgtccgagggccccatggaccatccgccgccgccgccgccgcaccacgccgccggcggcggcttgatccctttctacccttccgtcggcggccgacatagtattgccgccggcgtgggtatggaccaactcctgcacgcctccaccccgaagctggagcaacacggtgacggctgcgccgtcgccgtccaggccgcggagaccgccggcagcttcggcaacctcctgtgtggcgtcgacgagacgccgccgttctggccgtgggccgaccaccaccacttccattgatcgatcatcgtccatcacaaacgatggcgatcgacactgtagtgagtagaaatatcggaggaaaggaatttatttggacaattctggcgagtgcatgcagcaagggaggagagaaaaaaaaggtcgtgtactcgtgtgtgatatctggtccatattggcggggtaggcgggtagctgcctgcctagctggtcatgcatggtgggaactgggaaggggttgtaaatggggaataagtggagaggcggtgtaatttaattaggtagattttggtttgagttttgatagtattttttttatctttttgagtcttcgttttttttttctttgcgatcttcttttttctttttggttgttgacacatataaatttgtgaattggcaagcatacaggc

SEQ ID NO: 2314 - DNA, 675 bp, Zea mays
  Clone ID: TF_LIB4172-024-R1-L1-A4
aattcggcacgagggccgcgcggctcggcaggcagccaagcaagcaacagctgcacaaccccccagcaccgccgccactcctctctctctctctctctctctctctctctctctctctcgcaccaccaccatggcgtcgggcggctgcgctctcgccccgaggctatgactcggcgccgcccgtggccgtggctctccgtcttctccgtctccccgcgacgaagacaacccctcctcctccaactccgactcctccctgggcggcggtgctagccagatgtcgacggcgctggcggtggtcgggggcggcaaggaccggccgtcgcccggcggcggcggggcgccgcaggtggacacgggcaagtacgtgcgctacacccccgagcaggtcgaggcgctcgagcgcgtctacagcgagtgccccaaacccagctcgctgcgcaggcagcagctcatcagggagtgccccatactcagcaacatcgagcccaagcagatcaaggtctggttccagaaccgcagatgccgcgagaagcagcggaaggaggcctcgcgcctgcagactgtgaaccggaagctgactgcgatgaacaagctgttgatggaggaagatgacaggctgcagaagcaggtctcccgactcgtgtacgagaatggatacatgcgacagcagct

SEQ ID NO: 2315 - DNA, 847 bp, Zea mays
  unsure (1)..(847): unsure at all n locations
  Clone ID: TF_LIB4739-120-Q1-K1-C7
gaggccggccgggctctcccatccccgtctcgccgctagctttccctttccccccgctgctcctcccctccgtcctcctcctcaccctccccgcgcgccgcgcggctcggcaggcagccaagcaagcaacagctgcacaaccccccagcaccgccgccactcctctctctctctctctctctctctctcgcaccaccaccatggcgtcgggcggctgcgctctcgccccgaggctatgactcggcgccgcccgtggccgtggctctccgccttctccgtctccccgcgacgaagacaacccctcctcctccaactccgactcctccctgggcggcggtgctagccagatgtcgacggcgctggcggtggtcgggggcggcaaggaccggccgtcgcccggcggcggcggggcgccgcaggtggacacgggcaagtacgtgcgctacacccccgagcaggtcgaggcgctcgagcgcgtctacagcgagtgccccaaacccagctcgctgcgcaggcagcagctcatcagggagtgccccatactcagcaacatcgagcccaagcagatcaaggtctggttccagaaccgcagatgccgcgagaagcagcggaaggaggcctcgcgcctgcagactgtgaaccggaagctgactgcgatgaacaagctgttgatggaggagaatgacaggctgcagaagcaggtctcccgactcgtgtacgagaatggatacatgcgacagcagcttcacaatccttctgctgcgactacagacacgangctgtgagtctgtggtcacaagtggtcagcaccaccaacagcaaaacacagcagctcccgcgtcctcac

SEQ ID NO: 2316 - DNA, 535 bp, Zea mays
  Clone ID: TF_ZmC102447_1
cccttctcccccctcatctactccccctttttttgttcctgtgcctgtgcattggcttgtgatgggggccacttctccttcaggcctggagctcaccatggctgtccccggcctcagctcctcctctggctcagaggggtttgtttgcaacaacaatatcagcaacaacggtggcgggaacatgagggacctggacatgaaccagccggcgagcggcggcgaggaggaggatttcctgatgggcggcgtggaagaggacgaggaggagcggggcgccggcggaccgcaccgcccaaagaagctccgcctctccaaggagcagtcccgcctcctcgaggagagcttccgcctcaaccacaccctctcaccgaagcaaaaggaggccttggcgatcaaactgaagctgcggcccaggcaggtggaggtctggtttcagaaccgcagggcaaggactaagctgaagcacacggagatggagtgcgagtacctgaaacgctgcttcggctcgctgacggaggagaaccgccgcctgcag

SEQ ID NO: 2317 - DNA, 1182 bp, Zea mays
  Clone ID: TF_ZmC8754_1
cggccccccccgcgcgaccgcgcaaccggctgctactacacacaaacacagctagccggcgctgccaggttggctttggcgagcaacgacgacgacgacggcgctcaggactcaggtgctttcggttcaggcggaggagggcatggagcgcggcgactgccagttcacggtggtgccgccgcggcagtacgacgaggcccagttcatgcaccagctgatggtggccggcgaccagcaggaccccgcgggcgcggggcggggagctgccgccgccggcggggagaggaagcggcggttcacggaggagcaggtgcggtcgctggagacgacgttccacgcgcggcgcgccaagctggagccccgggagaaggcggagctggcgcgggagcttggcctgcagccgcgccaggtggccatctggttccagaataagcgtgcgcggtggcgctccaagcagctggagcatgactacgccgcgctcagggctcagttcgacgcgatgcacgcccgcgtcgagtcgctcaggcaggagaagatcgcgctcgccgcgcaggtagacgagctgcgggggaggctgaacgagcggcaagaccagagcggcagctgcgaggtcaacgacgcggaggcggcggcggacgacaagaggaacaatagcaccagctccctcgtgcaggacgacggcgccacgccgccgccggctgcagtagacgcctccgaggactcggcggcgaccggcgagtactacgaccacgtcgcgtacgagtacgatggcctgcacgaccccttcgtctgcgccactccggacctgtgggatacgtggccgctgctggagtggaacgcggtggcctgaaacctcgatcgtgtactcgtcgtcatgtctctgtatctagtgcacgtgtggtggattcatggtgattccttatatagctagctagccccaactagctaccgagccagttgatccggggagggatcgacgggtaacagacgatagagagctgggtaattaggaatcaggagcgaccggcggctgtggagggaaaaggatcgatcgacaatgtccggccaccgtgcacctatcatgttcgttggttcaccactgaagtttgaaccccctctctcccgaacatggatcctaaggggcccggtggccggacaatgtcgatcgatcccttttttccc

SEQ ID NO: 2318 - DNA, 1155 bp, Zea mays
  Clone ID: TF_ZmC8754_2
gaatacgtgcagagcaacagcatgcgtaagcgtaacccacgtgcgacaccatttgcctcggctctgaagtctgaaccacctctctcacgaacatggatcctaaggtgcacggtggccggacattgtcgatcgatccctcttttccctccacagccgccggtcgctcctgattcctaattacccagctctctatcgtctgttacccgtcgatccctccccggatcaactggctcggtagctagttggggctagctagctatataaggaatcaccatgaatccaccacacgtgcactaggtacagagacatgacgacgagtacacgatcgaggtttcaggccaccgcgttccactccagcagcggccacgtatcccacaggtccggagtggcgcagacgaaggggtcgcgcaggccatcgtactcgtacgcgacgtggtcgtagtactcgccggtcgccgccgagtcctcggaggcgtctactgcagccggcggcggcgtggcgccgtcgtcctgcacgagggagctggtgctattgttcctcttgtcgtccgccgccgcctccgcgtcgttgacctcgcagctgccgctctggtcttgccgctcgttcagcctcccccgcagctcgtctacctgcgcggcgagcgcgatcttctcctgcctgagcgactcgacgcgggcgtgcatcgcgtcgaactgagccctgagcgcggcgtagtcatgctccagctgcttggagcgccaccgcgcacgcttattctggaaccagatggccacctggcgcggctgcaggccaagctcccgcgccagctccgccttctcccggggctccagcttggcgcgccgcgcgtggaacgtcgtctccagcgaccgcacctgctcctccgtgaaccgccgcttcctctccccgccggcggcggcagctccccgccccgcgcccgcggggtcctgctggtcgccggccaccatcagctggtgcatgaactgggcctcgtcgtactgccgcggcggcaccaccgtgaactggcagtcgccgcgctccatgccctcctccgcctgaaccgaaagcacctgagtcctgagcgccgtcgtcgtcgtcgttgctcgccaaagccaacctggcagcgccggctagctgtgtttgtgtgtagtagtagc

SEQ ID NO: 2319 - DNA, 734 bp, Zea mays
  Clone ID: TF_LIB4172-013-Q1-L1-G12
gtccggaattcccgggtcgacccacgcgtccgcgtggaggaagctgctccctccgaagcagtaaaccagcatttctgtttgtttgtttgttttgcccttagttccgtcactccaaatctacccaccaaggaccctgaccctgtccactccaggcgaatcgagaccgtccggctgggtccccccaatttgggccgactttgcgcctccaaacaaccttagcatgatgtcttatctaaagcaaccgccttacgcagtcaatgggctgagtctgaccacttcgggtatggacttgctgcatccctccgtgggctaccccgggccctgggcttcttgtcctgcagccaccccccggaaacagcgaagggagaggacgacttttactagggcacagctcgacgttctggaagctctgtttgccaagacccggtacccagacatcttcatgagggaagaggtggcactgaaaatcaacttgccagaatccagggtgcaggtatggtttaagaatcgaagagctaagtgccgccaacagcagcagcagcagcagaatggaggtcagaacaaagtgaggcctgccaagaagaagagctctccagctcgggaagtgagttcagagagtggaacaagtggccagttcactcccccctctagtacctcagtcccaaccattgccagcagcagtgccccagtgtctatctggagtccagcgtccatctccccactgtctgacccct

SEQ ID NO: 2320 - DNA, 2940 bp, Zea mays
  Clone ID: TF_ZmC260_66
cgtaagcttggatcctctagagcggccggcccttttttttttttttttttttttttttttggtacaacattccatcttacaagaaaatcaacatcgatgaaaacaatgcatcttctgcatcctgtcatagcagcatcgtgctgccgttacttgtaattgagcccttcctgcaatgacagtaatcgctgcaaacaaatctgtaggatagctaatacctatagagcgacccagaaatcagaggaagccctcagttggcaaagaacgggaatcaatagcccccacaggaaagaaaagaaaaagaaaaaaaactgaatgacgtgcttgttagttgactggcatgatctaatgagagctagctgacttgcaatggtatatctatgttttttggctaccagtgtagagtcatacaagccaagtttcaaggcccatagacctgcaaatttcaggagcaatccaaattctggctcatgtctttgtctacaaacttcatcgtcccattttcttcttcaactcctgctgtattgctttttgcctgccctgccttctctgtaaggtcaggccacagattctgatccgcggcagaatcaacttttgacccggcttttaggggaactcttgctaaggttctttcttgatccgacttttgaagaaaccgcttttttagagatggtagcatccctgtttatgcatacattagattcttccatcacagtcccctctggttctttaggttgcatactaggtgtcactgggctattagtattttgggggctatgcttatctggactgatgcctttcctggaagaagctaaccttgcaaaatgacgcctattttcaaaccatctgttgacctgatgaaatgttagccctagttcttctgccaagctttctttaagagaacgactagggtatggttgtgtcttaaaatgttcatgtagcttctgactaatcactggaccaaaatgtcctttcctatctttgatattgctgccattagaagtaagatctccatgtttctcatctactgaaccatgaagagaatgcaagctttctttagtgttttgtgtagtcagttcattatggtgcgcaactctagagccttttcctgcaggagaaccaacttcaccctcttcattgctttttattggtgtgttcttcccagaccattcttcttcatcactagaatcagatgatgcttcaccatatgcctcatcatacagccttttgtagtccaaccgttcagcttgacgtctccttgatactggtaaaaccacactctggtctatttcagtctccatagggtcgtcagcagaacttgttgtgttagactgagcagtgttcttttccatatcacccaccctgacatcgggtaatggaggcgatgaaacttcatcatgtccaccagattttttaatctccttacaaaaatcatccgagtcagacgtgaaatcagactcatcagaatttgacttcttttcgacatctttatccgaatcaggacctgctggatcatagtcatcatcctctgaatcttcagaaggtaatcccaggtcatcaaccttctttttatctatcaaaggttccaaatcatcagaacaggttaagaagtcagagtcgtcagagtctgatcctccgtcatcatcctcttcctcttcagaagatccttcttccttactagccacatgctcttcaggcatattggggtcaaaatcattgtcatccgaatcatcagatggaagatcaaatgcttcatcttgcttagagccattggtcatagcagctgcctctggaaaaactttctcccaagggtcctcaatggagatgtcactgccctggagttcatttattagatctatacagtctaacttgcaatcacatgctgggcagagccatccttcatctcccatgggaatatcttcagtacgcagaggaggatttagacagttctggtggaaccctctgtcacaagctccatcacagagaatgatatcattacccaatgtagcatttttcgaaccacaagtagcacaaaagatatcttcacaagatatttctccttcagaatcaaataaagattcgtcaattttccccttggatagaagagaatcaatattttggaagacttcccgtattctcaatttgcatcgtaagatttctgatttggctcgttcaagctccttctcaggtcttatcttatccaaactttgatttttccagccttcactagcataagcttcaattaggctttgctcataattcattcggttcaaaatgtatctaacccgtttacgaatttgtgagaactcatctgtcgaatttttgtttgaggctctgctcctttttcttctcttggcagctggttgtcctggaggctgcacatgctcagtagatgttgtctttgaacctgatgtagagcgaagcaccctgacatcaatatcagatgacctcaatgtatatgcctgacctgttagtccttgggaaccctttttacctctgtttgctgcccttttatagtttttccttatccccaagttatttggcacagtttgagatgcagacagcaaaactggatgctcaagggtctcaggattctgactagagctcgtaccattttcaatctcaccattaccctcagccggaacgtgaactgtctttttttccatagtatatgatcaccaaaatttcatcaatttacagtagacagaaagcagtctcagcaaacctgtcttctgaggacaacaataaaaaagatctatgtggccaagccagattcaccagcaccttgaaatcgctgcgagctggcgacgcagcgccgcggagaagcttccaggcccggcggctctcctcctctcctgcgtggggcgagtgtggcggggaggaagagcgggaggcgtggccgcgtgagcgaagcggcgggcagaataaaaagtgtctatgcac

SEQ ID NO: 2321 - DNA, 1086 bp, Zea mays
  unsure (1)..(1086): unsure at all n locations
  Clone ID: TF_ZmC26143_1
ctcgagtttttaggtctaaactcgcaaataaaatttctggggtctaaacgtaaatttttatcgcaaaaggagctaaaaaaacaaaaaattcggacagaacgcgctatcggtttcactttcactcacagctattacacatgcgaaaatgcatacagtaatttttttttggcacgagatttggcggtcggtccccgcgggaagattgctctgctagttccacatccaccaccagctgacctggccggcgtcctcgtcgtcgccgtccgcgtggtgggtgtgttcggagaggaacgcggcggcggcttcttcgtcggcgtagtagctgcatccctcgtcgctgccggcgccgtcgtcgtcgtccgactggatgcctccagcgccgtgggttactggacccatcgtcccgcagccgtggtactggtcctggacctcggcgccggggaagtacgactcgacgctgctatcgacggccgcgccgccgatcctgccgttgtacaacagcgcgtccgccgcgtccaccaccgcgctcccgccgctgcccgtgctcagcctgtcctcggacttcacctgccgctcctcgaacgccgccgcctctgcctccggctccggctccggctccggttcctcgacgtcatcggccacggaagccctgacaacgcccaccgccggcaacgccgccgcggcgccgttggcgtcgccctccgtcgcctccttctctcgcagcttctcggtcaacgacaccacctgtgagcggaggcggtggttgtcctggagaagggcgtcgtggtccgcgcggagggcgtcgaaggaggccttgaggcggtcgaagtcgcgctccagctgcttggtcttccaccgggcgcgccggttctggaaccacacggccacctgccggggctgcaggcccagcttgcgcgccagctccgtcttgcgctccggctccagcttgttctcctcctcgaagctcctctccagcaggtgcacctgctccggcgtcaggcggcgcttcttctccggcagctngctcgtcgtagtactcctcctcgaggagctcgtcgggcgaggtgtagaagggcggacgctggg

SEQ ID NO: 2322 - DNA, 1339 bp, Zea mays
  Clone ID: TF_ZmC894_2
ggctgtaccggccaaaaaaaaaaaaacaccagaaaaaacaaataccggatagatattaaagcagctcgatcgtcgacttaaacggtggcacaaaaaggttcttccttttcgcagctccatcgtccaccaacctcctccgattcggccgtcgtagcgtatagccgaattgccccactccgggactctcgccagcttctccggccgactagaggctgtttccggcgagtgctcggctgatctcctccgcgcggctgaggagatcacgcggtccgctcgggggggctggggcgtgcatgatgggactttggttgattccgacgatggagactccggcgaggcttctgtggagcaccagcttcttccgccacaaaatcgccgacatgcttgcatcctcctcctgcttcttatagattcccacccctcgccgtcgtcgccggcagctagctcgctagcttctgtacatacgtcgacgccatatctagtcctcctcatccagtcccgataagtgataactaataattaaggcaaagaatctccaagcttgcttcgacgaccttgcattgatccatggagtccggacggctcatcttcaacgcgcccggctccggcgccgggcagatgctcttcctggactgcggcgcaggcggtggtcccggcggcggcttgttccatcgaggcgggagaccgatgcttggccttgaagaagggcgcggcgtaaaacggcccttctacacctcgcccgacgagctcctcgaggaggagtactacgacgagcagctgccggagaagaagcgccgcctgacgccggagcaggtgcacctgctggagaggagcttcgaggaggagaacaagctggagccggagcgcaagacggagctggcgcgcaagctgggcctgcagccccggcaggtggccgtgtggttccagaaccggcgcgcccggtggaagaccaagcagctggagcgcgacttcgaccgcctcaaggcctccttcgacgccctccgcgcggaccacgacgcccttctccaggacaaccaccgcctccgctcacaggtggtgtcgttgaccgagaagctgcgagagaaggaggcgacggagtggcgacgccagtgtcgcgccgcggcggcgttgccggcggtgggcgttgtcagggcttctcgcgtgaccgatgacgtcgagaaccccggcggcgttcgagcggcaggtgaagcgacaggctgagggcagcggcgggtcgtggtgaattctcgcacagctgttctgaaacagctagtgtagtgtattaatgagcggaacagtgccccccaccgttatataaatgactgttaaatgatcgtat

SEQ ID NO: 2323 - DNA, 1418 bp, Zea mays
  Clone ID: TF_ZmC11791_1
cctcgaggccggccgggaggacgcccaacagctaacactcctgtatccgagctactactcctagtcctagtacaggctacagaggcagagcgagcaaaactgcctgtacatagcaaccatcaacggcgaccgatccaagtagtgagcattagtggatctactacgtacatatatagaaggaaacagctgcagctctctctctcgctgtttcctgcgtgatctgcttgtgtagctactagctagctagcggagcggaacccatgggctgcgaggaggaagagaggctgctgttcccgtccttcgtctttcccgagagcttcgcggaggccgccacccccggctccggtggtgagcagaagaaggctcggcagcgtcggaggcgcaagccgcggccggcggagggcggcgagggcgcggacgagcaggccaggaagcggcggctgagcgacgaccaggcgcggttcctggagctcagcttcaggaaggagcgcaagctggagacgccccgcaaggtgcagctggccgccgagctgggcctcgacgccaagcaggtggccgtctggttccagaaccgccgcgcccgccacaagagcaagctcatggaggaggagttctccaagctccgcgccgcgcacgacgccgtcgtcctccacaactgccacctcgagaccgagctgctgaagatgaaggacaggctggcggaggtggaggaggagaagacgaagctcgtcgcggcggcggcggcggcggccggcggcgcagcgggcgcagggagcagcagcccgagctcgtcgtcgttctcgacggtgacgcaccacccggccgcggcgctgcaggtggggcagttcggggtggagccggaggaggccgccgacctcgcctacatgaccgagtacgcctacaacagctacatgaacatgatggacctcgcgcccgcctacttcggtggagtcgtctacgactacgaccacttcaactgatccacgagcatgcaggaggaggaggagggaagctacaagacgaaggaaggattgactggcctatcagctaggtactattttcgtgttaatggatggatggaccgatttgcagggcgcgcgtagcagtagtagcaatcaaggtcactagtatagtctgtcagtacgacgacgtcgatcagtcaatgtctcctgacgataattattaagtcgatctattcagtagtaacttgttaagccatgtagattagtagcagctggtaatctttgtaaatgtgtgtggattatcatgcaagtgcgcgcttatcatgatcgaaccagtggtctctgcgatgtaatattggggggaacgggggttaatcggaatcagaaaatgcatgcttgtagatgctttaattggtgaaaaaaaaaaaaaactcgagactagttctctcctcgtgc

SEQ ID NO: 2324 - DNA, 1172 bp, Zea mays
  Clone ID: TF_ZmC1389_8
cagccagctccattctatctactgctactctcagtactatatatctatccgcagttccatagttcttccagctgctctacacatacacatacacgctagctctagctctcacatcgattgagatcatcagagaggtggaagaagaagaagctaagataccagatcgaggaagagaggcggtgcggtggttggtagatgatggagagggtcgaggacttagggctcagcctcagcctcagctcgtccctcgcgtctcctcgcactcaccatgtcgccaccatgctgctacgcgctccaggtaaatatataatgcaatttgtctatatatatctctgtactaagtagctatgcttggatctatcagagagtaactgtgaatgaccatatcaattaagctgtagctagctctagtgtacatgtgtgagtcttatgtctgtctgactatatgtaagattagtagtcagcaactaaataccgtacgtgtatgagtatggctgtcactcggatgcatcacatataatgtatcagagaagaggttcctggagatgccactgctgctgcccgcgaagcggacgaccgaggtcaccggcgaggatggcctgcgaggcggcagcgatgaggaggacggcggctgcggcatcgacggctccaggaagaagctccggctgtccaaggaccagtccgcggtgctcgaggatagcttccgggagcacccaactctcaaccctcggcagaaggcagccttggcgcagcagctaggcctgcggccccgccaggtggaggtgtggttccagaacaggcgcgccaggtacgtacgtagcgcacatgcgatatgtcgccgcgcgctagctcgtgtgtgctgatgatcagcaagcatgcactgcatggccgggatttctctctcttttctgcccctcgctcgatcgcttcattcggtcgtgcaggacgaagctgaagcagacggaggtggactgcgagtacctgaagcgctgctgcgagacgctgacggaggagaaccggcggctgcagaaggaggtgcaggagctccgcgcgctcaagctcgtgtcgccgcacctctacatgcacatgtccccgcccaccaccctcaccatgtgcccctcctgcgagcgcgtctcctcgtccaacggcaactccgcagctgccacggcggc

SEQ ID NO: 2325 - DNA, 3212 bp, Zea mays
  Clone ID: TF_ZmC508_1
gatccgccctcgaggcgctctcttttccgcccatgccggaggtcttcttcctcccggagctctcgccatgcccgctctcccgcctcctgctagctagcctagcctagccagctgcgtgcgtgcgtgcatggggacgcggatcgtttcctgcatgcgatatcaccaacgcttcgctggaagaaggcgtcgtcacaggcagggattgaagaacgaaagctgatcgatggtagagagcaagagccagctagggtttgggagctgaggctaggaccgtacgtcgtacgtacgtgctgccattgttcatgacgccggcaaggcgcgtgccgccggcggcgatgatcggccggaatggcttcgcgtttgggtcctcgtccgcgctgtctttaagccaggctgacctcctagacagccatcagctgcagcaagcgttccagcagcagctcttcgatcagatcccgaccaccaccacagtggacgatagcagcgacaacctcatccatggccgctctgacacgctggtagatgagttcgagagcaagtcctgcagcgagaatcccgacggaacctctggtgacgatggcctggaggaagaccccaaccagcggccgaacaagaagaagcgataccaccgccacacccagcaccagatccaagagatggaggcgttcttcaaggagtgcccgcacccggacgacaagcagcggaaggagctgagccgggagctcggcctcgagccgctgcaggtcaagttttggttccagaacaagcgcacacagatgaagaaccagcacgagcggcacgagaacgcgcagctgcgcgcggagaacgacaagctgcgagccgagaacatgcggtacaaggaggcgctgggcacggcctcgtgccccagctgcggcggcccggctgccctcggcgagatgtccttcgacgagcaccacctccgcctcgagaacgctcgcctccgtgacgagatcgaccggatctcgggcatcgccgccaagcacgtgggaaagcccatggtctccttccccgtgctctggggatcggaggatatttatcagtggggagtcaagaacgcacctctcgacctcgccggcgcctacggcgtccagtcagctgctgcgggcctcggcgccgaccacctgttcggcgccggtgccggcgatctgctgaggagcgtgtcggccgggcagctcgacgcggacaagcccatgatcgtggagctggccgtcgcggccatggacgagctcctccggatggcgcggcctgacgcgctgcgtcgtgttgttgttgcttcggcagggacgtagcagcagctgctcgtggacgaggaggagtacgtccggacgttccccgctgggctcgggccgaggcagtacgggctccgtccggaggcttctcgggacagcgccgtcgtgatcatgacctgcgacagcctcatcgagatactcatggacgcgaaccgattcgcggcagtgttctcgagcatcgtgtcgagggcttccacgcacgaagtgctgtcaactggtgtggcagggagctacaatggtgcattacaagtgatgtcgatggagtttcaggtgccgtcgccgctggtgccgacgcgcgagagctacttcgtgaggtactgcaagaacaacccggacgggacatgggccgtcgtcgacgtctcgctcgacagcctccgccctagcccggtcatcaagtgccggcgcaggccgtcaggttgcctcatccaagagatgcccaatggctactcaaaggtgacctgggtggagcatgttgaggtcgacgacagatcagtgcacaacctctacaggcctttggtcaattcaggcctcgcgtttggcgcgaagaggtgggttggcacactggaccggcagtgcgagcggctcgccagcgccatggccagcaacatccccaacggcgacctcggtgtgatcacaagcatagaggggaggaagagcatgctgaagctggcggagaggatggtggcgagcttctgcggcggcgtgacggcgtctgcggcgcaccagtggacgacgctgtcgggaagcggcgcggaggacgtccgtgttatgaccaggaagagcgtggacgacccgggcaggccgccgggcatcgtcctcaatgctgccacctccttctggctgcccgtcccacccaagagggtcttcgacttcctccgcgatgagacctctcgcagcgagtgggacatcctctcgaacggtggtgctgtccaagaaatggctcacattgccaacggccgggaccatggcaactgtgtctccctccttcgtgtcaatagtgcaaactcgaaccagagcaacatgctgatcctccaggagagctgcaccgacgcctcgggctcgtacgtggtgtacgcgccggtggacgtggtggcgatgaacgtggtgctcaacggcggcgacccggactacgtggccctgctgccgtcgggcttcgccatcctccccgacggaccaccgccggccggtgcggctccgtcccacggagagggtttggacgctggcggcggcgggtccctcctgacggtggcgttccagatcttggtggactccgtccccaccgccaagctctccctcggctccgtagccaccgtgaacagcctcatcgcctgcaccgtcgagcgcatcaaggccgccgtctgcgcggaagccggcaacccgcagtagacatccatccatgcaatatcgaggagggagaaggggggcatgcagcaaggttttgtggaaatgttagtggggagtcaagaacgcacctcagactctccttgccgtgtggtgctcataaaggaaaaagaaggcgtcaccactatgcaaggggggatggttcgggtattgacttcgccgtccaatcaaactactacagaaaggacgtacgggtgctgtggagaagatggatcgatgctgtttctagggtttacttcctcattgttcgtggtgctgccgtagttcaggctaaggtgcctgtgcctgctcgcagtcgtagctagagaacacagagatttgttgcctctgatctttcctttttggatttgcaaagatttgtagatcagtcatttcgtaaaccgatgcgccttggctaaaacgcgcccgttcgttgttgttcgatcgtagctgccttttgctattcataaaacgatgcaatttcaaccactgagtttcttctagaaaaaaaaaaaaaaaaaa

SEQ ID NO: 2326 - DNA, 294 bp, Zea mays
  Clone ID: TF_ZmC62880_1
cgttcgtatccttctctcgtcttcctctccttctccaattcctctccgagagcttctagtctagcactccgttaacaatcgagtaatccacggcgcggcagtaatgtacttatatgtgctaccaggtagtgagcagacgaaggctcggcagctgagcgacgggcaggcccggaagcggcggctgagcgacgggcaggcgcggttcctggagctcagcttcgggaaggagcggaagctggagacgccccgcaaggtgcagctggccgccgagctgggcctcgacgccaagcaggt

SEQ ID NO: 2327 - DNA, 1595 bp, Zea mays
  Clone ID: TF_ZmC1455_2
actgcctccatcatcctcccagagagagagagagagcccgggagccgagccggttcaaccccatgaataccgctgctgcagagatcacggcctgcttctgcgtctgcagctccagcagtagcaacagcaggggctgcagtgcaaacgactgctagttcccctttccccgcatgatctctgccccttcccctaccttctcttgttcttgcttgcacgacccttttccttgtgcgctagctgccgcttcttcttcgtcttcctggagctccccgcatccacacatgccccaagaaccagacaataaaacaacacggaaccatcggagtctttttctactactatttccagcgattttattatatggatgtgtgcacaggtgcacgtagataggtagaatagaagggagattatagctagctagaggcagcgagcagctcggttgctgggacacgcgatcgagctacagcaaagaagactgcagggtggcgcggcgggcatggaggatctgtacagcatccacccggggatctcgcgccacggggcggcggcgactagcgaggcgtccggggtcgccggtggaccgggctcacccccgcccccgcccccgccggcggcggatctgacggagctggtcaaggcgcagatcgccgggcacccacgctacccgtccctcctctccgcctacatcgactgccgcaaggtgggcgcgccgtcggaggtggccacgctgctggaggagatcggccgggagaggtgcgccgccgcctccgccggcggggaggtcgtcggcatggaccccgagctcgacgagttcatggagacgtactgccggttgctggagcggtacaaggaggagctgtcgcggccgttggacgaggcggcgtccttcctcagcaacgtcaggacgcagctcagctccctctgcggcggcgccgcctcgctctccgatgaaaatgaaatggtggagtcctctgagaacgagccatgctcaggcgacacagacgcgacgacagacccagggcaggagcacagctcgcgcctggccgaccgcgagctcaaggagatgctgctgaagaagtacagcggctgcctgagccggctgcggtccgagttcctgaagaagaggaagaaagggaagctgcccaaggacgctcggtcggcgctgatggactggtggaacacgcactaccgctggccgtaccctacggaggaggataaggtgaggctggcggccatgactgggctggacccgaagcagatcaacaactggttcatcaaccagcggaagcggcattggaagccgtcggaggacatgcggttcgcgctcatggagggcggcgtcgccggatcctcctccgggacgacgctctacttcgacacgggcaccatcgggccgtgatcacctctgacgacaagccgtttcgaattgagggcaaattgttggttgatacggagatcagttcattttgtcggattcattgtgtatatgcatgggcgacaacgtgtattgtcgggtacacagtatgtagtggcatgtaaagacaccgtaacaatataacatgaattgtttaattgcctgttgcattttgatcaag

SEQ ID NO: 2328 - DNA, 1626 bp, Zea mays
  Clone ID: TF_ZmC1455_3
aattcggcacgagggcactgcctccatcatcctcccagagagagactgagagagagagagcgcagccgaggcagttcgcccgcatgtatcccgctgctgcagagatcacgcccagcttctgcgcctgcagctccagcagtagcagcaccaggggctgcagtggaaacgactgctagttccccttctccccatgatctctgccccttcccctaccttctcttgttcttgcttgcacgacccttttccttgtgcgctagctgccgcttcttcttcgtcttcctggagctccccgcatccacacatgccccaagaaccagacaataaaacaacacggaaccatcggagtctttttctactactatttccagcgatttgattatatggatgtgtgcacaggtgcacgtagataggtagaatagaagggagattatagctagctagaggcagcgagcagctcggttgctgggacacgcgatcgagctacagcaaagaagactgcagggtggcgcggcgggcatggaggatctgtacagcatccacccggggatctcgcgccacggggcggcggcgactagcgaggcgtccggggtcgccggtggaccgggctcacccccgcccccgcccccgccggcggcggatctgacggagctggtcaaggcgcagatcgccgggcacccacgctacccgtccctcctctccgcctacatcgactgccgcaaggtgggcgcgccgtcggaggtggccacgctgctggaggagatcggccgggagaggtgcgccgccgcctccgccggcggggaggtcgtcggcatggaccccgagctcgacgagttcatggagacgtactgccggttgctggagcggtacaaggaggagctgtcgcggccgttcgacgaggcggcgtccttcctcagcagcgtcaggacgcagctcagctccctctgcggcggcgccgcctcgctctccgatgaaatggtggagtcctctgaggacgagccatgctcaggcgacacagacgcgacgacagacccagggcaggagcacagctcgcgcctggccgaccgcgagctcaaggagatgctgctgaagaagtacagcggctgcctgagccggctgcggtccgagttcctgaagaagaggaagaaagggaagctgcccaaggacgctcggtcggcgctgatggactggtggaacacgcactaccgctggccgtaccctacggaggaggataaggtgaggctggcggccatgactgggctggacccgaagcagatcaacaactggttcatcaaccagcggaagcggcattggaagccgtcggaggacatgcggttcgcgctcatggagggcggcgtctccggatcctcctccgggacgacgctctacttcgacacgggcaccatcgggccgtgatcgatgcgatagatacctctgacgaattgggggcaaattgttggttgatactgagattagttacatgaagcaatatccgctgtcattttgtcggattcattgtgtatatgcatgggcgacaacgtgtattgtcgggtacacagtatgtagtggcatgtaaagacaccgtaacaatataacatgaattgttcaattgcctgttgcattttgatc

SEQ ID NO: 2329 - DNA, 1662 bp, Zea mays
  Clone ID: TF_ZmC1455_4
cattgggtacctcgaggccggccgggattccttccctctttcccgatctcaattcggcacgagggcactgcctccatcatcctcccagagagagactgagagagagagagcgcagccgaggcagttcgcccgcatgtatcccgctgctgcagagatcacgcccagcttctgcgcctgcagctccagcagtagcagcaccaggggctgcagtggaaacggccgctgctagttcccgttctccccatgatctctgccctttcccctactttttcttgttcttgcttgccccttttccttctgcgctagctgccgcttcttcgccttcctggagcttcccgcatccacacatacctctaaagaaccagacaaataaacgacacagaaccgtcggagtcgtcttctactactgtctccagtatatgggtttgttgtgcacaggtgcgcgtagataggtagaatagaaggcagattatcgctcgaggcagcagcttggttgctggggcacgcgatcgagctccaggcaagaagatttgcaggaaggcgcggcaggcatggaggatctgtacagcatccacccggggatctcacgcgccgggggcgcggcgactagcgaggcgtccggggtcgccggtggaccgggctcacccccgcccccgcccccgccggcggcggatctgacggagctggtcaaggcgcagatcgccgggcacccacgctacccgtccctcctctccgcctacatcgactgccgcaaggtgggcgcgccgtcggaggtggccacgctgctggaggagatcggccgggagaggtgcgccgccgcctccgccggcggggaggtcgtcggcatggaccccgagctcgacgagttcatggagacgtactgccggttgctggagcggtacaaggaggagctgtcgcggccgttggacgaggcggcgtccttcctcagcaacgtcaggacgcagctcagctccctctgcggcggcgccgcctcgctctccgatgaaatggtggagtcctctgaggacgagccatgctcaggcgacacagatgcgacgacagacccagggcaggagcacagctcgcgcctggccgaccgcgagctcaaggagatgctgctgaagaagtacagcggctgcctgagccggctgcggtccgagttcctgaagaagaggaagaaagggaagctgcccaaggacgctcggtcggcgctgatggactggtggaacacgcactaccgctggccgtaccctacggaggaggataaggtgaggctggcggccatgactgggctggacccgaagcagatcaacaactggttcatcaaccagcggaagcggcattggaagccgtcggaggacatgcggttcgcgctcatggagggcggcgtcgccggatcctcctccgggacgacgctctacttcgacacgggcaccatcgggccgtgatcacctctgatgacaagccgtttcgaattgagggcaaattgttggttgatacggagattagttacatgaagcaatatccgctgtcattttgtcggattcattgtgtatatgcatgggcgacaacgtgtattgtcgggtacacagtatgtagtggcatgtaaagacaccgtaacaatataacatgaattgtttaattgcctgttgcattttgatc

SEQ ID NO: 2330 - DNA, 1478 bp, Zea mays
  Clone ID: TF_ZmC1389_6
cattgggtacctcgaggcccggggggaccatttcattccttccttccttcccctcgctcgccttcctggcttcttcctccccagcacgcacacgcacacgcacacacccagccttttggctgccctgccggccgtcagagagagaaaccgagctctaactaactgaagtggcggccacatagctagctactcttctgatcctgagcgcgcacgcgccatggctcaggaggacgtgcacctggacgacgcaggcctcgcgctgggcctgtccctcggcagcggcagcggcggcgcctctggtgcggcgcgccacggtggtatcagccgccggctgagcagggaggtgcggctgccgtcgccgcacccgctggagccgtcgctgacgctgagcttgccggacgaagcgaccgcgaccgggtccggcgggggcggggccgcgcacagcgtgtcgtcgctgtcagtggcgggcgtgaagagggagcgcgtggatgacgccgagggagagcgggcgtcgtctacggccgcgttgccgcgggcctgcgccggcgccgaggacgacgacgacgacgggagcacgcggaagaagctgaggctgaccaaggagcagtccgcgctcctggaggaccgcttcaaggagcacagcaccctgaacccgaagcagaaagtcgcgttggcgaagcaactgaagctgaggccacggcaggtggaggtgtggttccaaaacaggcgagcaaggacgaagctgaagcagacggaggtggactgcgagctgctgaagcgctgctgcgagtcgctgacggaggagaaccggcggctgcagcgggagctgcaggagctccgcgcgctcaagttcgccccacacccacaggcgccgccgtcgtccgcgacgcaggccggcgcggcggcgggcgtcgttccggcgccgccgccgccgttgtacatgcagatgcagatgccggccgccgccacgctgagcctgtgcccgtcctgcgaccgcctggccgggcccggcgccgccgccaaggccgagcccaggcccaaggcagccgccacccaccacttcttcaaccccttcacccactccgccgcctgctgatgatgagggcagggcagcacgcagccacgcaacgcagcggcagtaaacagagcaccgccccgtgcagataataccacgtctgtacgtgtcacaagtaattaacaaacgtatggtcctcctctctatctattttcttgatccggagggctaagttagttgttttcgtgtcgatcccaaatgcatcagctaatccatcaatcataggcttgatagagtagtcgaaaaaaatagccgtagctttcctagcactccctccgccccccccccccccccccatccatgtatatttctgttgtaattctgtccctctctcgcggtctacttgctcccttttcgattggagtacgtagctcctttgcctttttgtttttggttttttgtt

SEQ ID NO: 2331 - DNA, 830 bp, Zea mays
  Clone ID: TF_ZmC24942_3
accggtcacggccttcccgggcttaaaccccactggtgccttgccctgtggtcctcgctccttgatccactcctcctgcagctcctcctcgcacagcacgtctcctctccccggcctccctctctttctctgtccttggtcctctccccagcagcctccctctctctttctctatccctggtcctctccagataacctgacacagtggtcacgcttgacaaggagagagaaaggcgttgcagcagctgatccgcgcccgcccggccgggagcgcaggcgaaggatggaacaatacgacgggctctttcctcccgcctacgtggactcctcctcatccctcctcctggtgcccaacgccaacggcactgcgcaggaggagagaccgagagcgcggcgcaggaggcgtcgagcagcgaggtgcggcggcggcggtggcgagctggacggaggaggggaccacaagaagcggcggctgaccgacgagcaggtagagatgctggagctgagcttccgggaggagcggaagctggagaccggccggaaggtgcacctggccgccgagctcgggctcgacctgctctatgttcctgactatgcctacgctgacagcagcgtggtcgagtggtttagcctgtatggactgatgtaatcgatggtatggtatgccatcgtcgtcggcagattaattctagctagctactcatcgtagcgtgtcattgctgtgctgaattgctgatttctatgtgcgccctcttaatcatatgtacataaatcaagctatcaattactggcaaaatatagccagctagcagcaactagtactttaattc

SEQ ID NO: 2332 - DNA, 1278 bp, Zea mays
  Clone ID: TF_ZmC1389_14
ctctcatgtctttaaaccctcgctctccccccccacttcttttatcccttcatcgtctatcagccagctccattctatctactgctactctcagtactatatatctatccgcagttccatagttcttccagctgctctacacatacacatacacggtagctctagctctcacatcgatgtgagatcatcagagaggtggaagaagaagaagctaagataccagatcgaggaagagaggcggcgcggtggttggtagatgatggagagggtcgaggacttagggctcagcctcagactcagctcgtccctcgcgtttcctcgcactcagcatgtcgccaccatgctgctacgcgctccagagaagaggttcctggagatgccactgctgctgcccgcgaagcggacgaccgaggtcaccggcgaggatggcctgcgaggcggcagcgatgaggaggacggcggctgcggcatcgacggctccaggaagaagctccggctggccaaggaccagtccgcggtgctcgaggatagcttccgggagcacccaactctcaatcagaagcagaaggcggcgctggcgaagcagctgaacctgaagccgcgtcaggtggaggtgtggttccagaaccgcagagccaggtgaacaaagcagcgcccttgaagcagcacacgcatgccatttatactgactcatcctccgtggctaatactagtctaataataatattatcgttcaggacgaagctgaagcagacggaggtggactgcgagttcctgaagcgctgctgcgagacgctgacggaggagaaccggcggctgcagcgggaggtggcggagctgcgcgtgctcaagctcgtggcgccgcaccactacgcgcgcatgccgccgcccaccacgctcaccatgtgcccctcctgcgagcgcctcgcctccgcgtccgcgtccgccgaccaggcgggccgtgcagggccctgctggggccctctccccgtgttcgtcgacggcccagcccggaggccgtgatccacgaccacgatatggcatgagatggatgcgcttgctaatcgctaccgctagctaagtagctagtgctaattagggctggatcttctttttttctttgtttggttcttattatactcgcaggctattacagcttagtagtgtttattagtccgatatgataaaaatcttcgttgtttggcagtgttttatttgctgaaaaatagataacgatgtcttatgtctttgtactcataagtgatgcaaaattgtctt

SEQ ID NO: 2333 - DNA, 2129 bp, Zea mays
  unsure (1)..(2129): unsure at all n locations
  Clone ID: TF_ZmC3383_1
agggcacccttcttgtcgcgccggctggccccgttgccggcgcagcggcggcgaaccatggcggggggccctgccgccgcactcccctcacggtcgtggcgctcgggcccggcgctttagtggatgccgcgccgtcccgcgggatctttggcgttgagagcaaacccagaaaggaaaaaggaaaaaaagaaaacagagagaggggagagtgggagacggtcggagacagaggcctcactcctccacactctcagtcgtcttccagtcccagcgctttcttggatcgcgaggaaaccactcggggagtttgcagttgcagagaactgtatcggccgaagtggttgcacggtgtgttggccttggccatgcgccacggcagggaacagagacgagcagcagggaggcagcaatggaggcgctcattgaccctgctctcgctgtaaagatagtcccgcggtgccctccgaattccacttgatccaactctcgacatgaagcggccacgcggcgctactccctccctgtctgcgatgcccaatcatcaggaagatgacggctacggcgtggtcgggatggaggcggacgtggacgtggacgtggacgaggagatgatggcgtgcggcggcggcggggagaagaagcggcgcctgagctccgagcaggtgcgcgcgctggagcggagcttcgaggtggagaacaagctggagccggagcgcaaggcgcggctggcgcgcgacctcggcctgcagccgcgccaggtcgccgtctggttccagaaccgccgcgcccgctggaagaccaagcagctggagcgcgactactccgcgctccgccagtcctacgacgcgctgcggcacgaccacgacgcgctgcgccgcgacaaggacgccctcctcgccgagatcaaggagctcaaggcgaagctcggggacgacgaggcagcggcgagcttcacgtcggtcaaggcggagccggcggcctcggacgggccggcccccgcgggggtggggtcgtccgagagtgactccagcgcggtgctgaacgacgcggacccgcccgtggcggaggcgccggcgccggcgcccgaggtgcagggcacccttcttgtcgcgccggctggccccgttgccggcgcagcggcggcgaaccatggcggggtgttcttccacgggagtttcctgaaggtggaggaggacgagacgggccttttagacgacgacgggccgtgcggcgggttcttcgccgtggagcagccgccggcgatggcgtggtggaacgagcccgcggaacactggaactgaaccgaggtggacgcggcagtgcagcgtagtagaatcgggatctcggacgagcggtggaggaataaccgaatagaggaattcggagcgataaagaaggggcttttctgcaaattttgtaaaacggggttttacctagccctactttttgtcaattctcgagcgtattagcagtagacagtagtagtagtctgggtcggaacccagtcaagctcagcgcctgggttgcgtttggactccagtgcagaattgcgtagaggatttagaggaagagcggagctgagctgagcgaggcaggagtaaaggacaacctgtatgtcactgttagtgggcccagtgccacgtgaaagtcaggcactgttggtgcccattgacggccggacttgccagcgacgcggatgggcgacgtgaacgtgtctggccgagcagtgcgctcgctccctccccccaatgggccatggcctcttccgcgaaagcgtgctcccctgtaagtatctgatttggatgctagccaaggctgctggatgattacttcgattatctaaaaaatctgatttggatgctcgccgcaaaaacaatggctcgctgcggagggaatcggcagcggtgccgtcagattgtggaatgtgttcaacggttatctgttggattaatgtggctgtggccagattgtaccccgctgattagtcaatgccattggctcaagaaactaaatcgccgccgccgaggagaacaaggtgcatgacactttctgctcgacgccgtgtgaggcccggcagggnatggacctggtgttgcgacaggagtcccttcgacctctcacagcactcc

SEQ ID NO: 2334 - DNA, 1936 bp, Zea mays
  unsure (1)..(1936): unsure at all n locations
  Clone ID: TF_ZmC3383_2
cattgggtacctcgaggccgggcgggattgcgggaactgaaagcaaaccaaaaaagaaagagagggggagagacacagaggcctcactccacacactgtcttgtctctcagtcccagagctttcttggatcgcgaggaatccactggaaattttgcaattgtagtagagaactgtatcgtccgacgaaggtgcatggtgttggccatgggtcacggcagggaacagagacgagcaggtcggcgctctccccccagctcattgatcctgtcctcgctataaggtagtcctgcggtggcctccgaatttcactcgatcgaacacgacatgaagcggccacgcggcgccagtccccctctggctgcgatgaccaatccgaacgatgatggttacggcgtggtcgggatggaggcggacgcagacgcggacgcggacgaggagatgatggcgtgcggcggcggcggggagaagaagcggcgcctgagctccgagcaggtgcgcgcgctggagcggagcttcgaggtggagaacaagctggagccggagcgcaaggcgcggctggcgcgcgacctcggcctgcagccgcgccaggtcgccgtctggttccagaaccgccgcgcccgctggaagaccaagcagctggagcgcgactactccgcgctccgccagtcctacgacgcgctgcggcacgaccacgacgcgctgcgccgcgacaaggacgccctcctcgccgagatcaaggagctcaaggcgaagctcggggacgaggaggcagcggcgagcttcacgtcggtcaaggcggagccggcggcctcggacgggcctccccccgtaggggtggggtcgtccgagagtgactccagcgcggtgctgaacgacgcggacccgcccgtggcggaggcgccggtgccggaggtacggggtactcttcttgacgcgcccggcgccgtggcggcgaaccatggcggcgtgttcttccacgggagtttcctgaaggtggaggaggacgagacggggctcctggacgacgatgagccctgcggcgggttcttctccgtggagcagccgccgccgatggcgtggtggaccgagcccacggaacactggaactgaaccgaggcggaggtagatgcagcgcagcgtagactcgggatctgggccgagcggtggaggaataaagaattcggagcgagaggcgggggcttttctgcaaattttgtaaaatggagttttacgtagccctctttcgtcaattctcgcgcgaatattttagcagtagcagtagtctttaggaacccagtcgagatcagtacctggttgcgtttggactcgaatgcaaaaacaaaaaaaatgcaagaaaaagagatgagaccaaacactgatgcagaaaggggagagagggacagtgggaagaggagtgtagaggaagagctgagcgaggtagggagtaaaggacaagctgtatgtcactgttagtgggcccagggccacgtgaaagtcaggcattgttggcgcccaattgaccgccggacttgtcagtgatgcggatcggcgacgtgaacgtgtctggccgtgcgctcccccaatggcctcttccgcggaagcgtggctctggctccttcgtcgacctgtcgtgcgtctctgtatctaattttggatgctcgccgacgccgctagatagctgtttggatgccgtgccgtgagaaatggcgatcgtttttgtgccctcttgctcgagcagatgcttgtccttgttataaaaaaaaaccctgcgaggtgttatataggctagtgtggggttctatctttttctccaataaatatgtagccctttataataactaatgaataaaagataacgcaagaaaaagattttctacctataaattnnnnnnnnnnnnnnnnnnnnnnnnnnnnnnnnnnnnnnggtctagagcg

SEQ ID NO: 2335 - DNA, 1961 bp, Zea mays
  unsure (1)..(1961): unsure at all n locations
  Clone ID: TF_ZmC3383_3
gggagagacacagaggcctcactccacacactgtcttgtctctcagtcccagagctttcttggatcgcgaggaatccactggaaattttgcaattgtagtagagaactgtatcgtccgacgaaggtgcatggtgttggccatgggtcacggcagggaacagagacgagcaggtcggcgctctccccccagctcattgatcctgtcctcgctataaggtagtcctgcggtggcctccgaatttcactcgatcgaacacgacatgaagcggccacgcggcgccagcccccctctggctgcgatgaccaatccgaacggtaacttccagcttctcctgttttgtttttcctgcgggaatccattgtatttgggggnggtgatgtcgtggcggaacgcgtgcggaggattgagtcctcttgcgtgttcccagatgatggttacggcgtggtcgggatggaggcggacgcggacgcggacgcggacgaggagatgatggcgtgcggcggcggcggggagaagaagcggcgcctgagctccgagcaggtgcgcgcgctggagcggagcttcgaggtggagaacaagctggagccggagcgcaaggcgcggctggcgcgcgacctcggcctgcagccgcgccaggtcgccgtctggttccagaaccgccgcgcccgctggaagaccaagcagctggagcgcgactactccgcgctccgncagtcctacgacgcgctgcggcacgaccacgacgcgctgcgccgcgacaaggacgccctcctcgccgaggtagttgtcgacgttatgccgttatacaagctgctggacgagcacgatgacgcgcgcaatggctgaccgccggcctgaccccctcggttggctgcctgaatttctcctagatcaaggagctcaaggcgaagctcggggacgaggaggcagcggcgagcttcacgtcggtcaaggcggagccggcggcctcggacgggcctccccccgtaggggtggggtcgtccgagagtgactccagcgcggtgctgaacgacgcggacccgcccgtggcggaggcgccggtgccggaggtaccggggtactcttcttgacgcgcctcggcgcccgtggcggcgaaccatggcggcgtgttcttccacgggagtttcctgaaggtggaggaggacgagacggggctcctggacgacgatgagccctgcggcgggttcttctccgtggagcagccgccgccgatggcgtggtggaccgagcccacggaacactggaactgaaccgaggcggaggtagatgcaggcatgcagcgcagcgtagactcgggatctgggccgagcggtggaggaataaagaattcggagcgagaggcgggggcttttctgcaaattttgtaaaatggagttttacgtagccctctttcgtcaaaaaaaaaaaattatatacgccgccatattcgcaagccaccgcaaccgaagccggccttcgccgccgcccccgcccccgccgcctctgcgatccccgcaaggtcgcaaacatgtctaccgtgctccagcgcccgacccccggcacggtccagtgcttcggccgcaagaagacggctgtggccgtcgcctacaccaagccggggcgcgggctgatcaaggtgaacggcgtcccgattgagctcatcaggccgcaactgctccgcctcagcacatacaaaccatcctgctggcagcgtgcaggttcaccaccaggggattgtttttataacaaggacaagcatctgctcgagcaagagggcacaaaaacgatcgccttttctcacggcacggcatccaaacagctttctagctcgagcagatgcttgtccttgttataaaaaaaaaccctgcgaggtgttatataggctagtgtggggttctatctttttctccaataaatatgtagccctttataataactaatgaataaaagataacgccag

SEQ ID NO: 2336 - DNA, 652 bp, Zea mays
  unsure (1)..(652): unsure at all n locations
  Clone ID: TF_LIB3689-215-Q6-K6-D4
ctctagcttgatttgttgattccatggatcttggtacttgggcgttccattcgatcttggcttggaggaattcttgtgtactgattggggttgccatgtgggagtgacgaaggcgggagaccgatgcttggccttgaagaagggcgcggcgtaaaacggccctttttcacctcgcccgacgagctcctcgaggaagagtactacgacgagcagctgccggagaagaagcgccgcctcaccccagagcaggtgcttctgctggagaggagcttcgaggaggagaacaagctggagccggagcgcaagacggagctggcgcgcaagctgggcctgcagcctcgccaggtggccgtctggttccagaaccgccgcgcccggtggaagaccaagcagctcgagcgcgacttcgaccgcctcaaggcctccttcgacgctctccgagcggaccacgacgccctcctccaggacaacaaccgcctccgctcacaggttgtgtcgttgaccgagaagctgcaagagaaggaggatgcgacggagggcggcgccaccgctgacaccgccgcgccggcggtggacgtcgaggcttccttggccgacgacgtcgaggagccagcagagcctgcggcgacgttcgaagtgctgcnnagagtga

SEQ ID NO: 2337 - DNA, 2575 bp, Zea mays
  Clone ID: TF_ZmC894_1
ataaaataaactgatttatgtaaaatctttttattgttcaaacagacactcaataaataaataaatgacaaattaagcttacaggaagagtatatatgtatatgtatatgaatgtaatccacctattgcgccccgccattgtcttgtctcgcatgcgtccttgaacacaactttctccgtaggatgaatcagagaacgaatacaagtcggcagaaaagaacacggttgtacattaaacaaccttgcaatccaagctggtctcgttatatatacagcggtgatggtcccttgacggaaggtcctgagtgagatctgaccatgcctttgagacttcatgtgggcaacgtttctctcctctcagcgcaaaaagatagatcctctgctctaccggcctaccacgttcgtctcccgcgccggccacccaccgctgccaccgagggtaaaaccgtcaacccgccttgccccggcgcctataagaagttccctctccatttcgtcagccgggagttccagagccctccagagcaaaaaaaatatattatcgaatactaaagcattttcctcgtcgatagaatatagaattttaaaaagggagcgaaataggttttttcctttttgcagctccgtcgtccaccaacctcctccgatccggccgccgcagcgtagccgaattgtcccctcgctagcttctccggccggctagaggctgtttcaggcggcctcgatctcctccgcgcggctgaggaaggagatcacgcggttgctcaggggctggggcgtgcatgatgggattttggttgattccgatggagactccggcgaggcttctgtggagcacgagcttcttccgccacaagatcgccgccatgctcgcctcctcctcctgcttcttatagatcccaccccctcgccgtcgtcgtcggcacggcagctagctcgctagcttctgtacataggtcgacgcgccatatagatactagtctcggattaagcgataattaaggcaaagaatctccaagtttgcttcgctcttgcattgaaccatggagtctggacggctcatcttcaacgcgccgggctctggcgccgggcagatgctcttcctcgactgcggcgcaggcggcggtcccggcggcggcttgttccatcgaggcgggagaccgatgcttggccttgaagaagggcgcggcgtaaaacggcccttcttcacctcgcccgacgagctcctcgaggaagagtactacgacgagcagctgccggagaagaagcgccgcctcaccccagagcaggtgcttctgctggagaggagcttcgaggaggagaacaagctggagccggagcgcaagacggagctggcgcgcaagctgggcctgcagcctcgccaggtggccgtctggttccagaaccgccgcgcccggtggaagaccaagcagctcgagcgcgacttcgaccgcctcaaggcctccttcgacgctctccgagcggaccacgacgccctcctccaggacaacaaccgcctccgctcacaggttgtgtcgttgaccgagaagctgcaagagaaggaggatgcgacggagggcggcgccaccgctgacaccgccgcgccggcggtggacgtcgaggcttccctggccgacgacgtcgaggagccagcagagcctgcggcgacgttcgaggtgctgcaggaggtgaagtccgaggacaggctgagcaccggcagcggcgggagcgcggtggtggacgcggacgcgctgctgtacggcaggttcgccgcggcagttgatagcagcgtggagtcgtacttccccggcggcgaggaccactaccacgactgcgggacgatgggccccgtgaatcatggcgccggaggaggcatccagtcggacgacgacggcgccggcagcgacgaggggtgcagctactacgccgacgaagccgccgccgccgccgccgcgttcttcgccggacacgccacccaccaccacgcggacgaggacgaggacgccggccagatcagctggtggatgtggaactagacgttcgatcttcccacgccgatcgatcgaccgtcttcgaatcctgtgtcaacaagaagaaaaaagaatcgtgccgtgatttttctttgcgcaacgctgctgtaagcctgtaatggtgaatttctagctatggttatgccgttatgaaggaagaaagtgtatgcatgcatggtagggtaaagagtgggtaattaatatcgttgatcatcccagtcactcgtggtgttccagaagatcaatggagttgggggagaaataagtgcgcatagaggcaagtactactctttttatggcacagtgcctatgtcaaatcagggtgttattaccagttggttttttttaaaaaaaaatactgtactattacgcattttcgcacatgatttagctgtgagttctgcacagtgaaactgaaacagctagtgtagtgtattaatgaatggaacagtgccccccaccgaaaaaaaaaaaaaaaaaaaaaaaaaaaaaaaaaaaaaaaaaaaaaaaaaaaaaaaaaaaaaagacttgaagaaagcttattg

SEQ ID NO: 2338 - DNA, 1189 bp, Zea mays
  unsure (1)..(1189): unsure at all n locations
  Clone ID: TF_ZmC894_5
ggccggccgggggagtgatttctgaccacgcctnttgagacttcaagtgggcaacgtttctcgcctctcagcgcaaaaagatagatcctctgctctaccggcctaccacgttcgtctcccgcgccggccacccaccgctgccaccgaggtctggacggctcatcttcaacgcgccgggctctggcgccgggcagatgctcttcctcgactgcggcgcaggcggcggtcccggcggcggcttgttccatcgaggcgggagaccgatgcttggccttgaagaagggcgcggcgtaaaacggcccttcttcacctcgcccgacgagctcctcgaggaagagtactacgacgagcagctgccggagaagaagcgccgcctcaccccagagcaggtgcttctgctggagaggagcttcgaggaggagaacaagctggagccggagcgcaagacggagctggcgcgcaagctgggcctgcagcctcgccaggtggccgtctggttccagaaccgccgcgcccggtggaagaccaagcagctcgagcgcgacttcgaccgcctcaaggcctccttcgacgctctccgagcggaccacgacgccctcctccaggacaacaaccgcctccgctcacaggttgtttcatttgtgtcgttgaccgagaagctgcaagagaaggaggatgcgacggagggcggcgccaccgctgacaccgccgcgccggcggtggacgtcgaggcttccctggccgacgacgtcgaggagccagcagagcctgcggcgacgttcgaggtgctgcaggaggtgaagtccgaggacaggctgagcaccggcagcggcgggagcgcggtggtggacgcggacgcgctgctgtacggcaggttcgccgcggcagttgatagcagcgtggagtcgtactttcccggcggcgaggaccactaccacgactgcgggacgatgggccccgtgaatcatggcgccggaggaggcatccagtcggacgacgacggcgccggcagcgacgaggggtgcagctactacgccgacgaagccgccgccgccgccgccgcgttcttcgtcggacacgccacccaccaccacgcggacgaggacgaggacgccggccagatcagctggtggatgtggaactagacgttcgatcttcccacgccgatcgatcgaacggtcttcgaatc

SEQ ID NO: 2339 - DNA, 1681 bp, Zea mays
  Clone ID: TF_ZmC1455_6
ctgcctccatcatcctcccagagagagagagagagcgcagccgaggcagttcgcccgcatgtatcccgctgctgcagagatcacgcccagcttctgcgcctgcagctccagcagtagcagcaccaggggctgcagtggaaacggccgctgcttccgcccgttctccccatgatctctgccctttcccctactttttcttgttcttgcttgccccttttccttctgcgctagctgccgcttcttcgccttcctggagcttcccgcatccacacatacctctaaagaaccagacaaataaacgacacagaaccgtcggagtcgtcttctactactgtctccagtatatgggtttgttgtgcacaggtgcgcgtagataggtagaaccgtagaaggcagattatcgctcgaggcagcagcttggttgctggggcacgcgatcgagctccaggcaagaagattattgcaggaaggcgcggcaggcatggaggatctgtacagcatccacccggggatctcacgcgccgggggcgccgccacggcggccagcgaggtgtccggggtcgccggcggaccaggctcgccccctcccccgccgtcgcagccccctccgccgccgccggcggatctgacggagctggtcaaggcgcagatcgccgggcacccgcgctacccttccctcctctccgcctacatcgagtgccgcaaggtgggcgcgccgccggaggtggccacgctgctggaggagatcggccgggagaggtgcgccgccgcctctgccggcggggaggtcggcctagaccccgagctcgacgagttcatggaggcgtactgccgggtgctggagcggtataaggaggagctgtcgcggccattcgacgaggcagcgtccttcctcagcagcgtccggacgcagctcagctccctctgcggcgccgccgcctcgctctcagcaatatattatacgactgctaatcccgaaacgacaagttcattcaacatcgcattagtttatgaaatggtagggtcgtcggaggaggacgaagcatgctcgggaggagacacggaggcgacggagccggggcagcaggagcacagctcccgcctggcggaccatgagctgaaggagatgctgctgaagaagtatagcgggtgcctgagccggctgcggtccgagttcctgaagaagaggaagaaagggaagctgcccaaggacgcgcggtcggcgctcatggactggtggaacacgcactaccgctggccgtaccctacggaggaggacaaggtgaggctggcggcggcgactgggctggacccgaagcagatcaacaactggttcatcaaccagcggaagcggcactggaagccgtccgaggacatgcggttcgcgctcatggagggcgtcaccggcggcgggccctcgtccgggacaacgctctacttcgacacgggcaccatcgggccgtgaccaccacactaccagcttgggcaacgcaaagtgcatacgtttttctttgtgtatatgggcgacaacgtgtcggtaggcacactcagcatactggagctgctgtccagttcagttcagtgcatatggcctcgtaaaggactctgtaccatgatgatgtaatgctaactccaacccttctcacaaatttctatttttcttattttctattttatattt

SEQ ID NO: 2340 - DNA, 485 bp, Zea mays
  Clone ID: TF_ZmC13584_2
ttccgactagctccttccaccgacgacactccccacgcatcgacaaaatggaggtaccgcgcctcccccagggtgcccttccatccatggcgttgccgcggccgtccccgcaatcaactcccagatctcgtgctcacctccccgcaatcaaggtcgtcacgcccgatgaggatggccgcgggtcgccgcacggcggtccgggccccagcgatagctccggcgcaggcgcgaggaagaagctccggctcaccaatgagcagtcgacgctgctcgaggacaccttccgcgcccacaacatactctccaacgcgcagaagcaggagctcggacggcaggtggatctcagcgccaggcaggtggaagtgtggttccagaacacacatgttcagataacacacatgttcatgctcatgctgaccccacacagaacaatcagcaatgttatgctatatattcatttcttggacatgggcgggatcttctac

SEQ ID NO: 2341 - DNA, 1547 bp, Zea mays
  unsure (1)..(1547): unsure at all n locations
  Clone ID: TF_ZmC11178_1
cattgggggtcgcgagacccgtcggcccacgcgtccgagcttctccttctctctctctccttcctggaccattctctctatctcctttctctctctacacatactcagacgagcagaagcagctagggacaccataggcaaactacttcagcaagaaattaaactatctcctacgcaagatcagaagaaactgtgtatggagcaagaagaggttggcctcgccctgggcctctccctcggctccggccaccaccaccaggagctcaagccccaacatccgtcgcatccgtgtgcggcgttgttggagccttctctgtcgctcagcggcccggcgaccaaggatgatggcccgaccgcaccggtgaggaggttcgctgccgtgaagagggagctgcagacgatggaggggaacgacgacgaggccaccggcagggtacttgtctactcagtggcgtcgtcggcggtggttactgccgacgacgacgaagggtgcaacagcagccggaagaagctgaggctgtccaaggagcagtcggcgctgctggaggaccacttcaaggagcacagcaccctcaaccctaagcagaaggctgctttggccagacaactgaacctgagcccaaggcaagtggaggtttggttccaaaacagaagagccagaaccaagctgaagcagacagaagtggactgcgagattctcaagcgctgctgcgagacgttaacagaggagaaccggcgtctccaccgcgagctccagcagctccgcgccctcagccacccgcacccccacccggctgcctttttcatgcccaccgccgctgccgctgcgctctccatctgcccctcctgccagcgccttgttgccaccggagcatctgccgccgccgcaaccaccgccggtgcagataataagcctaaggcgggcggccccggcggccgagcgccacacgtgttcagccctttcaccaattctgccgcctgctgaacacgcatacatatgtatatacatgcatgcgcacacatacatatatacgtatttttctttagcgctagccacgctctatcattcatcgatggtcatctactagctagatagtaattggttcactagatggcatatattcctgtcccctccccccttaattcattagctttgttttttcacaagctaattaatgaattgatagcggcgtcgcgtgaggacgatggagcaccacgcatgcatatgattctagtagcaaaaacaagagatatatgtcttgtttaatttggtgttgcttctgcttagtatagtgcccactgctggtgctgtagctgtagctttaattagtaggtgttcctgatggatttcctcttgtattagttaactgtcagtcagggaatagtaatgatgacagcatgacaccacatacacatcccagtttatttggatgtggatccatgtatatatgcacatgccacatgacggatctgtttcaacaattaaatactatattgatttgtcttcagaagttttgcatatccccaaccccacaccccggnggtnn

SEQ ID NO: 2342 - DNA, 1520 bp, Zea mays
  Clone ID: TF_ZmC1389_2
gtctcggcctgggcgtggcggcattccagcccagcttctgccacccggccggcaatgccgcggcggagcgggaggccagcccgaccgcggcggacgagagggagcggaggtgctctcccgccggcagcccgacgtcgagcggcagcggcagcggcagcgggaagcgcgtcgcggcggagaggtcggccggcagcggcgacgaggacgacgacgggggtgctcgcaagaagctgcggctgtccaaggaccaggccgccgtgctcgaggagtgcttcaaaacgcaccacaccctcactccggtaagggcgtaactaaggcttcatccttcgatccgacagacgtcgccgttcctcgccgtctgtcggtcggctgatttgatcttggcggtggccggtgggtgggtgggtggctgaccaaggttgtgtccgtctcggcgctgcagagcggccgcggcggcggcatcgtcgtcgcccaacaacagcgcgagctccttcccgacggacttctccgcgcacggccaggtggcgcccggcgccgaccgcgcgtgctcccgcgccagcgacgaggacgacggcggctccgcgcgcaagaagctgcgcctctccaaggagcagtccgcgttcctggaggacagcttcaaggagcacgccacgctgaacccgaagcagaagctcgcgctggcgaagcagctcaacctccggccgcgccaggtggaggtgtggttccagaaccgcagagccaggacgaagctgaagcagacggaggtggactgcgagtacctcaagcgatgctgcgagacgctgacggaggagaaccggcggctgcagaaggagctatccgagctccgcgcgctcaagacggtgcaccccttctacatgcacctcccggccaccaccctttccatgtgcccctcctgcgagcgcgtcgcctccaactccgcgccggcgcccgcgtcatcgccgtcccccgctactggcattgcggccccggcaccggagcagaggccctcgtcgttcgcggctctgttctcgtcccctctgaaccgcccgctggccgcccaggcgcaaccgcaaccgcaggcgccggccaactcgtgaggcgctctctactctatctccggcgacgcgaacggaggtggatctggctgtaaatacgatcacctttttttggcttcctttttcttttgttttcacttgatgcggttcttgagattttttttttgtggattgccgatgggttggtttaccggtttattagagcgcatcatctggccgtcggattggactgcggacggccgggtgcagaaaggaagtgctgcgatagagtttattaacctcagtagcatcgatcatgttttgttaccttgctatctatcttggcgtcaatataggccttgaaatccgaagttaccctgatgatgatgaaatgggtggtgtcaccaaaaaaaaaaaaaaaaaaaaaaaaaaaaaaaaaaaaaattggtctaattgccttttaacggatacaagcatatatacatt

SEQ ID NO: 2343 - DNA, 2748 bp, Zea mays
  Clone ID: TF_ZmC19193_1
tcgcttgttctccctagttccgacccgaagcagggaatgagcttcggcgatctcgacggcggcgggtccaagcgcaagaagccgtacaaccgccacgcgccgcggcagatcgaacagctcgaagcgatgttcaaggaattccaccacccggacgagaagcagcgcgcgcagctgagcaggcagctgggcctggacccgcggcaggtcaagttctggttccagaaccggcgcacgcatttgaagaaccaactggagcggcaggagaacgcgaggctgaaacaggagaacgacaaactgcgcgtcgagaacctgtccatccgggaggccataagggacctggtgtgcagctgctgtggcggtccagcggtgctcggggagctgtcgcccgaagagcaccagctgcgcctcgagaatgcgaggctcagggacgagctcgctcgagtctgcaccgtcacttccaagttcattggcaagcccatgtctcacatggaactgctgctcgcgaaggagccgcatcctattacaggctcgtcactggaacttgcagttgctgttggtgttggttccggcgtgccatcgagcaaaatgcccgtctcgacgatctccgagttggccggcagcacatccagctcaacgggaacagtgaccacgcccatggtgactgcatccttgccgatggttagcattgtcattgacaagtccaagttcgcccagcttgcagtgagtgcgatgaatgagcttgtcaagatggcgcggatgaatgaaccgctgtggattccaaccattccctcacctggctcaccaatcatggagactctaaactttaaagagtacttgaaggcattctcaccatgtgttggagtgaagcctactgggtttgtgtctgaggcctctagggaatccggcattgtcaccattgacagtagcgctgctcttatggaggtcttcatggatgagagacgatggtcagacatattctactgcattgttgccaaggcatcaatcgttgaggagatcttacctggtgttgcaggaagcagaaatggtgcattgctgcttatgcaggcagaactacaaatgctttcacctcgtgtccctataagggaggttacatttctcaggttctgcaaacagcttgctgagggtgcatgggctgtagtggatgtttccattgatggactgcagacggatcagtgcctagatacaaacacgaaatgccggaggctgccttcaggttgcgtgttgcaagatacccccaatggctgcaaggtcacatgggttgagcatgcagaatatcctgaggcgtccgtgcaccagctctaccagcctcttatgcgctctggcctcgcccttggcgcagggcggtggcttgcaacactgcaacgccagtgtgagtgcttggccatcctcatgtcatcgcttgcagcgccagagcatgactcagcagcggtttctctggaaggaaaatggagcctgttgaagctggcacggaggatgatggagaacttctgcgcagggatgggcgcgtcatcttcccgcgaatggagtatgctggatggtttaacaggtagcatggggaaagacgtgcgggtcatggtgcagaacagtgtggatgaacctggggtgccaccgggtgtggtgcttagcgtcgccacagcagtatggctgcctgtgacccctgagcggctcttcaacttccttcgcgacgaggagctccgtgctgagtgggacatcctcagcaatggtggccctatgcagcaggtgctacgcattaccaagggccaactggatggcaactctgtggctctgctgagatccgatcatacagactcccacctgaacagcatcttgattctgcaagagacgtgcactgacagatctggcgcaatggtcgtgtacgccccggtggacttcccggcaatgcagcttgtgcttggtggaggggactcgaagaacgtggcgctcttgccatctggtttcgtcattctgcctgctgggtctagcgccggtggggttgggcacaagtcacgcggatcgctgctcacagtcgcattccagatccttgtgaacagccagcccacagcaaagctgacggtggagtcagtggacaccgtgtacagcctcatctcctgtaccatcgagaagatcaaggcggcacttcactgtgacgtctgttaacttgggaacaggaagcttcaggcatggaggcaaggcaacagctggtgatcagcctgagtcaagaacgaaccgcgcaaaacagtagtgacctttgctaggtggtacgggtccatagggctggcccgtagcacacagcaatggcggtggttcgggtattgactcagcctccaattgttctgggttaaattttgcattttggacctacgcctggccgggcaatgccatggttggttttggtggttttagggagtctggagtcatcggtgctttttgttggctggctcgtggttttttggtatcaggtttgcttttgtaaccatagatgtaggagagccccccttgatgttgatgatacagtcaatatcagacaaatgcagcattgtatcgtgagattccagtctcagatcactgtggatttaccttgtgtggaacagtaggacgaggagcggcagtttatgtaaaaaaaaaaaaaaaaaaaaaaaaaaaaaggagggttgtgtcatccaaaacaagcttcctgtttcgatagaggaaattgatacagttaatgactgggtgtcacagttttgt

SEQ ID NO: 2344 - DNA, 1185 bp, Zea mays
  Clone ID: TF_ZmC24942_1
ggcaccccagcttacttaacaccccagctggtgccttgccctgtggtcctcgctccttgatccactcctcctgcagctcctctccccagcctccctctctttctctgtccttggtcctctccccagcagcctcgcctccctctctttctctatccctggtcctctccagataacctgacgcagtggtcacgcttgacaaggagagagaaaggcgttgcagcagctgatccgcgcccgcccggccgggagcgcgcgcaggcgaaggatggaacaatacgacgggctctttcctcccgcctacgtggacgactcctcatccctcctcctggtgcccaacgccaacggcactgcgcaggaggagagaccgagagcgcggcgcaggaggcgtcgagcagcgaggtgcggcggcggcggtggcgagctggacggaggaggggaccacaagaagcggcggctgaccgacgagcaggtagagatgctggagctgagcttccgggaggagcggaagctggagaccggccggaaggtgcacctggccgccgagctcgggctcgaccccaagcaggtcgccgtctggttccagaaccgccgcgcccgccacaagagcaagctgctcgaggaggagttcgccaagctcaagcaggcacacgacgccgccatcctccacaaatgccaccttgagaacgaggtgatgaggctgaaggacaagctggtgctcgccgaggaggagctgacgcgtttcagatccgcgggcaaccacgcggtctccggtgacggcggagacgtcatggcccgtgccgtctgcagcgggagcccgagctcatcgttctcgactggcacctgccagcagcccggaggaggcggcggcggcggcgatcacctgggggacgacgacctgctctatgttcctgactatgcctacgctgacagcagcgtggtcgagtggtttagcctgtatggactgatgtaatcgatggtatggtatgccatcgtcgtcggcagattaattctagctagctactcatcgtagcgtgtcattgctgtgctgaattgctgatttctatgtgcgccctcttaatcatatgtacataaatcaagctatcaattactggcaaaatatagccagctagcagcaactagtactttaattcagatgtgtgttcttactgctaccccgatgatcag

SEQ ID NO: 2345 - DNA, 1062 bp, Zea mays
  Clone ID: TF_ZmC24942_2
cccgggcttaacaccccagctggtgccttgccctgtggtcctcgctccttgatccactcctcctgcagctcctcctcgcacagcacgtctcctctccccagcctccctctctttctctgtccttggtcctctccccagcagcctccctctctctttctctatccctggtcctctccagataacctgacacagtggtcacgcttgacaaggagagagaaaggcgttgcagcagctgatccgcgcccgcccggccgggagcgcggcgcaggaggcgtcgagcagcgaggtgcggcggcggcggtggcgagctggacggaggaggggaccacaagaagcggcggctgaccgacgagcaggtagagatgctggagctgagcttccgggaggagcggaagctggagaccggccggaaggtgcacctggccgccgagctcgggctcgaccccaagcaggtcgccgtctggttccagaaccgccgcgcccgccacaagagcaagctgctcgaggaggagttcgccaagctcaagcaggcacacgacgccgccatcctccacaaatgccaccttgagaacgaggtgatgaggctgaaggacaagctggtgctcgccgaggaggagctgacgcgtttcagatccgcgggcaaccacgcggtctccggtgacggcggagacgtcatggcccgtgccgtctgcagcgggagcccgagctcatcgttctcgactggcacctgccagcagcccggaggaggcggcggcggcggcgatcacctgggggacgacgacctgctctatgttcctgactatgcctacgctgacagcagcgtggtcgagtggtttagcctgtatggactgatgtaatcgatggtatggtatgccatcgtcgtcggcagattaattctagctagctactcatcgtagcgtgtcattgctgtgctgaattgctgatttctatgtgcgccctcttaatcatatgtacataaatcaagctatcaattactggcaaaatatagccagctagcagcaactagtactttaattcagatgtgtgttcttactgctaccc

SEQ ID NO: 2346 - DNA, 836 bp, Zea mays
  unsure (1)..(836): unsure at all n locations
  Clone ID: TF_ZmC24942_4
gcacccctcttacttaacaccccagctggtgccttgccctgtggtcctcgctccttgatccactcctcctgcagctcctcctcgcacagcacgtctcctctccccagcctccctctctttctctgtccttggtcctctccccagcagcctccctctctctttctctatccctggtcctctccagataacctgacacagtggtcacgcttgacaaggagagagaaaggcgttgcagcagctgatccgcgcccgcccggccgggagcgcaggcgaaggatggaacaatacgacgggctctttcctcccgcctacgtggactcctcctcatccctcctcctggtgcccaacgccaacggcactgcgcaggaggagagaccgagagcgcggcgcaggaggcgtcgagcagcgaggtgcggcggcggcggcggcgagctggacggaggaggggaccacaagaagcggcggctgaccgacgagcaggtagagatgctggagctgagcttccgggaggagcggaagctggagaccggccggaaggtgcacctggccgccgagctcgggctcgaccccaagcaggtcgccgtctggttccagaaccgccgcgctcgccacaagagcaagctgctcgaggaggagttcgccaagctcaagcaggcacacgacgccgccatcctccacaaatgccaccttgagaacgaggtgatgaggctgaaggacaagctggtgctcgccgaggaggagctgacgcgtttcagatccgcgggcaacccacgcgtctccggtgacggcggagacgtcatggnccgtgccgtctgcagcgggagcccgagctcatc

SEQ ID NO: 2347 - DNA, 565 bp, Zea mays
  Clone ID: TF_ZmC8754_4
cccgggagagagcccggctggggaggaagaaccgatcgaacaacttttcttttttctagctataggatccaacggacgtcgatcgggcgatcgacatggacaggccatgccaccaccagcaccagttcttcatgccgccgccgccgcagcagcagcagctttgcgtgccgatgatggacgacccgtcgtcgttcttggcggagatgggcatcgggggcggagatgggccgtcgtcgtccgcgaggggggagaggaagcggcggttcacggaggagcagatacggtcgctggagtccacgttccgcgcgcgccacgggcacgccaagctggagccccgggagaaggcggagctggcgcgggagctgggcctgcagccgcggcaggtggccatctggttccagaacaagcgcgcccgctggcgctccaagcagctcgagcacgactacgccgtgctccgcgccaagttcgacgacctccacgcccgcgtcgagtccctcaagcgcgacaagctcgccctctccacgcagttgaacgagctaagcgagaaaatgaaagaccgggagga

SEQ ID NO: 2348 - DNA, 1497 bp, Zea mays
  Clone ID: TF_ZmC254_2
cattgggtacctcgaggccggccgggaccgggaaactgttgctcccgctttggccggagagaatagaggagcgccggggagagctgcgagcagagacggggcgaaggatagggatcgcgagcgaattcccggcctctctgcccccgcgacagcgacgcgggcggggccgcgcggcacagcgctcgctacctatagagaccccggggggcagactggagagggacaggccgcgtgcgcacgccaccgcgcttcattggccacgccgttgccatcacgccgattaaactagccgatcgatcgcccagctcgcctgcctgtgatcgaccgggtcgctgcctccgatcctcttgctgcccagcaccctggctacttcagccagctagccaggttgagaccgactagctcgatctagctgctgaggcgtggccatggagggcgacgacgacggcccggagtggatgatggaggtgggcggcgcgggcgccacagggaagggaaaaggcggcgcgctggacaagaacaagaagcgcttcagcgaggagcagatcaagtctctcgagtccatgttcgccacgcagaccaagctggagccgcgccagaagctgcagctggcgcgggagctcggcctgcagccgcgccaggtcgccatctggttccagaacaagcgcgcgcgctggaagtccaagcagctggagcgcgagtactccgcgctccgcgacgactacgacgcgctcctctgcagctacgagtccctcaagaaggagaagcacacgctcctcaagcagctggagaagctagccgagatgctgcacgagccgcggggcaagtacagcggcaatgcggacgccgccggcgccggggacgacgtgcgctcgggcgtcggcggcatgaaggacgagtttgcagacgccggggccgcgccctactcgtccgagggcggtggcaagttcgcgcacttcacggacgacgacgtgggagccctcttccggccgtcgtctccgcagccgagcgccgctggcttcacctcgtcggggccgccggagcaccagccgttccagttccactccggctgctggccatcgtcgacggagcagacctgcagcagctcgcagtggtgggagttcgagtccctcagtgagtgagtgtctgagtgatcgatcgccagaccatgcgacggcgggtcactcggttccaacttccaagcacacacacacacacacgtaagcacgaatacgagttggtagcggtcatcagccccgagcgcacggtgtacatagctttcagtagatcgaattccaggcatgtccatcaacaagcagtttcttctcgtcatcgatcatcatgcatgcaaaagaaaattttctctcccccattgtcgtcgccgctaccagatcatgtaatccaggaacatgtagagaaagatcaaacgagcttatagagaagggaggtcacatgttcgatcgatcaaaaagaaaaaaaaaaaaaaaaaaagcggcc

SEQ ID NO: 2349 - DNA, 5109 bp, Zea mays
  Clone ID: TF_ZmC1775_2
cgccaagccttttgttcaccgttactccgttcaccccgcgaggcgtgactcgtgagctctccgtgtcttggcgatgactgggcgaccgacgatgcagccgtaggccaggggccccaggtcttcctctggtccttctccggcgaagagcaccggtcagcagttactgtggacgatgttcgtttgtgtttatcattttcttggtcttgttcggggcaacaacgacattgggaataagtgtacggcagacaaacagtaacatgggaaggaaaggctcagaaatgtcaccaagtaaaaggtatcccttgaggtctccacatagtagtggtagagttcttcgctctgccttagccaatgataataaggacagtgagcctctgaatgctgctgctgctacccaagccgctgtgaaaaaaagaagtggcagtcagttggatagtcctaatagcagtgtcaggttgtttcactctacatcaaaaaataagaacgaggcatgtagcgggcctctaaatgacaggatccctgataagccagctgcaaataaaagaaaacgtgccagtccttcacaggtgggaagttccagcaacagtgtcagggtgcttcgctctgcaataaaaaataaagatgaggcatgcagtaaatctctaagtgacaggaccgctggtgagccagctgcaaataaaagaaaaaacgtcaatcgctcaaagacggggagtctgagctgtggtgtcagggtgcttctatctgcttcaaaagctaaggatgagacatctaccaagcctttaaatgatagtgctgctgttgaaccagcttcaggtaaaaggaaaggcaccagtccgtcaaaggtgggaagtgccagcaatagtgtcagggtgcttcgatctacttcaaaatataagaatgagacatgtactgagcctttaaatgatagtggtgctgttgaaccagctgcaaataaaaggaaaggtgtcagtcgttcaaaggagagaagtctcaatagcagtgtcagggtgcttcgctctggcctcaaataataagattgaggtatctattaagcctctaggtaatagtactgctggccaaccagctgcgaaaagaagaaaaagcggcagttccttcgaggcaggaagccctgtgagcagtgccagggtgcttcgctctacctcagaaaggaagaatgaggcatctaagcctttaaatgaaagtactgctgctcaaccagctgcgaggaaaaaaaaaagctggggtaatttcaaagaccgacaatccaaagattggtctcagggttcttcgctctgcctcaggaaagaagaatgaagcatgtattgggcatgtaaatgatagtacttctgctgaaccaactgtgacaaaaagaaaccgcaagccttcaatggatcgcagtcccaagaaggactacttaaaaatttgtcaaagagttagatatattttgaatcgaatgaactatcaacaaacctttattcaagcttatgcaagtgaaggttggaaaggccaaagtttggaaaaaataagacctgaaaaggagcttgaacgagccaaggcagaaatcctccaatgcaagttaagaatccgtgaagcttttcgaaatatggactctcttttatccaaggggaagcttgaagaatctttgtttgattccgcaggagaaatttcaagcgaagatatattttgtgctgtatgtggctcaaaggatgttactttacaaaatgacatcattctttgtgatggagcctgtgacagaggattccaccagaactgtttgaaccctcctttgctaactgaagatatacctccgggggatcaaagatggctttgccctgcatgtgtctgcaaagcagactctatagatgcactaaatgaacttcaagggagcaagctctccattcatgactcatgggagaaagttttccctgaggcagcttcaattgccaacggttctaaacaagttgatacttctgatctgctgccagatcatataaagcacagtgacaaccctgcattggttgaagggctgatggtggatgaagtcaggctttctgcagaggatgacagcaaagcggatgaccttcgcttgtcttcggaggactcaggggatggtgacttcgatccgtcaggtccagattctagtgaagaccaaaaagatggattgaactcagaagagtcagatttcacatcagactctgatgatttttgtgctgagattgccaaatcttgtggccaggatgaagtctcggcatctccattatcaaatgtgataaaccatacttatagaatgaaactcagggccagcaacaaccgctctaatgaagaaaaccatgatcatgtatttatggacatggagctagggcaagacatggtgctaccagtttcaagcaggcggcaggtggaacggttggattacaaaaaactatatgatgaggcatatgggaaagaatcatctaattcaagtgatgacaaagagtggtctggaaaagaactattagaaggcagtgaaacagattcacttagtgagcgacctcatcctgtaaaacggtgctctagaagagcacaagcagagcagcagaataatgaacatacaccacagagggagcgccttcatggttctgaaagtgagcagaaaactggaattcttcgatccaatggcagcagtagcacaggacggaagtttggtcctgtagctacccagaaattgaaggtacattttgagaaagatccatatcctagccgtgaaacgaaagagaatatatcagaagaactaggcttgacatttaatcaggtctccagatggttctctagcactcgtcactattcaagggttgcttctgccagaaaagaaatgcatcctgacggccatactagcgagaataatgataccacgactgtagatagcatgcaagcaaggcaacccaacactgtggtgatggaaaagttgactgggaatagaaatgacattgtttctgagaaaccgatggtgcagaacaatcttaaccaaggggtggcagaaaagttgactagggatagaaatgacattgttcctgagaaacaggtggtgcagagcaatcttaaccaatgtaataatgaagatatcccgctttctggaacagaaattgagatggagtcttacgaacaagaatcatctgaaagcagtgatgaagagtggtccacacttagcacaccacgaaaaacaaaattacaaggcaacgaaaaagtatcacttactgaatcactacgttctgcaaaacggtgttctagaagagcaccagctagggagcagaataatgaacatactcagagtgagcaacttcatggttctgtaagtaaacagcaaactgaagttcttcgctccaatgtcagcagtggcgatgcctcaaaatgtcattttggccctatagttactcagaagctgaaggaacattttgaaaaagatccatatccttgccgtgcaacaaaagagggtctggcacaagagctaggactgacatttaatcagatcagtaagtggttctctgccacccatcattattcaagagatgctgttgccaagaaccaaaaatacccaggagaaaatactactgagaataatagtagcacaatctttgatggtatacaagtaatagaacccaattttggtttgatagataaaccagatgcagatacaaatgacatgatttctgaaaagttgatggtacaaattaatcttaacgaaggcattgaagaggatatcccaccgagccaatatactaccaggtgtgaagagaaattaactatgactcaagctgccatctcaagggaagctggacctccaggttatggtcctggagaaaactttcttcaggtcagttcaaggattactagctgtgagcagagtgtgataatggctcctagcgctatcgcaagaggagttggtccaccaggatatacgcctggagaacaccagggcaatggggctccatggaatacaagctatgagcgaagaccgtttacgagtcctgcgactagctcaagagaagtcggacctccaggatatgggcctgaagaaaaccaaggcagtggcatttcctgtaatacaagcagagagcaaatattgtttatgagccctacaaccatctcgagagaacttggtccaccaggatatttgcccagagaaaaccagcgcagtgacacttcatggaatacaagctgtgagtcgggactatttatgagtcctgcgaccacctcaatagaacatggtccaccaggatatgggcctggagaaaaccaggagaatgacagtacaagctgcgagttgagaatgtttacaagtcctacaatcgtctccagagaagttggcccaccaggataccagcagggagtgtttatgagtcctaaaaccatctcaagagaagtctgtcctccaggatttgggtctggagagaaccagggcaacgacactacatggtacaaacagagcgcgtttacaagtcctacaaccatctcgagagaagtcggtccgccagggtatggacaggaagatcagggcaatggtggttcttggaacacgagttgtgagcagggagtgtttacgagtcctactagaggcatctcaagagaagtcggtccgccaggatacgggcccggggaaagtcagggcaataccacttcgtggatttcgacctgccagcagagaatgcttgcaggaatccagagaactggtggctcaaggagtatggacttggaagcctttccaccgggatacggacctggtggtgcttcagggagtgtcataagcccccaagctcggtctgcagagaatgtagaattttcggacgaggctagaaaaaaggctatacagcgggagctgagacggcggcagaagttcaggtgaaggcaatatatccagtcttcaagacaagacaatatatccagtcttgatggctgaatgagtgggcgaccttagttgccatcaagcaaaacccttgttgtatcagctgcttatcttccttttacagacttgcttggtttgtcaaggatttcttatgtgaaccctcttgaacctgaagtattcaatgcgctgtgaatttgtgcagttgccttaatcaaaaaaaaaaaaaaaaa

SEQ ID NO: 2350 - DNA, 632 bp, Zea mays
  unsure (1)..(632): unsure at all n locations
  Clone ID: TF_LIB4744-009-R1-K1-B9
ctcggccgggagttgtttgcacctgtggcctctctctctctctctctctctctctctctctactccctctctcacacccgtcctgcagtcctgctcagcaaggaaggagatagggatcaccgccaactcgtttgtgcgtgcaactcggctcctgcttttccaagacccctgccgcagtctcacaatagaatcaccgccatttccgaatcccttccagagctcagctgccaagtgccggtcacagatgaagaggcaatccaagaggcccaccgccagccgtgactccccagaaacgggtacagtggacaagcagctggcgctcgcggagtccctaacggcgcggaagacggagcccgacgagctgggggagaagaagcggcgcctggcgccggaccaggtgcgcgcgctggagcgctgcttcgaggcggacaacaggctggacccggaccgcaaggcccgcgtcgcgcgcgacctcgcgctgaacccgcgccaggtcgccgtctggttccagaaccgccgcgcgcgctggaaggccaaggccctccaccgcgacttcgcggcgctgcgcgcgcgccacgacgcgctccgncgngacaaggacgccctcgccgccgagataagggagctgaggc

SEQ ID NO: 2351 - DNA, 592 bp, Zea mays
  Clone ID: TF_LIB3960-010-Q1-K6-B2
ctcttcctctcctctcctcgctaggagccccaagcgagcacgccgcccaccacgatgccagcgcgcacgggagccggccgctccgcctccgcctcctctccgctcccgcaccactagcgcgggagcccgatggcgagcagcagggggaggctgaggctctccccgcgcgcggcggcggcgccgcagctggacgcgggcaagtacgtgcggtacacggcggagcaggtggaagcgctggagcgcgcctacggcgagtgccccaagcccagctcgctgcgccggcagcagctcatccgggactgccccgtcctcaccaacgtcgagcccaggcagatcaaggtctggttccagaaccgcagatgccgggagaagcagcggagggagtcctctcgtctgcagaccgtgaaccggaagctgggtgccatgaacaagctgttgatggaggagaacgaccggctgcagaagcaggtgtcccgtctcgtcttcgacaacgggtatatgaagaatcggctccacagtccttctgtagccaccaccgacacaagctgcgagtctgtggtgacaagtggtcagcacaacaagcagcagcaaa

SEQ ID NO: 2352 - DNA, 842 bp, Zea mays
  Clone ID: TF_LIB5117-048-A1-PF1-F5
ccttccaacgccaaccaccccccaagaaaccggaaagcgaacggcatggcgaccccccgcagcgcagcacgccacgctccctcctctccctctcgcaggccatgacgcgccaccgtccttggcctccttcccatcctcctcctcctcatcctcttcctcttcgggtagtggcagcggcaccacaagcaaccggcagcggcgccgggaagaagatggcgaggctctccccgggggcggcggcgccgcaggtggacacgggcaagtacgtccgctacacgccggagcaggtggaggcgctggagcgcgtctacaacgagtgccccaagcccagctccctccgccgccagcagatcatccgggactgccccatcctctgcaacatcgagcccaagcagatcaaggtctggttccagaaccgaaggtgccgggagaagcagcgcaaggagtcctcccgcatgcagacggtgaaccggaagctgaccgcgatgaacaagctgctgatggaggagaatgaccggctgcagaagcaggtgtcgcgtctcgtctacgagaacgcgtcggtcaagagcctcaagactaagatccacaaggcttctgcggccaccacggacacgagctgcgagtctgtggtgacgagtggtcagcagcaagccctagcagccccgcgtccgcagagggatgcgaacaacccagctggtcttctcgcaatcggtgaggagaccttgacagcgttcctgtccaaggcgaccggaaccgctgtcgaatgggtgcaaatgatgggaatgaagcctggtccggattcatgggaatcatcgcttttcgcacaattgtattggcgtaca

SEQ ID NO: 2353 - DNA, 3495 bp, Zea mays
  Clone ID: TF_ZmC354_1
cccgggtcgcccagcgtccgccccgcgtccgcggacgcgtgggcgacccagcgtcgccagcgtccgcacgggtaccccgggtttccctttcccttgcgctcctccttcactcctcatcctcagcctccccgcaggccgcggctcggcaagcaagcaacaacccccgccactcccctccctcctgtgctgcctcctgcggaaaggtgtgcgaaaaacccaccatgcccacccccaaggcgtcgggcggcttcgctctcgccccgaggccatgacttggcgccgcccgtggccgtggctctccgtcttctccctctccccgcgacgacaaccccctcctcctccctgggcggcggcgggctagctagatggcgtcggcgatggtggtgttcgggggcggcaaggaccggccgtcgcctggcggcggtggggcgccgcaggtggacgcgggcaagtacgtgcgctacacccccgagcaggtcgaggcgctcgagcgggtctacggcgagtgccccaagcccagctcgctgcgcaggcagcagctcatcagggactgccccatactcagcaacatcgagcccaagcagatcaaggtctggttccagaaccgcagatgccgcgagaagcagcggaaggaggcctcgcgcctgcagactgtgaaccggaagctgactgcgatgaacaagctgttgatggaggagaatgacaggctgcagaagcaggtctcccgactcgtctacgacaatgggtacatgaagaagcagctccacagtccttctgctgcgaccacagacacgagctgcgagtctgtggtgacaagtggtcagcaccaccaacagcaaaacccagcagctctgcagtccacaaagggatgcgaacaacccagctggtctactcgctattgctgaggagaccttggcagagttcatgtccaaagcgacaggaactgctgtcgactgggtgcaaatggttgggatgaagcctggtccggattccattggaatcatcgctgtttcgcacaattgtagtggcgtagcagcccgagcttgcggcctagtgagccttgagcccacaaaggtcgcggagatcctcaaggatcgcccttcttggtaccgcgattgtcggtgtgtggatattctccatgttatccctacgggtaatggtggaactatcgagcttatctacatgcagacttacgcaccgagcactttggcggcaccgcgcgacttttggactctccgatacactagtggtcttgaggatggcagtcttgtgatctgtgagagatcactgacacaatcgactggaggcccatcaggacccaacactccaaattttgtaagagccgaagtgcttcctagtggctatctaattcgaccctgtgagggaggtggctccatgattcacattgtggatcatgttgatttagatgcttggagtgtgcctgaggtccttagaccactttatgaatccccaaagattcttgcacagaaaacaactattgctgcactgcgtcacattaggcaaattgcgcatgaatcgagtggggaaatgccctatggagggggccgacagccagcagttttgagaacatttagccagaggcttagcaggggtttcaatgatgctgtcaatgggtttccagatgacggttggtcactgatgagcagtgacggtgctgaggatgttactattgctatcaactcttctccaaacaaacttattggtcctcatgtcaactcttcccagctgtttactgcgatcggaggtggcatcctgtgtgctaaggcatcaatgctgcttcagaatgtgccacctgccctactagtacgatttctgagggagcatcgctccgaatgggctgatcctggtgttgatgcttattctgccgctgctctgagggctagtccatatgcagttcctggcttgcgtgctagtgggtttatgggcagccaggttattctgccgcttgcacataccttagagcatgaagagttcttggaggttattaggcttgagggacacagcctctgccatgacgaagttgttctgtcacgagatatgtatcttctgcagttgtgcagcggtgtggatgaaaatgcagctggtgcatgtgcacagcttgtgtttgcacccatcgatgaatcttttgccgacgatgcgccactgctaccctcaggcttccgtgtcattccactggatgcaaagacggatccaccatcaggcacacgcacacttgaccttgcatctaccctcgaggttggatctggtgggacaacgcgtgcttcgagtgacgcctccagcacctgcaacacaagatcagtgctgaccattgctttccagttctcatatgaaaatcacctacgagagagcgtcgcagccatggccaggcaatacgtcaggaccgtggtggcatcggtgcagagggtagccatggcaatagctccttcgcgcattggtggacagcttgaaatgaagcaaactccaggatctcctgaggcacacacgctggcaaggtggatcggcaggagctacaggttccacactggagccgaactcctccgcacggacacccaatgcacggatgcttccttgaaagcgctgtggcaacactcggactcgatcatgtgctgttccctgaaggctgctcccgtgttcacctttgccaaccaagccggcctggacatgctggagacgacgctgattgctctccaggacatctcccttgagaagatccttgacgacgatggcaggaaggcgctctgcaccgagtaccctaagattatgcaacagggcttcgcgtacctccccggtggcgtgtgtgtgtcgagcatggggcggccggtgtcgtacgagcaggcggtggcgtggaaggtcctgagcgacgacgacaccccgcactgccttgccttcatgttcgtgaactggtccttcgtgtgagaacccggtccccctagtagtagagccaagttgcctagcgtttgcggctctgttgtttgaactctgtaccccatgtaccgtcgcttttgcctgtgtccaggcaacctatgaaacacacctttgtagttgttcatcacccccgtggaacaaacagctttgtactagttgttcgtcttcgcttgcttgctatcttatgatggatcctggtttgctcctgaaaaggaaaaaaaaaaaaaaaaaaaaaaactgaggctcgcaacatcgctcggcagcgccagaccggatgccgccttttgccctactacgtatcattagttgcttttccgttgtgccgcctgtgttaagaatttgtgtactgtgtggatgatcgagaactgactctgtttgtttgtgtgtgtgtgtgtgcgtgacaaacaactacaacagctgtatgcgtgcctggtcgtggtctcgtctccccggcctgtcgccggcgacattgatcactgttgcaggttgcagtattactatttgctagttctgcttaaaaaaaaaaaaaaaaaactcgagagggggccc

SEQ ID NO: 2354 - DNA, 427 bp, Zea mays
  Clone ID: TF_uC-zmflteosinte108d01b1
gtgtttgggctgtcctagacgcctattgctgcattcgtgctctagtccagaagcatagctatttgagcgagagaagctcctgctgatgaagtgagaggttgtggtacgtgaggtgtgcgttcgtggacatcgacggcgcctaggacgatggtactgagtgtatgatgcatggtgctcgtacggaagggaaaaggcggagcgtcgctcgacaagaacaagaaggggttcatcgatgagcagaccacttcactggaggccatgttcgcaacacaagccatgctggagccccgccagaaactgcagctggcgcaggagcttggactgcagccgcgccatgaggtcatgtggtttcagaacaagcgcgcgcgcttgaagtccaagctgctggagcgcaagcactcggcgctgcgcgacgactaccatgcgc

SEQ ID NO: 2355 - DNA, 1634 bp, Zea mays
  Clone ID: TF_ZmC1455_1
cattgggtacctcgaggccggccgggccccccaaccttcacatttccacgtatgtagaatactccacctccacccccgtccatttcccatccccaacctctctctctcccccctaggagtgggagctcctggctccatctatccgcctgcagatatcacaagcttttcctgctgctgctgctgcagcagcacctgcagcttctccgtctgcagtgcgagcagctgctaaaaattcccccataagcctctggcttcctgcccccctcactttcttggaagcccagcacaacacgaggatcatattcactccctacagtggcgtactagaataccagttgtgcgcaaacagcggcagcagccgtgatgtacaggtgagctggctctgccgctccactccatggaggatctgtacagcatccacccggggatctcgcgggtcgtcggaggcgcggcgagcgaggcgtccgtcgccggcgccggcgccggcgggccctcgccgtcggatctgacggagctcatgaaggcgcagatcgccagccaccctcgctacccgtccctcctctccgcctacatcgagtgccgcaaggtgggagcgcatccgcatgtgacgtcgctgctggaggaggtcagccgggagaggcgccccgacgccggcgccggggagatcggcgtcgatcctgagctcgacgaattcatggacgcttactgccgggtgctggtgcgctacaaggaggagctgacccggccgttcgacgaggccgcgtcgttcctgagcagcattcaggcgcagctcagcgacctctgcagcggtggaagctcgccggcggctaccgccacgcactccgatgacatgatgggctcctctgaggatgagcaatgctcaggggacactgatgtgccagacatggggcaagaacatagctctcacttaggtgaccacgagctcaaggagatgcttcttaagaagtacagtggatgcctcagccgtcttcgttcagagttcctgaagaagcggaagaaagggaagctaccgaaggatgctcggacggtgttactagagtggtggaacacgcactaccgctggccttatcctacggaggaagacaaggtgaggctcgcagcaatgaccggtctcgacccgaagcagatcaacaactggttcatcaaccagaggaagaggcattggaagccatctgaggacatgcggttcgcgctcatggagggtgttgccggtgggtcttctgggacgacactctacttcgatacaggcacaattggaccctgaatcatacaccacttgggatgacaactggccagctcatattagtaataagatctggcatgtggagtgacgatctgctcggtgaaaattgaaaataaatctgctgagctgaggttgatcagactagtcagttgccctattattttacaagatcatgtgtatatggtgccgtcgtatcagaacaaactgtatgcatgtatgggcgaattgagacctgcaaaaggagtttaattagtagtttcaagtattggctcatggatttgtaatactcgctacccaatttaattgttagataggctgaagggcttataaaggtaaatttacttctgctcttccaaaaaaaaaaaaaaaa

SEQ ID NO: 2356 - DNA, 1899 bp, Zea mays
  Clone ID: TF_ZmC1389_3
caccgttgccgagccctcgcctcaccctcacagtcgtctcaggatgatgccccaggccagcgctagcctcgacctcggcctcagcctgggcctcaccctcacctcccagggcagcctctcctcctccaccaccaccgccggctcctcctccccctgggcagccgcgctcagctccgtcgtggccgacgtcgccagggcgcggggtgacgcgtacgcgcagcaccacgctggcgccgcgatgacgatgcgcgcgtccacgtcgcccgacagcggcgacaccaccaccgccaagagggagagggagggggagctcgagcgcaccggctccggaggcgtccgcagcgacgaggaggacggcgcggacggcggcgccggcgggcgcaagaagctcaggctctccaaggaccaggccgccgtcctcgaggagtgcttcaagacgcacagcacgctcaaccccaagcagaaggtgcagctggccaaccgcctgggcctccggccgcggcaggtggaggtgtggttccagaaccgccgcgcgcggaccaagctgaagcagacggaggtggactgcgagtacctcaagcgctggtgcgaccgcctcgccgacgagaacaagcgcctcgagaaggagctcgccgacctcagggcgctcaaggccgcgccgccgtcgtcggccgccgcgcagcccgcctcggccgccgccaccctcacaatgtgcccgtcctgccgccgcctcgcctccgcgtccgcgtccgccgaccaggcgggccgtgcagggccctgctggggccctctccccgtgttcgtcgacggcccagcccggaggccgtgatccacgaccccgatatggcatgagatggatgcgcttgctaatcgctaccgctagctaagtagctagtgctaattagggctggatcttctttttttctttgtttggttcttattatactcgcaggctattacagcttagtagtgtttattagtccgatatgataaaaatcttcgttgtttggcagtgttttatttgctgaaaaatagataacgatgtcttatgtctttgtactcataagtgatgcaaaattgtcttactactcctttgcatatataaggttttctttggttgttatttgcctctaaaaaaaaaaaaatgctaaaaaaaaaaaaaaaaaaaaaaaaaaaaaaaaatttttaactttcgctttttgtttctgtttctgtttgagacaggttaatataatcgccgtcgtccgagggtgtagtgtcagggattgatatccctgtacaccgattattggattgagatgcttctagctagtcttcgtactgataagcgtgcgtgcgtacgtcagagcaccacagtgctggaatggatgatgacatgagagacaggtagagaagcccagctgcgtggctcttggacctttctgcaggtgtacgtggtgtgtacacacgcacacccttttttatagtacatatatacggctcaaaaaaaaaaaaaaaaggccggcgggccccccccccaaggccgagcctaggcccgacaggcccaagacagccacccaccaattttttaaccccttcacccactcccccgcctgctgatgatgagggcagggcagcacgcaacgcagcggcagtaaacagagccccgccccgtgcagataataccacgtctgtacgtgtcccaagtaattaacaaacgtatggtcctcctctctatctatttttttgattccggagggctaagttagttgtttttgtgtcgatcccaaatgcatcagctaatccatcaatcataggcttgatagagtagtcgaaaaaatagccgtagctttcttagcactccctccaccccacatccatgtatatttctgttgtaattctgtccctctgtcgcggtcc

SEQ ID NO: 2357 - DNA, 4197 bp, Zea mays
  Clone ID: TF_ZmC12602_1
tttttctctttttttttttcccctccctcttgtttttttttttggctcgaaaaaacaacctaccaacgtaatcaaacgagcttgagtagcagcacaaacaggcggtgcagagagggaacaagtcaattcccgaaccaagacccttcttccctgatagcctgggatcagatggtcacaactggtttggttcgctcttgactcctcctctcgcaccttttctcttgctctcctaaacaatcaagtcctcagtctcttctaatacagagttacacggctctacgcccgaccattacgcgcgaactactaggtaaatctcccgtcttattattattacaaaaatcgaaataagcataccaatcgaagctaaccttcttcacagttctgacttctgagcaagggaacagaccgagagagagagagctaccagcagcaacacctgcatgaccaagctgccccggattgttttctgcgtgatagagaatcggccggcacaagtgagagcttgacaggaccctttcttttccagtagctgtagatgacaccgcactagcttcccaaaatgatcaaaatgcccccaccattctcttcgttcggtcaggggtatttttgtcattttaagaggcatatggcgggaaagagaagggggatttttgaactttccgtgtgttggtttcgggctcctgtcaaaccctctcttgcacctgcgatgtctgtcagcagaaacaaccggacctggaagtcaatttggcttttgttgtggtgtatggatctgctctcctctgctcccgctcttgctacttactactcggaggcagcagccgccggttcagcggccccgcccgccccagcgcccttgagcgcggctgtgatctggtggacggcgttgcagacgtggctgttgatcgcggtcacgctcgagaggttcagcttagccgagggcacagcgctagcgagcacctgcatgcccacggtgaggaggcagccgctggcgggctcgtcggcgttacctgctgggctgctttggccgtcgccggagcctgcggcgctggttgctgcagccgaagggttggcggccgggaagatggcgaagcccagcgggaggagagggatgtaggaagggtcctcgccgctcattgtcacttggatggcgtccacgtccacggtcgcaaacaccacgaggctcccgccgtcggggtgggtgctgctctcctgcagcatgagctccacgttctgggatgagttgcttgcagcattgattctaagaagagaaatgcaattctttgggtgtgatccatttgcaatatgtgccacttcgtgaagtgagcccccgcttgacataatctcaagctgacaacgctgttgttcatcggcaagaagctcgaagaccttctgatggttgaaaggaagccagcttgtagagacagcggttagaatgacaccgctgggctgccccggatccgtgttcttgcgagtagtgaccctgatcgtgtcctctgtagtttctgagagtgaagtccaagattggctcccagaagcactgatgttggcagagaaactagtgatcatccgctgtgacagcttcatcatatttgttctcgcctctggtgtgcggatcactcccaggtcggcgatgttgcgggcgagctcactggcaaggcgctcgcattggcgctggagcagggatacccagcgcgtggcgccgaaggcagagccgctggcgacgtagtccttgaacacctggtgcagtggcttctcctctccaacaatctccgtgtgctccacccacaccacgctagagtagccattgggcatgtcctggatgatgcaaccggaggggcgcctacagcaccttacaacagatggggtttgcagtgcctccagctggaacccctcggccgggaagtcgacgagggaccaggtcccctcgtcgccgttgtgcacgcagtacctgaagaacaccacctctcgcgcaggcaccaaaggagacgggaactgcaactccgcttgcatcaagaggagagatccactgcccatatgaccagatgcagatccatggtttatgacctgaatggttcttgccttggataggatcgaagggaacaactccatccacttgttagcgtccaggaaggcatccaccagcgtgatgctgttcatgataaccacggtgccgtcccttgatccctcggtcctggccgcggcgccgccaggggaggcactgctatcctgctggccgccgttgacaggccagctgaacatccgggcgtgctcgtcggctaccatgacctcggagctcgcgccacggcgccgcagccagagcgactcgcccgcgcggcacatcttggcgagggtcatggaaaatgctcggaggaggtcgagcaccagctgcctgtcctgctcctggacaggcgccatggcgcccatgaacgacggcgtggaggcgtggtgctcggcggttccggtgatctgctgcgacggcggcccgaggacggactggatgaggtcgccgcaacccatgactggggactggtcggtgaaatggcgagagtagacattcatgtcgaggtcgagcggcggcatgagcaccggcggcggtgccgataagcagaccagcgcggacgacgacatgctcggctgtcggccgccgccgtaccgggtcgcgatgcacgccaagcggtcgagctcgtccttgagcctagcgttctcgatgcggagctgctgctcctcgtacgacatctcgccgaggacggcggcgtggccgcagttggggcagactacgttgcggatggcggcctgcaggcggtagttatcgctcttgaggctctcgttctcggcgcggaggaggacgttgtcggcgcggtcctgctgcgccttcatctgggtgcgccggttctggaaccagaacttgacctggcggggtttgagccccagctcctggctcagcttcagccgctgcttgtcgtccgggtgcgggcactccttgaacagcgcttccatctgctggatctggtgtgccgtgtggcggtggtaccgtttcttcttgccgttggcggtggccagctgctgctgctgtccggcggcatccgccgtcgtctggagctcgaggccgctgtgctgcggcttctgctccggccggtcgtcgtccacgtcggcgaagctgagcaggccgtccaggtggccgctcccggagccgccgctgagctccatctccatctccagctgatccatgtcctcgtccttggccacctggactcgtgccgaattcggcacgagattaaacttgagtggcaatagcataaaggggaacattccaatctccctgggtaccatctctgtggtgcaagtactggatctgtcatacaatgagcttaatggatctattccagagagcctcggcgagctgacatcattacagatactgaacctgaatggcaatcgtctttctggtcgtgttccagccagtttgggaggaaggcctctgcacagagctagatttaacttcacggacaatgccggactatgtggaatacctgggttacgtgagtgtggccctcatctatccgtggctgcaaagatcggcatggctttcggcgtgcttttagctattctattcctagttgtattcgctgcgtgctggtggaagagacgccagaacattctccgtgctaaaagattagctgcagcaagggaagctccttatgcaaaatcaaggacccagttcacccgcgatgtgcaaatggccaagcatcaacggacacatgaaaatgctcggagcagcaacagtgaaggctcgccacatttgctttcctagctcggtgagaatactgcgacagtgacttggcttccatctattcttcagttcctcctttgtatgctcctctgcagtcttgaaagacgaagctgctgtacatactagctaggtcacgaatggtgtatatacttgtattttttttggtgatctagaactcagtccaggagagggatcagtctatcagatgagagaaattacccatttcatcctacttactgttctgattactgctgttgatttccccttcactgttcaagtatgcttattgtcagttttgtactctgtggtctgaagctctgcaaaactgccttttgccaggagctggagctccaggctgggctgtgctgtgctgagatatagagtgaattctgcaccttttcctaacc

SEQ ID NO: 2358 - DNA, 458 bp, Zea mays
  Clone ID: TF_uC-zmrob73033d11b1
ttcatgcgtccgcggacgcgtggggccgccggggggcctttggcgtcgccctgggtcgcctccttctctcgcagcttctcggtcaacgacaccaccttaatgaaaccaaccagagcaccaacagacgggcgactcctccgtcatcagcgacgtgctcggactcggagcgaggccgtggaacaaagctctgctcgcgcggttgctgagggcgagaggatgtaagtacctgtgagcggaggcggtggttgtcctggagaagggcgtcgtggtccgcgcggagggcgtccaaagaggccttgaggcggtcgaagtcgcgctccagctgcttgggcttccaccgggcgcgccggttctggaaccacacggccacctgccggggctgcaggcccagcttgcgcgccagctccgtcttgcgctccggctccagcttggtctccttctcgaagctcctctccagc

SEQ ID NO: 2359 - DNA, 841 bp, Zea mays
  Clone ID: TF_ZmC1389_5
cccacgcgtccgctcggccttcagtggccacctccggacggcggcatctgtcatgtagggcgcgacgaggcgccggcgcgcggcttcgacgtgaaccgggcgccgtcggtggcggggagcgccctggcgctggaggatgacgaggaggagccgggcgccgcggcactgtcgtcgtcgcccaacgacagcgcgggctccttcccgctggacctgggaggcccacgcgcccacgccgagggcgccgcggcgcgggccggcggcgagcggtcctcgtctcgcgccagcgatgaggacgagggcgcgtccgcgcgcaagaagctgcgcctctccaaggagcagtctgcgttcctggaggagagcttcaaggagcacagcaccctcaaccctaagcagaaggcggcgctggcgaagcagctcaacctccggccgcgacaggtagaagtctggttccagaaccgccgagccaggacgaagctgaagcagacggaggtggactgcgagtacctgaagcgctgctgcgagacgctgacggaggagaaccggcggctgcacaaggagctcgcggagctgcgcgcgctcaagacggcgccgcccttcttcatgcgcctcccggccaccaccctctccatgtgcccctcctgcgagcgcgtcgcctccggccccagccctgcctccacctcggcacctgcgtcgtccacgccgcctgccacagccgccaccaccgccatctcgtacgctgcagcagccgccgcacccgtgcgagccgaccaccggccctcgtcgttcgccgcgctgttcgcggcgacccgcagcttcccgctggcgtcccagccgcggccgc

SEQ ID NO: 2360 - DNA, 2194 bp, Zea mays
  Clone ID: TF_ZmC1389_4
cgccttcctggcttcttcctccccagcacgcacacgcacacgcacacacccagccttttggctgcggtggcgccgtcagagagagaaaccgagctctaactaactgaagtggcggccacatagctagctactcttctgatcctgagcgcgcacgcgccatggctcaggaggacgtgcacctggacgacgcaggcctcgcgctgggcctgtccctcggcagcggcagcggcggcgcctctggtgcggcgcgccacggtggtatcagccgccggctgagcatggaggtgcggctgccgtcgccgcacccgctgtccgtattcattccttcctgactttcctcctcccgcacgcagcgcagcttgcaacccgcaacgaaccaaggccgcgccgcgcgcgccctgccggccgtcaggaaacccatctaactgaagtggcggctacatactgctgtgctagctgctagctagctactcttctggtcctgagcgcacgtacgacatggctcaggaggacgtccacctggacgatgccggcctggcgctgtgcctgtccctccacggtaccagcagcagccggctgagcacggaggcgccgcgcacgctggagccgccgtcgctgacgctgagcatgccggacgaagcgaccgcgaccgcgaccggcgggtccggcggcagcggcggggccgcgcgcagcgtgtcgtcgcggtcagtggagggcgtgaagcgggagcgcgtggacgacgccgagggcgagcgggcgtcgtcgacggccgccgctgcgcgggccggtgccggcgccgagaattcggcacgagcgacagctccatcgattcatccaccgctatctctctctctttcaactgcaagggaaaccgagctcaaagtggcaaccatcaatggatattatggcgcttaatgcgagagacgaggagcagtacgggaacaaccatctcgggctcgggctgagcctcagcctcggcctcggcgtcgccaccgcggctccggtcgaggtcgagcccccgccaccgcccgcggcggcggcagcagcagcagcagcgagctatcagcgtcgcgcccatcacctccctccccgcgccgtagtggtggaagtggaacggccccggtctcttcttcgggacgacgatggatccatctctggagaggaaccagcagcagcagcacccggcggccgcgcgccacggccacgagatgccgttcctgcggggggtggacgtgaaccgggcccctgccggggagaccaggaggggtagctgcagcgaggacgacgaggagcctggcggcgcgtcgtcgtcgccaaacagcacgctctccagcagcctcagcgggaagcgcgcagcgccggcgaggagcggcggagaggtggccgaccacaccccgagagccggaggcggcagcgacgacgaggactccggcggtgggtcgcgcaagaagctccgcctgtccaaggaccaggccgccgtcctcgaggagagcttcaaggagcataacacactcaaccccaagcagaaggcggcgctggcgaagcagctgaacctgaagccgcgtcaggtggaggtgtggttccagaaccgcagagccaggacgaagctgaagcagacggaggtggactgcgagttcctgaagcgctgctgcgagacgctgacggaggagaaccggcggctgcagcgggaggtggcggagctgcgcgtgctcaagctcgtggcgccgcaccactacgcgcgcatgccgccgcccaccacgctcaccatgtgcccctcctgcgagcgcctcgcctccgcgtccgcgtccgccgaccaggcgggccgtgcagggccctgctggggccctctccccgtgttcgtcgacggcccagcccggaggccgtgatccacgaccacgatatggcatgagatggatgcgcttgctaatcgctaccgctagctaagtagctagtgctaattagggctggatcttctttttttctttgtttggttcttattatactcgcaggctattacagcttagtagtgtttattagtccgatatgataaaaatcttcgttgtttggcagtgttttatttgctgaaaaatagataacgatgtcttatgtctttgtactcataagtgatgcaaaattgtcttactactactttgcatatataaggtttcagttgtttgcagaaaatcgcgttggc

SEQ ID NO: 2361 - DNA, 960 bp, Zea mays
  Clone ID: TF_ZM5012.C1.o5.fg
atggatattatggcgcttaatgcgagagacgaggagcagtacgggaacaaccatctcgggctcgggctgagcctcagcctcggcctcggcgtcgccaccgcggctccggtcgaggtcgagcccccgccaccgccgcggcagcagcagcagcgagctatcagcgtcgcgcccatcacctccctccccgcgccgcagtggtggaagtggaacggccccggtctcttcttcgggacgacaatggatcagcagcagcagccggcggccgcgcgccacggccacgagatgccgttcctgcggggggtggacgtgaaccgggcccctgccggggataccaggaggggtagctgcagcgaggacgacgaggagcctggcggcgcgtcgtcgtcgccaaacagcacgctctccagcagcctcagcgggaagcgcgcagctccggcgaggagcggcggagaggtggccgaccacaccccgagagccggaggcggcagcgacgacgaggactccggcggtgggtcgcgcaagaagctccgcctgtccaaggaccaggccgccgtcctcgaggagagcttcaaggagcataacacactcaaccccaagcagaaggcggcgctggcgaagcagctgaacctgaagccgcgtcaggtggaggtgtggttccagaaccgcagagccaggacgaagctgaagcagacggaggtggactgcgagttcctgaagcgctgctgcgagacgctgacggaggagaaccggcggctgcagcgggaggtggcggagctgcgcgtgctcaagctcgtggcgccgcaccactacgcgcgcatgccgccgcccaccacgctcaccatgtgcccctcctgcgagcgcctcgcctccgcgtccgcgtccgccgaccaggcgggccgtgcagggccctgctggggccctctccccgtgttcgtcgacggcccagcccggaggccgtga

SEQ ID NO: 2362 - DNA, 3614 bp, Zea mays
  unsure (1)..(3614): unsure at all n locations
  Clone ID: TF_ZmC260_62
accgaaaatgcgtttgcatgaaaagcaggtacagacccatggccgcacactgaaattacaaagtcctctgttcgcatcacgcaagaggtttggtacaacattccatcttaccagaaaattcaacatcgatgaaaacaacacacatcttctgcagtacactgctgtcgttacggagccgtacgcttttgcagtgccaggagtcgctgcaaacaaatctgaaggataactaattcctatagagcgccccagaaatcagaggaagctctcagttgcctaagaacggaaagcaacggccccacacacacacaaaaaaaaaaaaaaaactgaatgatgcgcttgttagttgactggcacgaactaatgagaggcagctagctgacttgtaaagttgtaatggtatatctatgttttttggctgccgtcatagagccatacaaagccaaagtttcaaggtccatagcaccggcagcgaaatcacgacccgacctggaaatttcaggagcagtccaaattctggctcatatctttgtctacaaacttcatcgtcccatttttttcttcctcaactcctgctgtattgccttttgccttgccttctctgcaagatcaggccccggattctgatcctcagcagaatcaacttttgaccctcccacatcacttccaggggttcttgatccaacttttgaagacactgcttctttagagatggtagtacccccatttaggcatacattagattcttccaccacagtcccctcaggttctttaggttccatactagctgtcacttgactattagtattttgggggctatgcttatctagactgatgcctttcctggaagaagctacccttgcggaatgacgcctagtttcaaaccatttgttaacctgacgaaatgttaaccctagttcttctgccagactttctttaacagaacgactagggtatggttgtgtcttaaaatgttcatgtagcttctgattaattactgggccaaaatgtcctttcctggctgtgctgttgctgccattagaagtaaggtctccaggtttctcatctactgaaccatgaatagaatgcaagctttttttagtgctttgtgtagtcagttcatcattatggtgcacaactctggagccttttcccgcaggagaattggcttcaccctcttcattgctttttattattggcgtgttcttcccagaccattcttcatcatcactagaatcagatgatgcttcaccatatgcctcatcatacaactttttgtagtccaaccgttcagcttgccgtctccttgaatctggtaaaacaacaccctggtctatttcagtctccatagggtcgtcagcagaacttgttgttttagcttgagcagtaatcttttccatatcacccaccttggcatcgggtaatagaggtgatgaaacttcatcatgtccagattttgaaatctccttacaaaaatcatctgagtcagatgtgaagtcagattcatcagaacttgacttcttttcgacatctttatctgaatcaggacctgctggatcatagtcatcatcctctgaatcttcagaaggtaatctgaggtcatcaaccttcttgtctatcaaaggttccgaatcatcagaacatgtcaaaaagtctgagtcatcagagtctgatcctccatcctcatcctcttcagacgattcttcatccttaccaaccacatgctcttcaggcatattggggtcaaagtcattgtcgtctgagtcatctgatggaagatcaaatgcgtcatcttgtttagagtcatttgccatagcagctgcatctggaaaaactttctcccaagagtcctcaatggagatgttactcccatggagttcatttattagatctatacaatctatcttgcaatcacatgctgggcagagccatccttcatctcccatggggatatcttcagtacgcaggggaggatttaaacagttctggtggaaccctctgtcacaagctccatcgcagagaatgatatcattacccaatgtagcgtcattcgaaccacaagtggaacaaaagatatcttcgcaagatatttctccttcagaatcaaataaagtttcgtcaattttccccttggagagaagagaatcaatattccggaagacttctcgtattctcaatttgcatcgtaagatttctgatttggctcgttcaagctccttctcaggtcttatcttatccaaactttgatttttccagccttcgctagcataagcttcaattaggctttgctcataattcattcggttcaaaatatatctaactcgtttacgaatttgtgaaaactcatcagtcgaacttttgtttgaggctctgctcatttttcttctcttggcagccggttgtactggagcctgaacatgctcagtagatgttgtctttgaacttgatgtggagcgaagcaccctgacatcactattagatgacatcaaagtatatgcttggcctgttagtccttgggaaccttttttacctctgtttgctgcccttttatagtttttccttatccccaagttatttggcatcgtttgagatgtagacagcaaaactgaatgctcaagagactcaggattctgactagagctcgcaccattttcaatctcaccattgccctcaacaggacagtgagctatatttttttccatagtatatgttcaccaaaatttcatcaatttacagtagacagaaagcactctcagaaaaccatcttctgaggagcacagggcgtgttcggctggctgcaagccgacactgttgcagctgtttggattgctgcagctgcaattcatagagagaaaaatactgtagaagccgcagccgcagccggattgcagccgcagcaagccgcagcgaacaagctgattttctttagagtcaaggagaccttcaataaccccatgcctcccatactaataaaacgcaggatcttattagcgatagagatggctatcattaaaaaaagagctactctttctggcaatctctgtactctagtggcaatctctaaatcgacccatcagcggacacagtcgtgctagtcccactctttgtggcgaagaatcccggcttggatggagcctggagggtgaccgtgtcggttccaagcatcgtcacgacggacgacatcaccgggcgggcagcggggtccccctggacgcagagcagaccgatgtggatgcacctcagcacgtcgccctccgggaagcttccgcccagggacgggtccaccagctccgccaccgtcccggcctcccagtgctcccatacggtggtcaagaggtctccggacttgtgggagctgccgttgttcttcctcccggtgacgatctccagcaccatgacgccgaagctgaaggcgtccgatttcacggagtagttcccgcgcatcaggtattctggtgctaggtacccataggttccgacaacgcggctggtgacggcctgcgtctggtcccggccgaagatcctcgcgaggccgaaatctgagatcttggggttcatcttcacgtctagcangatgttgctggccttgagatcacggtggactaccttgagctggg

SEQ ID NO: 2363 - DNA, 2678 bp, Zea mays
  Clone ID: TF_ZmC1775_4
attcggctcgagatcctgaagttacccagaaattgaaggtgcatacttccgtcctgtgctactactgccattggagcgaagtatgatcctgaagttacccagaaattgaaggtgcattttgagaaagatccatatcctagccgtgaaacaaaagaaaatctatcagaagaactaggcttgacatttaatcaggtctccaaatggttctctagtactcgtcactattcaagggttgcttctgccaaaaaagaaatgcatcctgacagccatacttgtgagaataatgatgagacaactgtagacagcatgcaagcaaaacaacccaatgctggggtgatggaaaagttgacgggggatagaaatggcattgttcctgagaaaccgatggtgcaggacaatcttaaccaaggagcgatggaaaagttaactagggataaaaatgacattgttcctgagaaaccggtgatgcagagcagtcttaaccaatgtaataatgaagatataccgctttctggaacagaaattgagatggagtcttacgaacaagaatcatctgactcaagtgatgaagagtggtccatacttagcacaccacgaaaaacaagattacaagaccatggaaaatcatcagttactgaatcacttcgttctgcaaaacggtgttccagaagagcaccagctagggagcagaataatgaacgtattcagagtgagcagcttcatggttctgcaagtgagcagcaaactgaatttcttcgctccaatgtcagcagtggcaaggtctcaaaatatcattttggccctatagttagtcagaagcttaaggaacattttgaaaaagatccatatccttgccgtgcaacaaaagagagtctggcacaagagctaggactgacatttaatcagatcagtaagtggttctctggcactcgtcattattcaagagatgctgttgccaagaatcagaaacgcccgggagaaaatactactgtgaataataatagcacaacctttgatgacatacaagtaatagaacccaatgttgggttgatagataaaccagctgcagatgtaaatgacatgatttctgaaaagttgatggtccaaataaatcttaacgaaggcattgaagaagatatcccaccgagccaatatgccaggtgtgaagagaaaataactatgactccagctgccatctcaagggaagctggtcttccaggatatggtcctggtcctggagaaaactttcttcaggtcagttcaaggaatactagctgtgagcagagtgtgatactggctcctaccgctatcgcaagagaagttggtccaccaggatatgcgactggagaaaaccagggcaatggggctccatggaatacaagttatgagcgaagactatttatgaatcctgtgaccagctcaagagcagtcagtcctccaggatatgggcctgaagaaagccgaggcagtggcatttcctggaatacaagcagtgaacaaatattgtttatgagtcctacaaccatctcaagagaacttggtccaccaggatatgggcctagagaagaccagtgcagtggcacttcatggaatgcaagctgcgagttgggagtatttatgagtcctgtgaccacctcaagagaagacagtccgccaggatatgggcctcgagaaaaccaggagaatgacaatatgagatgcgagttgagaatgtttacaagtcctacaaccatctccagagaagttggcccaccaggatatgagcttactggaaaaaacaagggcaacggcgcttcatgtactacgaattaccagcagggagcgtttacgagtcctgaagccttcccaagagaagcctgtcctccaggatttgtgtctggagagaaccagggtaacgacactccatggtatatgagcagcaaacagatggcgtttacgagtcctacgaccaaccctagagtaggtccgccagggtatggacaggaaaaccagggcagtcgtgtttcttggaatacgagttatgagcagggagtgtttatgagttctacaaacatctcaagagaagccggtccgccaggttatgggcctggggaaagtcagggcaatatcacttcatggatttcgacaggcgggcagagaatgtttacaggtccttcaactatcccgaacgaagtcgggcagcaaggatatggcccttcaggaatcccgggaacggatggctcaaggagtatggacttgaaagcctttccaccaggatatggacctgctggagaaaaccagggcggtggtgcttcagggagcgtcataagcccccaagctcggtctgcagagaacgtagagttttcagacgacgctagaaaaaaggctatacagcgggagctgagacggcggcagaagttcaggtgatggccgtgatgcgaatttctgatcttgctcatcgaattttgactacggattactactttttaagactacatatccagtcttgatggctgaatgagtgacgaccctagttgtcgagacgcaaaaccttttgttgtatgtgttccttttacagacttccttggcttgtcatgaatttctaatgtgaacttgtgctgtgaaaaaaaaagaaaaaaaaccaaaaaatttattaataagggcggccgccgaaaagtatgctcgtcgagccgggaatt

SEQ ID NO: 2364 - DNA, 909 bp, Zea mays
  Clone ID: TF_ZmC1389_1
ccgggcgagcagcagtgaacgtacttacgtcttcccccagctagctagctatctaccttggtggtggcgattgatatatagattaaacatggcgcctcaaagcctggatctcgggctgagtctcggcctgggcgtggcggcattccagcccagcttctgccacccggccggcaatgacgcggcggagcgggaggccagcccgaccgcggacgagagggagcggaggtgctcgcccgccggcagcccgacgtcgagcggcagcgggaagcgcgtcgcggcggagaggtcggccggcagcggcagcggcgacgaggacgacgacgggggcgctcgcaagaagctgcggctgtccaaggaccaggccgccgtgctcgaggagtgcttcaaaacgcaccacaccctcactccgaagcagaaggcagcgctggccagccgcctgggcctccgggcgcggcaggtggaggtgtggttccagaaccggcgcgcccggaccaagctgaagcagacggaggtcgactgcgagtacctcaggcgctggtgcgagcagctcgccgaggagaaccggcgcctgggcaaggaggtcgccgagctcagggcgctgagcgccgcgcccgcgccagcggcccctctcaccgccctcacaatgtgcctctcctgcaggcgcgtctcctcttcatcctgctcatcctcgccgcctaacacgcacgcgcatgccgctgcagctggcactggcaggagcgtggcggcggcggcggcgacgacgttgcccgcccaccggcagttcttgtgcgggttcagagacggcgcgggccgtccatccatccatgtatatttttgggcatgcatgctgtaattctgtccccctcgatcggggggccgatttactggaaatttttttttgctgccgcc

SEQ ID NO: 2365 - DNA, 1529 bp, Zea mays
  Clone ID: TF_ZmC3817_1
ttccttgccactctctatttcccccagtgctagctctctctctctctctctctctcaaatactgcccatgcggcttgccctcctcgtttgatgaggccaatggccagcaatggcatggcgtccgcaccctcgcccttcttccctccaaacttcctcctccaaatgcagcagacaccctccgatcatgagcatcaagaacagcatcaccaccaccaccaccacgagcaccacctcgctgctcctccccttcatcctcaccacaaccccttccttccctcctctcaatgcccctcgctccaggacttcagaggtatggcgccaataatgctggggaagcgtccgatgtacggggcggacgtgcaggtcgtcggaggcgaggaggtgaacggctgcggcggcgtgaacgaggacgagctgtcggacgacgggtcccaggccggcggggagaagaagcggcggctgaacgtggagcaggtgcggacgctggagaagaacttcgagctcgggaacaagctggagcccgagcgcaagctgcagctggcgcgcgcgctgggcctgcagccgcggcaggtggccatctggttccagaaccggcgggcgcggtggaagacgaagcagctggagaaggactacgacgcgctgaagcgccagctggacgccgtcaaggccgacaacgacgccctcctctcccacaacaagaagctccaagccgagatactgtctctgaagggcagggaggcagggggctcgtcggagctgatcaacctcaacaaggagacggaggcgtcctgcagcaaccgcagcgagaacagctccgagatcaacctcgacatctcgcgcgcgccggcgtccgaggcccccctggaccccacaccgccgcccggcgccggcggcggcggcatgatccctttctacccgccttccgtcggcggccgtcctgcttctgctgctggcgtggacatcgaccagctcctgcacacctccgcccccaagctggagcagcacggcagcggcggcgccgtcgtcgtccaggccgcggaaaccgccagcttcggcaacctcctgtgcggcgtcgacgagccgccgccgttctggccgtgggccgaccaccagcacttccactgatagatcgcctcctcttgtccccgccacaagaaataataattctcaatgccacaattgcgatcaacgttcgatgcagccagatggaacagcggaggatcgattcttggcgagtggagcagcgagggagagagagagagagagagagcgagtaagcaaggttgtgtatgatctgatcgatcggcgaggtcgtagctgcgagatatgcgatggagctagtagctgatcatggtggaaagtggggtttgtaagcgcaataagcggagatgcggtgtaatttaattaggtaggttttggtttgagttttgatagtatctttatttttgcgtcttcattttttttttggtcttcgcgttttgttcgcttttttttttgttcacacatatataaatttgtgaattgtgatg

SEQ ID NO: 2366 - DNA, 3378 bp, Zea mays
  unsure (1)..(3378): unsure at all n locations
  Clone ID: TF_ZmC13476_1
gccggccgggtcggggcttttccctgttcctcccatccctccctgatctctcccatccccttctcctgggctggctggccagtgacggaccagccctctcccacctcgcacgcccctgtggctcctgaccttcccaccaccggagttaatgccgcctggcctggccgtctcgctgtgcgcggcgtgggacgtggtagcagtaccgcgcgtcgcggttggacgggccacgggcgtaagtgcgtaagcgaggacgcgaggtgaggtgtggcgcgtgtctccctgtcgcccgcagcttctttttattcctccggtccggttccgttccggggaatggattctggggagccggcgcggccgcggctgctttgatcccttgccgcctgcctggcctgggctctcgtaccgcaacgcaatttggcggcgtgcgtgttccttgcttagattggcgtgatccagctctgctccaaccgtagaggtgcgcgcacttgctgctagctaagaagcatctgcagtgatcgttccaggctcgtgaggaaactcatttgctcgaatcatgtccgactttgtcgggagcagatataccaagcaagaagatttccatgttttgttgagcaagaaagatcctggagaaccacctgaacataagcacgtcctgtggatggcacactggaccaaagcaagcagcaacaatggcagcagcaatcctttggagggtaccaccaagggcactactacgaaagatagcgagaccttgccttatgaattcacggaatctacggttgctaaaaggctcatggtaggagtaagccatggaagcgcctccatgcagcatgaccgacaattcaattctagtgtgtggggtatggcacgccatatttccaacgaattgggaccgaagaatagtgaacatgttgatgggtcttttgaaaaatttgtgaagaaggatgctgtgaacttgagagcaagggcagttgtgtcagaaacatactctgttcacaagctttcagagttaccgttggattttcagcaccttggggactccgacgatccaagtccagattggagccactttccnccgcaatcaaggttgtcacgcccgacgaggatggctgccagtcaccgcacggccggtgggggccccagcgacggctccagcgcaggcgcgaggaagaagctccaactcaccaatgagcagtcgacgctgctcgaggacaccttccgcgcccacaacatactctccaacgcgcagaagcaggagctcgcacggcaggtggatctcagcgccaggcaggtggaagtgtggttccagaacacacatgttcagataacatgttctaacctgccggagagtttgaccctattctcaacggccaagcgggctttcatcctgataatccagggccgtctgcatcccatgtgatggccctatcgtcacaagaatacatgatgcactcacatcaaacagctgacgagaacatggatacgtgcaaacctgcagaaggctttgcatctcgtgtagaagatcatgctggcttcaattcagatcctccagggccaaagttaaaagggcaattattggataccatgtcatgttcttgcagcaaggatgacaacaactcagcagattgtccaatagatgagcagcacacaagccactattttgcaaactcaaagcatgaactaccctctgtatctaacaaaaagaagttcaagtttgcaggaaacaaccacaatcgaattgttgcaagtgcgtcccacgatctgaagacaaaaagatctgctgtccataaacaacaaagtgctgcagaggcagtgttctgtgcaccagtacttgatagtgagtttcagaatgaacctataactatttccaacatcgacaagaaggatggtgaaaattttcatgatatgtataaatgtcttggcaaggctgtttcgtgtcctttgttaccttatgagcatcgtcatctgaatacacagagaacggaatctgcagaaaatttgaaagtctgcacgcttcctgatcatcaaactgcaaataaattgacagaaaagagtcatggtgagctgctgacatatggaccaaagccaaagaaaaatacaggctcttgcaaccgaagaagcctctatttattcgaaaagctaacgattccttccaaatcacaaagtgcatatcctaaaaattctgcgtcttcaggaaaatctagcggctttggagtttgtatgtacggcaccaatattggaagccagttattcggagcacagaatcaatcttcatctaagactgaaacattgcacagcgatgctcttattgggtccaaatcctcagcaggcattgcttcattatcggcacaaaaggacaacggttgcccagccccagccccagccccagccccagacgaagcgaaaagcgagcagctagcagctccgtcgtccaacaccaagcagggaggagaatcagcatacagtaaagaagatggatctcataatctcaacgaaggccacgatgtttcgtccaaagcagctatcggtagcaagcaaccatgcatgcctggagcaggaatcacgaacctggatctcatactctcccagatgagcaggatgagaaaccagattcccagtggcggtgtaactcagccaccaataggcgccgagccaagtgatagatggctcaagcgcctgcagctcggcgtaccagaccctgacgtccctggttccaagaccaagaggccaaaagtcggagacagtcctccgccacccaggcaaataaaccggtcctttgacgtggcactcccttgcaacccaggaaaacaggaggagcagagcttgaatggaggggggaaagtgcagggaagagcccccccgattccagagaagagcgtcagtcgctggatagggagatggtgccagggcggcactcctgttttccgtgaaggcccaggccagcagggaaggcaggcaacgaaacctgctggccggttgtccgaggagcttgaaggacagttctttccaagcactgcggcgatggcgatgatggggcgcgcgatgcacaagctccggccgtgcgagcagcagcagaaggggccattcgtggtgtggaagatagattgacctttttgggtgtcatatacttgtttctttaaaaataaaataaaataaaatgtaaggcaactgtgcattttgcctggctgtggttcatggtttattgctttaatttctggtagtggaagtagctaggtatagtgcctactgatggtgtaatgctttgctgtaccaaaagtgtaatactatactgtttactgtgtcgttcgttatggtgatgtacaccatggagtaatcgaatgggacagacgaatgaactggaactggaaggtgagcatc

SEQ ID NO: 2367 - DNA, 1196 bp, Zea mays
  Clone ID: TF_ZmC3309_1
atattacttataaccattacatatcacttagtatttggaattttccaaacttgtccgtgctgtaatcaatttatatacttcaattagctagttttcgtcaacttatgcatattttttattttaagttttgtgtaagtcattaaattcttcccctatatttctaagattcatcctaattacttgcatggtggccatacaaaattccacctgtagccggatcaactgaattttctgtttcgttcctcaggattgaggtttagcaatctgtactgtgaccctctaatcatccccggcggtcacaagatcacggcaaggcagcggtggcaaccaacaccgatgcagctgcagatcctggagagcatcttcgaccagggcaacgggacaccgagcaagcagaagataaaggagataacagcggagctctcgcagcacggccagatctcggagacgaacgtgtacaactggttccagaacaggcgggcacggtcgaagcggaagcaggccgctgcttccttaccgaacaacgccgaatccgaagccgaggcggacgaggagcctctcgccgacaagaagccgaagtcagacaggccgccgccgccgccgccgccgatccaggataataccaaggctacgggcgctctcagcgccgacagggtctctggtgggacgcgtcacttggacacgggtcatgaccagaccagtggcgtgatgtatgggtgcaacgacagtggcttgttgagatcgtccggcagttcgggccagatgtccttgtacgagaacttcatgtcgaatccaagaatcgatcgtttcccggcgaaggtggagagctcccggagcttcccccatctccaacaacacggggaaggctttggcatgtttggatgacatgcatgctgctgcgctgagttgccgtgtgaaaaatggaggtcgacacagcgtgcgttcgatttgctgacgtgaaagttttatcttggatggtacgtgttgcttatcacggtctggttgaccacctccgcggatggtagctagctagcttgaacgaacctgctcttttggagtagctgtaagaggttgatatatagtagtatttgcacgtagtctaattactctaaattatcagcatataattcttcatgtttgcagatttagcacgagaccagtcctacgctgctgctgctgagcagcaggttgtggtt

SEQ ID NO: 2368 - DNA, 3097 bp, Zea mays
  Clone ID: TF_ZmC39640_1
tccatatctcagtcacacactcacgcgcgcgcgggggccgggggccgctggacccgccgttctccttctcctccccccctcgttcctctcgtctcaccattactccctacacgcgccgcggctaggattccgccgaggagacgctgcgcgcgtggatctccggtgctgtcctgctagcgtgcgacgaggccaggcaggcgcgcggccggcgccatgagcttcgggagctattcgacggcgggtccggcggcggcggaggaggaggagggatgcagttcccgttcacgaccgggttctcgtcctcgccggccctctccctcggtctggacaacgccggcggcggcatggtcggccggatgctccccgtgggcggcgcccccgcggacggcgggatggcgagggacgccgccgacgccgagaacgacagccgctccgggagcgaccacctggacgccatgtccgccggcgccggcgccgaggacgaggacgacgccgagccgggcaacccgcgcaagcgcaagaagcgctaccaccgccacacgccgcagcagatccaggagctcgaagcgctgttcaaggagtgccctcacccggacgagaagcagcgcggcgagctcagcaagaggctcggcctcgacccgcgccaggtcaagttctggttccagaaccgccgcacgcggatgaagacgcaactggagcggcacgagaacgcgcttctcaagcaagagaacgacaagctgcgggccgagaacatggcgatccgggaggcgatgcgcagcccgatgtgcggcagctgcgggagccccgccatgctcggggaggtgtccctggaggagcagcacctgtgcatcgagaatgcgcggctcaaggacgagctcaaccgcgtctacgccctcgccaccaagttcctcggcaagcccatgcccgtcctctcggggcccatgctgcagccgaacctgtcgctgcccatgccgagctcgtcgctggagctggcagtaggcggcctccgtggcctagggtctatcccttccttggacgagtttgctggcggtgtgtctagcccgttgggcacggtgatcacgcctgcacgggcgaccggatctgctccgccgcctatggtgggcgtcgacaggtccatgctgctggagcttgcgatcagcgccatggatgaactagttaagctggcacaggttgacgagcccttgtggcttcccagcctcagtggctctcccgacaagaagctgctcaactttgaggagtatgcccactcgttccctccgtccgtcggcgccgtgaagcctgtgggctatgtatccgaggcctctagggagtctggcctcgtcatcattgacaacagccttgctcttgtagagacccttatggacgtgagacggtggtctgatatgttctcgtgcatgattgctaaggccacagtcctagaggaggtgacatctggcattgcaggaagtaggaatggtgcgctgctgctgatgaaggctgagctacaggtgctctcacctctagtgcccatcagggaggtcacatttctcaggttttgcaagcagctggctgagggtgcatgggcagtagtggatgtgtccattgacggattggtgagagatcacaactctggaacagcatccaacgccggaaatatacggtgcaggaggttgccttctggctgtgtgatgcaggacactcccaatggctactgcaaggtcacatgggtagagtatacggaatacgacgaggcgtcagtacaccagctctatagaccactcatccggtccgggctggcctttggggccaggcggtggcttgcaatgctgcagcgccagtgcgaatgcctggccatactcatgtcccctgatacagtttcagctaatgactcgtcagtcataacacaggagggcaagcgaagcatgctgaagctggcacggcggatgacggagaacttctgcgccggggtcagcgcgtcatctgcacgtgaatggagtaagctggacggcgctgcaggcagcatcggggaggatgtgcgggtcatggcacggaaaagcgtggacgagcctggggagccgccgggcgtggtcctaagcgcagccacatcggtgtgggtgcccgtggctccggagaagctcttcaacttcctccgtgacgagcagctgcgtgcggagtgggacatcctcagcaacggaggcccgatgcaggagatggccaacatcgccaaggggcaggagcacgggaactcggtgtccctcctcagagccagtgccatgagtgccaaccagagcagcatgctgatcctccaggagacttgcactgatgcatcaggctcgatggtcgtgtatgctccagtggacatcccggcgatgcagctcgtcatgaacggcggggactccacctacgttgctctgctgccgtctgggttcgccatcctgcctgatggcccaagcagtgtcggcgccgagcacaagacaggcggctcgctgctcaccgtcgccttccagatcctcgtcaacagccagccgaccgccaaactcaccgtggagtcagtagagaccgtgaacaacctcatattctgcaccatcaagaagatcaagacagcgctgcagtgtgacgcttgactgtcgcgtgtcgccgcagggggggtggtcggtgatgacgagcctgagtcaagaacgaacctcgtgcgggaaagaaacctttgctaggtgataaggatccagcttggacgggtctttagcacggagcaatggtggtggttcgggtattgactcggtctctgtcatctgcttcttctccatggcaacctgttgtctgatacgggatcttgaatagtgcgtggacaatgatgtggttagatggttaaaatcttttgtttcagtcccatcgtttcatcagggaatcaaactttgagttttggccgcctcgttgttagttgtaatatacagttcattttatattgtgaggtaagctatatgccatgtgtaaacatgagagctcaggaatgttgggtagcatcatgagtgtagctaggcatcgaactatcggccaataaaatcccacgcgtctgatcgataaaaaaaaaaaaatgttt

SEQ ID NO: 2369 - DNA, 2432 bp, Zea mays
  unsure (1)..(2432): unsure at all n locations
  Clone ID: TF_ZmC354_2
gccggccggggtcctctcccttcggcacgtcgctgcccactcccatcccacgcgagcacaaccaccacctactccctactccctacactactccccccgcaagcacgcccagcgccatggccatggcggcagcgcgcacgggggcctgctactccgcctccgcttcctctcctctcctgcactactagcgggtccgctggcgacgatggcggcggtggcgagcagggagaggctctccccgggcgccgcgccgcaggtggacgcgggcaagtacgtgcggtacacgccggagcaggtggaggcactggagcgcgtctacagcgagtgccccaagcccagctcgctgcgccggcagcacctcatcagggactgccccatcctccgcaacatcgagcccaagcagatcaaggtctggttccagaaccgcagatgccgggagaagcagcgcaaggagtcctctcgtctacaaaccgtgaaccggaagctgagtgcgatgaacaagctgttgatggaggagaatgaccggctgcagaagcaggtttcccgtctcgtctttgacaacgggtatatgaagaatcgactccacagtccttctgtagccaccaccgacacaagctgtgagtctgtggtgacaagtggtcagcacaaccaacagcaaaacccagcagttctgcatcctccacaaagggatgcgaacaacccagcaggtctactcgctattgctgaggagacattggcagagttcatgtccaaggcgactggaactgctgtcactgggtgcaaatggggcagaggcttcaatgatgctgtgagtggctttccagatgatggctggtcttgtttgttgaacaccgatggtgctgaggatattacagttacaatcaactcatctccaaataaacttgttgggtctcatgtcagcgcttccccattattttctgctatggggggtggaatcatgtgcgcaaaagcatcgatgctgctgcagaatgtgccacctgctctacttgtgcgatttttgagggagcatcggtctgaatgggctgatcctggcatcgatgcttattctgtcgcctctttgagggccaacccatacactgttccaggtttaagggctggtgggtttatgggcaaccaggttatactgccccttgcacgcaccttggagcatgaagagtccttggaggttattaggcttgaaggacatggctttagccatgaggaggtgcttatgtcccgggatatgtttcttctacagctgtgcagtggcgtcgacgaggatgcacctggtgcgtgtgcacagcttgtctttgctcctattgatgaatcttttgccgacgatgcaccgttgctgccctcaggcttccgtgtgataccgcttgatgctaagacggatgtgccaacggccaccacacgcacgcttgaccttgcctctgcgctcgaggttggatcaggtggaagcggcatgcgcgcttcatgcgatggttccggcacgtgcgccacgagatcggtcctgaccatcgccttccagttctcgttcgagaaccaccttcgcgagagcgtggcggcaatggccaagcagtacgtcaggggcgtgatggcctccgtgcagagggtggccatggcgatcgctccttctcgcctcggttcgcgtatcgaactgaagcatccgccgggctctcccgaggcacttgcactagctacgtggattggcaggagctacagggcgcacactggaacggagatccgctggtcggacaccgaaggcgcggactctccactgatgctgttctggaagcacagcgacgcgatactctgctgctctctgaagccgccggctttcacgctcaagttcgccaacagcgccggcttcgacatcctggagacgacgatggtgaacatccaggacctgccgctggaggcggtcctcgacgaggagggccagaaggccctgtccgcgcagctccccgcgatcatgcagcagggcctggcgtacctccccggtggcgtgtgcaggtcgagcatggggcggcaggcgtcgtacgagcaggcagtggcgtggaaggtggtgggtgacgacggcgccccgcagtgcctggcgctcatgctcgccaactggaccttcatctgaggctcgcaacatcgctcggcagcgccagaccggatgccgccttttgccctactacgtatcattagttgcttttccgttgtgccgcctgtgttaagaatttgtgtactgtgtggatgatcgagaactgactctgtttgtgtgtgtgcgtgacaaacaactacaacagctgtatgcgtgcctggtcgtggtctcgtctccccggcttgtcgccggcgacattgatcactgttgcaggttgcagtattactatttgctagttctgcttgcnnnnnnnnnnnnnnnnnnnnnnnnnnnnnnnnng

SEQ ID NO: 2370 - DNA, 496 bp, Zea mays
  Clone ID: TF_LIB4148-005-Q6-K1-H3
tccggtacagtggggcatatcgatatgctgccagcggttgttccatacaaaggatctctgagagagatagatgcaggaccaatgacaagctactaccgagagaaacgagaggggcactggccgagtatggcagcgggcgtggccatggacggcgccgaggcgaccgggcggactgggatgaggaatggcggcgataggcaaaggaaaatgcagcggcgcactcgacaagaacaagaacgctcctatgacgagcaaaccaaatcgatggagtccatgttcacaacacatgccaagctggatccccgccagaagctgcaactggctcgggagctctgcctgcatccgcaccaggtggccatctggttccagaacaagcgctcacgctagaagtacaagcgtctggagcgcgagtacttagctctgcgcgacgactaccacgcgcctactctgtaactactagtccctcaaagacgagtaagcgcacgcctcctcaagc

SEQ ID NO: 2371 - DNA, 358 bp, Zea mays
  Clone ID: TF_LIB3245-448-P1-N1-C8
cggcggttcacggaggagcagataccggcggtggagtccacgttccgcgcgcgccacggccacgccaagctggagccccgggagaaggcggaactggcgcgggagctgggcctgcagccgcggcaggtggccatctggttccagaacaagcgcgcccgctggcgctccaagcagctcgagcacgactacgccgtgctccgcgccaagttcgacgacctccacgcccgcgtcgagtccctcaggcgcgacaagctcgccctctccacgcagctttttgcttggtgcgcgcgcgtgcatgaccagttgaacgagctaagcgagaggctgagagaccgggaggatcctgccgccgccggct

SEQ ID NO: 2372 - DNA, 1441 bp, Zea mays
  Clone ID: TF_ZmC17115_1
cccccgcgtccgtgcccaacccaaccgctgcttttatttatacacctcctttggcctcttgcatcatcagctagtttacttgcgctgggcaagtctctagtgccagcttgtttacttgtagatccaggctctctcctctccaagcctttagcacagcaaagtcccagtgccatccctgttctgccgttgtatgtgaaccctcctatgcaatagcaagatctccatctctctcagctctctccagtttcatttccactcaagagttgagcacggatgaagaggccgaccagcagaggttcttcaatggtcagcgggcaagcaaccacagatctacaagaagatagctgcaggtccatggagccgcacggagtggacggcgatgctacggccgcggctgagcgcgacgacgtggacgccggggcgtacgacgaggaggaggacgaagaagaggagctcgcagggtcccgcggcggcctcggggagaagaagcggcggctggcagcggatcaggtgcgcgcgctggagcggagcttcgaggtagacaacaagctggacccggagcgcaaggcccggatcgcgcgcgacctcagcctccacccgcgccaggtcgccgtctggtttcagaaccgccgcgcgcgctggaagaccaagcagatcgagcgcgacttcgccgcgctccgcgtgcgccacgacgcactccgcgtcgagtgcgacgcgctccgccgcgacaaagacgccctcgccgccgagataaaggagctgaggggcatggtggaaaagcagatggaggtgaagctggagtccgcggcggaggagctgctgccggtggcgacgaggtcagcagcagcagccgctgtgtataacaaggacgggtcgacggacagcgactcgagcgccgtgttcaacgaggaggcgtcgccctacccttactccggcgcggccttagaccatcagcagcagcaagaaaccagccacccgctgggcttcacgggtttcacctccttcttgacgtcctctttcccttccgtataccatggggattcgcatttggaccaggaagcggacggcttcttcagcgccgccgccgccggcgacggattcttcgccgaggagcagagcgcaggcatcggcagctggtacggcggtgagggttggtagaacagcaacagctaagctgttggctgcctggaggctggagatcactcttggtatcgtatctaccattcttgtaaaatatggcgctgtacattatattatgcatgcatgggtccgggacgcggtaactatatactactatgtagagttaatttatatggagtagttaatttctgtatttttcactggcgggctgaaagcctgaaacacgggctacgagaggagataggccgggtaatacggttattgttctataaatcttggttgacatgcagttaatttttag

SEQ ID NO: 2373 - DNA, 1148 bp, Zea mays
  unsure (1)..(1148): unsure at all n locations
  Clone ID: TF_ZmC254_3
gccggccgggtcggggcacttgcacctgaacgtagttttctacgcattcagtccatacaggtcccttgagtcttgagcagcgaatcagcgaacgaaacagcaggtagcgcccgcggaatccaatcagcaacggcgtcttgtgtggcctcgtggatcgtgatccagcacgccgcgcgcaccgcaacgcccccgcgccgtaacaagcaccaccacttgctcgcacgcaccgcggcaccggtaaaatacgtgaccgccaccggcatactagtaccccgtgagctggcgctggctctggctctggctctggcagtccggctggcaggagagaattggcgagggatttttatcgggagcgaattcccaggcagcccctgtctagagagggacagggccacgcacgcacgccaccgcgctccattggccgccccgttgccatcaccgcgcccatcgccccatcctccgattaaactactccatcgctagtaagcagaatcgatcgatcacagcaagctcgcacacccgcgatccatcctccattagctcctcctcttctccttgctcctccagatcaggtgcatgacagcaccgcgcgctcaggtggccaccggcgagacctagctaggtagggagggaggctgggagggagggagcgatggagcagggggaggaggacggggactggatgatggagccggcggcggggaagaagggcggggcgatgatcgacaggaagaagcgcttcagcgaggagcagatcaagtcgctcgagtccatgttcgccacacagaccaagctggagccccgccagaagctgcagctggcccgggagctcggcctgcagccgcgccaggtcgccatctggttccagaacaagcgcgcgcgctggaagtccaagcagctcgagcgccagtacgccgcgctccgcgacgactacgacgcgctgctctccagctacgaccagctcaagaaggacaagcaagcgctcctcaaccagctggagaagctagcggagatgctgcgggagcccggcggggccaagtgcggagataatgccggcgctgcccgcagggacgacgtgcgcttggccgtggncggcatgaacatgaaggacgagttcgtggacgccggcggggccagcaagctctact

SEQ ID NO: 2374 - DNA, 2047 bp, Zea mays
  Clone ID: TF_ZmC12553_1
cccacgcccccctgctgtggcctctgctctctcctgccagttcacctgctgcctccggtgcccgctgctgtgcctcgctcgctcaccaccaccaatcgccaccccgtgcggcaccattccactgcacaaacagcgcgccactttcccaattcccgtcgcgtggcctccttccgttcctggcacactttgtgcgtcctgtagcgagggggtgatcggcgatggactgggggaacaggaccaaggccgccgccgccgctgcggcgccgtgacgagagggccgggggaggggaagggctcagaggatacgtcaaggtcatgaccgacgaacagattgaggtcctccgctagcgtgatctcgatctacgccaccctcggatagcgtggttggacaggaccaaggcctccgccgccgccgccgcagcggcggcggacgagagggctgggggagcggaagggctcgcgggatacgtcaaggtcatgaccgacgaacagatggaggtgctccgcaagcagatctccatctacgccaccatctgcgagcagcttgtcgagatgcaccgcgccctcaccgagcaccaggacaccattgcaggagagctgcgtatcattgcattaagaagaaaagccgaatacaaatggcctgcgaggctgcaaccccgggcaaaggagtccgaagaggaaacccaaagaaaatataaagaaactactaaaaaagagaaggccaggtcacaaccactaactacaacttcctaagaatttcctgatccaagagcacgcaaaccagctgctccaacaaaacaccaaagattgcgctcatccataagggaccggagatttgcataaactttttttagctttcattaggtcattttttaaatattccgtattccaatgattcaccctaattacttacattgatggccgcacaacatcccacctgtccctttttagaataatctttaaaacagacttcactgaatttgcccttcctcctgtacaagtgttttaatgctcctttgtaatgtatgcattgtcgatggaatatagtcccttcttttttttcccgatcaactgggtttttgtttcttcttcaggaattaggtttagtaatctgtactgtgatcctcaaattatccctggaggccacaagatcacagcaaggcaacgatggcaaccaacaccaatgcagctgcagatcttggagaacatctttgaccaaggcaatggaacaccaagcaagcagaggataaaggagataacggcagagctctcgcaccatggccaaatctcggagacaaatgtgtacaactggttccagaacagacgggcacggtcaaagcggaagcaggccgcttctttaccgaacaatgctgaatctgaagctgaggtggacgaggagtctctcaccgataagaagccgaagtcagatcggtcgctccaggacaacaaggctatgggcgctcacaacgctgacaggatatctgggatgcatcacttggacactgatcatgaccaaatcggtggcatgatgtatggatgcaatgacaacggcttgagatcgtctggcagttctggccagatgtccttctacgggaacatcatgccgaatccaagaatcgatcatttcccggggaaggtggagagctcccggagcttctcccatctccaacacggggaaggctttgacatgtttggatgacatgatgcggcgctgagttaccgtgtaaaatgtgatggttgacacatcgtgcgttcaatttgctgacatgaaagttgatgttggatgtccgtgttgcttatcacgttctggttaaccacctccgcggatggtagctagcttgaatgaacctactctttgggatagctgtaagaggttgatattatagtttgcccgtagtctatatacgctgaactatcagcatgtaattctccacgtttgcaaatttagcacgggtatgcagcagcctgtggttaaaccttcgtgtgtgtgaaaccatttcttgcttgcttttaagaaaaaaaaaaaaaaaaaagcggcccgctatag

SEQ ID NO: 2375 - DNA, 1612 bp, Zea mays
  Clone ID: TF_ZmC12553_2
cccacgcgtccgcccacgcgtcgggctcgaggccggccggggtggccggtgcgcgcgtccacaaccgccgccaccgccttcccacttccaatacgcctgctgccactttccccattcctgtctgaccatccccacgcccccctgctgtggcctctgctctctcctgccagttcacctgctgcctccggtgcccgctgctgtgcatcgctcgctcaccaccaccaatcgccaccccgtgcggcagccgcgctgccatcccgcggaggactggaggagcacgcatatccgagccttccctgccgcgtcgcatggactcatgctgtcgcgggccgcctcccgcatcgcctccaaccgggtgcctgcctagctggccgattttcttcctcgcgtagccccattccgcagcacaaatagcgcgtcactttcccaatttctatcgcgtgccccccttccgatcctgccatttcgtgcatcctgtagcgtctggcagtgcgggggtcatcggggatggagtgggtggacaggaccaaggcctccgccgccgccgccgcagcggcggcggacgagagggctgggggagcggaagggctcgcgggatacgtcaaggtcatgaccgacgaacagatggaggtgctccgcaagcagatctccatctacgccaccatctgcgagcagcttgtcgagatgcaccgcgccctcaccgagcaccaggacaccattgcaggaattaggtttagtaatctgtactgtgatcctcaaattatccctggaggccacaagatcacagcaaggcaacgatggcaaccaacaccaatgcagctgcagatcttggagaacatctttgaccaaggcaatggaacaccaagcaagcagaggataaaggagataacggcagagctctcgcaccatggccaaatctcggagacaaatgtgtacaactggttccagaacagacgggcacggtcaaagcggaagcaggccgcttctttaccgaacaatgctgaatctgaagctgaggtggacgaggagtctctcaccgataagaagccgaagtcagatcggtcgctccaggacaacaaggctatgggcgctcacaacgctgacaggatatctgggatgcatcacttggacactgatcatgaccaaatcggtggcatgatgtatggatgcaatgacaacggcttgagatcgtctggcagttctggccagatgtccttctacgggaacatcatgccgaatccaagaatcgatcatttcccggggaaggtggagagctcccggagcttctcccatctccaacacggggaaggctttgacatgtttggatgacatgatgcggcgctgagttaccgtgtaaaatgtgatggttgacacatcgtgcgttcaatttgctgacatgaaagttgatgttggatgtccgtgttgcttatcacgttctggttaaccacctccgcggatggtagctagcttgaatgaacctactctttgggatagctgtaagaggttgatattatagtttgcccgtagtctatatacgctgaactatcagcatgtaattctccacgtttgcaaatttagcacgggtatgcagcagcctgtggttaaaccttac

SEQ ID NO: 2376 - DNA, 1406 bp, Zea mays
  Clone ID: TF_UC-ZMFLB73016H05_FLI
gcggagcgcaagtagatagctgctgcgtcttcctggcctgagggtttcggattcatcagccgggccgccggggtcgccatcgccgccgttgggacggcggcggcggagtttggcgtcgagttcttcagagggttaggttaggtgcacgcgtctctcgcgttcctccttcccaactcgaattcctttctttccatacccgtccccatgacgttcgttcttccatgattcccttccatatttgctccagccaggccatccgcggctgcgtggctgctctcctgctattttaatgcctgccttctctccctctcacgcctcataaaaaaaactaataattccttgggatctgaggggatccgcgtggggttggtaggatcgcgggcagagattttagccaggactggaggaaaaccagtccgctctctctccatgagcttcggcggcatgttcgacggcgccggctccggcgtcttctcctacgacgctaccggcggcggcacgggcatgcacaaccccggccgcctcgtcccggccccgcccctgccgaaacctggcggattcggcgccacgggtctctccctcgggctgcaaacgaacatggaaggggctcagctgggcgacttgggtcgtatgggcctgattggcggcggcgggagcgggagcggaggcgacggggactcgctgggccgcggccgtgaggacgagatcgacagccggtcaggcagcgacaacgtcgacggcgcctccggtgacgagatcgacccggacaacagtaaccctcgcaggaagaagaagcgataccaccgccacacaccgcagcaaatccaagaactcgaagctgtgttcaaggagtgcccccaccccgacgagaagcaaaggatggagctcagcaagcggctcaacctagagagccgccaggtcaagttctggttccagaaccgccgcacgcagatgaagacgcagatcgagcggcacgagaacgcgctgctgaggcaggagaacgacaagctgagggcggagaacatgacgatccgggaggcgatgcgcaaccccatctgcgccaactgtggcggcgcggccgtgctcggggaggtgtcgctggaggagcagcacctccgcatagagaacgcgcggctcaaggacgagctggaccgcgtctgcgccctcgccggcaagttcctcggccgcccaatctcctctggcagctccatgtcgtcgtccctgcaaggctgctccggcctcgagctcgccgtcggctccaacaacggctacgggcccggtcccctcggcgcgtcagcgctgcagcccctccccgacctactcggcgccggccttccgggccccgtgggctcggccgccatgcgcttgcccatgggcattggcgccctcgacgttgcgctgcacgg

SEQ ID NO: 2377 - DNA, 3856 bp, Zea mays
  Clone ID: TF_ZmC3271_1
cgttgctgtcgattcttccgccctcttcgtgagtccttcccctaggcgctactcgtctgctctcctctcttcttgtcacgagctctcctctcttctttccagtagctcgctcgccaggccgccaagccacatgcagcatgtggcggagcgcaagtaggtagctgctgcgtcttcctggcctgagggtttcggattcatcagctgggctgccggggtcgccatcgccgccgttgggccggcggcggcggagtttggcgtcgagttcttcagagggttaggtgcacgcgtctctcgcgttcctcctgcccaagtcgagttcctttctttccatacccgtccccatgacgttccttcttccatgattcccttccatatttgctccagccaggccatccgcgggctgcgtggctgcgctcctgctattttaatgcctgccttctctccctctcacgcctcataaaaaaaactaataattccttgggatctgaggggatccgcgtggggttggtaggatcgcgggcagagattttagccaggactggaggaaaaccagtccgctctctctccatgagcttcggcggcatgttcgatggcgccggctccggcgtcttctcctacgacgctaccggcggcggcacgggcatgcacaaccccggccgcctcgtcccggccccgcccctgccgaaacctggcggattcggcgccacgggcctctccctcgggctgcaaacgaacatggaaggggctcagctgggcgacttgggtcgtatgggcctgattggcggcggcgggagcgggagcggaggcgacggggactcgctgggccgcggccgtgaggacgagatcgacagccggtcaggcagcgacaacgtcgacggcgcctccggtgacgagatcgacccggacaacagtaaccctcgcaggaagaagaagcgataccaccgccacacaccgcagcaaatccaagaactcgaagctgtgttcaaggagtgcccccaccccgacgagaagcaaaggatggagctcagcaagcggctcaacctagagagccgccaggtcaagttctggttccagaaccgccgcacgcagatgaagacgcagatcgagcggcacgagaacgcgctgctgaggcaggagaacgacaagctgagggcggagaacatgacgatccgggaggcgatgcgcaaccccatctgcgccaactgtggcggcgccgccgtgctcggggaggtgtcgctggaggagcagcacctccgcatagagaacgcgcggctcaaggacgagctggaccgcgtctgcgccctcgccggcaagttcctcggccgcccaatctcctctggcagctccatgtcgtcgtccctgcaaggctgctccggcctcgagctcggcgtcggctccaacaacggctacgggctcggtcccctcggcgcgtcagcgctgcagcccctccccgacctaccctctagtcacggtggcattccagatcctggtgaacaactgcgcttgcccatgggcattggcgccctcgacgttgcgcgtcagcaacctgctctcctgggcatcgaccgcaccgtcctcctcgagctggcgctcgccgcgatggaggagctcatgaaagtggcgcagatggacgagccgcctggctccgcagacccgacggcagcggcttggaggcgctcaacctcgacgagtaccaccgagcgttcgccagggtgttcgggccgagcccaacaggctacgtcaccgaggctacccgcgaggccggcgtcgccataaccagcagcgtagacctcgtagacagcctcatggacgcggctcggtggtcggagatgttcccgtgcatcgtggcgagggcgagcacgacggacatcatctcgagcggcatgggcggcacgcgcagcgggtcaatccagctgatgcacgcggagctgcaggtgctgtcgccgctggtgccgatccgtgaggtggtgttccttcggttctgcaagcagcacgccaaggggctgtgggccgtggtcgacgtctcggtggacgccatcctccggcccgacggcggccaccaccacgcgcagaacggcggcggcgccgggtacatgggctgccgcctgctccccaccggctgcatcgtgcaagacatgaacaacggctactccaaggtcacgtgggttgtccacgcggagtacgacgaggcggtggtgcaccaactctaccgcccgctgctccagtccggccaggcccttggcgcgcgccgctggctcgcctcgctccagcgccagtgccagtacctcgccatcctctgctccaactctctccctgcccgcgaccacgccgcgatcacgccggtggggcggaggagcatgctgaagctggcgcagcggatgacggacaacttctgcgccggtgtgtgtgcgtcggcggcgcagaagtggcggcgcctggacgagtggcgcagcggcgagggaggagacgctgctgggaacggcggatcagcagccgcgggcgagggcgaggagaaggtgcggatgatggcgcggcacagcgtgggggcgcccggggatccccccggcgtggtgctcagcgccaccacgtcggtgcggctgcccgccacgtccccgcagcgcgtgttcgactacctccgcgacgagcagcgccgcggcgagtgggacatcctggccaacggtgaggcaatgcaggagatggaccacatcgccaagggccagcaccacggcaacgccgtctccctcctccgcccaaatgcaactagtggcaaccaaaacaacatgctcatcctgcaagagacctgcaccgacccgtcaggctctctggtggtgtacgccccggtggacgtgcagtccatgcacgtcgtcatgaacggtggcgactccgcctacgtctctctcctcccctctgggttcgccatcctcccggacggccactgccagtcaccaaacactgcacatcagggttcaccaagctgcggcggtagcagcagcagcagcagcacggggtctctagtcacggtggcattccagatcctggtgaacaacctgcccaccgcgaagctcaccgtggagtcggtggagaccgtcagcaacctgctctcctgcaccatccagaagatcaagtctgcgctccaggccagcatcgtcacgccctagctattagcgggcatttgacatggattccggccgccggttctcagaaaaaaggacggagtagtcggatgccatgtcaaatgcttagctagaggacgacatgctgtgacggcgcagatgctaaacaaggctgtgctcgtacgtacgtcgatcgcttcacatcagaccggcggggaactggtgcttgagaaggcagtgaaagaaaataagggtattaaaataaattatgtagtagtgtggagtatttattgcatagagcaatatatatatggggtgaggtacacagggattaagtcaagaacgaaccgttcgctaggctttgattgcttgagcaaacacgttttgctatcgctcaagcttgttatatgctcatgtggtggttcgggtattgacttaagtctctggcaaaagaaagtgaaacaccacctattagggcttctcctatatataaaatatatatgtagcagtttgttttcaatgccttctcaagcaccagtttcccgccggtctgatgtgaagcgaccatcttgtgaagagttctgttcttttgttttgtctccgatatagcgaaatatagagatgagaatgtctttgtgtttgtaacgtttgtgtagtgttatttcgtttgagttgatatatatgacatgtacgctttgttcatgcatgtggaaaaaatatgttctagtgtagctcactttaaa

SEQ ID NO: 2378 - DNA, 3365 bp, Zea mays
  Clone ID: TF_ZmC14030_1
aattcggcagaggctttaaggctgtcacctttccccatcccctacgcccccccttcaggtgcaggggccacccttcctcctgctcccgcccctcaatcaatcacgacgccacagccgcacccccgcgaaccctagctcgcagtcgcaccgcgcgccggacgctgaccaggtgcctgctctatctcctgcggtggccgtcgcgctgccgccgccagacccgatccgtccgaccgtgccaagcgccccccctccggcgatcgatgcgaggcgccgcgggaggcggctcgggctcgggcaggctgtgaggagcctgtccgctcgctgcgtcgtgcgcctgccttccctcacggatcggcctcgccgcgcgtttgctttcccgcccacgcagggatcttcgcgagcggggagttgaagcgcgagatttgcgcggctacgattctgcgttgccgagggagcaagggaaccaatggctgcagcggtggcgatgcgagggggaagcagcgacagcggaggatttgacaaggttcccgggatggactcgggcaaatacgtgcgctacaccccggagcaagttgaggtgctcgagcggctctacatcgattgccccaagccaagctcctcacggcgccagcaactgctgcgcgagtgtcctatactctccaacattgagccgaagcagatcaaggtctggttccagaaccgaaggtgccgcgataagcagcggaaggagtcttcgcggcttcaggctgtcaacagaaagttgacggcaatgaacaagcttcttatggaagagaatgagcggcttcagaagcaagtctctcagttggttcatgaaaacgcgcacatgcggcagcagctgcagaatacttcattggccaatgacacaagctgtgaatcaaatgtcactacccctccaaaccctataagggacgcaagtaacccttctggactccttgcgattgcagaggagaccttcacagagttcctctcaaaggctactgggacagctattgattgggtccagatgcctgggatgaagcctggtccggattcggttggtattgtggccatttcgcatggttgccgtggcgttgctgcccgcgcctgtggtttggtgaatctagaaccaacaaaagtcatagaaatcttgaaagatcgtccctcttggttccgtgattgtcgaagtctggaagtgtttacaatgtttccagctggaaatgggggaacaattgaacttatctacatgcagatgtacgccccaacaactttagttcctgcacgtgacttttggacgttgcgatacacgacaacaatggaagatggcagccttgtggtctgtgagagatccttgactggttctggaggcggtccaaatgcagcttctgcacagcaatttgttagggctgagatgcttccaagtgggtatttagtgcgcccatgcgaaggtggaggttcgattgtgcatatagtggaccatctagatctcgaggcatggagtgttcctgaagtgcttcgaccactatatgagtcttctagagtagttgctcagaaaatgactactgtggcactgcgccaccttagacaaattgctcaagaaacaagtggagaagtagtgtacgccttgggaaggcaacctgcagtcctacggacctttagtcaaagactaagcagggggtttaatgatgccattagtggtttcaatgatgatggttggtctgtaatggggggagatggcattgaagacgttgttgttgcttgcaactcaaccaagaaaattaggaataccagcaatgctgggattacatttggagcgcctggaggcattatttgtgcgaaggcatccatgttactgcagagcgtcccaccggcagtactggtccgatttctgagggagcatagatctgaatgggctgattacaatattgatgtgtatttggcttcatcactgaagaccagtgcgtgctcacttcctgggttgcgacccatgagattttctggggggcagatgatcatgccacttgctcacacagtggagaacgaggagattcttgaagttgtccgccttgaaggacaacctcttactcatgatgaagcccttctttcaagggacatccaccttctccagctttgcactggaatagatgagaaatctgtgggttcctccttccagcttgtgtttgcaccaattgatgagcattttccggatgatgctccattgatttcctctggctttcgtgtcataccacttgatatgaaaacagatggtgtatcctctggtaggacgctagatttggcatctagtcttgatgtgggttctgctgcaccccaagcctcaggggatgcacctccagatgactgtaatttgagatctgtgctgacaatcgcctttcaattcccttatgagatgcaccttcaggacagtgttgctactatggcccgtcaatatgtgcgtagtgttgtttctgctgtgcaaagggtgtcgatggctatatctccctcccaatctggtctaaatgctgggcagaggatgctttccggcttccctgaagctgttacacctaccatatgggtatggcagagttatcactaccatctagagctggtgaagcattgttgaaaatgctctggcatcatcccaatgctgttctgtgctgctcctttaaggagaaacctatgtttacgttttttaaggagaaacctatgtttacgtttgcaaacaaggcagggctcgacatgttagaaacatcttttattgcgctgcaagacctgacgctagacaagatctttgccgagtcaggaaggaaagcaatattctcagatatctcaaaactaatggaacagggctacgcgtacctgccgtcgggcgtgtgcatgtcaggaatgggtcggcatgtatcattcgaccaagctgtagcgtggaaggtgctcggcgaggacagcagcgtccactgcctggggttgtgtttcgtcaactggtccttcgtttgacacgccatcccatggcctgtgtgatgagcaggccaatttttttgtatggtgatcccaatatggggaaaccatcagctgtgacagaaggctttatgttgcatgcactagttgtacgtcttgaatcgagtgtatttatgaagaaattggggggcaatagtgatgcacggctacacatgacccagcattaaccaaacaaccgcgtcgccagtttctttctattcgatcagggagatgcattttctggcaaaaaatcttctatttttttgttgcaaatttggtctgtatatggaactgctgctggacgccgagaaagcaaacatatgcggaaactcactatggctcgagaaaaaaacttatgaagaggttggatactgaat

SEQ ID NO: 2379 - DNA, 1233 bp, Zea mays
  Clone ID: TF_ZmC74833_2
cgggaacgtccgccaaacgtccgccttacgtccgcgtaccgtggggcccgtggtgctggcgcgcgacctcctcccgctccacatcaagcactacaacttctcctttgtccgccagctcaacacctaccaacctgccccgagcaaagagagcaagttagttggtgtaaatgcttcagcgaagcagggcagcaggcgtgggcagtcgggctggtccagggacgccagctcgcatctgacggtttccgtctgcaaaggtagcagcagacgtcgcctttgaccgtctatgcctcaatcccgcagatgcttgtccgtgttgttaagctgctcaagaacccccacttcatggcgaagcccgctgcgattgacttgataagaagcattattcaggctgaaggtgcttccacagagcaggcattatcatcagctctaacaagtattatggatgcgctgaagagtactgactggaatacaaggaaggctgcctcactagctctttcaagtattgcggtcagttctgggtatttggttacctctttcagaacttcctgccttcgctcccttgagcgtagtaaatttgacaaggtaaaaccggtacgtgacaccattatacatgcaattcagctgtggataagctattccagggtctcatactcctgaaccatcagaagctgggtcatcaacaaaagagaactactttggagaccatcatgacgccagaagtatacatgatggaggatcaagagatacttcttttaggagaacagatcatgggccttctgtatctgttatcagtggtagttctctcagttcagcaaagcggaggtctcctttatctattaacaaagtagccataaacaatgctgcaaatttgcaacggatgaagactggtgattggcgtgttgaggtgtcagttccaaagcagagtatgataccgctggttaataatgacgagaagggatccagtaaagcctgcagcctaaaagatacaaagagaaatgcatatgaaagtgttgatgtagacagtaagtttgactatgacattgtagatgataaacaagaatgctcctctgtgtcagaagtagccagcaggagttttgagacaaagcatgtcactactgctcaggaatgcactgaagattgtgattcagcagaagttacagaacaatgtcccaggggtcgagaaagtaagagcataggctcaacattacagatgttactactcatgacacacat

SEQ ID NO: 2380 - DNA, 826 bp, Zea mays
  unsure (1)..(826): unsure at all n locations
  Clone ID: TF_LIB4741-079-Q1-K1-H2
cagtatgtcggctcacccgaagcctataaattcctcgccgcccatttccctccgccgcctcctaatcctcaacacccgcgcccccaccgcgcccgtcgtatgccaccatgcaccgtcgcccgccccaccgcgcacgctaatgaccccgatgctgccgtacgccgaccgccgccgacgatgctgctggagcccaaactctaggacgaggaggtgccgctgcagcaactggcgaccccgggcaccttcgagtccctggaccagctgatgccggaggtggacgcgccggccgacccgcacccgctggaggggctgctgcacgggccgcagctgccgcccttcctgtccaagacgcaccagctggagagcgagccgagcgctgcacggagtcatctcctgaggcgctgccgacaacagcttcaccgggtgtgacccctccaccttcgcgcgcgacgggctgccgcacaacttccagcacaaccatttctccaccttcgctaggtagatcaacacctatggtctccgcaaggctcatgctgacacaaggcagattgctcgcgaagatctgctgcaagataccaagcatctattgaagacgatggtcaggcgcaggacctccccaagaaaacaaggtggcgttctgcctggcctgtcttctgtagaatccagcttggaccctgagctctcgcgctgacgagagagaagaaccgctgcttgaagaagtagcaagggtgacacaggaacacctccttactattgatgcaatgaacacgctgaatcactggctggtatctgcagaggaccggcagatgagnatggtctctttcct

SEQ ID NO: 2381 - DNA, 540 bp, Zea mays
  unsure (1)..(540): unsure at all n locations
  Clone ID: TF_LIB4757-078-A1-K1-B1
ccggccgggttnttacatctacatcgtccggttcggatcgtctccgccagccaggtgctggatccgtagcggcggcggcggccatggacaagagcatgctcggcgacctggatggcctccccgaggaggacaagatgcggatggccgccatgatcgaccagctccagatccgcgacaggttcgtgccataccaacgcatctcgtgggcggagcagggccgctccttcatggtgtggaagcccgtggagctggcgcgcgacctcctcccgctccacttcaagcactacaacttctcctttgtccggccactcaccacctacgtgagcacatccaaaacaccctctaccatctatacaacatctattctgttggtgactgagattgttgctgcaaaatcaaggtttaagtttgggtcgatttgtgtggcttttgtttatgtccaatcgaaactgatggaaaaaaaaactctcgcatccggcggcgttacagttgccttgtgacgatggaaaaacaatgctacatgtaaaaatgactaaaccc

SEQ ID NO: 2382 - DNA, 559 bp, Zea mays
  Clone ID: TF_LIB3912-037-Q6-K6-D2
ccccacgtgcgagagaaaagaggagatgctgatcgcgcttctgcttccttatccggagctctgccgaggagcgctgcacagggaaccggagcggcaactgccggatcgggatccttacgttgttgagcgtgttatcaaccatgctcagagccatcggcggctactgcaagggctacggcgccagcctccacaccaagccggagcaggatcaggaccacgctggacccgtcgtggcaccgaccgtggacatagacgagccacatggtgagcgaccccgccacgcactccggtgggcgctggggcggcttccacaacatcttccacgtcctctacccggactacttgttggactacttgttgaagtactacttcaagcaccgctacttccgcagcttcaaccggtacctcaacacctacgggttcacgaacgtggacacagaccggcacgagttcgtgcatgagtggcagctgcggctgctggcgctcctgctgccgctgatcaagcacgaagagaacaacgccggcgccggcgcccgcggactcggccaggacctgtacg

SEQ ID NO: 2383 - DNA, 798 bp, Zea mays
  Clone ID: TF_ZmC12124_7
cattgggtacctcgaggccggccgggcttccccctatttcaccgaccattttccccattttacagcggcgaatatctctcatctcccccgtcctctttgctgcaacacctcctacccacccgacgaaaatatcctaagcgccgacccgaatacccgattcgctcctcgtccggtcgattcctgctcctaatcgctcgaatcgagtccttgccccgtgttccgtgccacaatctgggcgcttggctcccgcgagccggggttcttgggcctgggcggaggccatggacaagccggtggcgccgggcattatcaaggaggagctcctggagcagcagccgccgacgcaggacggtgtgggtggcggcggggatgcgccgcgcccgatggaggggctgcacgaggtgggtcccccgcctttcctcaccaagacgttcgaccttgtggaggacccggccaccgacgccgtcctctcctggagccgcgccggcaacagcttcatcgtctgggacccgcacgtcttcgccgacgggctgctcccgcgcctcttcaagcacagtaacttctccagcttcgtgcgccagctcaacacctatctagatggaacaagatactggatgaagtaccaagaatcagattgttttgttctagaagactctactgaccaccttcacatgctatagtatattgcttatcaaaatgatcccttgacagatataaatatgcaaagtgaaggttacagcagagctcaagacatatggcatatgactgacatgatgatgaccatttctggtctattgc

SEQ ID NO: 2384 - DNA, 727 bp, Zea mays
  Clone ID: TF_LIB4705-001-R1-K1-H10
cgggaaactgctttattacaagctgtacagcatgcttgaggatagcagtatctctcacctcatctcttgggcagagaatggcgagagcttcgtcatgtcaccatctgcggacttctcaaaagtgctatcacaatactttaagcataccaatatctcttcattcgtgcgtcaactgaatatgtacgggttccacaaagaacgagacgtctttcatactgggcatccggagtcgaccttgtgggagttcaagcacggtaacgggaacttcaagcgtggcgatcttttgggccttcgggaaatcaagcgacgcgccagtcgacatgccctcgttcaccgcgagaacagctacgcaaagccatcatcctcgcacccaggtacgccagctgaggctatgcctatgccccctgagacctccgagtcacgtatgaccagcatcgagcatacgcttttcgatctcagcgcgcgattgcagaggagcgaggaagccgctcaatacatgcatgtgaggaattcagtgatcactgacacgatgggccggttactacacttcaatcaagagctgtcccgcaccgtcctgtcccttttcccttcggagagcccacattatagggatgtcatggcacttcaagcggggatccagaagcaggtggacgctgtgcgtgcccttgacgagcatcatgaagctccctatggcggccgtcagcattattttggcgcaatggagaac

SEQ ID NO: 2385 - DNA, 3183 bp, Zea mays
  unsure (1)..(3183): unsure at all n locations
  Clone ID: TF_ZmC2162_1
cattgggtacctcgaggccggccgggttcgttctgagctctctctctctctctctctctccctacccaccaaatctcgcagtcgcagcaggtcctaggtgctcccgaggaatccattcccaatttgcgttcccactcccaccaccgcttcttcccgtatcccttgtcctccctaatttcctctcacaaaaagcgggtgcggcttcctgccactcacctcggtctcggggggcgccgtgcggcgggcgcccgtgctgctggtttcgctccaggggagaaggggcagagggagtagagcaggttaggtccgtttgcgttttcttttgcgggtttgtaggtcaaaagctccgcgagcactttccgctccacctcctcacgctcggaatcaaatcgatgcccccctgatttggttcctggtatcggtgcatgagcttgctccaagagatctcccttttggttcggcgtcaggggttctgtgaggtcacgcggcttcttcctcttggcgctcctcacatgtccgggcgcttcgatctctgcccactgcgcgagtgattctgctgctgcagcagctgttaggtgcgcgcgggccgttatggggtgaaccgaagcgttcctcgcagggctgtgggtttattacgccgcctgtttgcttccccgcaccttgtccttgtgcccatacttctttgcttttgtcacgcctgaaccgtgtcttcttgtagtatctgaggcttggcagttggcaagtacaaactagcaacttgcttaggtataaagtatccagtgtctggtgcagagcccaaaggggtcacgaatcgttgatgcatagatctgcttctggctgagataaggctctaagttcgctctgttgatggggctaccatgagccacgggaacgggatgttgaattctgtcaaggtggagaggtggccagcagcagtcgctgcaaatggccagcctaggccgatggatgtgctccacgacggcagctcgccgccgttccttaccaagacgtatgacatggttgatgacccaaccacgaacgctgttgtgtcatggagtgccgccaacaatagctttgttttgggatcctcatatctttggcacggtgctgctgccaaggtacttcaagcacaacaacttctccagctttgttcggcagctcaatacttatggcttcagaaaggtggatcctgacagatgggaatttgctaatgaggagtttctgagaggtcagaggcacctcctcaaaaacattaggcgtcggaaacctccacactcatctccaaatcaacaatctcttggctcttacctcgaggtaggacactttggatatgaagaagagattgatcagctgaagagggataaacagctcttgatggctgaggtagtgaagctgaggcaggagcaccaaaatactagatcagatctacaggccatggaagagaaattacaagacaccgagcagaagcagcagcagatgatggcattcatggcacgagtcatgcagaaccctgatttcatgcgtcagctgatctcccagcgggagatgaggaaggagctcgaggatgctatctcgaagaagagaaggcgccgcatcgaccagggacatgaagctggtagcatgggcactggttctagcctggagcaagggccacagggagtgtttgaaccgcaggagccggtggaatcagtcgccaacggtgtgccatctgatctggagagttcgtctgttgaggcgaagggattggaggttcgacagggtgtttcttcaggtggttctgagcatctgaatggcaggccaagcggagagttaaatgatgatttctgggaggaccttctgcatgaggggggactcggtgcagatgcaggcaatgctgttggtcaggatgatatgaacatggacatggacccagatgttagcctgcctcaactgaaacaacatggtcccagacattagccgctcttgtgctatcacaatggctgtgactgtgagtatctttacagttatgctcgttatatccctgtggtgtacctgtttcgacgttcgtctctcgaccaaatgtcacgtcgactgcagtctccagttgttaatacagtctgttcagcacgctgatttaagtatttgggtcaagatgttcatataatcctgtggtatccagagatattatagtttgttttcgtaactgtttgcgcagagaccatgctatgttgcctgcaggctatcagtgtatttgttctaacagatcgcgacgctggtacaacgcagtgacctgccagactgggccactatgagattgtagggaaagaccagatagcttgtgtatgtaaaagtggtcattctatcattctatgtatgctgatccatagtagcctatcatgtgcaacgctattgccctttgggatttggcatttcactgtatataacatatcatcggctcatcgccgtattgccgcatcaaaaagaaaaatgaattacccaaagcggaaaacccacgcgtccgccnaagacaactatctgatcacaggctactgctacgacgtacaatggtacccactggtattgacagggcaactgataggtagctcgtgttcataaacctcataacaggaccccgatggaaatgttccgttctactggggcgttgacaccggcgggcgtcttgtggtctctgacgacgccgagctcgtgaagagtgcctgtgggaaatcctgtgccccgttccccaaaggcttcttcttcacgacgtccggagggctgaggagctacgagcaccccatgcacgaggtgaagccggtgccgagggtggacagcaagggcgaggtgtgcggcacgacgtacacggtcgacgcaaccgccaggaaggagaccagcatcccaagggtcggcagcgccgccgattggtcttcgcagtactaaaattcgttatctttctctgtgtgtgttgaacgggttcgagcgcaggtagcaggtgacacgggcgtgggccgtgtttgttcgtatggaaaccgtgtctggtgtttgttcgtatgatttccgttgctgctttgctgcacgcctgtactgtgacaagaattactgcctttgctatcaggaaataaatttgtagagtttagagttgttttaaaaaaaaaaaaaaaaaaaaaaaaaaaaaaaaaaaataaaaaaaaaaaaaaaaaagcggcc

SEQ ID NO: 2386 - DNA, 2069 bp, Zea mays
  Clone ID: TF_ZmC3537_2
ggtaccctcgggtcggcccagtatgtcggttcaccgaagcctataaattcctcgccgccccgcctctcgccgatttccctccgccgcctcctaatcctcaacacccgcgcccccaccgcgcccgtcgtatgccaccatgcaccgcgcccgccccaccgcgcacgctaatgaccccgatgctccctacgccgccgccgccgcgatgctgctggagcccaaactcgaggacgaggagttgccgctgcagcagctggcgtccccgggcaccttcgtgtccctggaccagctgatgccgccggtgaccgcgccagccgagccgcgcccgctggaggcgctgctgcacggcccgcagctgccgcccttcctgtccaagacgtacgacctggtgaacgagccgtcgctggacggggtcatctcctggggcgctgccgggaacagcttcgtcgtgtgggacccctccaccttcgcgcgggacgtgctgccccacaacttcaagcacaacaatttctccagcttcgtcaggcagctcaacacctatggtttccgcaaggttcatgctgacagatgggagtttgctcacgaagatttcctgcgagatagcaagcatctattgaagaggattgtcaggcgcaggtcctccccaacaaaacaatgcagcgttcagcctggctcttcttctggagagtccagcttggaccctgagctccacacgctgaggagagagaagaacgcgctgcttgaagaagtagcaaggttgaaacaggaacaccgccagacaattgagcaaatgagcacgctgaatcacaggctggaatctgcagaggaccggcagaggcagatggtctctttcctggccaagctccttcagaacccgagtttcgtgaggaagctgaagctgcacagggagaagaaggagatcgactccaccagggtgaaaagaaagtttctcaaacatgttcctcatggcagcgtagagtcaggtgaatccagctcacagcacgccggagagagtggttcgtatttcgctgtgagttcccccatggctacaactacaagcgtgcatgacgacatcacggagcttcagaactttcttttggaagatgatgacctcaacttcggcatggattcagaaaacaccgggcttgaaggcaccgaggcaccagatgatattggagaactgattcaggggttcgacacacaagaggaacttgacctcggcagtggagctgagctacaggagatgcctccagcttctggttctcttgctcaagatcccacaatcggcaggttcaagggaaagaatgtgctgtgtccaggactggacgctacctcctccgaaggcgactgcctcagtccattgcctgacaacatggggctgctttcaggcaccatgctagggacggcaggcagcatgatggccgctgacgatgagcaaatatggggcgttgatgcttcggcagccctgcaaagctcttgcagtggcactagccaacaagctttcggtagccatgttagtgatccctatctgatggacatcgccaacaggcctgagagattttgggagcttgatttccaggcactggatgaggctgatctgcagctggacaagtgtgctatcgatgaccctgctcttcagcagcagccaagcatgaagaagccgtagacgaatttccgttgtgagacagacagacaatgtatatggtggtgctttatccactgaagtgctacgattaacttatggagattgctatagttacttcggtatttgggagcgaggctgatgaactcgcctactatggcacttagtagtagcagcagcacagcagtagtatgtttttgtttcccatttattcacccccggtgtttttgaatggaaacttgtatcctagtgatttcttcagagcagctgttaactgctctggccgattcttttttgttgtttccaaaaaaaaaaaaaaaaaagcggccttccatttatgtttttgttctgatttttttttttacttgctagttgctacttgcgaatgtcttgcaatgagtaatgggattaaaaaaatccgttctcagag

SEQ ID NO: 2387 - DNA, 2047 bp, Zea mays
  Clone ID: TF_ZmC2340_1
taccggccgggaaaaaaggaaatcgaaggagattgaacgaagcagcccaaccaaattcccctcgccgcctcgtcccttcgcgacatttctagtcccgtcgtcgcctcaatctcgaagcctctccggcgcagccgcctcatcatcgatccgaaggcctccaaccaaacatcctctagggtttccgcatcgtccgtcgcgatgggcttcacgaagcggtcgccccagcatcccgcctccccagccggcggcgaggtcggcgcccagacggcagggaaggtcacaccagtgccggcggcgccggagtcggcgcccgtggcggtggtgccgaggcctccagacgtggcgcccttcctgaccaaggtctacgacatggtctccgacccggccaccgacgcggtcatctcctggagcgccggcggcggcagtttcgtgatctgggactcgcacgctttcgagcgcgacctgctgccgcggcacttcaagcacaatcacttcaccagcttcatacgccagctcaacacctacggatttcataaagttgatccagatagatgggaatgggccaatgaaggctttgttaagggccaaaaacatcttttgaagaccatcaagagaaagaagaaatcctctcaggatgtacctagtgatctgcagtcggtgcctgtcaaaactgcacctggcactgagaatatcgagataggaaaatatggaggccttgaaaaggaggttgagacacttaagagggacaaggcccttctaatgcagcagcttgtagatctacggcagtaccagcaatcatctagcgctgaagtgcagaatttaattcaacgcctccgtgtgatggagcagaaccagcagcagatgatggcacttttggcaattgttgtccagaatccagacttcctgaaccagctcgtgcagcagcagcgcaggagtaactggtggaatgatgatggtaacaggaaaagaaggttccaagctctggaacatggtcctgtagatgaccaagagacttctggtggaggcgcacaaattattcaatatcgtcctcctgttcctgaaacttccaatcagccaataccagcaaatgaagctttctattcaacccctgcacaaccagcttcaagccctgcacttgagatgcccatggatgtagagatgacttcaaacaatgttgatacctttgattcaactggcaatgattttactgacacctctgctctatgtgaatgggatgacatggatatatttggtgacgaacttgagcacattcttcaacagccagagcaggactttcaagtggaccctcctttaacagttgaggattatggttatgatcatccacggttagagcaggactgtcagatggaagcacaacagaattgcaaaaatcctcaatatgttgcctgtgtcttgaagcaaagggaaagccatgcatctgatgtccattagtactgatcagtttgagctgatgtcataactgaagcatgagccgtggtcccccagaatgttgtccagtaacattagtggatagagatttgtgatgaacagaatcttgagactggcaggttagccaccattgggaacctgaagaccgtcgggattgctcagaattcagtatactaatactaaaaaaaaaatatacagtaacacatgttgactatacatgatttcgttttccttactcgctcgaccaaaggcagccgtacaatatttttacttttgtccaggtgggagcatctaggtctttaaatggtttcggtgattaatggtgatcctagattattatgatttgcagagactataacttaggttatgatagcagtgattgattatgcgtgggttttgtttttgtctcacgtctcattgtcctagctacgcccataacacaaggtatcattcctcatgttgtatataatatcatcgtggatgaatgaaacacttttggacttttttttttgcgtacgagattcttaggcaccgtttgtttttggtcagaatgacttcactgagccttccatagaagacaatattcataactggggaa

SEQ ID NO: 2388 - DNA, 2390 bp, Zea mays
  Clone ID: TF_ZmC10545_1
gcccacgcagcaatctggtcttctggaaatctccatcaatccgattccgaacggcagaaaattttcccttcccccggccaccaaccaaccaaacccgagcaaccagcctgagccacctcccatgcgccgcgccgcagcctgaggaggaggaggaggacgcggtggtctggagagggatggagggcgcgtcctcgctgccgcccttcctgagcaagacgtacgagatggtggacgacccggccacggacgccgtggtggcgtggacgccgctggggaccagcttcgtcgtcgcgaaccaggccgagttctggagggatctgctccccaagtacttcaagcacaacaacttctccagcttcgtgcggcaactgaacacctacgtaagcccccaccgcacagcacgatcattcattttcttcgccccatctccctctctgtccacctgtggttttgatcaatcggggtgcgtggcggcgtgctactgtcagctatgctgttgcccctttgcaaaactccacaagttggcatttatggggcgaatcttgttagccttgtagtagaacaattgtttagggtatcgtcttcggtcgaatgaactgtttccttgttatagcatagcgtgttgacaacttggcgataactttaaattacatgtgtccactatatatctagtatatatgctcaattatcttgttgagatgtttttccttttctaaatccaactagagttagtgtaccttttgacaaatgaagtgctgctaacggtaaacactgttgaattggcatctttgttgacacccaaattaaatccaatagaaaccataatgatttcggatggttacttttgatttatgagccttgatgggtcaaatttctgtgatgttgtgttaatcgttttcctgcttcttcttatgtagggctttaagaaaattgatcctgaacaatgggagtttgcaaatgatgatttcattaggggacaacagcaccgactgaaaaatatacacaggcgtaagcctatattcagccattcatcgcatactcagggttctggaccattaccagataccgaaaggagggattatgaggaggaaatcgaaaggcttaagtgtgacaatgcagctctgacctcagagcttgaaaagaatgcacagaagaaacttgttacagagaaacgaatgcaggatctagaagataagttgatctttttggaggatcggcagaagaatctgatggcgtatgtcagggatattgtacaggcaccaggatctttctctagctttgtgcagcaacctgatcatcacggaaagaaaaggagactaccagtacctatctctctctaccaagattctaatgctaaggggaaccaggttgtgcatgggggcttcatcaccaacccaccagcttgcagggaatcatttgacaagacggaatcttcattgaactcgttggagaatttccttcgggaagcgagtgaagcgttcaatatttcatatgatgatggcctccctggccttcatctgctgtcgttatcacagagctccattcgtccggagaaagtgatccccatgtgccatcacctgtctcaagaatgcatacatcttcggctggtgcgggagattcgctctcttcccgcgatttaacagagtcaactagctgcgctgagagccctcgcctccctcagatccaaccctgtacagattcacgaactaaggtgtctgagatcgatgtcaatcgggagcctgctgtcacagaaactggtccgacaagggaccaacctgccgaggagcctccccacgtagcagctggggtgaacgatggcttctggcagcagttcctcaccgagcagcccggtcctgatgtacaccaggaggcccaatcagaaaggagagatggcgatgatgataagggcgatcagacgaggataggggaccgagaaaatttttggtgggggaagaagaatgttgagcagatgagagagaagctggggcgtctcacctcggtggagaaaacctgactgtatttcttgtagctggaaaaaaaaagttagcacagaaacacatataggacgctggtgcctctgactgacatgtactttgcagtgtatcatatatcttcgccaccagatatgctgactgacatcgacctcgtagtcgtacttcttccacctgtacttttgccgagtttacagtgagatttagttgttgctatactttttttttcttttttcttttgagatggactagtcgctatacttctgttaggagttctgcattcgtacttggttagtagacacttcctggtactgttgtccaacgacgtggttatatatgtagatgatgataatattcacttcgttgttggatagtacaaaaaaaaaaaaaaaaaaaaaa

SEQ ID NO: 2389 - DNA, 568 bp, Zea mays
  Clone ID: TF_LIB5117-035-A1-PF1-F1
ctactcctccgttccttcgtctcgtcgcgtttccgtctctaaattccttgcttctctccacgctacgctatccggaaccttccggaaggttgctttgccaccctcccttccgttccgtccaacggtgtcgtcgggacagatctgcgctgtcggcggcggcgacggcgccatgggcgagcaggccgcggccgtttcctcctgcgagacgcctgctccggcggaggtggggacaggggtcgggcagaggtcgctgcccacgccgttcttgaacaagacgtaccagctggtggatgacccggcggtcgacgatgtcatctcgtggagcgaggacgggtcggcgttcatcgtgtggcgccccgccgagttcgcgcgcgaccttctccccaagtacttcaagcacaataacttctccagcttcgtgcgccagctcaacacctacggatttaggaagattgtgccggacaggtgggagttcgccaacgactgcttccgtcgaggagaaaagcggctgctttgtgacatacatcggcgaaaggtgacgccgacggtgagcccccttcaccccctt

SEQ ID NO: 2390 - DNA, 978 bp, Zea mays
  Clone ID: TF_ZmC476_1
gaacgaacaggacagcgagagaaagcaaagcgagctgctgcttccttatccggttcttcgccgtgagcgctccacagggaacggaacgggaactgggggatcgggatccttacgttgttgtgtgtattatcgagcaagctaagagccatgggcagcgagtgcaagggctacggcgtcggcgtcgccaccagcccgcagcaggagcaggagcaggctggcgccgccgtcgcaccgttcgtggccaagacgttccacatggtgagcgacccggccacggacgccgtcgtgcgctggggtggcgccagcaacaccttccacgtcctcgacccggccaccttctccgactacctgctgccctcctactcacgcgtccgcaacttcgccagcttcgtccggcagctcaacacctacgggttcaggaaggtggacacggaccggtgggagttcgcgcacgagtcgttcctgcggggccaggcgcgcctgctgccgctggtcgtgcgcaagaggaagaaggcgggcgccggcgccggcgccggcggccgggagctgtgcgaggccggggaggaggtgcgcgggaccatccgggccgtgcagcgcctgcgggagcagcagcgcggggtggaggacgagctgcgggccatggaccgccgcctgcgcgccgccgagagccggccggcccagatgatggcgttcctcgccaagctcgccgacgacccgggcctcgtgctgcgcgccatgctcgccaaggaggaggagctggccctgatcgacaaggggtcggaggcgcagccggccaagaggcggcggatcggggctgaagccgtggacctggcgcacagcaggggcgggggcgccgtgccgtttccgttctctgttctcggccaagtgttctactagggtagatacggactggtgtatatatgacttgcactgtattatagctttgcctcggtttcaaaagttactgccttccgtttt

SEQ ID NO: 2391 - DNA, 2346 bp, Zea mays
  Clone ID: TF_ZmC38206_1
tttttctgttttctgttctcgatgttcccgtcgtctttattgaggtgaataaaaaaatcccagatcttcgaacagaaatccagtatagtacttaattcgaactgaaatccagtagtacttcagaaccgcaacactacaaagcttccaccgcatgaaattagacaaacagtttgcacacaaccactgacagaaacatgtataaccatcagtactacttgctgagtcgctgtcactgtacataactacagactgaattcctgacgggcagggtcgtaaaacaaccaacagatcgctggcgtcgcctaaaacagccactccagtggcaagcagcaatcactagtcagatcacatcagatgcacctagcagttctcccttgacaccatggcgaatgccagccaattctcatggaagcaagccctaccattggcgaggaattcagaagggcatggaaaccgagcaacggaagcagaattgcctagtcttgctgacacagtgaacacaattcaggagctgcgggttctggtaagatggaaataacaaaacagcaacgaagccaagactaattgctagatgttgggccatctgagttgagataacccatcttctcagacagcacattcatatcatcctcgattacagggctatcgttctcctcgccaagtccttcgttcagcaactgctcccagaagttgtcattcagatcctcctggggcatgtcttgctgctgctcataggtactgccaatatcaatatcaatatcaatatcatgtggcccaatcaggccgtggccatcgaaagctgggctctcgaggtcagctgggattccgtcgacaaggaattcaactgggtcctgggcattaaacaggaccggtgaaccttgctccaagctgctactagcccccaagtcatcagcttcaggcccttggtcgatgcgccgtcttcttttctttgaaatagcatcttgaagctccttcctcatctcattctgggaaaccaggtgcttcaagaattcaggattccgcatgacacgtgccaagaacgccatcatctgctgctgcttctgttcagtcccttgtagcctatcctccatcgctttgagatttgcctttgtgttctgctgctcctgccttagcttcaccacttctgccatcagtaactgcttgtctctcttcaacatgtcaatctctgcatcatatccaaaatgtcccacctcaaggtaaggcccaatggactgctggtttgtggcattctgagcaggaggttttcgacgcctgatgttcttcaggaggtgtctctgtccccgtaaaaagccctcattcgcgaattcccaccgatcaggatccaccttcctgaaaccataggtgttgagctgccggacgaagctggagaagttgttgtgcttgaagtgcctgggcagcagcaccgtggcgaaggcgtgcggatcccacaccacgaagctgttgttggtggcgctccacgacacaatcaggtcggtgtccgagtcgtcgaccatgtcatatgtcttggtgaggaacggcggcggcccagggtcatgcagaccctccatcggctttggtgccgcggcgacggccgcggacggcccatccgcggcctccaccgtgcctgccatcaaatctcctccctccccatggctctcctccttcacctggttcagcgttgagtccatagccggatcctaccctcctaatccgagtaacgatgctaaaatctctgctctgacaccggaatggaatagtctgttggacaatgtcagtaaaactccgttgtaaaagagcagcaacgagcagctgcccctagcacacggccacacaggagtacaaggcacgcatcgacgttaaggcatacacacacacggcggccggcgcgcatctagcacggggatagggaacatgataaggtgtcatcctggcaagaccacctcaccatgtttacccccacctacagctctgcaagtacaggtagaaagcagccgacaaactgggggccagagcaccacgccagacgccaggggcggagaggaaatcaaagccgccgggtgcctcgtggtggcaccagggcgggatcttcttccctgttgcccggaaccacggcgggggtgggtgagccgtcacgagcgcggggagggtgggtagctcagcagcctactagatgcagtggctctggaatggtgggtagggggatagggtatggatttggctatttcgggaaaggaaggttctggaaggcgaggggacgggggatggggataaagcgtcggggggcggggaccggaactggcgcggcgggagagagacggaggaggaaagggtcgcgatcgcggccgg

SEQ ID NO: 2392 - DNA, 755 bp, Zea mays
  unsure (1)..(755): unsure at all n locations
  Clone ID: TF_LIB5117-051-A1-PF1-F7
ttcctcaatggccgtctctctcctccccgctccccaccgctcctcgctccctcgccgccgctccagccgccgagaggagagatcgatcccttcacggcaggcgctccaccgcaatcttctccattagggccggcgacggaggtacggggaggagggttttggtgtgttcccttggttgggagggttcttggggtttgggtgtatggacccaatgccgactctggtcaaggaggaggaggatggccatgggacaggagaatcgccgggggccacggcggcatcgaggccggtgaaggggctgcgcgatgccaggccgtcgctgttcctgacaaagacgtacgacatggtcgatgaccggagcaccgacgacgtcgtgtcgtggagcgctggcaataacagcctcgtcgtgtgggatctgcaccacttctccacagtgctgctgccgaggcacttcaagcacagcaacttctccagctttgtcaagcagctcaacacctatggtttcagaaaggtggatcctgatcgatgggagtttgccaatgagggttttctacggngacagaggcaccttctgaagaacatcagacgtcgaagacctcccgctaatactgcttcaaatcagcaatctcttggatcataccttgaggtgggacactttgggaaatcatacagataccgaccagctgaaaagggacaagcaactattgatggcagaagtggtgaaagctaaggcagaacagcagagcatgaaaacg

SEQ ID NO: 2393 - DNA, 877 bp, Zea mays
  Clone ID: TF_ZmC12124_3
aattcggcacgaggcctctttcctgcaacaactcctacccacccgacagaaatatcctaagcgctgacccgaatacccgattcgctcctcgtccggtcgattcctgctcctaatcgctcgaatcgagtccttgccccgtgttccgtgccacaatctgggcgcttggctcccgcgagccggggttcttgggcctgggcggaggccatggacaagccggtggcgccgggcattatcaaggaggagctcatggagcagcagccgccgatgcaggacggtgtgggtggcggcggggatgcgccgcgcccgatggaggggctgcacgaggtgggtcccccgcctttcctcaccaagacgttcgacctggtggaggacccggccaccgacgccgtcctctcctggaattcggcacgcaacagcttcatcgtctgggacccgcacgtcttcgccgacgggctgctcccgcgcctcttcaagcacagtaacttctccagcttcgtgcgccagctcaacacctatgtgagtcggcaaaacccaaacccccttctttctttcctttgaaataatccttctcttggtcagggcttgctaatattgatgcgctacgctgctagtagtttggtaatttgcgtttggttgcaattgcaagctgctttattcggcggagagcatccgaatcctctgcaatattacttgtatattaaactagtttgccatgttaggacatgaaaatctgttgtgcacttgttcttcactaaagttttaggtgatgtaacactgttgtgaggcattgttgtgatttggtgcatttttttattgttgattttaggcagcttgttccccaatgagatcgaggatgctgcaactggctaggatatga

SEQ ID NO: 2394 - DNA, 714 bp, Zea mays
  unsure (1)..(714): unsure at all n locations
  Clone ID: TF_LIB4766-021-Q1-K1-C7
ccggccgggaattccttttccaattcccctttcctctcaatcgcatacaccagcggcggcgccgggaccccgaaaaccctctccccgcacaccacggccaacaggaaccactccgctcctccgagccctagccgtcccgggccgggtcgggctcccctacatgacgccggcggcgggcaacggcagcgccaccgccgcgccgccgccaccgttcctcatgaagacctacgaggtggtggacgacccggccacggacgacgtcatatcctggggccccgggaacaacagcttcatcgtctggaacacgcccgagttcgcccgggacctcctgcccaagtacttcaagcacagcaacttctcctccttcgtcaggcagctcaacacctacgggtttagaaaggttgatccagacagatgggaatttgcaaatgagggttttctgagaggacagaagcatctgctgaagactatcaacagaaggaaaccatccttgcaggggaacagccaaccacagcaacctcagtcgcagaacgctcctgtgccttcctgtgtagaggttggtaagtttgggttggaggaagagattgaacggctgaagagggataagaatgttctcatgcaagagcttgtcaggctgagnacagcacagcaaacaactgaccatcagctgcagactttgggcaagcgtcttcaagggatgggagtcacggcagc

SEQ ID NO: 2395 - DNA, 1295 bp, Zea mays
  Clone ID: TF_ZmC2162_4
tccattcccaatttgcgttcccactcccaccaccgcttcttcccgtatcccttgtcctccctaatttcctctcacaaaaagcgggtgcggcttcctgccactcacctcggtctcggggggcgcccgtgctgctggtttcgctccaggggagaaggggcagagggagtagagcaggttaggtccgtttgcgttttcctttgcgggtttgtaggtcaaaagctccgcgagcactttccgctccacctcctcacgctcggaatcaaatcgatgcccccctgatttggttcctggtatcggtgcatgagcttgctccaagagatctcccttttggttcggcgtcaggggttctgtgaggtcacgcggcttcttcctcttggcgctcctcacatgtccgggcgcttcgatctctgcccactgcgcgagtgattctgctgctgcagcagctgttaggtgcgcgcgggccgttatggggtgaaccgaagcgttcctcgcagggctgtgggtttattacgccgcctgtttgcttccccgcaccttgtccttgtgcccatacttctttgcttttgtcacgcctgaaccgtgtcttcttgtagtatctgaggcttggcagttggcaagtacaaactagcaacttgcttaggtataaagtataaaccagtgtctggtgcagagcccaaaggggtcacgaatcgttgatgcatagatctgcttctggctgagataaggctctaagttcgctctgttgatggggcgaccatgaaccacgggaacgggatgttgaattctgtcaaggtggagaggtggccagcagcggtcgctgcaaatggccagcctaggccgatggatgtgctccatgacggcagctcgccgccgttccttaccaagacgtatgacatggttgatgacccaaccacgaacgccgttgtgtcatggagtgccgccaacaatagctttgtagtttgggatcctcatatctttgggacggtgctgctgccaaggtacttcaagcacaacaacttctccagctttgttcggcagctcaatacttatgtaagttgttaactctatagatgctttggtttcatgttctatgatgcggttgaggtgtgctggaatcctactgccttatttgtggagtgaattaccgttaggtactgtttgttttcgtgtttttaaccctgtaagcgattgcaccactataggttgccgttcttttgtgtttgtttctgcggctgcggaaccattcacggagggatgatgcggccgtgtgaaaggtcgttactttccattcaaaa

SEQ ID NO: 2396 - DNA, 819 bp, Zea mays
  Clone ID: TF_LIB4738-034-R1-K1-C9
acgtatgactatggttgatgacccaaccacgaacgccgttgtgtcatggagtgccgccaacaatagctttgtagtttgggatcctcatatctttgggacggtgctgctgccaaggtacttcaagcacaacaacttctccagctttgttcggcagctcaatacttatgttgccgttcttccgtgtttgtttctgcggctgtggaaccatgcacggagggatgatgcggccgtgtgaaagggcttcagaaaggtggatcctgacagatgggaatttgctaatgaggagtttctgagaggtcagaggcacctcctcaaaaacattaggcgtcggaaacctccacactcatctccaaatcaacaatctcttggctcttacctcgaggtaggacactttggatatgaagaagagattgatcagctgaagagggataaacagctcttgatggctgaggtagtgaagctgaggcaggagcaccaaaatactagatcagatctacaggccatggaagagaaattacaagataccgagcagaagcagcagcagatgatggcattcatggcacgcgtcatgcagaaccctgatttcatgcgtcagctgatctcccagcggaagatgaggaaggagctcgaggatgccatctcgaagaagagaaggcgccgcattgaccagggacatgaagctggtagcatgggcactggttctagcctggagcaagggccacagggagtgtttgaaccgcaggagccggtggaatcactcgccaacggtgtgccatctgatctggagagttcgtctgttgaggcgaagggattggaggt

SEQ ID NO: 2397 - DNA, 2135 bp, Zea mays
  Clone ID: TF_ZmC5551_1
tacgcctgcaggtacttctccattcccggcgggccgatacactcctctacgacgcggtatcgccgtatacccgcctcaagtacaaagggaaagctgcgactcgctcggaagtggggtactgtacttcccgctcgctcgctctctgctctggtccttcacgctctaaccttcagttgaggttctctaatcgggcccgctaaagtcgagagacaggttttcgcgaacatttgcatctagccatctctactcaactgaattcttgtgctcttgtggcattcacaaagtccattttcagactgagctagttcagctgtcattttttttttcagccaaaggtcgcgttcttttggacctgctcttgattcgttcgttcgttcgtttggattgattgattgattgattcctttcgacttcccttcaccacccccctgctccgtcaagcgtgcctctgttcttctgccattgctggatcgcgtttgtctgtttgttgggttgctggcgctgcggccatggatcccttccacggcattgtgaaggaggagttcgacttggacttcgacttcacctgcgcgtctgcggcggcggcggcggcggcctcgtgggccgtcgccttgccggagatgccccggccgatggaaggactcggcgaggtgggacccactccgttcctgaccaagacatacgacgtcgtggacgaccccaacaccgacaccatcgtctcttgggggttcgccggaaccagcttcgtcgtctgggacgccaacgccttcgccttggtgatcctcccacgctacttcaagcacagcaacttctccagcttcgtccgccagctcaacacctacgggttcaggaaggttgacccggacaggtgggagttcgcgaacgaggggttccagcgtggccagagggagctcctcaggacgatcaagcgccggcgcccgccgtcgagcccgtcggcgcagcaggggcaggcgccgtcggcctgcctggaggtggggcagttcgggctcgacggcgaggtgcaccggctgcagcgcgacagggggatcctgctcgcggaggtggtgaagctgcggcaggagcagcaggcgacgcgcgcgcagatgcaggccatggagaagcgcatcaccacggcggagcagaagcagcagcagatgacggtgttcctcgcgcgtgccatgaagaacccgagcttcatccggatgctggtcgaccgggagggccttggcggctgccgcagggagctcgaggacgcgctctccagaaagcgccgccgccccatcgagtacctcccgcgcgacggcgagagaagcggcactgccacggagtcggcggtgagcgactacatttccggacttccggtcggcgtcaacggcgtggcggaggcggacgacgacgagagacggtgggagagaaggggcggcggcggcggcggcgaggacacggagagcttctgggcgaagttgctcaacctcggcctggaggagaagcacagggagggcagatgcgatggcgaggaggggaacggagctgacgtggacaacgacgtggacgacgacgtggatgtgctggtgcagagcatctaccacttgaacccgaacccgggtagccccggtggcaagtgaaagttccagaacgttccacattccagaacccactatggtctatggaagtggaagctcccagtgggcatcgcaattagtcgtaggcgatagttttttatccggcgcctgacttcttgtcgcggggctatgcaagttgcaaaagtgcttgcgtttggccggttgccaaggaatgttcgggatgctcgtcgaactacgaagcttctagaagatggagcagcgaggctgcagcctactcgtatattactatcagggagcaggcgagcagcaaggctgcagcctactcgtatatttactatcaatggcgcgggcttcttcgctgcggtttagtccgactacggggtttacagctacggctacaatcaggatgaaacaaaggcacttctcaaatgtgtacctgacgtgtcattcttattcttctgggcggagcaggtagactaaaaaaaacagttgtagctttgtcttttcctgaaaaccaacttttttggtaaagctaaaatcatttcaagtttg

SEQ ID NO: 2398 - DNA, 635 bp, Zea mays
  Clone ID: TF_LIB5074-012-R1-XP1-F10
gccggccgggtcgggataatttccatttaaatattttcgaaaacagccagaaccaaaaccggaataaaaagaaaaatgatgaccgagctagcacccaatactatacaaactgatgaaaacataccctgcttcataagaaaaacttacaagattttagaagatggtaactactcaaatatcatctgttggaacaatgaagggacggctgtagtgatcaggaacccagctgattttgcccaaaatgtgctgcctatctatttcaagcacaataacttaaattcgtttattagacagctcaacatgtacgatttccacaagaagaaaaccccagatggagagcatgtatacttccatgagctattccaaagagacaaaaaacatctattaagaaacatcaaaaggaaaagcacagaatattctggaggaaacacagagaaaaacaaattaggtcaagaactaagccgcacaaaacaagatattgctaccataatcaatgaaaactttcttctaaagcaaataaatcgcgagcatctagcaacaatcaccaacttagaagctcaagctaacgagatcagtctaaagaaccaagctatattaagccaattaatgaaaaaaaaaaaaaaaaaaggccccta

SEQ ID NO: 2399 - DNA, 748 bp, Zea mays
  Clone ID: TF_ZmC142676_2
cgccggcggggaataaactgtgacaaatccaagcccacgcggccgaggagactcccccctccacttgggagttgggatccaccaaccttcacccactcgcagcaccagtcatggaggtcgccggcgcccgcgagcccggtagcggaggaggaggaggtggcggcggtggcggaccagccccgttcctgctgaagacgtacgagatggtggacgacccgtcgggcgacgcggtggtgtcatggagcgacgcatccgacgggagcttcgtcgtctggaaccagcccgagttcgccgcgcggatgctgcctacctacttcaagcacaacaacttctccagcttcatccgccagctcaacacatacggttttcgcaaaatagacccagagcgctgggaatttgctaatgagtactttgtcaagggacagaagcacctgctgaagaatatccacaggaggaaacccatccacagccatagccatcagccaggtgccctgcctgacaatgagcgtgcgttatttgaggatgagattgacaggctttcacgagagaaagctgccctccaggctgacctctggaagttcaatcagcagcagtcaggtgctgtgaaccagttagaagatcttgagcggcgagtgcttgacatggagcagcgacagacgaagatgctcagcttcttgcagcaggctaggaagaatcctcagtttggcaggaagctcgttaagatggcagaggaatccccaatctttgc

SEQ ID NO: 2400 - DNA, 868 bp, Zea mays
  Clone ID: TF_ZmC8681_1
gctcgtaatcctaaccgccctggtttctctacacgctacgggaccggtaacttctagaacccaccaccttccatccttccttcctttcctctctctctctctctcctcgcgcccacggtgcccgccagccagatccgcgcgttcaccggcgccatggccgccgagcatgccaccgccgcggtgggtgagccgcctcccgccacgtcgcagccggcggagggcgtgacggcggcggcgggccagaggtccgtgcccacgccgttcctcagcaagacgtaccagctggtggacgacccggcggtggacgacatcatctcgtggaacgacgacgggtctgccttcatcgtgtggcgcccggcggagttcgcgcgcgatctgttgcccaagtacttcaagcacaacaacttctccagcttcgtgcgccagctcaacacctacgggttcaggaagatcgtgccggacaggtgggagttcgcgaacgactgcttccgccgaggggagaagcggctgctctgcgacatacaccgccggaaggtgtcgccggccacgggggcggtcacggtggccgccgccgccgctgcggccatcccgatggcgctgcccgtgggctctccggtgtactccggcgaggagcaggtgctgtcaagctcgtccccggagcccccgtcgctgcagcagcacccgccggcgccgtccgggtcgggctccggcggggtggtctcgggcgacgtgggcgaggagaacgagcggttgcggcgggagaacgcgcggctggcgcgcgagctcggacagatgaagaagctctgcaacaacatcctcctcctcatgtccaagtacgccgccactcagcagccggacgccgccaagg

SEQ ID NO: 2401 - DNA, 1015 bp, Zea mays
  unsure (1)..(1015): unsure at all n locations
  Clone ID: TF_ZmC142676_1
ttaggtgacaaatccaagcccggccgaggaggagactcccccctccacttgggagttgggatccaccaaccttcacccactcgcagcaggcagcaggcggcagcagcagcacgcgctgccgcagcaccagtcatggaggtcgccggcgcccgcgagcccggtagcggaggaggaggaggtggcggcggtggcggaccagccccgttcctgctgaagacgtacgagatggtggacgacccgtcgagcgacgcggtggtgtcatggagcgacgcatccgacgggagcttcgtcgtctggaaccagcccgagttcgccgcgcggatgctgcctacctacttcaagcacaacaacttctccagcttcatccgccagctcaacacatacggttttcgcaaaatagacccagagcgctgggaatttgctaatgagtactttgtcaagggacagaagcacctgctgaagaatatccacaggaggaaacccatccacagccatagccatcagccaggtgccctgcctgacaatgagcgtgcgttatttgaggatgagattgacaggctttcacgagagaaagctgccctccaggctgacctctggaaattcaatcagcagcagtcaggtgctgtgaaccagttagaagatcttgagcggcgagtgcttgacatggagcagcgacagacgaagatgctcagcttcttgcagcaggctaggaagaatcctcagtttgtcaggaagctcgttaagatggcagaggaatccccaatctttgcggacgcgtttcacaagaagcgaaggctacctgggcttgaatgcatcacggatgctaccggaactgccactagctttttcgatgaccatagcagtagttccaggcaagaaatgggtaaccttctgaatcagcacttctctgacaagctgaagcttggactctgtcctgcaantggcggaaacaacctcatcaccctgagcacccaaagctcacatgaagataacgggagccctcttgggaagcatc

SEQ ID NO: 2402 - DNA, 531 bp, Zea mays
  Clone ID: TF_ZmC2234_2
atcgtccacctcatcaaaccttcgtccacgcttcgactcctgcagggagtgagggagagtgatggagaggtgcgggagctgggactgcgacgcggcggcagcgcagaaggcggtaccggcgccgttcctgaccaagacgtaccagctggtggacgacccggccacggaccacatcgtctcctggggggacgaccgggtctccaccttcgtggtctggcgcccgccggagttcgcgcgcgacatcctccccaactacttcaagcacaacaacttctcctccttcgttcgacagctaaacacctacgggttccggaaggtcgtcccggagcggtgggagttcgggaacgagttcttccggaagggggagaagcagctgctgtgcgagatccaccggcggaagacgtcgacgtccgcggctccgccgtcgcccccgccattcttcgcggcgcctcacttcccgctcttccacccggacgccccgcaccaccaccaccaccaccagttcgtggggggaggagacgacggggctgt

SEQ ID NO: 2403 - DNA, 617 bp, Zea mays
  Clone ID: TF_LIB4743-074-R1-K1-C12
ccggccgggccgcgtggctggcgcctcctggttgccgagcaggccaccaccgctgtggctgtgggcgagccgccggcggcggcagcggctacggggcagaggtccgtgcccacgccgttcctcaccaagacgtaccagctggtggacgacccggcggtggacgacgtcatctcgtggaacgacgacgggtcggccttcatcgtgtggcggccggcggagttcgcgcgcgacctcctgcccaagtacttcaagcacaacaacttctctagcttcgtgcgccagctcaacacctacgggttcaggaagatcgtgccggacaggtgggagttcgcgaacgactgcttccgccgaggggagaagcggctgctctgcgacatacaccgacggaaggtgacgccgccagccgcggcggccacggtggtggcgaccatcccgatggcgctgcccgtggactcgccggtgtactccggcgaggagcaggtgctgtcgtcaagctcgtcccccgagcccccgtcgctgctgcagcagcagccgacgccgtccgcgttggtctccggtgacctgggcgaggagaacgaacggttgtggtgggagaacgcgtggttcgcgcgcgagct

SEQ ID NO: 2404 - DNA, 432 bp, Zea mays
  Clone ID: TF_LIB3356-009-P1-K1-H1
ccagaatctaccagtaccaccttcctctctctctctcactcttcctgcgcgacggtgcaccctagcccgatccgcggcgccgccatggtcgccgagcaggccaccaccactgtggctgtgggcgagccgccaactgccaccccgcagccggcggcggcagcggctgcggggcagaggtccgtgcccacgccgttcctcaccaagacgtaccagctggtggacgacccggcggtggacgacgtcatctcgtggaacgacgacgggtcggccttcatcgtgtggcggccggcggagttcgcgcgcgacctcctgcccaagtacttcaagcacaacaacttctctagtttcgtgcgccagctcaacacctacgggttcaagaagatcgtgccggacaggtgggagttcgcgaacgactgctttcgccgaggggag

SEQ ID NO: 2405 - DNA, 652 bp, Zea mays
  Clone ID: TF_ZmC2234_1
cggcgtccacctcaacaaaccttcgtccacgcttcgactcctgcagggagtgagggagagtgatggagaggtgcgggagctgggactgcgacgcggcggcagcgcagaaggcggtaccggcgccgttcctgaccaagacgtaccagctggtggacgacccggccacggaccacatcgtctcctggggggacgaccgggtctccaccttcgtggtctggcgcccgccggagttcgcgcgcgacatcctccccaactacttcaagcacaacaacttctcctccttcgttcgacagctaaacacctacgtgagtcgccttcgcacttggccttggtttagctaagccttggaggccgcgcggagcgcggacggatggtgaccgccggtgacggcaatgctgcaacgggcaataatgcaggggttccggaaggtcgtcccggagcggtgggagttcgggaacgagttcttccggaagggggagaagcagctgctgtgcgagatccaccggcggaagacgtcgacgtccgcggctccgccgtcgcctccgccattcttcgcggcgcctcacttcccgctcttccacccggacgccccgcaccaccaccaccaccaccagttcgtggggggaggagacgacggggctgtggcggccgc

SEQ ID NO: 2406 - DNA, 857 bp, Zea mays
  unsure (1)..(857): unsure at all n locations
  Clone ID: TF_ZmC3537_1
catctctgagccggtctcccggcagcagcagtccctcgggttgtccacgcggagcgccagccgatgcctcgaggccggccacagtatgtcggttcacccgaagcctataaattcctcgccgccccgcctctcgccgcccatttccttccgccgcctcctaatcctcaacacccgcgcccccaccgcgcccgtcgtatgccaccatgcaccgcgcccgccccaccgcgcacgctaatgaccccgatgctccgtacgccgccgccgcgatgctgctggagcccaaactcgaggacgaggagttgccgctgcagcagctggcgtccccgggcaccttcgtgtccctggaccagctgatgccgccggtgaccgcgccagccgagccgcgcccgctggaggcgctgctgcacggcccgcagctgccgcccttcctgtccaagacgtacgacctggtgaacgagccggcgctggacggggtcatctcctggggcgctgccgggaacagcttcgtcgtgtgggacccctccaccttcgcgcgggacgtgctgccgcacaacttcaagcacaacaatttctccagcttcgtcaggcagctcaacacctatgtgcgtacacacaactcttccgttcctctgtttcttccccctcacaaatccacaatccgtcgctctgttgttggaatgctctgcttcggctcatgccccccctgacccctgttatgctattgatcatcttgggtaccgtacgcctaagtaaaattcccgctgacgtgtagagtgcctacggagatattgctgcggatttgtttttcttttggntggtaattggggttggatcgtgtgagtcatgtataaaactgg

SEQ ID NO: 2407 - DNA, 838 bp, Zea mays
  Clone ID: TF_ZmC10545_2
ttgggtacctcgaggccggccggggcgtcactgcttacctaacccgacccgaccagaaaccaccgcgcactgacgccgcccggctccgtctccggctcccgctcccgctcgaggtcgaggcccacgcagcaatctggtcttctggaaatctccatcaatccgattccgaacggcagaaaattttcccttcccccggccaccaaccaaccaaacccgagcaaccagcctgagccacctcccatgcgccgcgccgcagcctgaggaggaggaggacgcggtggtctggagagggatggagggcgggtcatcgctgccgcccttcctgagcaagacgtacgagatggtggacgacccggccacggacgccgtggtggcgtggacgccgctggggaccagcttcgtcgtcgccaaccaggccgagttctgcagggatctgctccccaagtacttcaagcacaacaacttctccagcttcgtgcggcaactgaacacctacggctttaagaaaattgatcctgaacaatgggagtttgcaaatgatgatttcattaggggacaacagcaccgactgaaaaatatacacaggcgtaagcctatattcagccattcatcgcatactcagggttctggaccattaccagataccgaaaggagggattatgaggaggaaatcgaaaggcttaagtgtgacaatgcagctctgacctcagagcttgaaaagaatgcacagaagaaacttgttacagagaaacgaatgcaggagctagaagataagttgatctttttggaggatcggcagaaaaatctgatggcgtatgtcagggatattggacaggca

SEQ ID NO: 2408 - DNA, 2441 bp, Zea mays
  unsure (1)..(2441): unsure at all n locations
  Clone ID: TF_ZmC12537_1
gtccagaaccttccgagctccgcccggccacgaacgcgncgcgcggcctagaacgttccattcncctctgggcaggcctggagaagggtcaagccggtaggagtatttatcgccgccggcagccactttcccgcgcagcaggagaagagagacgacacagcagcttttttggtttccccttccctttccccgcgcggtgatcgctgggttctccgcgagcgaggcagggcactgcgcgtcctccgcgaccgcctggtgatcgctgggggttctggacgttggcgtttcatttggttggttggtgggtggcagcagccgtggcgagatggagctgatgctgccggtgacggtgaaggaggagtggccgccggaggaggaggaggaggaggaggaggaggaggaggaggacgtggacgcggacgcggacgcggacgcggacgctccgcggccgatggaggggctgcacgaggtcgggccaccgccgttcctgaccaagacgttcgacctggtggccgacccggccaccgacgaggtcatctcctggggccgcgccggcaacagcttcgtggtctgggatccccacgtgttcgccgccgtgctgctccccaggttctttaagcacaacaacttctccagctttgtccgccagctgaacacctatgtgagtgccccaagtactctgcttgctcagttgctgtcgtgtgaatttttgtttctggttggctttgtgctcgcgcgctgctctggttctgcagttcatctcgcctcttgcattggggagtacagtagcatgagcgatcagtcgacaagtctgtctctattattacttaccgaaagaacaagtctgtatatatataagcattttgtgtgattcacaatgacttggagctgatacaatcgttgaacgcgtattgctttttctttggcggcctagcaaatacaatggcaaaaatggccaaatgttttgaatggttcagaagcagaacgacaatgggggagattgcagaaccagcatctccatgacaagatgttaaattcctctgacatgctctttgttcgccttgttactgtgtagctagatggaccaggacaagggatgaacgaagctactacagcctacgagaaagaaacaaactgcttgtttgtcctaaagataaagaagactcactcctttgatcaccactcaccaccaagcaatatactgctagtgtataccactgcccgtgcctgtaaattcggtcgcaaaacttatgtgaaacctcaagttttacataaatttgccatcttgtcttgttaattggctcagcgcctcagcgtcggcatttgtcgattcttagtgtgtgatggcttctggaaatgcagcttactgaacgctgcgcgtgttcatcgctttgcgacgtgcagggcttcagaaagatcgacccggacagctgggagttcgcgaacgaaggattcctgaggggccagaggcatcttctccggctgatcaagcgtcggaggccggcgccgccgccgccgtacctccaggcgtcgcagtcgcaggggtcgtgcctggaggtgggccggttcggggggctggacggagagatggagcggctgaggcgcgacaaaagcatcctgctggcggaggtggtgaagctgcggcaggagcagcagagcacgcgggcggacatgcgggccatggaggagcggctgcggcacgcggagcacaagcaggtgcagatgatggggttcctggcgcgggcggtgcagagcccggacttgttccagctgctggcccagcagcagggcaggcggagggagctggagggcgcggcgctgctctccgccgcctcccggaagcggaggcggcccatcggcgccgcgccggccaacggcggcttgcagcagcaggaggaggagcagcagcagggcgacgacgacgaccccaccgccacgcgggcgctgttcgcggagctggacgagcgagggaccacgtcggagctggagaacctggcgctcaacatccaggggctcggcaagcgcaggcaggacgggagcgagaagcagggtggccgcgcgcggagccagcagcagggcgggttcgagacggcggagctcaccgacgacttttgggaggagctgctgaacgaagggatgaagggcggtgccgaggctgagacgctgccgccggagaggagacgaccggcttggtacgtcgacgcgctggcgcagaagttgagctccatgagcaataacaccacggcgaagtagagatgatctcgttaattaatcctatacgactagtaacagtagcttaattgtccctccgacaggggtcagtgaattctcttagcgatagctccattgttgtagattgtagtatataggagtgggatcgtgatggttacactgtgtcattttgtgcagagtgcagacgtgtagtgtatagtattcttggt

SEQ ID NO: 2409 - DNA, 581 bp, Zea mays
  Clone ID: TF_ZmC11401_1
ggccggaaaaattttctaatccgcaaacgaagcttccagaaggcttcttcttgcgtaccttccacttccacccaacgcgactcgctctttccgcgtgggggaagtcgccggctcagatccagccgggctgcggcgctggccggatggccgagcagggcggcgcagccggggaggccgctggcagcgacccccctgcgcctgcgcctgcgactgccccggcgccagccccagcgcttgctgcggacgcggccgggcagaggtccctgccgacgccgttcctgaccaagacgtaccagctggtggacgacccggcggtggacgacgtgatctcgtggaacgaggacggctcgacgttcgtggtgtggcggccggcggagtttgcgcgcgacctcctccccaagtatttcaagcacaataacttctccagctttgtgcggcagctcaacacctacggatttaggaagatggtgcccgaccggtgggagttcgccaacgacttcttccgccgtggggagaagcgcctgctttgcgacatacaccgacggaaggtagcaccggctccggcggcggggctggccact

SEQ ID NO: 2410 - DNA, 1541 bp, Zea mays
  Clone ID: TF_ZmC1964_1
gttactagctagcttatattgcatatctcctccccagctcctccgtcctcgctagctcgtcttcttcttcttcctctcatcttttgcttgtcctccattattccatcgatctcctattcctgtgccgaccgaggccgccatcgtcaaagagaaacacagagcgggtcggggactccctcgggggaggctgctagtgctagctagctcgaccatatacagtttgtgggcgcggccggccgggcaagctgctaaggtaccagcataccacccatccatggctttcctggtggagcggtgcggcgagatggtggtgtcgatggagagcccgcacgcgaagccggtgccggcgccgtttctgaccaagaagtaccagctggtggacgacccctgcaccgaccacatcgtgtcgtggggcgacgacgacaccaccttcgtcgtgtggcgcccgcccgagttcgcccgcgacctcctcccaaactacttcaagcacaacaacttctccagcttcgtcaggcagctcaacacctatggcttcaggaagctagtgggcggacaggtgggagttcgccaacgagttcttcaggaagggcgccaagcacctcctcgcagagatccaccggaggaagtcgtcgcagccgctgccgacgccgctgccgccgcaccagccctaccaccaccaccaccaccacctccaccaccacctcagcccgttctccccgccgccgctggcacagccggtgccgtcgtaccaccaccacttccaagaagagcccatcgccaccgccaccgcgccgcacggcggtgctcaagccgccgccggcggcggcaacaatgaaggcagcggcgccggcgccggcgccggcggggactttctggccgcgctgtcggaggacaaccggcagctgcggcggcgcaactcgctgctgctgtcggagctggcgcacatgaagaagctctacaacgacatcatctacttcctgcagaaccacgtggccccggtgacgagcccctcgtcggcggcgcacgcgtccctgcccagcgccggcggcggcggcgccgcggcgtcctcctgcaggctaatggagctggacccggcggactccccatccccgccgcggcggccggaggcggacgacggcacggacacggacacggtgaagctgttcggcgtggccctgcagggcaagaagaagaagcgggcgcaccaggaggatggggacgacggcaaccatgagcagggaagcagcgacgtctagccgccggccggcttgcattgctagctctctcgttcgtgtacatacagagatcagatcagagagtagtagtttgcctcgctagctagctaggctaggctttggtaattttcttctgagtgcgtactgaaattaatgtgcaagagcgaagtgtttgtctgagtaaaactaacaacaatctacggatgcgtgcatggaagctaagctatagatgcagaggcttgcaccaccttctcaattcgcaatcgcaacaagttcttcctcgccgcggatgggaatacggaatgg

SEQ ID NO: 2411 - DNA, 1913 bp, Zea mays
  unsure (1)..(1913): unsure at all n locations
  Clone ID: TF_ZmC12124_1
ccggccgggccgggcccttcccccgatttcaccgaccattttccccattttacagcggcgaatatctctcatctcccccgtcctctttgctgcaacacctcctacccacccgacagaaatatcctaagcgccgacccgaatacccgattcgctcctcgtccggtcgattcctgctcctaatcgctcgaatcgagtccttgccccgtgttccgtgccacaatctgggcgcttggctcccgcgagccggggttcttgggcctgggcggaggccatggacaagccggtggcgccgggcattatcaaggaggagctcctggagcagcagccgccgacgcaggacggtgtgggtggcggcggggatgcgccgcgcccgatggaggggctgcacgaggtgggtcccccgcctttcctcaccaagacgttcgaccttgtggaggacccggccaccgacgccgtcctctcctggagccgcgccggcaacagcttcatcgtctgggacccgcacgtcttcgccgacgggctgctcccgcgcctcttcaagcacagtaacttctccagcttcgtgcgccagctcaacacctatggcttcagaaaggttgatcctgacaggtgggagtttgcaaatgaaggtttcctcagaggtcaaaggcacctgctgaagatgataaagagaaggaagccaccatcagctgtggcaccattgcgacagcaacgtgcccctgcttcttgcctggaggttggtgagtttggatttgaggaggagattgataggctgaagcgtgacaagaacattttaatcacagaagtagtaaaactaaggcaggagcagcaaagtactaaagatcatgtgagagccatggaggaaaggctacgagtggctgaacagaagcaggtacagatgatggggttcttggcaagagcaatgcggaacccagagttcttccagcagttggcccagcagcaagacaagaggaaggagctcgaggataccatctcaaagaaaagaaggcggcccattgacaacacaccattctacagtgatggggaaagcgaacagcttgattcacagttgaaaatgttcgagtcaggtgttctcaatgggctcaatgaacctgagctggagaatttagcagtgaacattcaggagcttgggaagggaagcatagatgatgggaacttgactcaagttagtgaccagtcagagctgaacgacgacttctgggcagagcttttggtcgaagattttggagacaaggcaggacagccagagttggagggaagaactgaagacgtgaatgaccttgctcaacaactggggtatctgagttcttctagcccaaaatagagccagttcctaatggttgcccccacaatcactggtgctttccctaccctactgttgcagaccatcctgatcaaaccggaatgatgatggatctggcagacaagttgactggtggtggagaggtgttcatactgaaggcgtgctgtggagaggtcactgccttgacgttgaaggcttagcgctgtactctgctgtgggagttacgtgtggggtgttggctaaatgtctcttccggcgtcttctggcaaaatgatctcgtggacggtgactggcaaagatgcctaggggccaacgtatacgtacacagctgttatcagatcttgttcaaagtcattgcgcggttttgacggtgctatgtatcgatcagggttctggccttctggggttgggttgtagaattgactggctgatctagtgttctccatgtatgactggtgtaaccttaaaacaccctcagcttgttgttgaactgtgacaagcatcttttttttttgttgtactccattttcatcatcattgtacatcaaattgctgaattatgaacagattnnggataatttggccgact

SEQ ID NO: 2412 - DNA, 553 bp, Zea mays
  unsure (1)..(553): unsure at all n locations
  Clone ID: TF_ZmC363424_1
cganagagggagttcgccaagacgacttcatcaggggacacaagcaccttctgaaacgcatccaccggcgcaaaccggtgcacagccactcgctgcgcacccaagcgagcgggccgctagcggagtcccagaggcgcgagctcgaggacgagatcagcaggctcaggtacgagaagagcctgctcctggcggacctccagaggcagaaccagcagcagcgcgggatcagctggcagatgcagtcgctggagagcaggctggcgcagatggaggagcgccagaggagcgtcgtggcctccctgtgcgacatcctgcggaggcgcggggtcgttcgtgttccggcctccgcgatggagacgacggaccactccagcaagaagaggagggttccgattccgaagaccgatctcttcgtcgccggcgaacagcccaaggtcgaagagcagcaggtgctgccgttcctgcaggcggtgggcgcagaagcgccaggcgtgtcgacgatccgcgttttggatgccgagccgtttgagaagatggagctggccttggtgta

SEQ ID NO: 2413 - DNA, 2212 bp, Zea mays
  Clone ID: TF_ZmC3627_1
cacaggtggcgggcgggcggggcgcgaagtttccattcccctttcctctcgatcgcatacaccagcggcggcgccgggaccccgaaaaccctctccccgcacaccacggccaacaggaaccactccgctcctccgagccctagccgtcccgggccgggtcgggctcccctacatgacgccggcgtgaggcaagtgcttagtggatcgcgctggtgggaggatgcagggcggtgtcatggcccatgccgccgccgccgcggcggccgcgtcgacggtgaccacggcggtggcgcccccagtcacggcgcacgcggtggcggtggcgcccccggtcacggcgcacgctgcggcggcggcgggcaacggcagcgccaccgccgcgccgccgccaccgttcctcatgaagacctacgaggtggtggacgacccggccacggacgacgtcatatcctggggccccgggaacaacagcttcatcgtctggaacacgcccgagttcgcccgggacctcctgcccaagtacttcaagcacagcaacttctcctccttcgtcaggcagctcaacacctacgggtttagaaaggttgatccagacagatgggaatttgcaaatgagggttttctgagaggacagaagcatctgctgaagactatcaacagaaggaaaccatccttgcaggggaacagccaaccacagcaacctcagtcgcagaacgctcctgtgccttcctgtgtagaggttggtaagtttgggttggaggaagagattgaacggctgaagagggataagaatgttcttatgcaagagcttgtcaggctgagacagcaacagcaaacaactgaccatcagctgcagactttgggcaagcgtcttcaagggatggagtcacggcagcaacagatgatgtctttcctggctaaagcaatgcaaagtcctggtttcctagcgcagtttgtacagcaaaatgagaagagcagaagaagaatagtagcggcgaacaagaaaaggcggctgcccaggcaagatggtggcctagactccgaaagtgctgctgcttcgttggacggtcaaatcatcaagtatcagcctctgatcaacgaagcagccaaagcaatgctaaggaagatactaaagctagattcttcgcataggttggaatctatgggcaattcagagaatggcaattttctgctggagaattatatgccaggcgctcaagcctttgagagctcttcgtcaacaagaaactctggggtcaccctttcagaggtttcagctaacccaggtttgccgtatggcggcggcggcggcacgagctctgggctgtcagccatctgccctcctgaaatccagtgcccagttgtgatggacaacatgtcgtctaaccaagtgcccagcatgagtgctgtgcctcctgtttcgaaggctacaattgacatgggtattcctgaattctcagctctggcagacttggtgaatgaaggctccgtcgatatccctggaggggcctttgagatgcctggtcctgagtttcctctgccagaaggcgatgacagtgtccccatcgagaccgatgagaccatgtacaacaacaacgacgagactcagagccttccaggcatcatcgactccttctgggagcagttcctggtaggcagccctctctctgccgataacgatgaagttgattcggggtcgccacaggagaacggatggagcaaagtggggaacatcggtgatcttacagaacagatgggccttctgtcatcaacaaatcaccgcgactcagggaatgggctgtagtgtatcttaattaatatacggtagactgggattatcggtaataagcgtcgcctgcagtttttgttatttttccttttggccaaaaaatgatatgccggtatatcaaccactcgctcgacctatatgcgcgggaggggcagtcttccagctgagctctgaatgccacagccacctgcttgtatcaatctatgatgttggcagtcttgagaacaccactgtgacttgttaaatctgtatgcttattcccactctagttgctgatattgtttagtttgttatattggtgcggaaacacgggggttgtttagcaacaaagtacaacacgttgcttcattacaattcgattctgtacaattccatactccaaccaatatttttccagcaaggggatcaaaaaaaaaaaaaaaa

SEQ ID NO: 2414 - DNA, 1756 bp, Zea mays
  unsure (1)..(1756): unsure at all n locations
  Clone ID: TF_ZmC3627_2
cctctccccgcgcaccacggccaacagnaaccactccgctcctcgccgtaccgggccgggccgggctcccctacatgacgccaccgttcctcatgaagacctacgaggtggtggacgacccggccacggacgacgtcatatcctggggccccgggaacaacagcttcatcgtctggaacacgcccgagttcgcccgggacctcctgcccaagtacttcaagcacagcaacttctcctccttcgtcaggcagctcaacacctacgggtttagaaaggttgatccagacagatgggaatttgcgaatgagggttttctgagaggacagaagcatctgctgaagactatcaacagaaggaaaccatctttgcaggggaacagccaaccacagcaacctcagtcgcagaacgctcctgtgccttcctgtgtagaggttggtaagtttgggttggaggaagagattgaacggctgaaaagggacaagaatgttcttatgcaagagcttgtaaggctgagacagcaacagcaaacaactgaccatcagctccagactttgggcaagcgtcttcaagggatggagtcacggcagcaacagatgatgtctttcctggccaaagcaatgcaaagtcctggtttcctagcacagtttgtacagcgaaatgagaacagcaggaggagaatagtagctgcgaacaagaaaaggcggctgcccaagcaagatggtggactcgagtccgaaagttctgctgcttcgttagacggtcaaattatcaagtatcagccttcgatcaacgaagcagccaaagcaatgctaaggaagatcctaaacgtagattcttcgcatatgtttgaatctatgggcaattcagataatagtaataataataataataatctgctggaggattatatgccggccggccaagcttttgagagctcttcgtcgacaagaaattctggggtcacccttgcagaggttccagcaaactcaggcttggcgtatgtcggcacgagctcggctatctgttctcctccagcggcccctgaaatgcagtgcccagtggtgctggataacaaggcgtacaagcaagtggccagcatgagtgctgtgcctcctgtttcaagtgacatgggtattattccggaattctcagatctggcagacttggtctctgtggatattcttggaggggcctttgagatgatgcctggtcctgagttccccctgccagaagaaggtgatgatgggaccaccatgtacaacaacaacgacgaggaggctcagagccttccaggcatcatcaactccatctgggagcagttcctggtaggcagccctctatctaccgataatgaggaagttgattcagcaggcggactatatgcgcaggaggatggatggagcaaagtggggaacatcgctaatcttacagaacagatgggacttgtatcatcaacaaatcaccgggactcagggaatgggctgtactagtatcttaattaatacagtagactgaggattctggtaataagtgttgcatgctcttttcttatttaattattttcccccttttcgccaactcaatatgggaggtggggggtgaggagattcaaaggcatgtttggctcgttacctaagttgacacactttgccaaacttacttttatgactaaggttagttatttaatttggacgactaactttagacaagtgtgacacatttagccacaacccaacagaccctctgtctttcagac

SEQ ID NO: 2415 - DNA, 627 bp, Zea mays
  unsure (1)..(627): unsure at all n locations
  Clone ID: TF_LIB4185-044-R1-K1-H6
aagaaagctaacatatttcctttttttttttccaacaaaaaccaatttacaaatttggggggggacagcacaaaaagagcattgggtcccccccccaaagtttttacagatcccgggctttcccaaaagcagggttcaactcggaggaagagggacgggaatcaatttacctagcgggggggggggattaaactgacaaaggggttgagctggcggacaaaactggaaaaattgttgggcttaaagggcccggggagcaccgtttggaaaaaaacaaaggggtcggcaaaaacaaaactgttgttgccgttgccccagccgatcaccccgtggcgggccccgggggtgccccccccccccccggggggggggggggtttttcccaaaaaaaaaggggggggggggaaggattttcttcccgccgggttaacaaaaagggggggggggggtgggggcgccccccccccccgngagggcgggggggggaggggggtttattaaacccccccccccccccccggcgcgttttatcccccgggggggggggggctttttttttttttaatcccccccccccccccggggggggaccctcatcttcttttttttttttataaatctgggggg

SEQ ID NO: 2416 - DNA, 633 bp, Zea mays
  Clone ID: TF_LIB5116-017-A1-PF1-D3
ggttatttgtttagccatgtcctcctgtcacgcacgctgcccataattagtaaccatagcctaattgggcggcgcccggcccctctctgcaagcaaccacacctgcctgcctgcctgccttttgagggactttgacgtgtgcgggtgagttagagtagagggagcgaactcccagtgcctgaggcaagtacgcaggaggtacatagataggagcaggatggacggcctccacacggagctggcgctggggctgatcgggtgcggccatggcgacctccagacggcgccgttcgtggccaagacgtaccagatggtgtgcgaccctaggacggacgcgctcgtcaggtgggggaagggcaacaacagcttcctcgtcaccgacgtcgccggcttctcgcagctcctcctcccctgcttcttcaagcacggcaacttctccagcttcgtccgccagctcaacacatatggcttccggaaggtgcacccggaccgatgggagttcgcgcacgagtcgttcctgcgcggccagacgcacctgctgccgcgcatcgtgcgccgcaagaagcgcggcgagggccggtgctggcgcctcgtgctcgtctgcagtcggcggcggcgagcagcaccagcacg

SEQ ID NO: 2417 - DNA, 573 bp, Zea mays
  Clone ID: TF_LIB4315-023-R1-N1-F11
gaaaacttatgtacattgggattaatataaacaataaaaagacttcaagagatctttggaagaaggaaaaaaatacatccataaaaagaaccgataccagcctccgactacaactccacaccatcatattctacttataaaagagcttttcatattctactatataatacctgaaacctttttatgttttactttataatatctattaattattattagatagataataagggtgatggaagatgctaattatctaagtggccaacaaaatacttcaaaaattgcatttttaatatcttatcttaaacccatcatcccattttgctctccagtctccaccaatcgacccccatcctgctcggcttgcagcaaaagggttgttggttattttgtttgtttaagagttcccagcgctggacaatgaaggatttgatgcagacttggcgtcctttgcatctgatccttccccaacaactgctttttcctcgctcctacagcttaaaggccccgggttcatcttcctcacttcctctttcgggtatatgaagattttgcgaaccatgcaacaaaact

SEQ ID NO: 2418 - DNA, 518 bp, Zea mays
  Clone ID: TF_UC-ZMROMO17026D01_FLI
cgaaaccgcctgtaaaaatatatcgtccccgcaggctttgagcctttttgtactagtgattgtattgtatgattagttgctgatgctatggagtaccaccaacgagttcctcacgagaagcctgcacatgttctcacctatgaagaccgggatggagactggatgatggttggggatgtaccgtgggagctcttccttggaagtgtgaagaaacttaggatttgcaagaacagataaatgctagttagcaaagcttattattcgtgcgctgcatggactctatttctttcttctttttatttatatcggttcatacagaaagattttgctggccacagagtggacatgcatgtgataccgaggctatatatactgaccgtgtacagtatacggaagaaaagtcaatcttgataccatccctagaaaattaaattttggtatttttatatgtttcccttttctgttttctctgagtgcctagcttgtaaataccatatatgcatggctatttgttaaag

SEQ ID NO: 2419 - DNA, 662 bp, Zea mays
  unsure (1)..(662): unsure at all n locations
  Clone ID: TF_ZmC12865_5
tttattctccttaaacactcgtntgtgatccctgagatgaattattcacattttttctttcttttttattgcttaactatctattgatgcatcaggcatttactagttttttccgcgtccgtgctcgttggtgatctcttgttcaccacattttgccggaaacttaggatcatgagaggctctgatgctgctggcatggctcctccaagaccaccggaacagacagttcggaacaaatgagggcggacagcttacttacctggcgctgaactgaagggagagcgacgctgccttggtcaggccttctttcacttgtgcagtgggatctgcgtcctgctgtctcggacgcccattttgcccacgagctggtcgtcacgtgctgtcgctttttgtctgggaaagatagcgtactgcttgctgtatgatactttcatctgtgttcggaagtttgtagcgcttcatatcctggaagggagtaaagaaaatgtccatgctgtccggtgagaatttctttccccgtgctgtgtctgcgagtcaaactaactattgagcgatatgagcatgcattggcatcagtttacctgccataaacctgaaaaaatactaaaaatgaagaaaagaaaagcaaaaaaataaaggggcggccgccgactagggagctc

SEQ ID NO: 2420 - DNA, 506 bp, Zea mays
  unsure (1)..(506): unsure at all n locations
  Clone ID: TF_LIB4303-018-R1-M1-C3
gcccgacgggcactctcaagcaacggcgagacgcggtccctgactacgaacgattgaggaatctcagcaagagctatatcatttttgatcgcaccagcgtcaggcgatgatgatatcgggttcaacgtacataaattcgtagatcagtgatatccaattcttagacagaaatcttcggggctccagctcactgttcaacatcggacgcgaacatacaccaaggtgcacaagcgccgcgctgcgcgaagagctaacgacacagacagacaaaacgcttacnatgaattgaancatgatnttgaccgtntgtttggaattgaggggcatctcatcaaccaaaacagacctggctggaaactggtttacgatgatcactatgtggatgtcccattagttgttgattacccatgcgaggacttcttgaactgcgcgcggtgcatcaggattctttctccgcacgacgagaggcatcatgatgctgnccatcgactacggagacagctttc

SEQ ID NO: 2421 - DNA, 567 bp, Zea mays
  unsure (1)..(567): unsure at all n locations
  Clone ID: TF_LIB3632-008-Q1-K6-C5
cggncgcgtgggccgtgtcctcttcctcccccgcggcaggtgcaggtaccgcggcgccaagcaagagggccaaggcggatgcggcgcccaactcgccagggacggtcgcgtctggccacccacagagcagctttggagtggtgggatggccacccataagaactttcaggatgaacagcctatttaaccaggccaaagagaatgcatcggaggctggcgccaagaagcccatcgtcgaacctgacatgcaggaagacaaggaggagagcaagaaaggccggaccgtcggttgggtgaaggtgaacatggaaggagatatcattggaaggaaggtcgatctcaatgcccatcgctcttacaagacccttgcctcagcacttgagctcatgttcatgaagccgtccattggtctttgcacttctagtaagtcatatagtctgatcttttactttcactatatatatagatataacccagttgcatacttggctatacacttaggacacgacactgtactagatatagtttcataagtctgcgaggatgttttttctgctctcatttctg

SEQ ID NO: 2422 - DNA, 418 bp, Zea mays
  Clone ID: TF_LIB5116-066-A1-PF1-A4
gttcaccgaggcttgccggaggatcagggtcatgaaaagttcagatgtagttgggcttggagttacaagggcaggggttaagtccaagaataagaactaaaacggtcgctgcccacggtttgaagacgaggtcgcacatgccgtctgtactactgcatggttttcctatcccacaagtaaaatcacccgttactctaccgtttaagatttgcgacatctcctagagacttatgctctatattttgttgtgcccacgttgttgtacgcgtgttatttccatccgtgtaaatggttggtaagcagtgcgagagctactgctgtgtttgatgactcctatgtattttgccactcttgtcctgaaccggtcgttcgtcgtaaatgtgaaggttgcaagactattatttaaaaaaaaaaaaga

SEQ ID NO: 2423 - DNA, 506 bp, Zea mays
  Clone ID: TF_ZmC784_7
cggggttactctctctctctctctctttcggatggcgcgccgtacctcaggaagatcgacctcaagacttacaagaactacaaggacctgtcgaccgcgcttgagaagatgttcagtggcttcagtactggtgagatgtctcggggttactctctctctctctctctttcggatggcgcgtcagtgagtaattatgtttcgttttgatgtggatggtgttagaagtacatcaagaagcctttaaaaagcagcatactcctacttgattcctaggataagcaatagcttgaacttaccccgttatattttgagtaattgtaagattacaaacaatctggcaccccttgttttgttaatttttgggtgaactttttattcctcccaaaacaaataccctggtgattgttcagttattgcatccgtatcaagtctctcttagaaagatgttgtttcctgtaaggcaaaaaaaaaaaaagaagaaaaaaaaataaaaactcggggggccc

SEQ ID NO: 2424 - DNA, 449 bp, Zea mays
  Clone ID: TF_ZmC435820_1
atgtgttgttttgtttcttttttttctttttttttttttgtttcatagctcgcaaagctaaggcttgtttctgccctgaacttctatccatcgaatggaggcgaacgaagcgcccaacgaggatctcgggggtcatcagggggaaaacaaacccttcagccccgtacctaccctggggctgaagacccctaacctgctgctgctgctggtgcgggggccctatcttgctggtaatcccccccccaccgaaccgacggccccgaccccggggctaaggcttctcaactcctgcctgctgacggagacggcacagttgctaccaaacctccgcgcgggggccgagctcaggagctccagggggtgtttccccatctgttttactttgtgccccgagaggatttttatgcaggacaccgagctccctttttcttgccaggggtcgtcacccc

SEQ ID NO: 2425 - DNA, 686 bp, Zea mays
  Clone ID: TF_LIB5025-034-A1-XP1-E4
gcaggttgcaccctaacaaactcggctagccatcgggagaggaaagcgctctcacttccccatccttcctccgtccacaccgcagccactacagatagatacgccatcccacgaggtcaactcaagtcccctttccttctccaccacgatgagcggcggcgctgccagcggcagcggcagcggcggcgcgagcttccagcagcacgcgaagcggcggcggccgcccgctgggccgcagcggctgacgctgtcggtgcaggacgccgacgccgacgacgcggccgcggccgtggtcccgcccgtcaccgtggtcctggacgggcgctgcatctgccaccgcgtccacctcaaccgccacacggggtaccgcagcctggcaggcacgctccgccgcatgttcgtcgactccgacgacgactccgaccagcagcagcagcagcagcggcggcgcgccgaggacgacctcgacctcgccaatgccgtcccgggccacgtcgtcgcgtacgaggacatggaggacgacctcctcctcgccggcgatctcaagtggaactcgatcgatttactctctcgatggtgtgcatgattgcatcgcagcgattttgttcgcgtcgccaaaaggatccgtatcatccctgccaagaagacgacgtcgtcgtcaagccgcggcaacaaatgcggaggag

SEQ ID NO: 2426 - DNA, 677 bp, Zea mays
  Clone ID: TF_LIB4171-041-R1-K1-C3
cccccctcgagtttttttattacctttttttttttttttttttttttttttttttttttttttttttttttttttttttttttttttaaacacccttctttggacctttatttagagggacaacaaacagcccctgggaccctgttttttgcaaactagggaaaggggggctcaatcgtagccccaaccctttttggcccaaaccatttacccctcgaacaaagggttaacaacaaaaaaaaagggggggttttttttttgccccaaaacaatgttgaaaaactaacattgacaaacggggggttttttacttgcgaaacaaaaaaaacatgggggccaaaccataagggaaaattttttttaaaactggaaaacgttttccggcttccacaaaaacccctacaggcccgggatatcccccttttgctctggacgggaaaaaacaccccttctagtggcaatttttggacttaaaacccgcccttggagcaagcccaatggcattggaccctttcaagaacccgaccctggggaaaaagtcaacaaacatctcccaggggacatcgccaacaagcatccaatctccatccttggcctcggaaggaaaaacattttccccctccttgggggactcaaaaaacccatccttgccagtactgaacccactgaacattttt

SEQ ID NO: 2427 - DNA, 417 bp, Zea mays
  Clone ID: TF_jC-zmX700440508a1
gtaagctcggaattcggctcgagatcggcaccggtgtatttattgcaacctgtgcaaatcgagtgcgggggggatgcatgaatcagcaggggtggaactggaacggtgaacattcaccacgccccgtacagtgcaaaagatatccaaagcacggcccagggtgctttaacacggagctggacaacggctcataagcatggagtcctacttggcatgggagaggacctttgtaaatctaccgactacggtgaacttcaatcagagctggacaagatgcttgacttctagggtgaattggtatctcgctatcaaaactgggagatggtctataccgaccaccagggcgatatgatgctcgagggagacgacccgcgggaagatgactgcaacataactcgcaagagctacatctacacg

SEQ ID NO: 2428 - DNA, 506 bp, Zea mays
  unsure (1)..(506): unsure at all n locations
  Clone ID: TF_LIB3912-054-Q6-N6-B5
agcaccaggagaagcaccatctacaaactgggtaccggggggcttttacccggaggcatacacacaaaattacctacctactacacaccactgaaacacacccctttctcgttcttccggtcactctgacacgtggccttttgtctgcttcaccactttcaaaagggctgcaagaagtgaaacacacacaagattagcttagggtcagtagttcttccgtgcagccaaggctagacattgctgctgaagctgcctcactgactggacaagttagcgcggttctcaaaatcgacagccgaagtcgaggggccgctccggggctctttggaagccagccctcttcccagcgagtcagacaggcagtcttcgagcctcgcgtttagggcgcctgggttcatcctctccacttcctcccttgtgtagatgaagatcttgtggaccatgtcacagaactcattccnaggggtcgtcgccgaccagcatcatgtcgccttcgttgtcagtgt

SEQ ID NO: 2429 - DNA, 1891 bp, Zea mays
  Clone ID: TF_ZmC9734_1
ggacaggtcgcctgggatgagccggacctgttacagaacgtgaagagggaagaagctgtgcgtcccactgtacccggagcttccgctggagggccagttcccggcgccgatgttccacggaagccccctcctcggccgtggcggcgccggtggcccgatgtgctacttcccggacggcactcctgcaggcatacagggagccaggcatgctcaattcggcatatccttatcagatctccacctgaacaagctgcagccgggcctgtcaccgcacgggctccaccgccagctcgaccacggcgtgcaggtgcaggtgcagcagccgaggatcgccgccgggctcatcgtcggcggccacccggcggcccgagacgacgtctcgtgtctgctcaccatcggcaccccaaagagcaagaagccaccgtcagacgtcaagaaggcgtccacggcggcggcaccgcagctgatgctcttcgggaaagcgatcctcaccgagcagcagatatcgctaggcggcggcaatgtcgtgccggcgctgctggcgaagaagagcccctccgacgacgacgacgacgtggccgagaggacggtgagcaactcggacgtgtcgagccctgggaggagcaaccaggacggcacgtccagtggcggaggcccggcggcgcgggcgtgctggcaggaggaggagtgcaacaacagggcggcaggttctgaggacgacctcctcgggcactgcaaggtgttcatgcagtcggaggacgtcgggcgcacgctggacctctccgccgtcgcgtcgtacgaggagctctaccagaggctcgccgacatgttcggcgtcgacaaggccgagctgaccagccacgtgttctaccgcgacgacgcttccggagcgctcaagcaccctggcgacgagcctttcagtgagttcaccaagaccgcccggaggctgaccatactgacggacgagagcagcgacagcttagcgaggtagagtccagtctcaaggagacggcggttcggcagtttcggttgggagtgggaggcgccccggaacgggagcgcgtgcgtgcgtctgatccaggaccaaagatttgtcggactagtagctctacagtagtggagtacgtacgtacaccttgatgctgctgcttctgctgtcagttcaagtggccataaccataatgcagctgcctttggtcacagtgactgatcggatgtgttgtgtacatcggaccgttgatttgcgaacgcgattactgaaagattattattatttttttgtatttttgatataactaaggtgctttggttcaatgaagctctcgtcgcctgtacaaccggggggagctagcgaaccgcggcggcgatctcgaaggacgatccccccttgcaaagtgctggtgcagactgcaaaaagggcggtgctgctgtcgtgtcggtcgtttcttatcagctcttttgttgcctgcaaaatgaatttaaagaatgtgctctgtccccctgcccagaatgtgctctgtcacgctgccacgtcagtcagtcagcacgcagttgctaccgcaccaccggtactgttctactgcttgtggcgatccatgccctgtcgttgttcctgttgcgggggagccctggcaggcgtgcgtagtgcgagcgccccggatgccgtgccatttcaccagccaggccgcgccgtgctgcttctagcggtccttgtgtgcacggcgtacgttgttcagtgatctttcctggagtgtccaagtactctcgtgcctactgtcccacggtctgcttttcatcctctctaatatatgttcatctctgtacacgagcgaaaagcgtgaacagtagaggaggaagatcactaaacagaaaaaaatataaaattttgtgt

SEQ ID NO: 2430 - DNA, 553 bp, Zea mays
  Clone ID: TF_LIB3608-010-Q1-N6-C6
tcgcgatctagacttagtcccacgcgtccgcggacgcgtgggttttttttttttttttttttttttttttcttaaattcattttgcaggcaacaaaagctgatatgaaacgaccgacacgacagcagcaccgccctctatgcagtctgcaccagcactgtgcaagtggcgatcgtccttcgagatcgccaccgcggctcgctagctccccccggttgtacaggcgacgagagcttcattgtctgccgccttcttctacctcgcgtccgttagtatggtcagcctccgagcggtcttggtgaactcactgaaaggctcgtcgccggcgtgcttgagcgctccagaagcgccgtcgcggtagaagacatggctcgtcagctcggccctgtcgacgccgaacatgtcggccagcctctggtagagctcctcgtacgacgcgacagccgaaaggtcgagcgtgcgcccgacgtcctccgactgcatgaacaccttgcagtgcccgaggagatcgtcgtcatcagtcgccgtcgccgccgccttgttgtcctggcacg

SEQ ID NO: 2431 - DNA, 647 bp, Zea mays
  unsure (1)..(647): unsure at all n locations
  Clone ID: TF_LIB4979-126-Q1-K1-G8
aatacaaccattcgttcgcttcgactcccactctcgctcgttctttcactctctagctccccctcgcccccctaacgggtaccctactcgtcaccacaataacagacactccacacctcacccgtcctacgcgtcaggtgctagctggtccacatgatcatcccgcatcacgacctctagtactaggcctctcgccggcggtagctgccgccgatgaccaccatgacctgaaggctatgcatctccgccttggtgtgccgggttgcgaatcgccggatctatcgagacgagtctgacatcacaggccccctgcacctgctccccagtatagtcggatacagagcgcccgctgaccaggtgccgacgccatccaccgaagccgattccgaccaacaaaagaaggctgctcaatactccgaccaatggaacgtagaagagactaccgcaagcgacgcanaagactatcgccgaccggcatcgccaccaatcccaacgtaccgcgagaacaccatgtctaccacccatatgaagggcatccaggaggactgctgaggccaagcatgatcagctcttcctgcacatccaggtcagtatggatggcgcaccgcacctcaagaagattgacctcatgacttactagaactaca

SEQ ID NO: 2432 - DNA, 651 bp, Zea mays
  Clone ID: TF_LIB3354-016-P1-K1-B5
agctcatcacatccatctcattctactactgcctcagagaccaagctgctgcaaccggagaaggagatctattctacaaagtgaagtacttagcttgggacatggaaaccgtcgtgggagacctcatggcgaccgagctgaggcttggcctgccgggcaccgtggacgactgcagccagcaccagcagcagacccagctgaaggtggccgcgccgccgtccaaccctactaggggcaagaagcgccccgccgccgaggaggaggaggcaaacaagcgcgacgcggaggcagcacccccggcggccaactacttgtcaccaactcttgcagggcgcccgtggtcggatggccaccggtgaggtcgtaccggaagagctgcttccagcaggcaaagcagcaggccgtcagcagcagcagcaaggcggccgacaaagaggatgctgcggcgccggcgcccagctgcacggcgtccgcagccgcctcaaacgccaccgccagcgccggggccggctcattcgtcaaggtgagcatggacggcgccccgtacctgcggaagctcgacctgaggatgtacaaggggtaccgggagctccgggaggccctggaggccatgttcgtctccttcggcagcgccaacaacaacaacaacct

SEQ ID NO: 2433 - DNA, 421 bp, Zea mays
  Clone ID: TF_LIB4977-002-R1-K1-H7
cctcgaggccggccgggccgggcctctttttgccggaaacttaggatcatgagaggctctgatgctgctggcatggctcctccaagaccaccggaacagacagttcggaacaaatgagggcgggcagcttacttacctggcgctgaactgaagggagagcgacgctgccttggtcaggccttctttcacttgtgcagtgggatctgcgtcctgctgtctcggacgcccattttgcccacgagctggtcgtcacgtgctgtcgctttttgtctgggaaagatagcgtactgcttgctgtatgatactttcatctgtgttcggaagtttgtagcgcttcatatcctggaagggagtaaagaaaatgtccatgtgtccggtgagaatttctacaaaaaaaaaaaaaaaaaaggcccctagggcc

SEQ ID NO: 2434 - DNA, 911 bp, Zea mays
  Clone ID: TF_ZmC148771_1
caatttccttcaccgcaatttgttctcgctttatcagatctccaccttatccacctgcagtcgagcctgctgtaccctggatgcgcaagttgtgaccatgttggtccgacgatccctatcccgtcaggaatcaagcctgctgtaccctgggctccgccgtcccggcgcggtcggtcagactgtccctactccgtcggtgccaggcaccgacctgaccatcggaggcgcaccggcgcgcgacggcgtcccgtgtgccctgtccgtcggtgccagcaagcagaaccccgacgccgtcaagccggcggggctggtgctcttcggacggaccatactaaccgagcatcagatgagcctcagcagctccggcggcgccacctccccagcggcgactggtaacagctctctgtgctggaccgccgagaagggccccaatgtctcggagggctcgggctcgggctcgggctccggcgtcatccagaacagcccgaccggcaagaacacgtcgtcggagaggctgccgtggttcggggacggcagcagccagcaggcctccgagcccggtcttgagcccggacaatgcaaggtgttcgtcgagtccgacacggtcggccgcaacctcgacctgtcggcgctgggctcgttcgacgagctgtacggccgcctgtccgagatgttcggcgtcgagggcgcggagatgcggagccgcgtgctgtaccgcggcgccaccggtgaagtgaggcacgccggcgacgagcccttcagcgatttcgtcaagtcggcacggaggatcacgatattaaccgatgctgggagcgacaacctaggtagctaagtgaggagcagtgaaccaattccagccgcgagtactgactagccaagtagctagtgtgtggttacaggaacagcatagg

SEQ ID NO: 2435 - DNA, 274 bp, Zea mays
  Clone ID: TF_jC-zmX700344041a1
attcggctcgaggttctacacgcatttttcgatagggaaggacgccaagcccacatggaagcttgtggaccccgtgaacgggactgcacacttacccacgtacaaggacagagtacgggactggatgctcgtaggctagcttgccctgaaggatgtcgtggacaactagcagctcctttgtacagggaaggggctcagacgacacaacttggtactgagagccacccaatgaggagcactcaggctggcattaccactcacgaacccactgttg

SEQ ID NO: 2436 - DNA, 503 bp, Zea mays
  Clone ID: TF_LIB4172-001-Q1-K1-C12
accacttgtttttttttctgtctcgagtttttcccataacacatcatcacacggggagcaacacagacccccattagctccacgctctttgtcccaagccacagagctagcggggggcgcaaaaacaaacaggggggagagtaatcctcgagccgagggccatgggctcccctgcgcctttttaaaaactagaccgaacccaccggcgcccccccagcccacaggcctctcggcttctgtatgctcgcggagcgtgccgacccattgcccaccctttttgagggagccgctctcaagagcgggaggcccggtttgcccatccgctggacctcctacggagaaagtatctttatacaagacacactgtacaaaaatccctgccgtgggacatcccccaccaaaaggacattcccccctctggaaacaaaaacaaggtgccaccctgatctaaaggggtcttccatctggcccctggggccaaacagacgccaaaccttttttcc

SEQ ID NO: 2437 - DNA, 506 bp, Zea mays
  unsure (1)..(506): unsure at all n locations
  Clone ID: TF_ZmC2665_2
cggacgcgtgggcggacgcgtgggcggacgcgtgggcggacgcgtggggaagatcacgagaaggatgtcctattagttggtgatgacccatgggaggacttcgtgaactgcgtgcggtgcatcaggattctttcgccgcaggaagagaggcaaatgaggctggccagcgactacggagacagctttgttggcaaccaagcgtgcagcagctcggacggaggtcgcccgtggagggtcaccggcgactagaaatagcaggcgatgtctgagcacaaatgtttggtataatccgtccaacgatagcaagaaaatgatacgcgatttctgagcacaaacttttgcactcagatgatcgtgcaaacaattagcattttaagaaaaatgttgcagttcaatgtaactgcaggaatgtctctgatgtagcctcttcgatgtggcagccttaacaatcgatgtgctacagttactctgccttttaaaaaaannaaaaaaaaaaaaaannnnng

SEQ ID NO: 2438 - DNA, 575 bp, Zea mays
  Clone ID: TF_701186148_FLI
gtcggtgatcttccctgggaagtagattaccttcggggttggaggagctcaccattagggcggttctttgcctaccgacagcgaggaacggcggtggcctcacagtctcacacaggggcagtgagttattttacctctatctgccggaagctcaaaatcatgaggggctctgatgctgttggaatagctccacgaaccgtcgagcagacaggtcagaacaaataagctttggcctttgcctgcatccaaggaagacatctgagctagctgggagactatgttgaaggctgaagcctgaaatagttgccgggaatcgtcaaaacccgtcaagtgtttagtgtagttttcacgtgtccttgagacatgtgcatttgtatgtctgtgacgtgatccgttagatcgtgcaatcgtaggttgctgttcttgtgccctttgaaggccagacagatcagggagctctctgcttccttagtgcacttgctttgcagcattccttgttattctactctgaaatcatacatcatgccacaagaaccgatggttcgtgatgtcaagagagctgccctaattgttcc

SEQ ID NO: 2439 - DNA, 769 bp, Zea mays
  Clone ID: TF_ZmC1098_3
agatatgaaagaatcatatgcttattttcccctttgcgaagcattacctcattaccttagctcactatctcatagtgttggatttttgtcaccagctatggtgacatgcaaataacagaagatgaaaagaaaaaaatgtacttgtggcgcaggtattaaacatatttgttatattgttatataattcggtaaactgattaccccgtaagaaaaaaaatgtaaaatgtacttgtggtgcaggtactaaacgcatttgttatataattcggtaaactgattaccccgtataagtttcatatacaatttggtaaactgattaccccgtatcagttttatatctgtacaagttaccactcaagatgcaagtgctgatcttatttgttccttttcagttattttacctctatctgccggaagctcaaaatcatgaggggctctgatgctgttggaatagctccaagaaccatagagcagacaggtcagaacaaataagcttggtctttgcctgcacccacgcaagaaatctgagctagctggaaggccatgttgaaggcttaaatagttgctcggaattatcaaaagtcgtcaaatgttagtgtagtttccacgtgttcttgagacgtgtgtatttgtatgtctgtgatgtgatccgtcagatctgttcttgtgcccttcaaaggccaaatcagggagctctctgcttcctgtgtatgcttgctttttccagtattcccctgttattctactatgaaatcatccatcgtgccac

SEQ ID NO: 2440 - DNA, 602 bp, Zea mays
  Clone ID: TF_ZmC2833_20
ggccgcttttttttttttttttttccgaagcaacgaccaggctgctgatcgatagatagacaatagactgatagacaagaaagaagagtgatctttggctttgtacaaccacgcatcatggagattcaactcgactctccactccttttgcatgtcttgctaaacacacacacacacacacacacacacccctactaggggcacaaaagaaaaagaacaaagcgaccacacatcattccacgcatgcacaaagctttcctctctctctccccctcgttccaagcaagcagcttcatctttctcctcgccatgtctctggtttgctgctagctgctgctccattgttggcagacaatgctaggggagaaggtacataatactcaacaccacacgcccacacccatgcagggacgccttggagaagaaataagaccccaaaagaacaaaagaatttgctggcgcatgcacgcacgcacagcacaaggctgcgatagacgtctcatcatcagtcgttcttggccgagccgagccctctcgcttctgaccccttcatgatcctcagcctcgtacgtctttcccggccggcctcgaggtacccaatg

SEQ ID NO: 2441 - DNA, 769 bp, Zea mays
  unsure (1)..(769): unsure at all n locations
  Clone ID: TF_LIB4828-045-R1-N1-D2
ggcgattgggttcctcgaggccggccgggcccttccccccttccgttccgttccgatttgacgagttggtggctgctatagattcactccacccctctccatttctgataagtatccagctagctaccagtgtatgcaccaggcagcagcagcatggcggagtgcaaggacgacgacagcggccggcggtctccgtcgtcgtccatggacagcagcacccaccccccggcgctctccaccgcgtcctcggcctcccgccgcccgccggagaggagggaccagctcagccccgacctgcagctagggctcagcctgtcgccggcgtcctccgccctcctggtagcggagacaaacaacagcatcgtcccttctacgccaaggaaccaagcactcccggattggcccccgatcaaaccgttccttagaagcgccctgactgcctcggcacgccgacggcgaacgctgttcgtcaaggtgtacatggaaggcgtcccgatcggccggaagctggacatgctcttgctggacgggtacagcagcctcctagcgaaactttgccacatgttcaaggcatctatcacttcgggttcctcacgagaaggccgcgcatgttctcacctatgaagaccatgatggagactggatgatggttgnngatgtaccgtgngagctctttctcgnaagcgtaaagagctgnagatgcgagaaccgacaggtgctagatagcaaacttttcatgcgggggancgactctgntcccctctctttt

SEQ ID NO: 2442 - DNA, 769 bp, Zea mays
  unsure (1)..(769): unsure at all n locations
  Clone ID: TF_ZmC258_2
cactcccttcaacctccattaaaaactaagcgttcacgacccccagcttcaccatgtatggtttcaggactgccttcaagttttgtgatctttgccagaagttggaggagatgtttgacatccagggggggagctcggttccacgctcaagaagtggcgggtcgttttcactgacgatgaggatgacatgatgcttgttggagatgatccttggggcgagttttgcggaacggtgcacatatgaggaggcaaagaagctgacatccgagtacaagttaccggttagcagtgacagcaggaagctgagcgccgtaaactcactgtctgaatgacttgactaatcttgttgtttccaccattgactatgggggtaaattgcccatgcaccattgctccgtgggctgaactcgtggttggcgttcggttgccttgggttttggaggcttttggactgccatgccagcatgagcctcctggaaggaggaactctggcatctgcgtgccattatttcccatttgtccgtgcagtttggtcaggtgggagatgtatgcttctttcagcaacaatatttgcggaagcgatctgtatatatattagtctactgtttaatacgtaagcaattgtgctcctagcctgcccttgcgccgtaccatgccgtggcgcttctcttgtgctggctcgatctttttgatataaattactaacataccaacactctggtctttattggtgacctcnnggcagacnngaanaagacaaggctgcggg

SEQ ID NO: 2443 - DNA, 412 bp, Zea mays
  Clone ID: TF_LIB3597-060-Q1-K6-A9
accgagtcctctcggggctggcgggctcgactgcgaggacaccgggctcacgctcaccctacgtcctggcgggctccgagccttgcgccgccgccgacggcgagggttccctgtacctctacttctggaagggctgcggcttacgagacccagaccgcaagcgcgcctgctacgacgctggaccccggatcgatcctccccaggtaggcgcgttctacgacgctgaaccggcacccaaggatggcgtggcgggctggccgccggtgaggtcgtaccgtaagaagcgctcgacgacgccgtggacttcaaaaggccgtcaaggtcgccaaggaggccagcgacggcgcgccctacctgcggaaggaggacctgcaagcgtacgccggctacgaccagatgcatagagcgctcc

SEQ ID NO: 2444 - DNA, 688 bp, Zea mays
  unsure (1)..(688): unsure at all n locations
  Clone ID: TF_LIB4759-002-R1-N1-D4
ccggccgggaggaaatcgatatgattttgatgcagcagtctagactaggtgcaattaattataaaacacttgcgtttaagatgtgggcgctgaaaaattaggaaatctgtccagtgaagacactataatttgagtaaatgattagatccactcttgtgtgaaatttgctattctatttgattcttttcgatcagaggatacattgatttctatgtatctcatttcacctttttaacagaaaaattttgccctatactccctccattgcatatagtttactttggctttgtcctaactcaaatttctaggactaccattgttttcaaaattaatgttaacacttacaagctcgcttaaatgccttgtaaaaatatatttaatgaaaaatctgatgagactaatttgatgttctagatgattgtgcttttttattctccttaaacactcgtttgtgatccctgagatgaattattcacatttttttctttcttttttattgattaactatctatgatgtatcaggcatttactagttatttccaatgtcctttttgcagcttgttcaccacattttgccggaaacttangatcatgagaggctctgatgctgctggcatgggtacgtgtacgagcactagaatgtctatcttcgattgttgaaagactttgttcgatattaaaaattatg

SEQ ID NO: 2445 - DNA, 658 bp, Zea mays
  Clone ID: TF_ZmC615_1
agtcggaggatgtcggtcgcaccatcgacctgtccgtctttggctcgtacgaagagctgtacggtcagttggccgacatgtttggcagcgagaaggcagaggtaatgagccacctttgttaccgtgatgctgctggcgctgtcaagcgtactggcgacgagccgttctgtgacttcatgaaagtggcacggaggctcaccatagtagagagcaccgaggggaggctgcagaaacctctcgtcgagtacatggcttgattgcatgactgttcgataaggcactctgaagcttgaggaagactgaagcttggagcgaatatgttttcgtttgcgtttgtctgccgtgaagcggaatcgcgatgtctgtctcgtcgtgtgaaagaaactcgtgtatcggattttcgtctgtcgtgacttggtcgttagaactctgtcgtggtcagttgtgttgcgcttgcgcttgggtcgaagttgatagatggcctctttgatgaactagcttggaataaagttcgagttgtggttagggaatgccagtgccatggcaattcagttgtcgttgtcgatttagttaaaatgcgtgtatttgttgctgcagtttgatagcacttgccaagatatgttgaacttatcgtggttatgttcatttcctcagcgtg

SEQ ID NO: 2446 - DNA, 762 bp, Zea mays
  unsure (1)..(762): unsure at all n locations
  Clone ID: TF_LIB5116-030-A1-PF1-G6
aatcactgcagtcgagtctgtcaccgcacgggcttcaccaggtcgatcacggcgggcagccgccgaggatcgccgctgggctcatcattggtcacccggctgcgcgagacgacatctcgtgcatgctcaccattggcagtcaccagaacaacaacaacaacaagtcagatgtcaagaaggcttcaccccagctgatgctctttgggaaacccatactcactgagcagcagatcactttaggtaactctgggggtttctctccatctgctgctaggaagagctcctctgaaatgagcgccgagaagtcggcgaataactctgatcttccaagcccgcaaagcaaccagaacggcactacgaagaacttgtcctgcggaggagttccattgtgccaggacaacaaggtactcgatctcgggctggatatcgggcactgcaagatattcatgcaatcagaggacgtcgggcgcacgcttgatctcaccgctgttggttcttatgaagagttatatcgccggctttctgacatgttcggcatggaaaaagccgagctgatgagccatgttttctaccgtgatgcagccggggcgctcaaacacactggagatgaacctttcagcgacttcacgaagacggcgcgtaggctgacgatacttacggacacgagcggcgacagcagcgtagcgagctaaggngggatgaggaagngaggaagctctctcgccacttgtacgtacagccgggtcgatggcggcgcggcgc

SEQ ID NO: 2447 - DNA, 352 bp, Zea mays
  Clone ID: TF_jC-zmX700553368a1
attcggctcgaggggtgggcaagcacttcctttgcccccatggaactcgatgactactgacgggcagcacccagaggagcgagagggaatacgatacctgacacagactttccggcccgatgaaggcaacgcctctcgacaaggtgaacatggacggcgcgccttacctgagcaaggtggacctgatggcgtacagcacatacaaggacctctcacttgcactcaagagaatcagcggcacctgcaccctatgtgggaacaaccacaaccaggggagattgttggacccagcctccgacactgttgatatagacactactcacgatgacgttgatcgtgacgggacgctgaa

SEQ ID NO: 2448 - DNA, 763 bp, Zea mays
  Clone ID: TF_LIB4738-131-A1-K1-C12
ccttctcccttccgctccatttgacgagtcgtcggcgctagcaagatcattcgctccgccgctctccgacccatttctaacaagcaccagctgctgcgtaacatatatcacacagtgtatgcacacctgcgggcagcatatggccgggtgcaagcaggacgacgacgccgtcggccgttctccttcgtcgtcgtccatggacagcagcagcagcacccacccgccggcgctatccgccgcgtcgtcgtcgggcttccggccgacgacgacggagaggagggacgacctcagcaccgaccttcagctagggctctgcaggctgtcgccggcggcgccctccgccctcctggtcgtaccggagaccaagagcatcccttccacgccaaggaccacccaagactggcccccgatcaaaccattcctcagaagcgccttgacagcctcggcacgccgacgacggcggacactgttggtgaaggtgtacatggaaggcgttgcgatcggccggaagctggacttgctcttgctggatgggtacgacagcctcctagcgaagctccgccacatgttcaaggcctccatcacctccagtatggccgggtgcaagcaggacgacgacgccggcggccgttctccttcgtcgtcgtccatggacagcaggagcaccacccacccgccggggctatccgccgcgtcgtcgttcgtcttccggcccacgaaggagaggagggacgacttcagcaccgacctttcactagggctc

SEQ ID NO: 2449 - DNA, 384 bp, Zea mays
  Clone ID: TF_LIB3156-001-Q1-K1-D9
tattgaatgatttcatgaagaatgataatctaatgcatctgcttaatctctaagattatgttccaacctattaacacaaagatccagattgcattcttgattgtgatcacccttgcgagatgcttattgaatcatgtaaaaagctgcacatcatgaaatgtaccgaagccattgaactatcaccaagagctatggacaaatgcaacattagaatctccagttgatatcttttaataaggtccacaatattactatgttgatagcatagccagcatccgatggttatttagcacgtttactttgttactactttattatcactggtatttaaaatcatatattgtcctttttttattcattttaggaacaaaaaaataaactttt

SEQ ID NO: 2450 - DNA, 533 bp, Zea mays
  unsure (1)..(533): unsure at all n locations
  Clone ID: TF_14203817
gggatggcttttgactcaattgkttctgcaatcgacgrtggtgtcatgttgratgggrgttcttgcccccctgcccctccgcggggaatgcggvcattcacwarggtctacaggcgtggggctgtgggccgntccattgacatgggcgggttctccggatatgrrghwttgaygcatgctgtggcccgcatgtttggtatggagggcccmcttggggmccgmcggggmatgggatggargttggtctacccggbtcatggggatgacgatcctacttcttggtgmcgccccatggggggsgtttgtgaattgtgtgragtgcattrggktcctstccccccragargtgccgcagatgygcttsgatggtgytttggggsccratgtcctctccgaccgggcttgckgcbgctckgttggtggggrtgcctggtbgcctcgccgcgcccggssccctggtngcccttccatcgggttctgcggccsgtttgggtgscctggtcccgggggttcggggtgggggttttggctgc

SEQ ID NO: 2451 - DNA, 613 bp, Zea mays
  Clone ID: TF_ZmC427602_1
ggacgaaaaaccaaatgattttttaaagttgaggcaggggggggcatttttttccagcccttagggggactttttttgctaaacaaacattaggggggggccaccagttaaaacttgccccattaaaaggaaaaaccaaaactgggggaaggcccaaccaactcaaaaccccatttttaaatactactacggggccctacgggctcatccaatgcattttaaaaaggggaaaaaaaggctttaaccccccttccaaggaaatctatggaaacatttgccttgttctttactacttgggacaaccagttagttgccaaggcataaacagttgtcggatttaaacaaaaaggcggactggtacccgggtgcctttttaacaaaaaaaataaatgcggaccccctttccgtcaaattgggaaggccgttttcctccggcctcaagttcagggcccccgggttcatgccctggacccccccccttgggtacacaaaaattttgggccccatgctgaaaaacttattccaggggtcgcccccaaccagaataatgtccccttcgtagtcggggaacacaaccatccactccttgttaaagcctttcaactccccgttg

SEQ ID NO: 2452 - DNA, 601 bp, Zea mays
  Clone ID: TF_ZmC1117_6
gacgcgctgttcaccaactccttctccgcggcggcagagggcggcggcgaccaccaccagcacgccatcgcctacgaggacaaggacggcgacctcatgctcgccggagacgtgccctgggagtaagtacaccgtcgggttcggatcagcaagcatgctgctccgttctgtggatctgaggatacgtttggtgaacagaagcctgattaattgtgattcttaatttcaccccctttgcagtatgttcatctcttcgtgcaagaagctcaggataatgaagggctctgcctctgaggccaggtgatcgctgatccatacataaacagaggctacagacacgccacctgggaacgcggatccaagagcacacacggatcgtacttgacgaggaaggagggaggagcagtgtggcttgagctctccagtgttgtacaaagacatgtttctttctgaacccaaaagggagaaagatgtatgaagcgtgtatataagatcttagctagcagtttgttttcatttgtatgagcgatcgaaggctgtaaaaaatgaaaaagaaaaaagaaaagggaatgagaaattgaccaaaaaaaaaaaaaaaaaa

SEQ ID NO: 2453 - DNA, 887 bp, Zea mays
  unsure (1)..(887): unsure at all n locations
  Clone ID: TF_ZmC965_4
ctgcggtggnagctaggcgcatccccccatcattgacctcatttctaatagctttgntannnnnncttntncaaaagctacccttaatatccagaacatagggcaaagtattcccaccagaagctgcaagaagggtcataagctttgtagagccctttttagggcatgtttgnaaccaannncaccanctaanattatatttttccccaacnggggggggggggggacnccaatggtgagcggcccccccctgcaccaccccctagnggggacaaaaaaatgaaggcgaataatgctggctggcgatgacccctggaatgaattctgccatatggtccacaagatcctcatctacacaagggaggaagtcgaaaggatgaacccaggtgccctaaactcgaggctcgaagactgcctgtctgactcgctgggaagaggggtagcttccaaagagccccggagcggcccctcgacttcggctgtcgattctgagaaccgcgctaacttgtccagtcagtgagcccttttgaaagtggtgaagaagacaaaaggccacgtgtcagagtgaccggaagaacgagaaaggggtgtgtttcagtggtgtgtagtaggtaggtaattttgtgtgtatgcctccgggtaaaagccccgcggtacccagtttgtagatggtgcttctcctggtgctagtttcccgtcgtaagctggatttttttggggggtgtgtgccctgctctgtgtgctgacccgcctgggggtaagttgtagcagagcaggagaaagcaggcaagaaaccgctggtgcgcctgcttggccaatccttttccttgcggagcgctgtaaatagccttggatctgaagcgtagtaatgtattgtcatggtactc

SEQ ID NO: 2454 - DNA, 642 bp, Zea mays
  Clone ID: TF_18178970
gtggacttttttttttttttttttaggtgcaacgactcgatcttgattcatgtacatgtgacatatactacaacagaaaaagagcaataatgtgacatgagctgggtgatggtagtggtaggtgcgcgtggccaaaatcaaaatcccgcagggatgagatggaactgaaatgtttggatgttagggaagtcaactgcatccccgcagcgcaggcgcagctcatgtagtacgtgaggagatcgtacgttgttgttggaatcgtgtgctggaatcgtgtccagaattgcgtcgtcgtcacattcgccagcttccctctcgccacttgagctatatatgtgcagcagtgcaagtcttgtccggatgacgcctctgctgcacgtacgttcaaatctgcctccgtcattctgttcccagtgcggcgccggcatgcatgcctgtcaggcgttggagctcagccctctcgcctcgcacgatcgcatcacccgcatccgcttgcacgaggacacgaacatctcccacggcacgtcgccgacgagcatccagtcgccggtcgccgtcctcgtaccaccacggcgtgctcccacttcgccgtagccgtccatcagcccgatggagcagcagcagaacaactcgttgagcgcc

SEQ ID NO: 2455 - DNA, 639 bp, Zea mays
  unsure (1)..(639): unsure at all n locations
  Clone ID: TF_LIB3689-252-Q1-K6-C5
gnagcggnaagccgccgtactcggagcccagcacgccgccgccagccatgtcggtggatacggagcggagctccaccgagtcgtccgcggcctccgggctcggctacgaggacaccgcgctcgccctcaccctccgcctcccgggctccgaccccggccgttcctccccgctcgccgcgccctccgacgctgcgccgtctcccaaggcgcgggtggtggggtggccgccggtgaggtcgtaccgcaagaacgcgctcgccgactccagcaaggccagccgggcagccaatttcgtgaaggtggccgtcgacggcgcgccctacctgcggaaggtggacctccaggcgtacggcggctacgaccagctcctccgcgcgctccaggacaagttcttctcccacttcaccatcaggaagttcgccgacgacgagaggaagctggtggacgcggtgaacgggacggagtacgtgcccacgtacgaggacaaggatggcgactggatgctcgtcggcgacgtcccctggaagtgagctccttcgctctgtctgttttactttccctgatctaattagctggttatctacgcagtttggctgtgctgagtagatttgaaaaaaaaggacatggctgtagtttaca

SEQ ID NO: 2456 - DNA, 1243 bp, Zea mays
  Clone ID: TF_ZmC784_2
cacccctccaacagatcactcttcgctccggctccgactcgcactctttccccttcccttcccttcccactcccaggctcccactctcaccccttccgcctacccacgcaaacggcacacgaactaacagccacctctcacgtcccccaccctctggttcatgtcctgctgctccccatgtcgcctccactcgagctcgactacataggcctctcgccgccggcggcagccgccgccgctgaaaacgacgaactgaagggtactgagctccgcctcgggctgccagggtccgggtcgccggaccgccgtgtcgtggctgccaccgcgaccaccctggacctgctcccggccaagggcgccaagcgcgggttttctgacgaggcgcccccgccatcgcctgttgccactgccggaaagggaaagaaggtggcagaagaggagtacgacgagaagaaggtggcagcgaccccgcagccggccgccaaagcacaggtggtgggatggccaccagtctgcaactaccgcaagaacacgatgactaccacccagctggagggcagcaaggaggatggtgatgccaagcagggtcaggggttcctgtacgtcaaggtcagcatggatggcgcgccgtacctcaggaagatcgacctcaagacttacaagaactacaaggacctgtcgaccgcgcttgagaagatgttcagtggcttcagtactggcaaggacggctcatctgagtaccgcaaggatggtgaatatgttctgacttacgaggacaaggatggagattggatgcttgtcggcgacgtaccatgggagatgttcgccggctcctgccgcaggctcaggatcatgaaaggctcagatgcgattggactcgctccaagggcagccgataagtccaagaaccgcaactagaacggtggcttcctatccttacacagtccggtacgagggaggagatgcagtgacttgtagggatctgtacgaaaaccgaaaaagtctactaacagctatgacttgtgagaagaattctggcttatggtctgcactagaatggcttggtacatcgtctatggacaaaacacgctattcgattaattgttgttaattaagccttggggggggtacgagtgctattcatgtaaatggtttggtgcatcgtgtgctgctgctgcctgctgctgttactacgattgagctcccctataatactatgatttgaagagagatggcgatgtcc

SEQ ID NO: 2457 - DNA, 418 bp, Zea mays
  unsure (1)..(418): unsure at all n locations
  Clone ID: TF_LIB3332-001-P1-K1-G7
cccacgcgtccgggacgcgggtggtggggtggccgccggtgaggtcntaccggaagaacgcgctctccgactccggcgagggcaaccggtcatccagtttcgtgaaggtggccgtcgacggcgcggcctacctgcggaaggtggacctccaggcgtacggcggctacgaccagctcctccgcgcgctccaggacaagttcttctcccacttcaccatcagtcagtgcttcgtgcaccgtcctgccctgggtttagttttccgcagcgccttgctctgtttgatcgagcggcgccttcgcctgatgaaaggttcagaggccgttaacttgggtacgtacgtgttctcctctaaggccttgcctagcttcatgtgctacaaaatccgtagcgattgcaaaccatctggctcatttttttt

SEQ ID NO: 2458 - DNA, 1102 bp, Zea mays
  Clone ID: TF_ZmC1407_1
cattgggtacctcgaggccggccgggcttctccctttccgctccaatttgacgagtcgtcggcgctagcaagatcattcgctccgccgctctccgccgacccatttctaacaagcaacagctgctgcgtaacatatatacacagtgtatgcacacctgcaggcagcatggccgggtgcaagcaggacgacgacgccgtcggccgttctccttcgtcgtcgtccatggacagcagcagcagcacccacccgccggcgctatccgccgcgtcgtcgtcgggcttccggccgacgacgacggagaggagggacgaccttagcaccgaccttcagctagggctctgcagcctgtcgccggcggcgtcctccgccctcctggtggtagcggagagcaagagcgtcctttccacgccaaggggcagcaggaccacccaagactggcccccgatcaaaccattcctcagaagcgccttgacagcctcggcacgccgacgacggcggacactgttcgtgaaggtgtacatggaaggcgttgcgatcggccggaagctggacttgctcttgctggatgggtacgacagcctcctagcgaagctccgccacatgttcaaggcctccatcacctttgctgatgctatggagtaccaccaacgagttcctcacgagaagcctgcacatgttctcacctatgaagaccgggatggagactggatgatggttggggatgtaccgtgggagctcttccttggaagtgtgaagaaacttaggatttgcaagaacagataaatgctagttagcaaagcttattattcgtgcgctgcatggactctatttctttcttctttttatttatatcggttcatacagaaagattttgctggccacagagtggacatgcatgtgataccgaggctatatatactgaccgtgtacagtatactgaagaaaagtcaatcttgataccttccctagaaaattaatttttggtattttttatgtttccttttctgttttctctgagtgccttgtaaataccatggctgtttgttaaagaagaggcgatttgcgtgaagaaaaaaaaaaaaaaaaaaggcccctagggcc

SEQ ID NO: 2459 - DNA, 1285 bp, Zea mays
  Clone ID: TF_ZmC2230_2
cccacgcgtccgcccacgcgtccggccacgcgttctcacgttttcgtcgtccggccggccggcgagcattttgcttctgcgatcgatcggcgcgacgtgcacggccatggagatgatcgacgcagagctgcgtctgggtccgcccggcagcaacaacagagacgtcatcaacgtcgtgcagccggcgttggcggcggcgaaacggccgtcgtcgtcggtgctggagagcgaggcgtccgggacggacgaccatgaccatgacgacgccgcaccgacctccaaggtgcaggtggtggggtggccgccggtgagagtgtacgccgccggtgagagtgtaccggaagaacgcgttccacgcggcggcggaggcgaggaggaccaggcggggcgagcagcagggaggaggaggcctgtacgtgaaggtgagcatggacggggcgccatacctccggaaggtggacctgcggacctacggcggctaccgtgagctgagggacgcgctggacgcgctcttcggctgcttctcctcctcggccgacggcggatgccagttcgccgtcgcctacgaggacaaggacggcgacctcatgctcgccggcgacgtgccatgggagtaagtagtaccgccgggcagcagcagcatctatatctatccatggataaaggaggaacaacaacacctgacctcacttgcgcactgctgtggaatctgcaggatgttcatctgttcttgcaagaagctcaggatcatgagggggtccgaagcaagataaccaagcaacgaggatgcaaggacctgttgtatgcatatgcatggaggccggccggactcatgctgtcatgcatgagagtttgagagaggagaagaagacgacctactggaactgaaggcggttgggtatacctgcatggggagggagcccacgcatgcacgcgcgcgtcgtcgtgttctacggccagctagccaccagaccggctgccggcccatatgcacaccacggagatggaggtgatggttcaaggatcacggcggcgtacgcgcgcgtcatcagtcacgccgtcctgtcatcagatgagatggaggggtgatgcatgagggcagtgctagctgtggacggctggctggacgtgcagatcggagcgagattgtactgtgcacgcacataagctttgtacagtggcatgtgctggtcatctgtaattttgatttttttccccctccttttgtaagtgagcaagtttgaggaaaaaatgtatgaatgaagaaaaggagaggggggatttc

SEQ ID NO: 2460 - DNA, 1229 bp, Zea mays
  Clone ID: TF_ZmC13155_2
gagctgagcgcgctccgtttcagtttcagagagcggttgctgtgcatgtgctggtgctgcgacttgactgttcgagcacagctgcgtctgcgtccccatggtgtagataggaggggaggaagcaggaagagggggaggcagcctgtgtgtgtgagagagaggcagaaagtagtgaggaaggaagcaggaagatggcttggaatgcccgcttcggcgatgacgaggaaggcagcggccttgagctcagcctgggccttccgggctacttctccgggtcgccagaccaagccgcaggtttcgaggagaaagcgagccggggttctgctgctgctcctcctcctcctcctcccgctgctgctcgagcgaaaggaagcgacggcttcaaggcgaggccggcggcagctgctccggtcgtgggatggccgccggtgcgcgcgttccggcggaacctcgccacgtcgtcctccaagccgtcgagccacggaggcaaggagcccgccgcgagcgccgacggcggcaacaagggcctgttcgtcaaggtcaacatggacggcgtccccatcggccgtaagctcgacctggcggcgcacgccggctacgacacgctctccgccgccgttgacagcctcttccgcggcctcttcgctgctcaagcggcggggccaggcggggagcagcaggctgtcgcgggtatcctgagcggcggcggcggcggcgagcacacgctggtgtacgaggacgacgagggcgaccagatgctggtcggggacgtgccgtggccgatgttcgtcgccaccgctaggcgtctgcgcgtgctgaagagctccgacctgagcccgtcgtcgctgagggcagcgagagccgcagctgagtgctgaacgcaccctggacctggagcctgaacgttttgcggcctctccggagggcccatccgtgtaaaatcgaagcagttttcgtcgattttgcttttagcaagggattatatgtcctagtgatcaagtagggaagcaagaatctatctagaggtgatgaggggtgtcgtagaaccatgcaatcctagtgctagattttttttctgaaagtttaacaaggtttcttggcgctggataggacagcggatacgttatcgagctcgccacggcccatgggctactacatgttttgtgagttgtgtgacctggggcgacctagttcttttgtattattttttctggaaaaaatttatagct

SEQ ID NO: 2461 - DNA, 1096 bp, Zea mays
  Clone ID: TF_ZmC31703_1
aaaccgaaggcttgttggtaagtgcaattaatcctgtgaagtgtcagtctaatttgtcaactgacgttgagatcaattaccgaatacaaaaggatgcccaacaagagatctcaacctccatggtttcacagtcattcggtcagtctgatatagcttttaactcaattgattctgcaatcaacgatggtgtcatgttgaatagaaattcttgcccccctgcacctccgcagagaatgcggacattcacaaaggtctacaagcgtggagctgtaggccgatccattgacataggcaggttctccggatatgaagaattgaagcatgctgtggcccgcatgtttggtatagagggccaacttgaggaccgacagagaataggatggaagttagtctacacggatcatgaggatgacgtcctacttcttggtgacgacccatgggaggagtttgtgaattgtgtgaagtgcattaggatcctatccccccaagaagtgcagcagatgagcttagatggtgatttggggaacaatgtcctctccaaccaggcttgcagcagctcagatggtgggaatgcctggaagcctcgccgcgaccagaaccctggtaacccttccatcgggttctacgaccaatttgagtgacctgatcacggaaattcgagatgagaattatagctgcaaaaagcaaccagtgtccagccatctacagaattatcgccacggaaagggtaagcagatgcaggatgctgtagacgtcttggcttttatagttgggagaggaaatgctcctcagattagggtatgttctagatatatgtgtagttttctttgttttgaaacaatttaggcaagaagaatgaaacttacctagagctgttgctgagtcgaaacatcagacaagatggttaggcaaaacctgaacttcagacagagtaggcagatctgaagataaagtattttgattgagagtattttgtaattctgtattgaactgccgctggggtttgcttgagacccatgcggcactatatgagtctctcagttcagaaaatactgaagcagatctaagaggtcctactgattattactatttgttt

SEQ ID NO: 2462 - DNA, 681 bp, Zea mays
  unsure (1)..(681): unsure at all n locations
  Clone ID: TF_LIB4742-105-Q1-K1-G3
attgggtacctccgagccggccgggaccacaatcccagtcaccagctcatcacatccatctcattctactactgcctcagagaccaagctgctgcaaccggagaaggagatctactctactcttcagagcactgtgcattgggacatggaaaccgtcgtgggagacctcatggcgaccgagctgaggcttggcctgccgggcaccgtggacgactgcagccagcaccagcagcagacccagctgaaggtggccgcgccgccgtccaaccctactaggggcaagaagcgccccgccgccgaggaggaggaggcaaacaagcgcgacgcggaggcagcacccccggcggccaaggcgcccgtggtcggatggccaccggtgaggtcgtaccggaagagctgcttccagcaggcaaagcagcaggccgtcagcagcagcagcagcaaggcggccgacaaagagggatggctgcggcgccnggcgccngagctgcacgngcgtccgcagccgcctcaaacgccaccgccggcgccggggccggctcattcgncaaggnnagcatggacggcgccccgaacctgcggaagctcgacctgaggatggacaagggcttccgggagctccgggaggccctggaggccatgttcgtctcctccggnagcgccaacaaaacaacctgtccg

SEQ ID NO: 2463 - DNA, 833 bp, Zea mays
  Clone ID: TF_ZmC1167_6
aagaaattagagaggattttgacttaaaggagatttaatcctcctcaatctttatagattagtacaaaacgaacatgacctaacaggaaaagaaggagaagcattttattatccacgcctctttgccttttgttttctctttttgaccttggataagattccatccagaaacgccctccacgcggaccaatcacggtactttcccgtttgatacttcgctgctgctgctgctgctagttttttagcgtatccatgtacagaatcccttggtttgaaaagaattggctttggataagggctgtcttcctagctctgttcgactgttccccacttctagataggttgatccttctagaaaaatattctgtttcgatcaatgagacgagccgggcctgtccgagttaattttaatttataattttcttccttggtcaaactgtgtttttttttttttttttttgcaggatgttcgtggagacctgccggcgccttcgcctgatgaaagattcagaggccgttaacttggcaccaagagccgcccgatgaggcgcaagcgcaactccaccgtcaccagtatgcactggcttttagtggcttggcttgttggaggaacgagggaacgtacttcgtcgctgttttgaggatcttcccttgacatatatatagcaatgtgtacagctgtcacctgctgcttttgcctgaggaaagtttgtagttccattactttacttatctgtagtgtctatctatctatctatagatccgaagctttgatatacacatggcggctacaatgtatttttgatgaataagaccagaccagagtaccagac

SEQ ID NO: 2464 - DNA, 1077 bp, Zea mays
  Clone ID: TF_ZmC1428_1
ctccacacacaccacacacacagacacactgacacacccacacactagttgtatgtgctagagctgcagttggcttggcatcagaggccatgaaactgaaacaggagcaagcagacgacgactgcagcaagatgcagggaggtcgtggcctgatgagcagccttgagctcaggctgggcatgtcttcagacaatggcgacgccagctgcggcggtgatccgtggcttggcgttggagtgcacccctggagccttgccggcaggcaagcagagaaggtagccctggagcaagaccaccagcggcctccacctccgcagccggtgggatggcccccggtgggtgcgttccgcaggagccacctgcaggtgggcgcgaaggccgttgaggaaccgacgagcaaggtgaagctcggcgagcaggggccggcgccggctcggtccaccatgttcgtgaaggtgaacatggagggctgcgccgttgggaggaaggtggacctgcaggcgcactgtgggtatgcgtcgctgtcgcgcgcgctgcaggccatgttccatggcttcctgtcagatggtcagtggaggatcgctggcagagaagaagatgacgacgacgacaatgagcagcagccggagccgacgaagaagggggagagtaagagcaacaagaaggcgtacattcttctgtacgaggacaacgagggcgaccggatgctcgtcggcgacgtgccgtgggagctgttcatggcttcggtgaagaggctctacatcgcacaggacccaaggaagacgaagaattagctaattaagctagttagggcctggctaggagaaacgttgctggctgccttattatttctacaaatagctccaagtcgaagcagatagctaagctagcactcccttcttcgatcctgtaatcctgtcgagcatcagttcatatacagcgcgtgtagtcggcatctctagtccaatattaatatataggaaattttgccttggacttctatatgtcctgtagaccttgaacaatacttctaatgtctgacttaagttattgatcatctgaactccgttcacaaat

SEQ ID NO: 2465 - DNA, 1246 bp, Zea mays
  Clone ID: TF_ZmC965_3
agtggtttttcgagcaggccgggaattatctagtgatgcctgaaggtgcaaattttacggggaaatcagctttcacttcacttcaggaccatggcactgataaatgctccacaggctgctttggtcatattgagtcaagttcccacacagaccatgcatcctcaagtttgatcaggccccagcctttggtccttggaaatggtgttcagaaaagcaaaggcacttcatttaaattatttgggattccccttggcagcccagaaaaatctgaacctctggtatccccaccaagtgtcgcatatgacgggaaacttcaaacttctccatcagaaaaagggaatcagctagacgtagttgaagtggataattgttctcatccttctaagactgtgaagccacttgatggtcctcagtcagattctattacagagaataatcagccttctccagaagctacccttaatatccagaacaaagtgcaaagtagttccaccagaagctgcaagaaggttcataagcaaggtagtgccctcggcaggtcgattgatctaacaaagttcgcttgctatgatgagctgattgctgaactggatcagatgtttgacttcgatggtgagctgaagagtccatgcaaaagttggttagttgtctacactgacaatgaaggcgatataatgctggttggtgatgacccctggaatgaattctgcgatatggtccacaagatcttcatctacacgagagaggaagtcgaaaggatgaacccaggtgccctgaactcaaggtctgaagatagtctatctgactcgctgggaagaggggtagcttccagagatccccgaggaggcgggtctacttcggctctcgattccgagaactgctagtttgttcagtcagtgaggcctttggaagtgaagcagacaaaaggcgtgaatcttgcggtgtagagtgtagttggtacattgtgtgtatgcctccgggtaagccctgcggtacccagtttgtgtcctggcgccagtttaccatttaagctaagtttttgggtgtgccctgtgctggggtctgggctctagttattgtagcagagcaggcaatgcatgcaagaaactgatgatgcgcctgtttggccctctttcccttcccaagccatgtaaatagccttggctctgaagcgtagtattgtattgtcgacagccgtacttgagatagtactccaagaggcgcgcttgctcctgtcagttgggtg

SEQ ID NO: 2466 - DNA, 4575 bp, Zea mays
  Clone ID: TF_ZmC1433_1
ccggccgggacgtccgcccctgccagtttgcgttcgccacccgtccaaaaccccccaaccaaagcccgctccggcagcccccaccccaccatcgcgtcaatggcggcgccgcctgtccagcctgtgccaaccgcggcggcggcggcggcggctgtgaacggggacgcgttccgtctgggcttcgtcggcgcgggcaacctggccgagagcatcgcccgcggcgtggcggcgtcgggcgtcctcccggcctccgccatccgcaccgcgccccaccgccgccccgagcgcggcgaggccttcgcgtccttcggcgcgtgcttgctccaaaccaatgcccatgttgtggacgacagcgatgtgatcgtcatctccgtgaagcctcagatcgtgaagcaagttctacttcagctgaggccacggctgtcagaaaaaaagcttctcgtgtccattgctgccggcatcaagatgcaagatttgcaggattggtctggtcaacgacgtattattagagtaatgcccaacaccccttcagctgttggacaagctgcatcagtcatgtgtttgggagagatggctactcaggatgatgaaaaccgtgtaagaaaactgttcagtgccattggaaaagtctggacagctgaagagaaatattttgatgctgtaactggtctgagtggtagtggcccggcctatatcttcctagcaatagaggccatggctgatggtggagttgctgctgggcttcctcgggaccttgcccttggtcttgcatctcaaacagttcttggtgctgcaactatggtgagccagacaggcaaacatccagggcaactgaaagatcaggttacttctccagcaggtactaccattgccgggattcaggagctcgagaagggcgcattccgtggaacgctgattagtgctgttgttgctgccgcaaagcgctggcgaactgtcatttcgaaaactcgagggccgggaggatcgatcaatcagcaccgaccactcgcgacccgattcgaatcgagccagagtcccaggcagcggcggcggcggcgcccgcctccaagaccacctccacccggaccccagccccaaccccaagttaacagatgggggacgttgcgaaggacttgacggctgggaccgtgggaggggctgccaacctcatcgtcgggcacccgttcgacaccatcaaggtcaagctccagagccagcccacccctgctcccggacagctccccaagtacgccggcgccatcgatgctgtgaagcagacggtcgcggctgaaggcccgaggggcctatacaaggggatgggggcacctctggccaccgtagcggccttcaacgctgtcttgttcagtgtcagggggcagatggaggcgtttctcaggtcagagcctggtgtgccgctgacagtgaagcagcaggttgttgcgggcgccggtgctggaatcgcagtctccttcttggcttgtccaacagaactgatcaagtgcaggttgcaagcccagagttccttagccgaggcagccaccgcttctggtgtggctcttcccaaaggtccgatcgacgtggcgaagcatgttgtccgggacgccggcgccaaaggtctcttcaagggcctggtcccgacgatgggacgcgaggtccctggcaacgcactgatgttcggcgtgtacgaagccacgaagcagtacctggccggcggcccggacacgtcgggcctcggcaggggctcccaggtcctggcgggcggcctcgccggcgccgccttctggctgtccgtgtacccgacggacgtggtgaagagcgtgatccaggtggacgattacaagaagcccaagtactccgggtccctcgacgcgctgaggaagatcgtggcggctgatggggtgaagggcctgtacaaggggttcggaccccacccccccgctccaggcgctgtcctgtgcccacggggacgccgggcttcgtcggcgcaacccttgtgacattttgccccctcttcccttcccaacccaacccattgcatttgcaagcccttttacattgcagagcgccagagcctcgctcgctctcggaacagagctaggcagctaacagacgaagaagaagcaagccaagcagaattgagagagaggcgaggacgtggcgacgacggcagccgcgatggcgacgacgacggacctggggttcgaggcgacggagctccgcctgggcctgcccggcgggggaggtggaggggagccggcgctgggcggcgaggggaggagctcttcctccgcctccggcaagaggggcttcgccgagaccatcgacctgaagctgaagctggagccagcggccgtcgtggaggcggaggaggaggaggaggaccacggcgttgctgttgcccttgagaaggaggaggaggccgggaagatgaagcggtccccgagccagagcagcgtcgccgccgccgccgccgccgtgctggctgaccccgccgagaagccgcgcgccgccaaggctcaggtggtgggatggccaccggtccggtcgttccggaagaacatcatgtccgtgcagtccgacaagggcgccgccgccgccaacggcgacaagtcctcgccggcggcaggcggcggtgccgcgttcgtgaaggtgagcttggacggcgcgccctacctgcgcaaagtggacctcaagatgtacaggagctaccagcagctgtccaaggcgctcgagaacatgttcagctccttcaccatcggaagctgtgggtctcaagggatgaacggcatgaacgagagcaagctggtggatctgctcaacggctccgagtacgtgccgacctacgaggacaaggacggggactggatgctcgtcggcgatgtgccgtgggagatgttcgtcgaatcatgcaagcgccttcggatcatgaaaggatcagaagccattggcctggcgccaagggccatggagaaatgcaagaacagaagctgaggagaagacggacggacggaagcttgcatctcagcaccaccaggggtggatggatgcaagaagaacaaatctccatggcttttgcagctctgctcgtctctgtatcatactcgtcgtccctgcccttcaggcctctgtatctccctgatcaatgaagtcgttttggtgtgtcaactgttctctccgtgcccagcttgtcagtgaaagagtcagtcagtgtccatcaagtctcatcttgtcctatacagaagagagaagccatgcatgaacatgtacctgtcctataacaatgtctttttttgctacctgtttttttttctctctctctctttttttggcacaagatgcaaaggcaccctgctcctgatcaaagggccttttgcatcataagctgtttgattataattaccatggtgtgtcagtggaacaaataactgttgcaaggtgttaaaaaaaagttgtattgtaatatgatcacctctcttccttgttgttttcaaaaaaaaaaaaaaaaaaaaaaaaagctagcaccagggcaactgcaagatcaggttgatgcaccaagagcaaatctccatggcttttgcagctctgctcgtctctgtatcatactcgtcgtccctgcccttcaggcctctgtatctccctgatcaatgaagtcgttttggtgtgtcaactgttctctccgtgcccagcttgtcagtgaaagagtcagtcagtgtccatcaagtctcatcttgtcctatacagaagagagaagccatgcatgaacatgtacctgtcctataacaatgtctttttttgctacctgtttttttttctctctctctctttttttggcacaagatgcaaaggcaccctgctcctgatcaaagggccttttgcatcataagctgtttgattataattaccatggtgtgtcagtggaacaaataactgttgcaaggtgttaaaaaaaagttgtattgtaatatgatcacctctcttccttgttgttttcgacccgccatggcacgcacgttccagccaatgccgcgacatgcggggcctacgagatcacgagatcggtgctaggttgatttgattggtgctggcctttgctatggccctttgcagtttattcattctccttgcgcggctggagcaacgcgaacaatgccagacaatttttagggaggaaagagagagagaaacttttcacttcaatgatgagattctttaatgaagcaaagcttacttaaaagtttgttcatgtggagccacagagtgagtggttggtgacagataagtaatactggccttgtcgtaatggttggttggcctggcctagagtgggcatccgacggtgatccgatggcgcgcgagtccgactggtggtgcttgtgatggtgagctgtgtggcccatggttttgttggcgtttgggggtgggtggccctcgtcagttcgcattcgggattcccttttgcccccacaattccacgttcgccttggcttctttttcttgttggcctaaattatattctttttctctttcacacacacaaatatattcagtttcccgttcttcctttattagtgccag

SEQ ID NO: 2467 - DNA, 457 bp, Zea mays
  unsure (1)..(457): unsure at all n locations
  Clone ID: TF_LIB3357-037-P1-K1-E7
gcaagccaagcattctcacgttttcgtcgtccggccggccggcgagcattttgcttctgcgatcgatcggcgcgacgtgcacggccatggagatgatcgacgcagagctgcgtctgggtccgcccggcagcaacaacagagacgtcatcaacgtcgtgcagccggcgttggcggcggcgaaacggccgtcgtcgtcggtgctggagagcgaggcgtccgggacggacgaccatgaccatgacgacgccgcaccgaccttcaaggtgcatgtggtggggtggccgccggtgagagtgtaccggaagaacgcgttccacgcggcggcggaggcgaagaggaccaggcggtgcgagcagcaaggaggaggaggcctgtacgtgaaagtgagcatggacggngcgccatacctccggaaggtggacctgcggacctacngcggctaccgtgagctgaggga

SEQ ID NO: 2468 - DNA, 518 bp, Zea mays
  Clone ID: TF_ZmC1428_2
aggtggacctgcaggcgcactgtgggtatgcgtcgctgtcgcgcgcgctgcaggccatgttccatggcttcctgtcagatggtcagtggaggatcgctggccgagaagaagatgacgacgacgacgatgagcagccggagccgacgaagaagggggagaataagagcaacaagaaggcgtacatccttctatacgaggacaacgagggcgaccggatgctcgtcggcgacgtgccgtgggagctgttcatggcttcggtgaagaggctgtacatcgcacaggacccgaggaagacgaagaactagctaagctagctagggcctaggaaagacgttgctagctgcctttattttatttctactctctatatagctcgaagcagatagcaacagtgtatgctgctagtgtttaactacctcccttctccgattatgtaatcctgtccagcatcagttcatatacagcgtagtaggcatctctaatctaatattaatatataggaaattttgcttaatgtc

SEQ ID NO: 2469 - DNA, 1628 bp, Zea mays
  Clone ID: TF_ZmC784_3
cgggaaaacaaccactcttcgcttcgactcccactcccactctccctttccactctcaggctcccactccccccctaccggctaccctacccatcacacacaaacggccactcctcacctcccccgtcctccggttcatgtcctgctgctccccatgtcgcccccactcgacctcgactacataggcctctcgccggcggcggctgccgccgctgcccacgacgacctgaagggtaccgagctccgccttggtctgccggggtccggttcgccggaccgccgtgttgtggctgccaccgcaaccaccctggacctgctcccggctaagggcgccaagcgcgggttttctgacgaggcgccgacgccatcgcccggtgcagcttccgggaagggaaagaaggtagcggaagaggaggacgacaagaaggttgcagcgacgccgcagccggtcgcaaaagctcaggtggtgggatggccaccaatccgaagctaccgcaagaacacgatgtctaccacccagctgaagggcagcaaggaggatgctgaggccaagcaggaccaggggttcctgtacgtcaaggtcagcatggatggcgcgccgtacctcaggaagattgacctcaagacttacaagaactacaaggacctgtcgactgcgcttgagaagatgttcagtggcttcagtactggtgagatgtctcgggttactctcctctcccggatggcacgtcagtatgtaattgtgtttcattttgatgtggatggtgtaagaagtacatcaagaagccttttaaaagcatcataattgattccttggataagcaatagctttgacttaccgttagttttgagtaattgtgagattacaaacaattgattccttggataggcaatagcttcgacttaccgttagttttgagtaattgtgaagatacaaacaatctggcacatcttctttttttatctttagtgaactttttattccttgctaaacaaataccctgctgcttgttctgttattgcatttgcatcaagtctttcttagaaaagattttatttcctgtaaggcaaaataatttttgtctccatgttatgattattcgaggatatcttcgggtcctgagtattattccagaaagctactatcactatgagagcaacatccactatatatttctgaaatttggagatctatggtctgtcctgtatttgtatatctaatatctcattagttgtcaccactttcttagaatcatggacatgaaaatgcggtccgagtcttttcagtagaaattttagtacaagaagaggttctcttctgctttccttttattggtcttacaggttagtatgggtgtaatgccatatcaggcaaggatggcttatctgagtaccgcaaggatggtgaatatgttctgacttacgaggacaaggatggagattggatgcttgttggcgatgtaccatgggagatgttcgctgactcttgccgcaggctcaggatcatgaaaggatcagatgcaattggacttgctccaagggcagctggtaagtccaagagtcgcgactagagttggggcttcttacagtcctgagcaggaggggaatatccagtggctgtgggggat

SEQ ID NO: 2470 - DNA, 924 bp, Zea mays
  Clone ID: TF_ZmC1407_2
attgggtacctcgaggccggccggcgggaggcagcagcagcatggcggagtgcaaggacgacgacagcggccggcggtctccgtcgtcgtccatggacagcagcacccaccccccggctctctccaccgcgtcctcggcctcccgccacccggcggagaggagggaccagctcagcgccgacctgcagctagggctcagcctgtcgccggcgtcctccgccctcctggtcgcggagaccaacaacagcatcgtcccttctacgccaaggaaccaagcactcccggattggcccccgatcaaaccgttccttagaagcgccctgacagcctcggcacgccgacggcgaacgttgttcgtcaaggtgtacatggaaggcgtcccaatcggccggaagctggacatgctcttgctggatgggtacagcagcctcctagcgaaactttgccacatgttcaaggcatctatcacttatgctgacgctgtggagtaccatcagcgggttcctcacgagaaggccgcgcatgttctcacctatgaagaccatgatggagactggatgatggttggggatgtaccgtgggagctctttctcggaagcgtaaagaagctgaggattgcgaaaacagacagatgctagatagcaaactttttcatgcggtggatcgactctgtttcttcttcttttaatatatattaggttcattaggaaagattttgctgaactaaagagtggagtcgtgatgctgaggctatactaaccgtgtacagtgtactgaagaaacgccagccttgctaccacccctgcaaaattaaattttggtattttatgtttcctttccctgtttctttgactgccttgtaaataccatggttatttgtttatcaacaaggagtttgcatggaaaattttattgttccaagcg

SEQ ID NO: 2471 - DNA, 1032 bp, Zea mays
  Clone ID: TF_ZmC2833_10
agcaaagggcttttttttttttttttttttttgaagcaacgaccaggctgctgatcgatagatagacaatagactgatagacaagaaagaagagtgatctttggctttgtacaaccacgcatcatggagattcaactcgactctccactccttttgcatgtcttgctaaacacacacacacacacccctacaaggggcacaaaagaaaaagaacaaagcgaccacacatcattccacgcatgcacaaagcttccctctctctctctctctctctctctctctctctctctctctctccttccaagcaagcagcttcatctttcgcctcgccatgtctctggtttgctgctagctgctgctccattgttggcacagacaatgctaggggagaaggtacataatactcaacaccacacgcccacacccatgcagggacgccttggagaagaaataagaccccaaaagaacaaaagaatttgctggcgcatgcacgcacgcacagcacaagcatgcgatagacgcctcatcatcagttgttcttggccgagccgagccctctcgcttcagaccctttcatgatcctcagcctcttgcaggtgctgatgaacatgccgaagggcacgtcgccgacgagcatgaggtcgccgtccttgtcctcgtaggtgacggcgaagtcggaggggttgacggcgggcgcgtcggcggcgccggagaagcagaggaacatggcctccagcgcctcccgcagctcgcggtagcccttgtacatcttgaggtccaccttcctgaggtagggggcgccgtccatgctcaccttcacgaacaacccgccggcggccggggcctcctccgccagggctgccgccggcttgttcttggccgccgcctgctgctggaagcagctcttcctgtacgacctcaccggcggccatcccaccagctgagccttggcggccggcggcggcgcggcgtcggcgtcggcgtcggtctcgcagtcgcgcttcttgggcgcgtcctcgggcccgctgctgg

SEQ ID NO: 2472 - DNA, 1400 bp, Zea mays
  Clone ID: TF_ZmC1405_3
ccccgcgtccgactgggctcactcatgctccaactaactgctaagttgcaaccccactcccatttctatctctctcctcctgccatcaccctagaataggagcatttaccactgctttctctctctctctctcttccatcctcatgctccctctatatatacacatctccaccctgttcctgggtcctctcttccacccactgcaaccccaaatctctccttcctcacacacgcgaagctgagagaccaaagaagaagaagaaggagcgagcaagcagaaagttagctagctgctagcgtggaagtgcccaaggcgagagagagagacaagcctaggacggccgcgccaggctagccagccagctgctagctcctgcggacgagccgatggctggcgccgacgtcgacgtcgggacggagctccggctcggcctgccgggaggaggcgccgcggcggccaagaaggacaccatcgacctcaagctgaagctgcccaccgccggcatggaggaagctgctgccgccgccaggccggagccggcagccgagaaggccaagaggcccgccgaggcgccggccgccgatgccgagaagccacctgcacccaaggcacaggccgtgggctggccaccagtccggtcgtaccgcaggaacgccatgaccgtcgtccaggccgtgaggagcaagaaggaagaggaacctgagaagcagcaacagcccgctgccgccaacgccttcgtgaaggtcagcatggacggcgcgccctacctgcgcaaggtggacctgaagacgtacggcagctacaaggacctctccgctgcactcaagaagatgttcggcaccttcgtcaccgcaactgggaacagcatgaacgaggggagattggttgatccggccggcgatgctgatgatgtggtcactacttacgaagacaaggatggtgactggatgctggtcggcgacgtcccgtgggagatgtttgtcgactcatgcaagcgtctgaggatcatgaagagttctgaagccataggtcttgcaccaagaacgaaggataagtgcaagaacaagagctgaagaagatgcagtgttaaagatgttgcccattgtatcagaagaatggtccccttgcagtgcgctgccgttttttttttcctactagaaatataacgcgttttaattactagttggagggagacctgtcttgttcaactcgttcatggaccagaagcaataatatatccgtgtgtagctggattggtgttatgtcatgtcccctaccgtgtctcccagaatctacttggtgattttattccagtgttgttaatcaagtttatgtgattgttaagtaaagggcatcaatgggactattattattcgtgggctggccaccagtccggtcg

SEQ ID NO: 2473 - DNA, 664 bp, Zea mays
  unsure (1)..(664): unsure at all n locations
  Clone ID: TF_LIB3689-238-Q1-K6-B1
acagaattggcttgttatttttaatggaatgaaataaatattcacgctttctgacatagaatcccctagaagggttaggtacatagaataagtatggatagtcttttccaatgcgataaaataaagcgacatcgtgtctatttttctttgctaaaggggtatttccatgggtttgccttggtatcgtgttcatactgtcgtattgaatgatccgggtcgattgctttcggtgtttaggggggtgaatgtaaaaaaactcaagatatgtatcttgacgaagacacagtgtcttagctctatgttcgagacatgagactagctgattggtcactttaatttattgaatgctctgattggtacaattaatatggtaagacacatgttttagacacgtccactgtattatgttgtgttttaggtgtgtcttatacttggagtaccgtgcaacagtgtctaggttgtacatgcccttaggtttcgtggctcattttttttctcaactaaatacatgtttagctgccacatcgtctttcgctccaattgtaggatgttcgccggctcctgccgcnagctcaggatcatgaaaggctcagatgcgattggactcggtatngttgtgctcctgttatgtctagtgtatcgncgcgctaatcatgttgtcttg

SEQ ID NO: 2474 - DNA, 670 bp, Zea mays
  Clone ID: TF_ZmC1206_12
gcgctccctcccgagctcctccggctcacggtcacgcctcgtgtccccccaccccctgctgctcctcctcctcaagaaatggaaggtgatctacacagatgacgaggacgatatgatgctggtcggggacgatccatggagtgaattctgcaggatggtaaaaaggatatacatttattcctacgaggaggccaagtctttgactcccaaggcgaagctgccggccatcggtggtgacaccggcgtcaagccggacccaagcaaactgccagcagaatccgacgtgccacagagcgactccgacaacagtgctcccgttgctgctgataaggactgatggacgctagctcggccgtaccttctctttggatttgcgcttcgccggcccaaaggacgtacggtgccctgcaccatctgcctcggcttggaccagcgaggatggccgggagggagtgcatgcccgttccgtgcgtgtttcgtttgccgtgtttggtaggagccatggcttgttgccgccggcgctacatgggttctgtagactgttacactgactgctgccgtctcacctggccgccccctctcacctctctagtaatatactagggcttatgtacacagctgttttggtagtggcatatgtatatcgtcggtcatgttgcttgcgacattt

SEQ ID NO: 2475 - DNA, 397 bp, Zea mays
  Clone ID: TF_LIB3116-025-P1-K1-C6
gcccgccgttgagggcttccagaaggaacactttccaggcggaagcggcggaaacggccaaaagggccgaccaaaaccagaaccagggaggcctgtccttaaaggtaagcatggccggccccccttacttaaggaggggggacctccggttgtccaagggttccagggagttaaggggggttttggacccccttttaacaaactctttttccgggggggaaaagggcggggggaacaacaaccagaacgccttggtttacaaggccaaggacgggaacttaatgctcgccgaaaacgtgccctgggatatgttaattttttcgtgcagaaagttaaggataatgaagggttttgcctttgaggccaggggatcgttgatccatacataaacagaggt

SEQ ID NO: 2476 - DNA, 1170 bp, Zea mays
  Clone ID: TF_ZmC784_12
ctgtgcggcgctcgaggcggccggtcgggaccatcacacacaaacagccactcctcacctcccccgtcctccggttcatgtcctgctgctccccatgtcgcccccactcgacctcgactacataggcctctcgccggcggcggctgccgccgctgcccacgacgacctgaagggtaccgagctccgccttggtctgccggggtccggttcgccggaccgccgtgttgtggctgccaccgcaaccaccctggacctgctcccggctaagggcgccaagcgctggttttctgacgaggcgccgacgccatcgcccggtgcagcttccgggaagggaaagaaggtagcggaagaggaggacgacaagaaggttgcagcgacgccgcagccggtcgcaaaagctcaggtggtgggatggccaccaatccgaagctaccgcaagaacacgatgtctaccacccagctgaagggcagcaaggaggatgctgaggccaagcaggaccaggggttcctgtacgtcaaggtcagcatggatggcttatctgagtaccgcaaggatggtgaatatgttctgacttacgaggacaaggatggagattggatgcttgttggcgatgtaccatgggagatgttcgctgactcttgccgcaggctcaggatcatgaaaggatcagatgcaattggacttgctccaagggcagctgataagtccaagaatcgcaactagaatggttgcttcttacagtccagagcaagagggagatatccagtgactgtagggatctttgtggaagccggaaaacgtctaacagtttcaagaagaatttctgccttatggtctgtaccacatgtttttgctgctacgcaagtaaagaactccacgtctgtcaatgttagttttacaacatcgtctacggacaaaaaaaaaaaaaccccccgctatttgattgttgctaagccttcgtacgacgtgtaaatggtttggtacaatgagtgctgcgactacgattgagcacccctctacctagtttgcaaaaaaacagtgtcccatggactgtctgttgtccctctatataaatgtccaatgaagcttgctaatgtgtggtcatcgtgttcatgttctggtccattcatatccccagtgtttaaaccctgacccagcaacttgtttcg

SEQ ID NO: 2477 - DNA, 1646 bp, Zea mays
  Clone ID: TF_ZmC1405_6
ccggccgggccggggaccgactctcggcaacggatatctcggctctcgcatcgatgaagaacgtagcaaaatgcgatacctggtgtgaattgcagaatcccgcgaaccatcgagtttttgaacgcaagttgcgcccgaagccttctggcggagggcacgtctgcctgggcgtcacgcgtcctctcttcttccaccaccacctcctactccgctgcaaccccaaatctctccttcctcgcatacgcgcgcagcagaggagctgagaccaacgaagaagaagaacaaccgagcaagcacaagcttagctagcgtggaggtgcccaaggcgacgacggccgccgcgccaggctagccaaccagctgctcatcgctcctagctgcggagccgatggctggagccgacgtcgacgtcgggacggagctccgcctcggcctgccaggaggaggcgccgatgcggccaaggctgccaagaggggcttcgaggacaccatcgacctcaagctgaagctgcccaccgccggcatggaggaagctgccgctgccgccgccgccaagccggagccggccgccgagaaggccaagaggcccgccgaggcgccggccgctgatgccgagaagccacccgcacccaaaaacgctgagccggtcgcaaacaagaatataaacatgcatgatctggctaccatagtaaagaaatatcagtttgaagctctgacgaggataattgttaccagggcacaagctgtgggttggccaccagtccggtcataccgcaggaacgtcatgaccgtccagtctgtgaagagcaagaaggaagaggagcctgagaagcagcagtccgctgccaacgccggcggcaacggctccgccttcgtgaaggtcagcatggacggcgcgccctacctgcgcaaggtggacctgaagatgtacaacagctacacggagctctccgttgctctgaagaagatgttcagcaccttcaccacatccgggaacaacatgaatgagggaaaactagttgatccggtcagcggtgctgatgtggtcactacttacgaagacaaggatggcgactggatgctcgttggcgacgtcccgtgggagatgtttgtcgagtcatgcaggcgtctgaggatcatgaagagctctgaagccataggtcttggttagtgtctccagataaaattatcttccatagttccattataagatttacatgtcaactctaaccgcctatgttttcttcatttaaaaaaaaatacagcaccaagaacgaaggacaagtgcaagaacaggagctgaagaagatacagcgttaaagacgctgcccgttgtgtcaaaagaatggtgcccttgcagtgtgctgcggtttttctagaaatataatgcgttttaattactagttggagggagacctgtcttgttcaatttgttcatggaccagaagcaataatctatctgtgtgtagctggattggtgttatgcgatgtcccctaccgtgtgtcccagaatctacttggtgattttatcccagtgttgttaatcaagcttgtgtgattgttaagtaaagggcatcaatgagactattattattatggtaccttgtaagttaacctgtttgttaattgtcattataatatttggc

SEQ ID NO: 2478 - DNA, 1467 bp, Zea mays
  Clone ID: TF_ZmC790_1
cgtcgactggctctgccgggacggcggaacgatgctttttgactgtctctctctcctcacctcaagtccccgaaccagtagtgcaccaagaaccactccatccatctccatgggagactccggaggaagaagaggaccacctcttcctcggctgctagatctcatcccggacgggaaagaacggaaggggagggaagcgcaagacgcgggaaggtcgaagaacagcggcggcttcgggggcgaggaggacgcgaagctggagctcaagctcgggcctccgggtctcactctcgtagaagaaggaacgacagctaccgtgccaagagatggaggcgtactacagcgagagacgacgaccaccccgaccctctcgctcgggtgcttcccacgtaacccctccaagcctgcggtagacgcagctacagctgggacgaagagggggttcttcgacaccgccgtcgaggccaagacagaaggccgcgacgagcggatggagcagcaggccggagctggatgtgggaacgagctagcactggacgagaagacggcagccgcggccgcgagtgagagacagaaagggtcctgctgcccgccgacgccacagcacgcccctcctgctgcgaccgtgcacagcggagcacacgtcctgcagctgggaagaaggcctcccacgcgtccgcccacgcgtccgcccacgcgtccgcggacgcgtgggcttgctcatcatcatcatggaagctcctccaaacaacccaccgagccacagaacagcgaagctagcaggaaggagaagcctgcctgcaagaagaaccctctcgtaaaaatcaacatggacgggatccccatcggaaggaaagtagaccttgcagcctacgacagctacgagaggctatcactgggcgtcaaagagcttttccacggttttcttcaagctcaaaaggatatgtctccaactgctggaaagatattctctcaattgttggatggatctggcgaatataccctggtctacgaagacaacgaaggagacaggatgctggtaggggacgtgccgtggaatgtgtttgtgtcaactgctaaaaggctgagggttttgaggagctcggagcttgccaaaggtttggtaggcacaaggccacctcagattgcggtagctccgagaagaggaccaccagattgctgaaagcctgaaacagcgacaaaattctgatcatttggaatgtgagcaagcaaactgaacccggaccttttgtgatgtgacggtaccttttttttgcctgtagaaactaatctagtgagatgaactgccatttcagtctttcagatgtatgcggaggtcctggatattttgtaaattaggctaccatgtgactcgttgctgtagggtaataatgtcctaatgtaattcaacatgggcattaattggacttataagagaaatttcgcagatgcaagatctaccaatgt

SEQ ID NO: 2479 - DNA, 625 bp, Zea mays
  Clone ID: TF_ZmC790_2
ctcgtaaaaatcaacatggacgggatccccatcggaaggaaagtagaccttgcagcctacgacagctacgagaggctatcactgggcgtcaaagagcttttccacggttttcttcaagctcaaaaggatatgtctccaactgctggaaagatattctctcaattgttggatggatctggcgaatataccctggtctacgaagacaacgaaggagacaggatgctggtaggggacgtgccgtggaatgtgtttgtgtcaactgctaaaaggctgagggttttgaggagctcggagcttgccaaaggtttggtaggcacaaggccacctcagattgcggtagctccgagaagaggaccaccagattgctgaaagcctgaaacagcgacaaaattctgatcatttggaatatgcatgccgaggtcctggatattttgtaaattaggctaccaataccatgcgactcgttgctgtagagtaataatgtcctgatgtaattcaacatgggcattaattggacttataagagaaatttcgcagatgcaagatctaccaatgtaaaattacccgttctgtgcgacagataaaaaaaaaaaaaaaaaaaaaaaaaaaaaaaaactcgaggggg

SEQ ID NO: 2480 - DNA, 1566 bp, Zea mays
  Clone ID: TF_ZmC2833_4
ggccgctcttttttttttttttttggaacaattcctcccctgcaatttcaacactcgcaattacagaagcaacgaccaggctgctgatcgatagatagacaatagactgatagacaagaaagaagagtgatctttggctttgtacaaccacgcatcatggagattcaactcgactctccactccttttgcatgtcttgctaaacacacacacacacacccctacaaggggcacaaaagaaaaagaacaaagcgaccacacatcattccacgcatgcacaaagcttccctctctctctctctctctctctctctctctctctctccttccaagcaagcagcttcatctttcgcctcgccatgtctctggtttgctgctagctgctgctccattgttggcacagacaatgctaggggagaaggtacataatactcaacaccacacgcccacacccatgcagggacgccttggagaagaaataagaccccaaaagaacaaaagaatttgctggcgcatgcacgcacgcacagcacaagcatgcgatagacgcctcatcatcagttgttcttggccgagccgagccctctcgcttcagaccctttcatgatcctcagcctcttgcaggtgctgatgaacatgccgaagggcacgtcgccgacgagcatgaggtcgccgtccttgtcctcgtaggtgacggcgaagtcggaggggttgacggcgggcgcgtcggcggcgccggcgccggagaagcagaggaacatggcctccagcgcctcccgcagctcgcggtagcccttgtacatctttaggtccaccttcctgaggtagggggcgccgtccatgctcaccttcacgaacagcccgccggcggccggggcctcctccgccagcgctgccgccggcttgttcttggccgccgcctgctgctggaagcagctcttcctgtacgacctcaccggcggccatcccaccagctgagccttggcggccggcggcggcgcggcatcggtgtcggtctcgcagtcgcgcttcttgggcgcatcctcgggcccgctgctggcgacgacgtcgcgcttcttgcctctgggcgtcgacggcggcggcggcggcgccttgttctgggactcctcggcctcctcctcctccgtgcccggcaggccaagcctgagctccgtcgccctgaggctgtcaacgtcgtcgtcggccttgaatccgtagcccgctgccgatgctgcggcgacctccattggcgtgtcttcttgcttcttccgcacggcccgcgtgggcaataaaggcggtggttgcagcaaccggcgtcgagaggccgacgagctgcgctgtgctctgtcttggtccttgctggtgatgcccttggcgcggtcccggccggcagattcagattatggtcggaatgtatcttgtaccacagagaaattttatccgtgctcgtcggtgtagaataaaaacggcacccttgcacatattgtacattacatcgaaacacatagctttgttttctacaaaattgaaaactcaaaagtttcagaagtggatgccagtagttccc

SEQ ID NO: 2481 - DNA, 1674 bp, Zea mays
  unsure (1)..(1674): unsure at all n locations
  Clone ID: TF_ZmC1405_1
gctccaaaccgactttgtatcgtagtggttaaagacttagactgctcttggtgagatcttgaggtcgattcctcgaatcgcattgaatttactgcgtttttaaaaaaaaaaaaaaaaaaaaaaaaaaccattggcctcgagccggccgggccctctcttcttccccaccacctcctactccgctgcaaccccaaatctctccttcctcgcatacgcgcgcagcagaggagctgagaccaacgaagaagaagaagaacaaccgagcaagcacaagcttagctagcgtggaggtgtccaaggcgacgacggccgccgcgccaggctagccaaccagctgctcatcgctcctagctgcggagccgatggctggagccgacgtcgacgtcgggacggagctccgcctcggcctgccgggaggaggcgccgatgcggccaaggctgccaagaggggcttcgaggacaccatcgacctcaagctgaagctgcccaccgccggcatggaggaagctgccgctgccgccgccgccaagccggagccggccgccgagaaggccaagaggcccgccgaggcgccggccgctgatgccgagaagccacccgcacccaaggcacaagctgtgggttggccaccagtccggtcataccgcaggaacgtcatgaccgtccagtctgtgaagagcaagaaggaagaggagcctgagaagcagcagtccgctgccaacgccggcggcaacggctccgccttcgtgaaggtcagcatggacggcgcgccctacctgcgcaaggtggacctgaagatgtacaacagctacacggagctctccgttgctctgaagaagatgttcagcaccttcaccacatccgggaacaacatgaatgagggaaaactggttgatccggtcagcggtgctgatgtggtcactacttacgaagacaaggatggcgactggatgctcgttggcgacgtcccgtgggagatgtttgtcgagtcatgcaggcgtctgaggatcatgaagagttctgaagccataggtcttgcaccaagaacgaaggacaagtgcaagaacaggagctgaagaagatacagcgttaaagatgttgcccattgtgtcaaaagaatggtgcccttgcagtgtgctgcggtttttctagaaatataatgcgttttaattactagttggagggagacctgtcttgttcaatttgttcatggaccagaagcaataatctatctgtgtgtagctggattggtgttatgcgatgtcccctaccgtgtgtcccagaatctacttggtgattttatcccagtgttgttaatcaagcttgtgtgattgttaagtaaagggcatcaatgagactattattattatggtaccttgtaagttaacctgtttgttaattgtcattataatatttgacaaaaaaaaaaaaaaaaaaaggcccctgccaaaaaaaaaaaaaaaaaaaaatcgagggggtttcttgttcaatttgttcatggaccagaagcaataatctacctgtgtgaagctggattggtgttatncgatgtcccctcccgtgtgtcccagaatctacttggtgattttaccccagtgttgttaatcaagcttgtgtgattgttaagtaaagggcatcaatgagactattattattaaaaaaaaaaaaanaaaa

SEQ ID NO: 2482 - DNA, 975 bp, Zea mays
  Clone ID: TF_ZmC13155_1
cattgggaccctcgaggccggccgggagcaagagggcgaggctgtgtgtgagagagggggaggcagagaacattcggcagtgtgagaatcggaatcggagatggcttggaatggccgcttcggcgacgacgaggaggggagcggccttgagctcagccttagcctcccgggctacttctccggatcgccaacccaagctgcagcaggtttcgaggacaaagcagacggcggctctgctgctgctgctgctgctgggcgagcaaagggaagcaatggcttcaaggccaggccggcggcagctgctccggtcgtgggatggccgccagtgcgcgcgttccggcggaacctcgcctcggcgtcctccaagccgtcccgcgatccgccaccaagccacagaggaaacgagtccgcgcgccgccggcggcaaggccgtcgagggcggcaacaagggcctgttcgtcaaggtcaacatggacggcgtgcccatcggccggaagctcgacctggccgcgcacgccggctacgacacgctctccgccgccgtcgacagcctcttccgcggcctcttcgctgctcaagcggcggggccaggcggggagcggcaggctgtcgcgggtatcctgagcggcggcggcggcggcgagcacacgctggtgtacgaggacgacgagggcgaccagatgctggtcggggacgtgccgtggcagatgttcgccgccaccgccaggcgtctgcgcgtgctgcggagctccgatctcaacccctcgtcgctaagggcagcgaccaggaagagagctgcagcttagtgctgcgctggcgtaccctggagtctcaactctgaacattttgcggccttttcggagggccaccaatgtaaaattgaagcggtttttcgtggatttttgttaccattaccatcatgtatgtgatcaagtagggaagcaggaatctagaggagatgagtggtgttgttag

SEQ ID NO: 2483 - DNA, 771 bp, Zea mays
  Clone ID: TF_ZmC37343_1
agcagtggtaccgacgcagagtactttttttttttttttttttttccgttttttgaggtgaaaaaaatatgacaaaggtgacagggttcaatagtttaggcgccacatggaaccgtcagcttttagatatgagaagatatagagaactacagggctaggtcacctctacagtgagtgcctgcatccatactttcatagaccaattcttgcctgccatttagagcttaggctatggctacacgtagctacaacagctatcgtacaacatgtccattaccataatgatacaatggatctagctatattaacgactaggttatttctgaccaacacaacttgagagaagatagatcataggaaccgaaaagactcgtggacggcaatcctgcggtgctgaattgccggttttggttcagaacttcagtttctggtcttcatctcggtctcagtagtccagaggcaccacaggtgcgatgctgccggtgagattctgcatgtcgtggcctgcagaataatcatcgcagacactgccctgcagtgtcctcactccagttgtagacagaaggtcgcctccgccgcggaccatctgctgcacgtcttgcggcgagaggatctttatgcaccatacactattcacaaactcctgccacgggtcatcgccgacgagaagaatatcgttttcccggtcaacgaatacaagctgccagcctgatcttacagggtccctccagttggccttcaagaccaaataaccgctcgagctcgctacgt

SEQ ID NO: 2484 - DNA, 664 bp, Zea mays
  Clone ID: TF_ZmC792_1
gtccttcaggagaaacctcgcaaatggcagctcgtctaagcaatccctcgagcagcaacaacaaaacgatgatgaagcctcctgtgacaaggcgaagcagacctgcaagagaagcccgctcatcaaaataaacatggacggcatccccattgggaggaaaataaacctctcagcgtacgacagctaccagaagctttcgtctgccgtccaagatttgttctgtggcttccttgatgcagcccagaaggatgaatctagagggcgaggagcagaagagaaaatgttctcagggttgttggatggaactggtgagtacactttagtttgtgaagacagtgaaggaggcaggacactagttgggcacctaccatggaatgtatttgtttctaccgctaagaggctgagggtcatggaaagctctgaacttcctcatggcctgattaaaactgcctccaagagggctgatggctgatatgaggccaagtcgcgcccagccttcgaatcatgcaattgcaagctatgccaatcattggcttcttcggatggccctttttggcttgtagagagaaatctaataagataatgttagcatatcgcagatgccctgaatgcactgtgcaccttttgtaattttcgtcgctctgtttcagatgtggtgctgatc

SEQ ID NO: 2485 - DNA, 400 bp, Zea mays
  Clone ID: TF_LIB3245-012-P2-N1-D10
tatagaagagctatgacgtcgcatgcacgcgtacgtaagctcggaattcggctcgagtcgtgaaggtggccgtggacggcgcgccgtacctgcggaaggtggacctcgcggcgcacgacgggtacgcggccctgctccgcgcgctccacggcatgttcgcctcctgcctcgttgccggagccggagccgacggggcggggcggatcgacaccgccgccgagtacatgcccacctacgaggacaaggacggcgactggatgctcgtcggagacgtccccttcaagatgttcgtggactcgtgcaagaggatccgcctcatgaagagctccgaggccgtcaacctatctccgaggacatcatcccggcagtgattggtggtgctgtggacgccatatgccct

SEQ ID NO: 2486 - DNA, 1288 bp, Zea mays
  Clone ID: TF_ZmC6227_1
cgcacgcacgcactcgcctccgacagcgaccgcgcaacgtccttctcccgcgcctcccggccggccggtccctgttccctctcctcccctcggagcagcaggagcaggagcagccgcgttcgtcctctgcgctgcgcggcccgccggcctgaccaagcaaagcttatcggccggagccggacgaacgaacgatgcagcaggacctcagaaactcagagagaagaaacccggaacaggcgcatccagtgatgtcggcgagctcgaccaactccgcggcttccccggccgtgtccggcctcgactacgacgacacggcgctcaccctcgcgctcccgggctcctccgccgagcccgccgccgatcgcaagcgcgcccacgccgaccacgacaagccgccatccccaaaggcgcgggccgtgggctggccgccggtccgcgcgtaccggcgcaacgcgctgcgcgacgaggccaggctcgtgaaggtggccgtggacggcgcgccgtacctgcggaaggtggacctcgcggcgcacgacgggtacgcggccctgctccgcgcgctccacggcatgttcgcctcctgcctcgttgccggagccggagccgacggggcggggcggatcgacaccgccgccgagtacatgcccacctacgaggacaaggacggcgactggatgctcgtcggagacgtccccttcaagatgttcgtggactcgtgcaagaggatccgcctcatgaagagctccgaggccgtcaacctatctccgaggacatcatcccggcagtgattgttgttggtgtggacgccatatgccctacgcggcttatctctccgaattagttcacagagtgtgtgctggaagaggcttggctgctcaggtcctccatgcacacgtcatacaccgtacgtagggtgagggttcagtctgttgctgtgtgttctgtacaggccacaccacacacgcccccatggaaaactttttcagtttcgagtgcccctccctctcggccggacggtttggtttttggacgacgccggcgaggaggcggcgctagcacactagtagctccgtttccgtgtgttctttcatacttggctttggtttccgtttcagtcttcggccctcggtcgtcttgtctcgactctcgagggatccatgtatacacgaacatggtacatgctgtgtgctgtttccattgtataaggtcaaagaatacaagtacgatctgtttctgttctcgtaaaaaaaaaaaaaaaaaaaaaaaaaaggaaaaaaaaaaaaaaaaa

SEQ ID NO: 2487 - DNA, 610 bp, Zea mays
  Clone ID: TF_ZmC3003_2
aggagcccaatgcgctgctcgagggcgtcgccgtcgcgggcctcgtcgggattatgcgccagcgcggatcatgtgcggagcgaggcaggttcatatccaaacaagaagccacgatggaatctggatttcccctctatctgatggaatctggatttggtgccagtctgttttcctgtgattttgggataccagccccattccccttcatggagggtatgcgttgctgttggtcggcacactggaatggaacagatatagacagaaccttcaggttcataagcaaggagttgcgcttgaccgatctatggatctctctagatgcactgactaaggtgaattgaaagcggaactagacatgatgtttgaattcgagggtgaattagtatctgcaaaccaaaactggcagattgtttataccgacaacgagggtgatatgatgcttgtgggagatgacccgtgggagaatttgatgtggttgtgtatgatgtactttatattttggcatactatgcacaaaaacaaatgccttctatgaccatcgtgatttatacattttcaaacaaaattttatgataaaaaaaaaaaaagggcggccgccaccgcggtggag

SEQ ID NO: 2488 - DNA, 1172 bp, Zea mays
  unsure (1)..(1172): unsure at all n locations
  Clone ID: TF_ZmC13783_4
cgagcagcagcagcaacaggcatggaagcaaaagtttatgggctcacagtcgatgtcttttgggggctcggtttcacttaactcacccactaccaaagatggtcctgttgacaacaaaattggtcgtgatgtgcagaaccagaccctttttagccctcaagttgactcttcctccctactgtacaatatggtacctaatttgacctcaaatgttgcggataataatatatcaacgattccctctggatcaacatatctgcaaagtccaatgtatggttgtctggatgactcttctggtttattgcaaaatacaggagagaatgatccgacaactagaacattcgttaaggtttacaagtcaggatcggtggggagatccttggacatcacccggttctctaattatgctgaacttcgagaggaactgggtcagatgttcggcattaagggtcagttggatgaccctgatagatcaggctggcagcttgtatttgtcgacagggagaacgatgtgcttctccttggagacgacccatgggagtcatttgtgaatagtgtatggtacatcaaaatactttcacctgaggatgtgcataagatgggaaagccaggaaacgatccacgctacctatcttaaattgatacccagagctctttcgggctcccgtgacgattctgtggcacactgtagcactgtccatggcggtccggtgtgctgtgctcgcatgttcgcccgtgtcatctatagcatgtacaccgtgcgcgtcttcagaactcccccgttacttgtatccggtgcaggccaccgctctggactgatatcttgtaggttccacttaggaatcagtatcagcgactctatcctagttggtttgtagctcgcacggcactcgttcttgtgtcgcatcgaaatcttcaggctaaatgcttagttgaaactgttcccgtgattcttaagctatctatgtatttgaggattccccggcatgctttcgacgatgaactgcaataatttgaatgcaggaggattgtttgagggtagctacgctgccccgcgcgctagttcccgttccttgactcgggctccctttctttttcgcgccgggccgtggntccgcgtcccccncttggggcgcgttcctcggtctcctccccgctgggggcgggttctg

SEQ ID NO: 2489 - DNA, 747 bp, Zea mays
  unsure (1)..(747): unsure at all n locations
  Clone ID: TF_ZmC13783_6
aagtccaatgtatggttgtctggatgactcttctggtttattgcaaaatacaggagagaatgatctgncaactagaacattcgttaaggtttacaagtcaggatcggtggggagatccttggacatcacccggttctctaattatgctgaacttcgagaagaactgggtcagatgttcggcattaagggtcagttggatgaccctgatagatcaggctggcagcttgtatttgtcgacagggagaacgatgtgcttctccttggagacgacccctgggagtcatttgtgaatagtgtatggtacatcaaaatactttcacctgaggatgtgcataagatgggaaagccaggaaacgatccacgctacctatcttaaattgatacccagagctctttcgggctcccgtgacgattctgtggcacactgtagcactgtccatggcggtccggtgtgctgtgctcgcatgttcgcccgtgtcatctatagcatgtacaccgtgcgcgtcttcagaactcccccgttacttgtatccggtgcaggccaccgctctggactgatatcttgtaggttccacttaggaatcagtataagcgactctatcctagttggtttgttgaaactgttcccgtgattcttaagctatctatgtatttgaggattcctcggcatgctttcgacgatgaactgcaataatttgaatgcaggaggattgtttgaaaaaaaaaaaaaaaaaaaaaaaactcgag

SEQ ID NO: 2490 - DNA, 834 bp, Zea mays
  unsure (1)..(834): unsure at all n locations
  Clone ID: TF_ZmC1249_9
aagatgtttgacttcgaagggtgaattggtatctggtagccaaaactggcagatcgtctataccgacgacgagggcgatatgatgcttgtgggagacgacccgtgggaagagttttgcagcatagtgcgcaagatttacatctacccgaaggaggaggtccagaagatgaactcgaaatcagctgcgccaaggaaggaggaatctccggcaccgggcggcggaggttgccccccccccaacgagtagtatgtatggtggttctccgtttggttgcttccccccggtttgcttttggcggcaagttgaggccaaggttttactactgctattgttattgccgatttgctctccccccttccggtgtaaatatctgtgtgtacccagtcccagccttgtgctagtaagtagcaaccagttttcccttttggtattttaaccagcagctaaattcgcggcattttagtccctgtaagcggtaagcagctttgtagcgtgagatagatggccaagcgccggtacgtacgtgtagtgtctggtcttctccctgagtgtactataaagagttaatataggagctgaccctgtgaacccgcgtgatggatgcatatgcttagtgcaaacctgcattttgtctctatttgaccatctgtacacgcatgatcgccttgcttgcctggtgtctggtctgctgatggcagcgcaaagcgaaaggcaaatgcattgaagggaaggcaagtggaggttggagttgatgctgncgngtgcgggcgcgatttgctgtncctttncggtgtgcggtgttgactgacgcgcgcgagcacgaaactggggga

SEQ ID NO: 2491 - DNA, 765 bp, Zea mays
  Clone ID: TF_LIB4746-023-R1-K1-H9
ggtacaaaccggccttccggtccctgttccctctcctcccctcggagcagcaggagcaggagcagccgcgttcgtcctctgcgctgcgcggcccgccggcctgaccaagcaaagcttatcggccggagccggacgaacgatgcagcaggacctcagaaactcagagagaagacacccggaacaggcgcgtccagtgatgtcggcgagctcgaccaactccgcggcttccccggccgtgtccggcctcgactacgacgacacggcgctcaccctcgcgctcccgggctcctccgccgagcccgccgccgatcgcaagcgcgccgtacctgcggaaggtggacctcgcggcgcacgacgggtacgcggccctgttccgcgcgctccacggcatgttcgcctcctgcctcgttgccggagccggagccgacggggcgggacggatcgacaccgccgccgagtacgtgcccacctacgaggacaaggacggcgactggatgctcgtcggagacgtccccttcaagatgttcgtggactcgtgcaagaggatccgcctcatgaagagctccgaggccgtcaacctatctccgaggacatcatcccggcagtgattgttgttgctgtggacgccatatgccctaggcggctaatctgtccgaatttgttcacagagtgtgtgctctggaagaggcttggctgctcaggtcctccatgcacacgtcatacaccgtacgtagggtgagggttcagtctgctgctgtgtgttct

SEQ ID NO: 2492 - DNA, 818 bp, Zea mays
  unsure (1)..(818): unsure at all n locations
  Clone ID: TF_LIB4742-134-Q1-K1-A5
cctcgaggccggccgggacctcttcaatcccagtcccacacaaagtttctcctcgatcctcatcttctcctactcatctcctccccctccctccctccctctctcgagtcaagagcagagcagctaccaaacaagctatcccctttcgcttccgatccatggagctcgacgccgacaacctgagcgccaccgagctccgcctcggcctgcctgggaccagcagcagcagcagcagcgacgactggcagaagaagccgtcgccctccgtcggggccaagcgcgctctggacgacggcaccaagagcgaggcctcagggaccagcacggccgccggagacctcgacttcgaccacgaccacgacaccgccgcgcctcccaagtaagaactagaccccccatggcgcaagtggtcgggtggccgccggtgagggcgtacaggaagaacaccttccaggcggcggcggcggccaagaaggtcgagcagaagcagaagcagcagcagcagggaggcctgtacgtgaaggtgagcatggacggcgcgccgtacctcaggaaggtggacctccggatgtacaaggggtacagggagctcagggaggctctggacgcgctcttcaccaactctttctccgcggcggcagagggcggcggcgaccaccaccagcacgccatcgcctacgaagacaaggacggcgacctcatgctcgccggagacgtgccctgggatatgttcatctcttcgtgncagaagctcaggataatgaagggctctgcctctgagtctggaggccagtgatcgctgatccatacataaacag

SEQ ID NO: 2493 - DNA, 407 bp, Zea mays
  Clone ID: TF_cC-zmle189022c10d1
cacacaaaacaagcagagatggatttttaaaaaagccaagcctaacaacatgattgagagtcattatgtgcctgttcatgattagtacttaattagacatgcatctcattgttttgtttgaggaaattttataacaaaccataatgacccagattagctataattcaaccacttagcaatgcccatccggggctgctgcagcttaattatccttactttagtaactaagccaactgggcaccgcatttacaaaggatggggcaggtcatgaattgggcgactaggctagctcctgttcttggattttgccatggcttttggggcaagaccaagaccaagggcctcctttcctttcatgatgcgaaaacgcttgcatgattaaacaaacatttcccatgggacattac

SEQ ID NO: 2494 - DNA, 572 bp, Zea mays
  Clone ID: TF_ZmC342443_1
cagggtgacagcatgtttcttccttcctaggacgtctctccttacaaaacgatcaaaattatatgcacattgattaggaaacaccaatagtacaacatagaactcacataaatactagctacattacttaattagtacaagaagaaaactacttctcgaagttgtatatgccagatcaagagatgtccttctgatcacttgcttgaagagtgccttcagtcatcggtcggttgttcggttgtatattttctgtcatcttcaccctgacctttgtcacttgatgttgggtttcggacaatgtacaatcttttagcagacgctaggaataattcccatggaacgtcaccaacctgcattcggtcaccctcgaagtcttcatacagaaatatgaacttgtcattattggttggaagatctttttctcccgtgcctgttgcgcctgtagaacagtctgcgggcgagtagaagtttgttgtcatgttggtgagcaccctggagagggaggcatagccgccttgcgccctgaggttgatcttcctgccaatcgcgtagccgtccatgtgtaccttggc

SEQ ID NO: 2495 - DNA, 1449 bp, Zea mays
  Clone ID: TF_ZmC1167_2
cattgggtacctcgaggccggccgggttggccttctcctccccttcgcccttcctccctcctctctcagtctctctccggcctccctcgcccacagagtcagagcggaagccgccgagctcggagcccagcacgctgcacgccgccgccggccatgtcggtggatacggagcggagctccaccgagtcgtccgcggcctccgggctcggctacgaggacaccgcgctcgccctcaccctccgcctcccgggctccgaccccggccgttcctccccgctcgccgcgccctccgacgctgcgccgtctcccaaggcgcgggtggtggggtggccgccggtgaggtcgtaccgcaagaacgcgctcgccgactccagcaaggccagccgggcagccaatttcgtgaaggtggccgtcgacggcgcggcctacctgcggaaggtggacctccaggcgtacggcggctacgaccagctcctccgcgcgctccaggacaagttcttctcccacttcaccatcaggaagttcgccgacgacgagaggaagctggtggacgcggtgaacgggacggagtacgtgcccacgtacgaggacaaggatggcgactggatgctcgtcggcgacgtcccctggaagatgttcgtggagacctgccggcgccttcgcctgatgaaagattcagaggccgttaacttggcaccaagagccgcccgatgaggcgcaagcgcaactccaccgtcaccagtatgcactggcttttagtggcttggcttgttggaggaacgagggaacgtacttcgtcgctgttttgaggatcttcacttgacatatatatagcaatgtgtacagctgtcacctgctgcttttgcctgaggaaagtttgtagttccattactttacttatctgtagtgtctatctatctatctatagatccgaagctttgatatacacatggcggctacaatgtatttttgatgaataagaccaggccagagtaccaggcacaccgaaccgaacccgttcttccgcagctccacgcgcggttggcattttgagggttatgtggtggtgttgtgcttgcagtaggcgtgaaggctgatggcgtagctgccaattatttatacatctttattcgcgttgtgttgagctttattatatggttttgtttgagagttcatggctttgcatcctgttcctacgggatgctggtcagcttttcccttatcaagtacattctggtttaaaaaaataataatataattatttaataacaacaatttcttttaaatattattttttaaataataatatttttaaaaaattttcaataatttttaaaataaataaatatattttatttatttagggggggtcgccctttttatataccaatttttatttttcctctttcgccaaaattatttttttttttttttctctcaaattaaata

SEQ ID NO: 2496 - DNA, 1235 bp, Zea mays
  Clone ID: TF_ZmC1426_2
tcgagcgtagcatgcaggaacttatttgccgtgcgctcccaggtctccgctcgcgtgccttccagtctgtctcacactagctgctgtgggacgatcgaagtgggtgtgtcagctagctagctgcgccgtgaccacgcacatgaccgcagtgcgcgcggggctgatcaagggaaagtgatcggatggagctggagctcgggctcgcgccgccgaacccgcatcagccgctggctgccgccgccgagttcgtcggtctcctcagcagctcggctggctcgtgcgggaacaagagggttctcggcgacgcgttcggggccgccaaggcggccacgcttccgctcttcgtctgcgaggatggcgacggaggcggcggcgaccgcgaccgcgacggcgtcgtcgaccatgaacagcaaagcaacaatgtacccaggaagaagaggctggtggggtggccgccggtgaagtgcgcgcgtaggcgtagctgcggcggcgggtacgtgaaggtgaagctggaaggggtgcccatcgggcggaaggtggacgtgtccatccacggctcgtaccaggagctgctccgcacgctcgagagcatgttcccttcgggtaaccaacaagatcatgcagaagacgaggtggtggtctcgcacgagcgccgccgtcgccatccttatgtagtcacctacgaggacggcgaaggggactggttgctcgtcggagatgatgtgccgtgggaggtctttgtcaagtcagtgaagcggctcaagatacttgcgtagccgacggtcggcgcctcagagacgtcgtgtggtccgtctcaccaggatcggagcagtgtagtactcctgggcgtcatctgcgtaataacgttgtttctgtcctgtgtgcccgtagcagtacgtactgtcctatagtaagctagctttatggggtgcttcagctttcagagcatgacgaaagcactgattagctgctgtcatcacatttggttcgtctttgtgtcgtacggtatcgctggcgtcagtgtcgcggcagcctaggtgatctaagcatacttactatctcaagttacttttggttcccttagcttgcatggtaattcatataccgtatacgtgtgtgactcaggggcgaagctgccttaaggcacaggggtcaccggacccgatggaatttatcaaatccagtgtaaaatactatttaacactgttcatcaatatatttgatttcaataattc

SEQ ID NO: 2497 - DNA, 605 bp, Zea mays
  Clone ID: TF_ZmC1328_2
gtaaaaggcaacagacaggataggctgcataaacatagagctggttcgtctgaacatttacatacaacccaaaaggtcacatcgcttcccggaaagagaaacaaaataaacaagagcaggaaaacccaaaaggtcggttcggttctttgatgatcccttccaagagaaagtagggaaaagaagaggaagaaaccacgaagaaagatgatacaagctcagaagacgttttcttcttcacagcacaccaacatcactgcaaggaagtgtctaagaggtaaacactggacactcagttaccgtcctcttctggccaggaggtgctgttagagatgaagagaggtcagatgtcttcagaacgcgcagcctcttcaccgaagaaacaaacatcccccaggggacatcgccaaccagcaccctatcgccttcataatcctcataaaccagagtgtactccccagttccatctagtaaacccgatatcgccacctcttcctgtgaacactcctttgcgccggcagccagagggtcttgttgggctgcaagaagcccccggaatagcttgtcgacagacagagacagctcatcgtaactaccggaggcactca

SEQ ID NO: 2498 - DNA, 743 bp, Zea mays
  Clone ID: TF_ZmC12865_4
gccggccgggctggggtacctcgaggccggccgggccgggcctcgctcagctcgaacgatcgaaaagaaaaaggactcacctcggccctctcctcttgtgcttctgcttccccaccgagtctcctcaaccccaggcactcgccctctgtcccctcccttcctcgcctccgatgccgccgccgccgccgctcctcgagccgcgcgactacctcggcgccggcgccacctcgtcgtgctgctcgtcgtcctgctcctccggccgcgagggcgcggggccccacctcgcgctgcggctcgggcttccggggtccgacgactcccccggccgcggcgcggacgcggagcacgcccgcgcccacgtcgacgccgcgctcaccctcggccccgcccccgcccccgcgcctcccaggggcagcgccaagcgcgggttcgccgactccctcgaccggtccgcgaagctggacggcgttgccgcggatgacgctgctgggggcgtcacgcgggtagctggagctgctgccggagctccgcccgctgccaatgccatggacagggcacaagttgttggatggccgcctgttaggagctaccggaagaataccctagctgccagtgccacaaagacaaatgggggagatgaaggtacgagtgaggcgggatgctgttatgtcaaggcagcatggatggagccccatacctaaggaaggtggacctccagacctattccagctatgaggatctct

SEQ ID NO: 2499 - DNA, 674 bp, Zea mays
  Clone ID: TF_LIB4766-015-R1-K1-F6
cctcgagggccggtccgggaaaaaaaaaaaaaaaaaacccttccacccactgcaaccccaaatctctccttcctcacacacgcgaagctgagagaccaaagaagaagaagaaggagcgagcaagcagaaagttagctagctgctagcgtggaagtgcccaaggcgagagagagacaagcctaggacggccgcgccaggctagccagccagctgctagctcctgcggacgagccgatggctggcgccgacgtcgacttctggacggagctccggctcggcctgccgggaggaggcgccgcggcggccaagaaggacaccatcgacctcaagctgaagctgcccaccgccggcatggagggagggcggctgccgccgccaggccggagccggcagccgagaaggccaagaggcccgccgaggcgccggccgccgatgccgagaagccacctgcacccaaggcacaggccgtgggctggccaccagtccggtcgtaccgcaggaacgccatgaccgtcgtccaggccgtgaggagcaagaaggaagaggaacctgagaagcagcaacagcccgctgccgccaacgccttcgtgaaggtcagcatggacggcgcgccctacctgcgcaaggtggacctgaagacgtacggcagctacaaggacctctccgctgcactc

SEQ ID NO: 2500 - DNA, 1169 bp, Zea mays
  Clone ID: TF_ZmC1117_1
ggtaccctcggatgcgccccgcgaggccggtcgtcgcaaccagtcaaccaccctataaagcgcggggtctgaggctggccggcacctcttcaatcccagtcccacacaaagtttctcctcgatcctcatctcctccctctctcgagtcaagagcagagcagctaccaaacaagctctcctttcgcttccgatccatggagctcgacgccgacaacctgagcgccaccgagctccgcctcggcctgcctgggaccagcagcagcagcagcgacgactggcagaagaagccgtcgccctccgtcggggccaagcgcgctctggacgacggcaccaagagcgaggcctcggggaccagcccggccgccagagacctcgacttcgaccacgaccacgacaccgccgcgcctcccaaggcgcaagtggtcgggtggccgccggtgagggcgtacaggaagaacaccttccaggcggcggcggcggccaagaaggtcgagcagaagcagaagcagcagcagcagggaggcctgtacgtgaaggtgagcatggacggcgcgccgtacctcaggaaggtggacctccggatgtacaaggggtacagggagctcagggaggctctggacgcgctcttcaccaactccttctccgcggcggcagagggcggcggcgaccaccaccagcacgccatcgcctacgaagacaaggacggcgacctcatgctcgccggagacgtgccctgggatatgttcatctcttcgtgcaagaagctcaggataatgaagggctctgcctctgaggccaggtgatcgctgatccatacataaacagaggctacagacacgccacctgggaacgcggatccaagagcacacacggatcgtacttgacgaggaaggagggaggagctgtgtggcttgagctctccagtgttgtacaaaggcatgtttctttctgaacccaaaagggagaaagatgtatgaagcgtgtatataaaatcttagctagcagtttgttttcatttgtatgagcgatcgaaggctgtaaaaaaagaagaaaaaaagaaaagggaatgagaaattgactaaagctggtcattttcctctcaaaaaaaaaaaagaaaagggaatgagaaattgactaaagctggtcatgtttccaaaaaaaaaaaaaaa

SEQ ID NO: 2501 - DNA, 640 bp, Zea mays
  unsure (1)..(640): unsure at all n locations
  Clone ID: TF_LIB4744-117-Q1-K1-E4
cgaggccggccgggggaaatggaactaaattagttacctatctgatttgtgcctcattttctccggacacattttctttcactccaattgtaggatgttcgctgactcttgccgcaggctcaggatcatgaaaggatcagatgcaattggacttggtaacttgtactcctattcagtttagtttattgccgtgctaattatagtcttagttggttggtggacatggtaggatggtacatgatatgatgatccaagtagcttgtgttgttagttgtacatgatacaacttttattaggacttcctcagaaaggagacataattcatggtccctgcatctgtggtggtagctctcttgggtaatatatttgccatcttcttgtacatagcactcaaaattaggtccaaaatcagaagcgcggggtgaactagacattatcagttgcattttgcatttagtactgttaccaacactagaaccaagtacgttatcgtcagtttggagtgcacataataatagggaaaagtcatgtatcaattatatcctggagatgccaagttaatagttaaatattgaaaattggaagatttgaatcgtagntgtcacttgctaancaggtattctaattcaactccagagtc

SEQ ID NO: 2502 - DNA, 796 bp, Zea mays
  Clone ID: TF_ZmC2833_15
attgctaacttaataagtaatagagatatgtaacttaagacagggaaagaagagtgatctttagcttttgtacagacacgcgtgcatggagattcaactccactccttttgtgttgctaacaccccctactagtaccacaaaataaaaaaaaaacaaaagaacaaagcgaccacacatcattccactccactccacttggttggatgcacaaattaaagcttttctatctctctccatctccgtcccctcgttccaatccaagcaagcagcttcatcttctcattgatggcagacgaggaggggatggtacaacacaagcccatactaccccatgcctcggacgcacaacaatcccccgctcacgcgtgcacaagccgccgtgtgcgtggatctcggtcgggtctgcacaatggtcgtcgtctccctctccctcagtcgttgttcttggctgacccgaggcctagtctggcctcagaccccttcatgatcctcagccgcttgcaggtgccgatgaacatgctgctggctgatgctccattgttggcagacaatgctaggggagaaggtacataatactcaacaccacacgcccacacccatgcaggtacgccttggagaagaaataagaccccaaaagaacaaaagaatttgctggcgcatgcacgcacgcgcagcacaagcatgcgatagacgcctcatcatcagttgttcttggccgagccgagccctctcgcttcacacccattcatgatcctcaccctcttgcaggtgatgatgaacatgccgaagggcacg

SEQ ID NO: 2503 - DNA, 807 bp, Zea mays
  Clone ID: TF_ZmC1407_3
actcctaagggcgattgggtacctcgaggccggccgggcccttccccccttccgttccgttccgatttgacgagttggtggctgctatagattcactcacccctctccatttctgataagtatccagctagctaccagtgtatgcaccaggcagcagcagcatggcggagtgcaaggacgacgacagcggccggcggtctccgtcgtcgtccatggacagcagcacccaccccccggcgctctccaccgcgtcctcggcctcccgccgcccgccggagaggagggaccagctcagccccgacctgcagctagggctcagcctgtcgccggcgtcctccgccctcctggtagcggagacaaacaacagcatcgtcccttctacgccaaggaaccaagcactcccggattggcccccgatcaaaccgttccttagaagcgccctgacagcctcggcacgccgacggcgaacgctgttcgtcaaggtgtacatggaaggcgtcccgatcggccggaagctggacatgctcttgctggatgggtacagcagcctcctagcgaaactccgccacatgttcaagacatctatcacttatgctgacgctgtggagtaccatcagcgggttcctcacgagaaggccgcgcatgttctcacctatgaagaccatgatggagactggatgatggttggggatgtaccgtgggagctctttctcggaagcgtaaagaagctgaggattgcgagaacagacagatgctagatagcaaacttttttcatgcggtggatcgcgactctggttcttcttttt

SEQ ID NO: 2504 - DNA, 1238 bp, Zea mays
  Clone ID: TF_ZmC2230_1
cgcaagccaagcattctcacgctagctgttctcttcttgcctcatccatcgtgcatctatattctcggcgcgagttacgtctttttcgtcgtccggccggcgagcattttgcttctgtgatcgatcggcgcgcgcgacgtacggccatggagatgatcgacgcagagctgcgtctgggtccgcccggcagcagcaacagagacgtcatcaacgtcgtgcagccttcgttggcggcggcgaaacggccgtcgtcgtcggtggtggagagcgaggcgtccgggacggacgaccatgaccatgacgacgccgcaccgacctccaaggtgcaggtggtggggtggccgccggtgagagtgtaccggaagaacgcgttccacgcggcggcggaggcgaggaggaccaggcggggcgagcagcagggaggaggaggcctgtacgtgaaggtgagcatggacggggcgccatacctccggaaggtggacctgcggacctacgcggcggctaccgggatgagggacgcgctggacgcgctcttcggctgcttctcctcctcggccgacggcggatgccagttcgccgtcgcctacgaggacaaggacggcgacctcatgctcgccggcgacgtgccatgggagatgttcatctgttcttgcaagaagctcaggatcatgagggggtccgaagcaagataaccaagcaacgaggatgcaaggacctgttgtatgcatatgcatggaggccggccggactcatgctgtcatgcatgagagtttgagagaggagaagaagacgacctactggaactgaaggcggttgggtatacctgcatggggagggagcccacgcatgcacgcgcgcgtcgtcgtgttctacggccagctagccaccagaccggctgccggcccatatgcacaccacggagatggaggtgatggttcaaggatcacggcggcgtacgcgcgcgtcatcagtcacgccgtcctgtcatcagatgagatggaggggtgatgcatgagggcagtgctagctgtggacggctggctggacgtgcagatcggagcgagattgtactgtgcacgcacataagctttgtacagtggcatgtgctggtcatctgtaattttgatttttttccccctccttttgtaagtgagcaagtttgaggaaaaaatgtatgaatgaagaaaaggagaggggggatttcaaatttgagttagttgccgttaagcaaccaaagg

SEQ ID NO: 2505 - DNA, 800 bp, Zea mays
  Clone ID: TF_LIB4172-012-Q1-K1-H10
tcgagttttttttttttttttttttttacaaggccaggtagtatagtaaatacataggcagagtaactgtagcacatcgattgttaaggctgccacatcgaagaggctacatcagagacattcctgcagttacattgaactgcaacatttttcttaaaatgctaactgtttgcacgatcatctgagtgcaaaagtttgtgctcagaaatcgcgtatcattttcttgctatcgtgggacggattatatcaaacatttgtgctcaggcatagcctgctatttctagtcgccggtgaccctccacggacgacccccgtccgagctgctacacgcttggttgccaagaaagctgtctccgtagtcgctggccagcctcatttgcctctcttcctgcggcgaaagaatcctgatgcaccgcacgcagttcacgaagtcctcccatgggtcatcaccaactaataggacatccttctcgtgatcttcgtaaaccagtttccagccaactctgttttggtcgctgagctgcccctcaattccaaacatacgggcaacgtcatgcttcagttcatcgtaaccagaatatctgttgatgtcgatagatcttccaacagcgccacgcttgtgcaccttggtgtatgttcgcatacgttgttgaacaggacctggagcccgggaatttctgtttaagaattggatatcattgatcgacgaatctatggaattgaacgcgatatcagcaacgccaaatggatggtgagatcattgaagatgataactcttgctgagaatcctttgatgaaat

SEQ ID NO: 2506 - DNA, 1357 bp, Zea mays
  Clone ID: TF_ZmC2833_8
gcacaacttaagaggctgtttggtttgagaaatgaagtgatacatcttcttctcactcctcacttttttatttggtttttgaaatagaatgggttgatccatcaccaccccattcctcataagctaataattagtatatacatgaggagtgagttgattacaccaaaattaataaaatgaacatatgatgcaccacttcatgaagcatagagtgactccacaaaccaaacacactataaagtttttctgtctctctccatctccgccccctcgttccaatccaagcaagtagcttcatcttctcgttccaagcaagcacaaaagcttttctatcttgctgctccattgatggcagacgaggtggggatggtacaacacatgcccatactaccccatgcctctcggacggacaacaacaatcccagagcaaaaagcacaagccgcgccgccgtgtgcgtggatctcggtcgggtctgcacaatggtcgtctccctctccctcagtcgttgttcttggctgacccgaggcctagtctggcctcagaccccttcatgatcctcagccgcttgcaggtgccgatgaacatgctgaagggcacgtcgccgacgagcatgaggtcgccgtccttgtcctcgtaggtgacggcgaagtcggaggggctgccgccgccgccgccggacgcgtcgcccgagcccgagcccggcccggagaagcagaggaacatggcctccagcgcctcccgcagctggcggtagcccccgcacgtgccgaggtccaccttcctcaggtagggcgcgccgtccatgctcaccttcacgaacaccccgccgcccgccggacccggagcaccctcatccgccgccgctggcttgcccttggcgctcgccgccgccgcctgctgctgctgctggaagcagctcttcctgtacgacctcaccggcggccaccccaccacctgagccttggcggccggcggcgcggcgctgacgccgtcgcgcttcttgcccctgggcgtggacggcggcggcgccaccttctgggcctgccggggctcctcctcctccgccgccgccgcctccgtgcccggcaggccgagcctgagctccgtggccctgaggttgtcgacgtcgtcgtcggccgcctccaagccgtagtagctgtagctcgctgctgcggccacctccattgcttgtccttagctagctaggttaggtagccgccgatgctgcggcgacctccattggcgtgtcttcttgcttcttccgcacggaccgcgtgggcaataaagacggtgcctgccccaaccggcgtcgagaggccgacgagatgcgctgtgctctgtattggtccttgctgg

SEQ ID NO: 2507 - DNA, 1374 bp, Zea mays
  Clone ID: TF_ZmC2833_9
aacttaagacagacagggaaagaagagtgatctttagcttttgtacagacacgcgtgcatggagattcaactccactccactccttttgtattgctaacacccctcctactcgtagtaccacaaaataattaaaaaaacaaaagaacaaagcgaccacacatcattccactccactccacttggttggatgcacaaattaaagctttttctatctctctccatctccgccccctcgttccaatccaagcaagcagcttcatcttctcctgttccaagcaagcacaaaagcttttctatcttgctgctccattgatggcagacgaggtggggatggtacaacacatgcccatactaccccatgcctctcggacggacaacaacaatcccagagcaaaaaaagggcccgctcacgcgtgcacaagccgcgccgccgtgtgcgtggatctcggtcgggtctgcacaatggtcgtcgtctccctctccctcagtcgttgttcttggctgacccgaggcctagtctggcctcagtccccttcatgatcctcagccgcttgcaggtgccgatgaacatgccgaagggcacgtcgccgacgagcatgaggtcgccgtccttgtcctcgtaggtgacggcgaagtcggaggggctgccgccgccggacgcatcgcccgagcccgagcccggtccggagaagcagaggaacatggcctccagcgcctcccgcagctggcggtagcccccgcacgtgccgaggtccaccttcctcaggtagggcgcgccgtccatgctcaccttcacgaacaccccgccgcccgccggacccggagcaccctcatccgccgccgctggcttgcccttggcgcccgccgccgcctgctgctgctggaagcagctcttcctgtacgacctcaccggcggccaccccaccacctgagccttggcggccggcggcgcggggtcggtcacgccgctgacgccgtcgcgcttcttgcccctgggcgtggacggcggcgccgccaccttctgggcctgccggggctcctcctcctccgcctccgccgccgccgccgccgcctcctcgcgcttcatgcctctgggcgtcgacggtggcggcggcggcgccttgttgtggccctcatcggcctcctcctcctccgtgcccggcaggccaagcctgagctccgtcgccctgaggctgtcaacgtcgtcgtcggctttgaatccgtagcccgctgcagatgttgcggcgacctccattggcgtgtcttcttgcttcttccgcacggcccgcgtgggcaataaaggcggtggttgcagcaaccggcgtcgagaggccgacgagctgcgctgtgctctgtcttggtccttgctggtg

SEQ ID NO: 2508 - DNA, 829 bp, Zea mays
  Clone ID: TF_ZmC2734_3
gacaaagtgaaccgaccaccagcgaccttcgtgaaggtttacaaatctggaacctacgggaggtcgcttgatatcactaggtttagcagctatcacgagctccgtagggaactggggcgcctatttggccttgagggccagttggaagacccattgagatcaggctggcagcttgtattcgtcgaccgtgaggaggacgtccttctcgtgggcgacgacccttggcagtaagcactgcatgcgacgttgtttcttttttttttctgcattcttcctcacattgcgttggcaacccaaccccacagggaattcgtgagcacggtgtcctgcataaagatcctctccccgcaggaggtgcagcagatggggaagcagggcctggagctcctgagctcggcccccgcgcggaggctcggtagcagctgtgacgactacgtcagcaggcaggagtcgagaagcctgagcaccgggatcgcgtccgtcggttcggtcgagttgggatgagtagcaagatagcgcgcacgcagcagcagcagcaggttacgcatcctcagcctcagggtaggtaggggactgaagggttggtctgcgacttgatgacccacgagctcctcgttgcgcgcttcgttcgcctccatgcgatggatagaagttcagcgcagatcaagccttagctctgcgagctatgtatcatctaataattctgtccgtgtcgtaccatgtcaactcctaagtagaagaattgaagaaactaccagcagccgctgtctggtatacacgctgaaacattttttcttgtatggagaaatactaatcatctggatgtagc

SEQ ID NO: 2509 - DNA, 661 bp, Zea mays
  Clone ID: TF_ZmC1249_5
aagcagagctggacaagatgtttgactcgagggtgaattggtatctggtagccaaaactggcagatcgtctataccgacgacgagggcgatatgatgcttgtgggagacgacccgtgggaagagttctgcagcatagtgcgcaagatctacatctacacgaaggaggaggtccagaagatgaactcgaaatcagctgcgccaaggaaggaggaatctccggcagcgggcggcggaggttgcgccgccacaaacgagtagtatgtatggtggttctccgtttggttgcttccccgcggtttgctcttggcggcaagttgaggccaaggttttactactgctattgttattgccgatttgctctcccgccttccggtgtaaatatctgtgtgtacccagtcccagccttgtgctagtaagtagcaagcagttttaccttttggtattttaaccagcagctaaattcgcggcattgtagtccctgtaagcgtagcagctctgtagcgtgagatagatggccaagcgccggtacgtacgtgtagtgttgtctggtcttctcactgagtgtactataaagagttaatataggagctgaccctgtgaacccgcgtgatggatgcaaaaaaaaaaaaaaaaaaggcccctagtctctatttgaccgtc

SEQ ID NO: 2510 - DNA, 1811 bp, Zea mays
  Clone ID: TF_ZmC784_1
cagccttccacgctttcactctcccttcccgcttccactcccactctcactctccctttccactctcaggctcccactccccccctaccggctaccctacccatcacacacaaacggccaccgggaactcaccactcttcgcttcgactcccactcccactctccctttccactctcaggctcccactccccccctaccggctaccctacccatcacacacaaacagccactcctcacctcccccgtcctccggttcatgtcctgctgctccccatgtcgcccccactcgacctcgactacataggcctctcgccggcggcggctgccgccgctgcccacgacgacctgaagggtaccgagctccgccttggtctgccggggtccggttcgccggaccgccgtgttgtggctgccaccgcaaccaccctggacctgctcccggctaagggcgccaagcgcgggttttctgacgaggcgccgacgccatcgcccggtgcagcttccgggaagggaaagaaggtagcggaagaggaggacgacaagaaggttgcagcgacgccgcagccggtcgcaaaagctcaggtggtgggatggccaccaatccgaagctaccgcaagaacacgatgtctaccacccagctgaagggcagcaaggaggatgctgaggccaagcaggaccaggggttcctgtacgtcaaggtcagcatggatggcgcgccgtacctcaggaagattgacctcaagacttacaagaactacaaggacctgtcgactgcgcttgagaagatgttcagtggcttcagtactggcaaggatggcttatctgagtaccgcaaggatggtgaatatgttctgacttacgaggacaaggatggagattggatgcttgttggcgatgtaccatgggagatgttcgctgactcttgccgcaggctcaggatcatgaaaggatcagatgcaattggacttgctccaagggcagctgataagtccaagaatcgcaactagaatggttgcttcttacagtccagagcaagagggagatatccagtgactgtagggatctttgtggaagccggaaaacgtctaacagtttcaagaagaattctgccttatggtctgtaccacatgtttttgctgctacgcaagtaaagaactccacgtctgtcaatgttagttttacaacatcgtctacggacaaaaaaaaaaccccccgctatttgattgttgctaagccttcgtacgacgtgtaaatggtttggtacaatgagtgctgcgactacgattgagcacccctctacctagtttgcaaaaaaacagtgtcccatggactgtctgttgtccctctatataaatgtccaatgaagcttgctaaaaaaaaaaaaaaaaaaatcatcagcagaatcgcacgctatttgattgttgctaagccttcgtacgacgtgtaaatggtttggtacaatgagtgctgcgactacgattgagcacccctctacctagtttgcaaaaaaacagtgtcccatggactgtctgttgtccctctatataaatgtccaatgaagcttgctaatgtgtgaaaaaaaaaaaaaaaaaaaaaaaaaaaaaaaaaaaatcgaaggaggtcgaatttggaagtggatcttggggttttcccccccccaaccaaaaaaggggaaggcttggggctttgccctgccagcgcgttcatctcccgtttttggggctgcggcccctagtggtttgcaaattgtttgtgattgttgcccctcttgttggggggtctttgggggcaagttttctgctatttggg

SEQ ID NO: 2511 - DNA, 1449 bp, Zea mays
  Clone ID: TF_ZmC1324_1
cattgggtacctcgaggccggccgggccgcagagctcctccctctctctctgtctgctgtgctcagataatagcgacacctcctttcctctccctcgaggtgtctctcccagaacgcacagcacagtcgcagaacaggaaggcagagagcagcgccgcgatgagaggaggaggagcggggcccactgcggcgttcatgtccgacgagccgcctccagccgacgcggaagaggtggaggagaactccggcgccgaggaggaggacgaggagacggtggtggagcaggacgacgacgagctggagctggggctctgcctcggctccaagcaacagcagcagcagcatccgccgccgtgccggatcctcacggcccgggacctgcagccgaggtccctgtcaccggattcctccgtgtcctcttcctcccccgcggcaggtgcaggtaccgcggcgccaagcaagagggccaaggcggatgcggcgcccaactcgccagggacggtcgcgtctggccacccacagagctttggagtggtgggatggccacccataagaactttcaggatgaacagcctatttaaccaggccaaagagaatgcatcggaggctggcgccaagaagcccatcgtcgaacctgacatgcaggaagacaaggaggagagcaagaaaggccggaccgtcggttgggtgaaggtgaacatggaaggagatatcattggaaggaaggtcgatctcaatgcccatcgctcttacaagacccttgcctcagcacttgagctcatgttcatgaagccgtccattggtctttgcacttctagcagttcaaagactctaaagctattagacagctcatcggagtatcagctcacctatgaggacagggacggggactggatgcttgttggagatgttccctgggagatgtttgtaggttcagtgaagaggctcaagatcatgagaacctcagacgccaaaggtctcggtccacgattccaagggtctcacagacccacagcagcttgcacgagaggcaggacgtgaaaccaccgatgtgcgtttggtgctaacaccgctggtgaagcttgaactgtatttgatatcacgtaacagtaacagcagcccatatcgctggcatagttgtgagattacggggctgtttggtttactgtctaaggcgccacaacatggctaacttttatgtctaagtttagttcttcaattcgaacgactaaacttaggcaacttcattgtgtctagtggaaatagtagaagtttttttttttgcttcttccctgtggtgccctcgttgagcttttcttatgggctatacgagcatcatcgcccccagctcttctgtccacgctgtttacctgtgaggaatggtcgcccaaagtgttggtttttatccttgtgtttgatatggcagaagtatctgctctgctgtttcat

SEQ ID NO: 2512 - DNA, 1053 bp, Zea mays
  Clone ID: TF_ZmC347_3
atcacatccatctcattctactactgcctcagagaccaagctgctgcaaccggagaaggagatctattctacaaagtgaagtacttagcttgggacatggaaaccgtcgtgggagacctcatggcgaccgagctgaggcttggcctgccgggcaccgtggacgactgcagccagcaccagcagcagacccagctgaaggtggccgcgccgccgtccaaccctactaggggcaagaagcgccccgccgccgaggaggaggaggcaaacaagcgcgacgcggaggcagcacccccggcggccaagtgagtagctaatagatctgagcaccgaaacgttcagagtgaaccgaacgtgtgtctctcgtacgtacgttacgtggcgcccgtggtcggatggccaccggtgaggtcgtaccggaagctcgacctgaggatgtacaaggggtaccgggagctccgggaggccctggaggccatgttcgtctcctccggcagcgccaacaacaacaacaacctgtcggagttcgccgtcacctaccaggacaaggacggcgacctcatgctcgtcggagacgtgccgttcgagatgttcgctagcacctgcaggaagctgaggatcatgaagagatctgaagccacaggcctgggatcggcgagacaatgaagaaggtctgacgacgaccgagggcccgacaacgttcatgtcgatctcttctttttttttctttttgccccattattttattttgttcttcttgtccgagagaccccaagccaaaaggatgagcttggtgggtggcgcatcaatctacaaagcgcatgcatatacgcggatgtgtgtgcggctttggttctgtaagacgacgactagtagctaggtcttttttagcagcagcacagaagctaaggagatgcatgctgatgacgagcggttgtttcggcttagctctccgtatgctgtgcttgtacaaaccaaacaatacagttatcttcaccgtcgttgatcccttaaaaaaaaaaaaaaaaaaaaaaaaaaaaaaaaaaaaaaaaaaaa

SEQ ID NO: 2513 - DNA, 1384 bp, Zea mays
  unsure (1)..(1384): unsure at all n locations
  Clone ID: TF_ZmC2833_7
ctagttcctggatcgtgttattcggatagataactcaactcaccagggaggaaaacaattcctcccctgcaatttcancactcgcaattacagaagcaacgaccaggctgctgatcgatagatagacaatagactgatagacaagaaagaagagtgatctttggctttgtacaaccacgcatcatggagattcaactcgactctccactccttttgcatgtcttgctaaacacacacacacacacgacccctactaggggcacaagaaaaagaacaaagcgaccacacatcattccacgcatgcacaaagctttcctctctctctctctctctccctccctccttccaagcaagcagcttcatctttctcctcgccatgtctctggtttgctgctagctgctgctccattgttggcacagacaatgctaggggagaaggtacataatactcaacaccacacgcccacacccatgcagggacgccttggagaagaaataagaccccaaaagaacaaaagaatttgctggcgcatgcacgcacgcacagcacaagcatgcgatagacgtttcatcatcagttgttcttgaccgagccgagccctctcgcctcgggccccttcatgatcctcagcctcttgcaggtgctgatgaacatgccgaagggcacgtcgccgacgagcatgaggtcgccgtccttgtcctcgtaggtgacggcgaagtcggaggggttgacggcgggcgcgtcggcggcgccggcgccggagaagcagaggaacatggcctccagcgcctcccgcagctcgcggtagcccttgtacatctttaggtccaccttcctgaggtagggggcgccgtccatgctcaccttcacgaacagcccgccggcggccggggcctcctccgccagcgctgccgccggcttgttcttggccgccgcctgctgctggaagcagctcttcctgtacgacctcaccggcggccatcccaccagctgagccttggcggccggcggcggcgcggcatcggtgtcggtctcgcagtcgcgcttcttgggcgcatcctcgggcccgctgctggcgacgacgtcgcgcttcttgcctctgggcgtcgacggcggcggcggcggcgccttgttctgggactcctcggcctcctcctcctccgtgcccggcaggccaagcctgagctccgtcgccctgaggctgtcaacgtcgtcgtcggccttgaatccgtagcccgctgccgatgctgcggcgacctccattggcgtgtcttcttgcttcttccgcacggcccgcgtgggcaataaaggcggtggttgcagcaaccggcgtcgagaggccgacgagctgcgctgtgctctgtcttggtccttgctgggaag

SEQ ID NO: 2514 - DNA, 1051 bp, Zea mays
  Clone ID: TF_ZmC1117_4
acctcttttccccagtccccacaaagtttctcctcgatcctcatctccctctctcgagtcaagagcagagcagctaccaaacaagctctcctttcgcttccgatccatggagctcgacgccgacaacctgagcgccaccgagctccgcctcggcctgcctgggaccagcagcagcagcagcgacgactggcagaagaagccgtcgccctccgtcggggccaagcgcgctctggacgacggcaccaagagcgaggcctcggggaccagcccggccgccggagacctcgacttcgaccacgaccacgacaccgccgcgcctcccaaggcgcaagtggtcgggtggccgccggtgagggcgtacaggaagaacaccttccaggcggcggcggcggccaagaaggtcgagcagaagcagaagcagcagcagcagggaggcctgtacgtgaaggtgagcatggacggcgcgccgtacctcaggaaggtggacctccggatgtacaaggggtacagggagctcagggaggctctggacgcgctcttcaccaactccctctccgcggcggcagagggcggcggcgaccaccaccagcacgccatcgcctacgaaggcaaggacggcgacctcatgctcgccggagacgccccctttgtgcccttatgttcatctcttcgtgcaagaagctgaggataatgaagggctctgcctctgaggccaggtgatcgctgatccatacataaacagaggctacagacacgccacctgggaacgcggatccaagagcacacacggatcgtacgtgacgaggaaggagggaggagctgtgtggcttgagctctccagtgttgtacaaaggcatgtttctttctgaacccaaaagggagaaagatgtatgaagcgtgtatataaaatcttagctagcagtttgttttcaaactgtgttttgtaaaaaaaaaaaaaaaaaaaaaaaaaaaaaaaaaaaaaaaaaaaaaaaaaaaaaaaaaaaaaaaaaaaaaaaaaaaaaaagaaaaaaaaaaaaaaaaagggccccta

SEQ ID NO: 2515 - DNA, 729 bp, Zea mays
  Clone ID: TF_ZmC37228_1
tttttttttttttttttttttttggttctaatcccacattgtttcttatttttttacgtgggtgcggctgcacccctagaatgaactaatatacatgggcccaggtcacttacaaaagaggagctcaaagttacagataggctagcaagcataagctacagcatatgagctagcgtgcacagtaccaaaaaaattcctaggtagtagcttttcaccgatgctacttggctgaataatctccgatctgacatgcatgcacgtccagtcagccgtccacagcacgtccgcctgactggtggcgggagacacggcgtgacgtgtactacgccgccgtgatccttgaaccatcacctccatgctgccatgctccatctgatcatgtccatggtgtgtatggtcgtatgagccggccgggctggccgtagaacacgacgacgcgcgcatgcatgcattgggcctccgacccctgtgcaggtatataccctacgccgcgcctccaattccagtgaatgacagatataaagacctccctttttctctctgtctctctctccccctctgtcccatgctcgcgtcatgagttggacggaccatagctagctggactggacctccatctccatgcatgcatccaacatgttctttgcatcctcgatgcgtggttatcttgcttcggaccccctcatgatcctcagcttcttgcaggaacagatgaacattcccagggca

SEQ ID NO: 2516 - DNA, 668 bp, Zea mays
  Clone ID: TF_ZmC1167_3
aattcggcacgaggtgcaaagagggggggggggggggggctatagaggagctcttgatacccagctgccaaggatgtagtagcatgctcccattagacttggtccggcaagtttctaactggtggttttgcaggatgttcgtggaaacctgccagcgccttcgtctgatgaaaggttcagaggccgtgaacttgggtacgtacatgtttttcccctaaagcctacctccatgtgtttaaaaacgtctgctttttttcacagccatcgctcttgttcattttcacagcaccaagagccgcccgatgaggcacactccgttgggcgttggcacgcacgcacgcactggcgtcttgaaggaaagggggaactctgctggtcttgatgaggatcttcacgtgagataggaacgtgtgtacagttgtcgccttatggtattgagttgaggaaacttggaagttccattacttgtctgtagtctctactttatatagatgcgaagaagcttgagatacacattgcctacaatgtcttttgatgaataagaccagacagcaccgaaccgaactcgtcctccacacggttgctttgccatctcggtggttttgtggtggtggtggtggtcgtgcttcctataggtgtgaggctgatggcgtggctgccatttatcc

SEQ ID NO: 2517 - DNA, 753 bp, Zea mays
  Clone ID: TF_ZmC1249_4
ctggcagatcgtttataccgacaacgagggtgatatgatgcttgtcggagatgacccgtgggaggagttctgcaacatagtgcgcaagatctacatctacacgaaggaggaggtccagaagatgaactcgaaatcatccgcgccgaggaaggaggaacccccagcagctggcgaaggttgcgccgccgccgccgcaaacgagtaggatgtctgcctgcactgcagcaaagcagttttagatgactaggtcgtgtggaggaagccgacgatgatgcatgcgtgatgaacccgttccttgtgcaggaggtggtgccagcccgggtcccagggaagtaaaaactcctgagatcttttgcttgtccgttgcagccccatccccgtccgtttgggttttagttgggaacgtagaaactactgtctccgtctgccactccgaagctcgctgttggtagcaagttttattgctagtattattgttattgctgatttgctcccctctgcctttgcgatgtaaatatttatgtacccagccccatccccagctccagcctgtagtgagtagtaacaagcagtagcggtaccttcggtattaaaccggcagctagctatttcgcggcattttaatccctgtaagcgtagctctgtggcgtgagatagatgacaaacactgggtatatgtatgtctgatctttctcactgaatgtaccataagagaggtttgtagagtaaaaaaaaaaaaaaaaaaggccccta

SEQ ID NO: 2518 - DNA, 539 bp, Zea mays
  Clone ID: TF_ZmC2833_22
tagacaatagactgatagacaagaaagaagagtgatctttggctttgtacaaccacgcatcatggagattcaactcgactctccactccttttgcatgtcttgctaaacacacacacacacgcacacccctactaggggcacaaaagaaaaagaacaaagcgaccacacatcattccacgcatgcacaaagctttcctctctctctctctccccctccttccaagcaagcagcttcatctttctcctcgccatgtctctggtttgctgctagctgctgctccattgttggcacagacaatgctcggacgcgtggggcataatacttaacaccacacgcccacacccatgcagggaccccttggagaagaaataagaccccaaaagaacaaaagaatttgctggcgcatgcacccacgcacaggacaagcatgcgatagacgcctcatcaatcatcatcagttgttcttggccgagccgagccctctcgcttctgaccccttcatgatcctcagcctcttgcaggtgctgatgaacatgc

SEQ ID NO: 2519 - DNA, 810 bp, Zea mays
  Clone ID: TF_ZmC1237_1
cccacgcgtccgcccacgcgtccgcccacgcgtccgcccacgcgtccgcgaagatcttcggcatgatcttgcgtgcatgttcggtattcaagggcagcttgaagatccctacaggacggactggaagctggtctatgttgaccacgaaaatgacatcctccttgttggcgacgacccatgggaggagtttgtaagctgtgtcaagagcattaaaatattgtcatctgttgaagtacagcaaatgagcttggatggtgacctcggctgcatccctcctcaaactcaagcctgcagtgcttctgatgacgcaaatgcatggagggcatgacgtaaatactaatatgttccttaccatttttaaacaatactgagagtcaggggtcaaagaagtgaaacacacgtctaacataatcacgaggtactgttacttagagccgactcactgacagagtcgatgagaagctcgtggcggaagttgttcagcaagctgccatattttggaggccttgacggctgacgctttgttccactgaaatcgggtaattactcaacacaatcatattagtttccttcttgtgtgtgtaagttgggtgggggtggggggtataatgaatttgagaagctactctgcttattagaacctacattcactgtaatcctcctacaaagttgttcgattatctcagtgtatatatgtgcgctgtagaaccgtgactgtcagttttgcaactcgcaatccccaatgtaattgttcctgtgtgctgctttaacagctgaagtactattataaattgtattatctgtaacaga

SEQ ID NO: 2520 - DNA, 628 bp, Zea mays
  unsure (1)..(628): unsure at all n locations
  Clone ID: TF_21213622
gaaccttcctctgtcctgccctgcccttaccagggatctgaaccttctatcgatgattgatcatcacgtgagctaaagcatatctagcnnnnnttacttgaaaatccaagcccgatgaacttgaannnnnnnnnnnnacagaacgggtaattttacattggtagatccatttgcgaaatttctcttataagtccaattaatgcccatgttgaattacatcaggacattattactctacagcattggtattggtagcctaatttacaaaatatccaggacctcggcatgcatattccaaatgatcagaattttggcgctgtttcaggctttcagcaatctggcggccctcttctcggagctaccgcaatctgaggtggccttgggcctaccaaacctttggcaagctccgagctcctcaaaaccctcagccttttagcagttgacacaaacacattccacggcacgtcccctaccagcatcgtgtctccttcgttgtgttcgtagaccagggtttattcgtcagatccatccaacacttgagagaagtctttccagtagttggagacatatccttttgagcttgaagaaaaccgtggaaaagcttttgacgcccaggatagcctctcgc

SEQ ID NO: 2521 - DNA, 1476 bp, Zea mays
  Clone ID: TF_ZmC1117_3
cattgggaccctcgaggccggccgggacctcttcaatcccagtcccacacaaagtttctcctcgatcctcatcttctcctactcatctcctccccctccctccctccctctctcgagtcaagagcagagcagctaccaaacaagctatcccctttcgcttccgatccatggagctcgacgccgacaacctgagcgccaccgagctccgcctcggcctgcctgggaccagcagcagcagcagcagcgacgactggcagaagaagccgtcgccctccgtcggggccaagcgcgctctggacgacggcaccaagagcgaggcctcagggaccagcacggccgccggagacctcgacttcgaccacgaccacgacaccgccgcgcctcccaaggcgcaagtggtcgggtggccgccggtgagggcgtacaggaagaacaccttccaggcggcggcggcggccaagaaggtcgagcagaagcagaagcagcagcagcagggaggcctgtacgtgaaggtgagcatggacggcgcgccgtacctcaggaaggtggacctccggatgtacaaggggtacagggagctcagggaggctctggacgcgctcttcaccaactccttctccgcggcggcagagggcggcggcgaccaccaccagcacgccatcgcctacgaagacaaggacggcgacctcatgctcgccggagacgtgccctgggatatgttcatctcttcgtgcaagaagctcaggataatgaagggctctgcctctgagtctgaggccaggtgatcgctgatccatacataaacagaggctacagacacgccacctgggaacgcggatccaagagcacacacggatcgtacttgacgaggaaggagggaggagcagtgtggcttgagctctccagtgttgtacaaagacatgtttctttctgaacccaaaagggagaaagatgtatgaagcgtgtatataagatcttagctagcagtttgttttcatttgtatgagctgccgaaggctgtaaaaaatgaaaaagaaaaaagaaaagggaatgagaaattgactagaaaaaaaaaaaagggcggccgccaccgcggtggctgattgtgatttttaatttcaccccctttgcagtatgttcatcttttcgtgcaaaaagctgaggataatgaagggctctgcctttgaggccaggtgatcgctgatccatacataaacaaaggctacagacacgccccctgggaacgcggatccaaaagcacacccggatcgtacgttacaagaaagaagggaggaactgtgtggcttgagctctccagtgttgtacaaaggcatgtttctttttgaacccaaaagggaaaaaaatgtatgaagcgtgtatataaaattttagctagcagtttgttttcaaactgtgttttgtatgagcgatcgaaggctgcaaaaattttaagaaaaaaaatgaagagggattgag

SEQ ID NO: 2522 - DNA, 630 bp, Zea mays
  Clone ID: TF_LIB3637-253-Q6-K6-C11
ggtctctaaaaacaatttaagcccttcctcatgtaatcattttttaaaattcaggtttacaagtcaggatcagtggggagatccttggacatcacccggttctctaattatgctgaacttcgagaggaactgggtcagatgttcggcattaagggtcagttggacgaccctgatagatcaggctggcagcttgtatttgtcgacagggagaacgatgtgcttctccttggagacgacccgtgggagtcatttgtgaatagtgtatggtacatcaagatactttcacctgaggatgtgcataagatgggaaagccaggaaacgatccacgctacctatcttagctacctatcttaaatcgatacatggagctctttctggctcccatgacgattctgcggcacactgtagcactgttcacgacggcctgctctactgtgctcgcatgttcgcccgtgtcatctgtagcatgcaccaccgtgctcgtcttcagaagacgaactccccgtcgcttgtatccggtgcaggtcaccgctcctggactgatattttgtaggttccacgtaggaatcagtatcagcaactctatcctagtttgtggtaggctcgcgcggcgctcgttcctgtgtcgc

SEQ ID NO: 2523 - DNA, 659 bp, Zea mays
  Clone ID: TF_LIB4666-004-Q1-K1-E11
ttaccaagcctttgcgtgaaaaatttggcttctctgatcctaatgtgaactcttccagcttcatcagctctagcagcaacgaaaacatgctggaatcaaacttccttcaggtttacaagtcaggatcagtggggagatccttggacatcacccggttctctaattatgctgaacttcgagaggaactgggtcagatgttcggcattaagggtcagttggacgaccctgatagatcaggctggcagcttgtatttgtcgacagggagaacgatgtgcttctccttggagacgacccgtgggagtcatttgtgaatagtgtatggtacatcaagatactttcacctgaggatgtgcataagatgggaaagccaggaaacgatccacgctacctatcttagctacctatcttaaatcgatacatggagctctttctggctcccatgacgattctgcggcacactgcagcactgttcacgacggcctgctctactgtgctcgcatgttcgcccgtgtcatctctactctctagcatgcacaccgtgctcgtcttcagaagacgaactccccgtcgcttgtatccggtgcaggtcaccgctcctggactgatattttgtaggttccacgtaggaatcagtttcagcaactctatcctagtttgt

SEQ ID NO: 2524 - DNA, 2114 bp, Zea mays
  Clone ID: TF_ZmC784_9
aagaactacaaggacctgtcgactgcgcttgagaagatgttcagtggcttcagtactggcaaggatggcttatctgagtaccgcaaggatggtgaatatgttctgacttacgaggacaaggatggagattggatgcttgttggcgatgtaccatgggagatgttcgctgactcttgccgcaggctcaggatcatgaaaggatcagatgcaattggacttgaaaggagacataattcatggtccctgcatctgtggtggtagctctcttggctccaagggcagctgataagtccaagaatcgcaactagaatggttgcttcttacagtccagagcaagagggagatatccagtgactgtagggatctttgtggaagccggaaaacgtctaacagtttcaagaagaattctgccttatggtctgtaccacatgtttttgctgctacgcaagtaaagaactccacgtctgtcaatgttagttttacaacatcgtctacggacaaaaaaaaaaccccccgctatttgattgttgctaagccttcgtacgacgtgtaaatggtttggtacaatgagtgctgcgactacgattgagcacccctctacctagtttgcaaaaaaacagtgtcccatggactgtctgttgtccctctatataaatgtccaatgaagcttgctaatgtgtggtcaaaaaaaaaaaaaaaaaaaaaaaaaaaaaaaaaaaaaaaaaaaaaaaaaaaaaacaactcataacaggtctatttccatttacttaatgatgatggagagatgaaaacagcaacaacaacaacaacaaagcttttcagtcccaagcaagttgggtaggctagagttgaaacccaacatgaggggagtcacggtttagaaacatcaatagctgctttccaagcactctattcaaacacatagtagtgctacatgacttggactatttagttgcatgtgcatcgctacggtttctatatatcatatatggtttctttgtataacataaatcaacacaagttacaggggttagaggcgatgtctctcttcctagagacccatggttcaaatcccagcaagcacacttttttatattttgctgagcgcgtgggggaaatctagcgacgctcgctacgcgcatggggaggccgacgatgcacgacgaaactcccactttaaaggtgtagtgatttgcatgatagaagaaatggtccaggacatggacattcaagaatcaactggttgccaaccagagcaccatggagacttggcatcctaaaccttgaaagccttgacagcccttgtgcagcggatagccatgtccttgacatgctggatactcattatctttgagttgattgggaccatatcttttgaaagtcaagataaaaggcactaagcagggttagcaatggctccgtccccgtgtcccccacccaccctcaactccacagcgttgctgcgcgaggcgagaggtgcatccaaccaaaaatgctaggctttgttgatagccaggtccagctgctgctccctttcttgagtacaggagtggctagccgcaggtgctggagccaaaagttgaagatcgccgccatagccatcagatgacaaggcccaactctcccgctgggattgaattggcaggatagccatttccgtaccccgactccccttagggcatgtacaatatgtgtcttaagttgtgtcttaaagtgtgtctaaggggtgaatgtaaaaaaactcaagacatgtatcttgacgaagacacaatgtcttagctctatgttggagacaggagactagctgataggtcactttaatttattgaatgctctgattggtagaatgaatatggtaagacacatgttttagacatgaccactgtattatgttgtgttttagttgtgtcttatacttatagtaccgtgcagcagtgtctagattgtacatgcccttatatttcccattcctccacaacaattcccgttcccacccacatatcctaatatgcaaacgccaccaaaagctaatttggtggggtactaggagtaacagctaagcaagacctgggcatttaattaaaaatctaataaaataaaaaatccttaaaagg

SEQ ID NO: 2525 - DNA, 1184 bp, Zea mays
  Clone ID: TF_ZmC347_2
aactcggcccgagcaccagctcatcacatccatctcattctactactgcctcagagaccaagctgctgcaaccggagaaggagatctattctacaaagtgaagtacttagcttgggacatggaaaccgtcgtgggagacctcatggcgaccgagctgaggcttggcctgccgggcaccgtggacgactgcagccagcaccagcagcagacccagctgaaggtggccgcgccgccgtccaaccctactaggggcaagaagcgccccgccgccgaggaggaggaggcaaacaagcgcgacgcggaggcagcacccccggcggccaaggcgcccgtggtcggatggccaccggtgaggtcgtaccggaagagctgcttccagcaggcaaagcagcaggccgtcagcagcagcagcaaggcggccgacaaagaggatgctgcggcgccggcgcccagctgcacggcgtccgcagccgcctcaaacgccaccgccagcgccggggccggctcattcgtcaaggtgagcatggacggcgccccgtacctgcggaagctcgacctgaggatgtacaaggggtaccgggagctccgggaggccctggaggccatgttcgtctcctccggcagcgccaacaacaacaacaacctgtcggagttcgccgtcacctaccaggacaaggacggcgacctcatgctcgtcggagacgtgccgttcgagatgttcgctagcacctgcaggaagctgaggatcatgaagagatctgaagccacaggcctgggatcggcgagacaatgaagaaggtctgacgacgaccgagggcccgacaacgttcatgtcgatctcttctttttttttctttttgccccattattttattttgttcttcttgtccgagagaccccaagccaaaaggatgagcttggtgggtggcgcatcaatctacaaagcgcatgcatatacgcggatgtgtgtgcggctttggttctgtaagacgacgactagtagctaggtcttttttagcagcagcacagaagctaaggagatgcatgctgatgacgagcggttgtttcggcttagctctccgtatgctgtgtttgtacaaaccaaacaatacagttatcttcaccgtcgttgatcccttactaattgcttgtggagatcgaggcgatggtcctcttgagctttc

SEQ ID NO: 2526 - DNA, 1665 bp, Zea mays
  Clone ID: TF_ZmC1405_2
aaattattagccccactgtgctagcaagctggcctctctgcccatgaatacagaatccaaacgaagaaaacatggaacaaaaataattggctccaacctccaactgggctcactcatgctggaactaactgctaagttgcaaccccactcccatttctatctctctcctcctgccatcaccctagaataggagcatttacctccgctttctctctctccctctcttccatcctcatgctccctctatatatacacatctccaccctgttcctgggtccgcctcgaggccggccgggaactgctaagttgcaaccccactcccatttctatctctctcctcctgccatcaccctagaataggagcatttacctccgctttctctctctccctctcttccatcctcatgctccctctatatatacacatctccaccctgttcctgggtcctctcttccacccactgcaaccccaaatctctccttcctcacacacgcgaaggtgagagaccaaagaagaagaagaaggaggagctgctagcgtggaagtgcccaaggcgagagagagacaagctagctaggacggccgcgacaggctagccagccagctgctagctcctgcggacgagccgatggctggcgccgacgtcgacgtcgggacggaactccggctcggcctgccgggaggaggcgccgcggcggccaagaaggacaccatcgacctcaagctgaagctgcctaccgctggcatggaggaggctgctgccgccgccaggccggagccggcagccgagaaggccaagaggcccgccgaggcgccggccgccgatgccgagaagccacctgcacccaaggcacaggccgtgggctggccaccagtccgatcgtaccgcaggaacgccatgaccgtcgtccaggccgtgaggagcaagaaggaagaggaacctgagaagcagcaacagcccgctgctgccaacgccttcgtgaaggtcagcatggacggcgcgccctacctgcgcaaggtggacctgaagacgtacagcagctacaaggacctctccgctgcactcaagaagatgttcggcaccttcaccgcatctgggaacagcatgaacgaggggagattggttgatccggccggcgatgctgatgatgtggtcactacttacgaagacaaggatggtgactggatgctggtcggcgacgtcccgtgggagatgtttgtcgagtcatgcaagcgtctgaggatcatgaagagttctgaagccataggtcttgcaccaagaacgaaggacaagtgcaagaacaagagctgaagaagatgcagtgttaaagatgttgcacattgtatcaaaagaatggtccccttgcagtgcgctgccgttttttttcctactagaaatataacgcgttttaattactactagttggagggagacctgtcttgttcaactcgttcatggaccagaagcaataatctatccgtgtgtagctggattggtgttatgtcatgtcccctaccgtgtctcccagaatctacttggtgattttattccagtgttgttaatcaagtttatgtgattgttaagtaaagggcatcaatgagactattattatttattattaaaaaaaaaaaaaaaaaaaaaaaaaaaaaaaatgtatgtggtc

SEQ ID NO: 2527 - DNA, 1439 bp, Zea mays
  Clone ID: TF_ZmC1098_1
ccgggtcatctcacctccactccaaacaaacaagggacggtgagcgaggaaccccaccccacgtcgccctccccccacctttctctctagtctctagtttctagtctctacccccaggccccagactcctgcctcttctctctctcgcccacccgccccggccccaatgtcgccgcccctcgagccccacgactacatcggcctctccgccgccgccgccgcggcgccgccgacaccgacctcctcctcgtcgtcctcgtcctcgccggcgccccgcctcaccctccgcctcggcctgccgggctccgagtcccccgaccgcgaccgcgaccgggaccgctgcgaggacgtcgccgccgcgctctccctcggcccgctgcctgctacccccaaggcgcccgctgccgtctccgccaagcgcgccttcccggaccccgcccagcgccccggcgctgccaaggctagcgacgacaagcaggcgtcccccgccgccccgccggccgccaaggcgcaggtggtgggatggccgcccgtgcggaactaccggaagaacaccctcgccgcgagcgcctccaggagcaaggcgccggcggcggaggacgccgcgtctgcggcccggcccatgtacgtgaaggtgagcatggatggcgcgccctacctcaggaaggtggacatcaagatgtactccagctacgaggacctctccgtggcgctccagaagatgttcagctgcttcatcgctggtcaaagtggcctgcataaatcatcgagcaaagacaggctgactaatggctcgaaggtggatgccctcaaagaccaggagtatgtacttacatatgaggataaggatgcagactggatgcttgtcggtgatcttccctgggattattttacctctatctgccggaagctcaaaatcatgaggggctctgatgctgttggaatagctccaagaaccatagagcagacaggtcagaacaaataagcttggtctttgcctgcacccacgcaagaaatctgagctagctggaaggccatgttgaaggcttaaatagttgctcggaattatcaaaagtcgtcaaatgttagtgtagtttccacgtgttcttgagacgtgtgtatttgtatgtctgtgatgtgatccgtcagatctgttcttgtgcccttcaaaggccaaatcagggagctctctgcttcctgtgtatgcttgctttttccagtattccctgttattctactatgaaatcatccatcgtgccacaaagaactgatggttcctgatgtcaaaaaagctgtccgaattgtcttctttttacaggagaaattggttctgcccaaaacaccaataatgtggagcaaaaaacccgtcaaatgtttaatgatattttaacgtgtcacttgagacatgtgcattttgtttgtctgtgacgtgatccgtt

SEQ ID NO: 2528 - DNA, 634 bp, Zea mays
  Clone ID: TF_LIB3606-053-Q1-K6-C8
cggacgcgtgggcggacgcgtgggcggacgcgtgggaggaagaggaacctgagaagcagcaacagcccgctgctgccaacgccttcgtgaaggtcagcatggacggcgcgccctacctgcgcaaggtggacctgaagacgtacggcagctacaaggacctctccgctgcactcaagaatatgttcggcaccttcaccgcatctgggaacagcatgaacgaggggagattggttgatccggccggcgatgctgatgatgtggtcactacttacgaagacaaggatggtgactggatgctggtcggcgacgtcccgtgggagatgtttgtcgactcatgcaagcgtctgaggatcatgaagagttctgaagccataggtcttgcaccaagaacgaaggacaagtgcaagaacaagagctgaagaagatgcagtgttaaagatgttgcccattgtatcaaaagaatggtccccttgcagtgcgctgccgttttttttcctactagaaatataacgcgttttaattactactagttggagggagacctgtcttgttcaactcgttcatggaccagaagcaataatctatccgtgtgtagctggattggtgttatgtcatgtcccctaccgtgtctccc

SEQ ID NO: 2529 - DNA, 534 bp, Zea mays
  Clone ID: TF_LIB3597-014-Q1-N6-H10
aacaccaatccagctacacacggatatattattgcttctggtccatgaacgagttgaacaagacaggtctccctccaactagtaattaaaacgcgttatatttctagtaggaaaaaaaaaaacggcagcgcactgcaaggggaccattcttctgatacaatgggcaacatctttaacactgcatcttcttcagctcttgttcttgcacttatccttcgttcttggtgcaagacctatggcttcagaactcttcatgatcctcagacgcttgcatgagtcgacaaacatctcccacgggacgtcgccgaccagcatccagtcaccatccttgtcttcgtaagtagtgaccacatcatcagcatcgccggccggatcaaccaatctcccctcgttcatgctgttccctggtaagacggatcatggacgcacagcttctgtgggttcagctcaactcaatgcattcgccgaatttgtaaaggcgtggcgatcggtatcagttcggttcacaagcttgtatgctgcagattcctatgc

SEQ ID NO: 2530 - DNA, 838 bp, Zea mays
  Clone ID: TF_ZmC1336_1
caagcagaccgctggcgcctccagcgccgtcgccggaaacggcggcacaccacccggaagcacgacgacagccacgcacaccggcggcggcgagacgaacggggcggcggcggcggcgctggcggcacggccagcgctggcggccagcagcatgttcgccaaggtgcacatggagggctacgcgatcggcaggaaggtcaacctcagggcccaggacggctacgactccctctcaaggacgctcaccaatatggcaaccaacttcttctgccccgcagactgttcaggcgcggcagaaaaagacgctccaaagagtgacaagttcatattcctgtacgaagacttcgagggcgaccgaatgttggttggtgacgtcccatgggaattgttccttgcgtctgctaaaggattgtacatcgtccgaaaacccagcatcaggcgacaaaggtcggggtgaaggtgacagaaactataaagccgaagaaccaacgaccaacggctgatgatgcaggcactctcttcaagcaagtgtggtcgcaaggacaggagcatataaatatatatgcactacatgctaggacatcttcttggttttggcatatatatagctccgaattacattttcttctgctggtactatatatttaatagtaaggtagttagtagagctatgtgagttatgttgtactgttggtgtttcctgatatcaatgtgcatatagttttgatcgctttgtaatggggggaaaaatctacaaaaggccggaagaaacatgctcacattggtctcaacaagtcaacggtgataaataaggcagatatattatgacttgttaacc

SEQ ID NO: 2531 - DNA, 1079 bp, Zea mays
  Clone ID: TF_ZmC8950_1
cccatgtctaactttaatcagcagcagcagatgttcaaagctgcggctcctgagactgatattcagggtgcagatcccagtaataacacactctttggaataaacggtgatggtcagctgggctttcccatgggagcagatgatttcttatcaaatggaattgatgcttccaagtatcagggtcatatttcaacagatattgatggtaactacaggatcccaaaggatggccagcaagaaatatcgtcatccatggtttcacagtcgtttggtgcatcagatatggcattcaattcaattgactctggtatgaatgatggtggtttcgtgaacagaacctcttggcctcctgctcctcccttaaagaggatgaggacatttaccaaggtgtacaaacgtggagctgtaggtcggtccattgacattagtcagttcagtggatacgatgagttgaagcatgctctggctcgcatgtttagtatggaggggcaacttgaggaacggcagagaataggctggaaacttgtctacaaggatcatgaggatgacatcctacttcttggtgatgacccttgggaggaatttgtcaactgtgtgaagtgcattaggatcctgtcgcctcaggaagtgcagcagattagcttggatggggatctggggaacaacattctccccaaccaggcctgcagcagctccgacggcggcaatgcctggagagctcgctgcgatcagaactccggtaacccatctactggttcatatgaccagtttgaatgacctaacttgccggtccatacatgccggatcacaagtaggcgtctcgtgaggggatggcaggtgcagaatgtttgtagatgtgtcgccagatttacgtccgggagagcgaatcgctcgatggattggtagtgtttttgttcatatgtgtaggttttctcacatggaaggaatgtagtatagaggatgggagatgaagattaccgtaggtgaaagatgatgttgtaccatgaggggggaaaacatgcttgtagtagtaaagactgctgcttcagtccacgtatctaaaaagttcttctctgacc

SEQ ID NO: 2532 - DNA, 1523 bp, Zea mays
  Clone ID: TF_UC-ZMFLMO17210E05_FLI
tacagctagcatagcaaggaccacgacgtgccgacggcagagaagcgcaactcaactcgtcgggcttcctttgtcccgttctttgaggcgcaaaggaaaaccaagcaagagggagaaggctacctaacctagctagctaaggacgagcaatggaggtggccgcagcagcgagctacagctactacggcttggaggcggccgacgacgacgtcgacaacctcagggccacggagctcaggctcggccttccgggcacggaggaggcggcggcggcggcggcggaggcggaggaggaggagccccggcaggcccagaaggtggcggcgccgccgtccacgcccaggggcaagaagcgcgacggcgtcagcggcgtgaccgaccccgcgccgccggccgccaaggctcaggtggtggggtggccgccggtgaggtcgtacaggaagagctgcttcctgcagcaggcggcggcggcggcgggtgccaagggcaagccagcggcggcggcgccggcgctggcgaagggtgctccgggtccggcgggcggcggggtgttcgtgaaggtgagcatggacggcgcgccctacctgaggaaggtggacctcggcacgtgcgggggctaccgccagctgcgggaggcgctggaggccatgttcctctgcttctccgggccgggctcgggcgacgcgtccggcggcggcggcggcggcagcccctccgacttcgccgtcacctacgaggacaaggacggcgacctcatgctcgtcggcgacgtgcccttcggcatgttcatcggcacctgcaagcggctgagaatcatgaaggggtctgaggccagactaggcctcgggtcagccaagaacaacgactgagggagagggagacgacgaccattgtgcaggcccgaccgagatccacgcacacggcggcgcggcgcggcgcggcttgtgcacgcgtaagcgggggattgttgtgcgtccactccgaggcatggggtagtatgggcttgtgttgtaccatccccacctcgtctgccatcaatggagcagcaagatagaaaagctgcttggaacaggagaagatgaagctgcttgcttggattggaacgagggggcggagatggagagagatagaaaagctttagagggtgtttggtttctacatactaatttttagtccctacattttattccactttagttacaaaattatcaaatatagaaactaaaactctattttagtttctatatttatcaatttatatactaaaatggaacaaaatgaaggaactaaacattagtccctagaaaccaaacacctccttaatttgtgcatccaaccaagtggagtggagtggaatgatgtgtggtcgctttgttcttttgtttttttaattattttgtggtactactagtaggaggggtgttagcaacacaaaaggagtggagtggagttgagagtggaattgaatctccatgcacgcgtgtctgtacaaaagctaaagatcactcttctttccctgtctt

SEQ ID NO: 2533 - DNA, 1631 bp, Zea mays
  unsure (1)..(1631): unsure at all n locations
  Clone ID: TF_ZmC2734_2
ctgtgagcacaatccaagcacagggtcatgtctgagttcctcaagcaggagatccaacgcagccagtcattcaatgagcagaagccccagatgcaacaccagncaagaatcacagncagcagcagcaaccacagtgtctgccagtcccccaacatcagcaaatgcaacaacagaatatgaccaactaccagtctatatctaatgcattatcaccgttttctcagctgtcgccagtttctcagtcttcacctatggcgctgcagactatattaccgttctcgcaggcacagagcttcacagacacgaatgtaggttcattgtctccatccaatggtaacaccatgcaaaacacactgaggccgttctcatcagaagcagtttctcacctcagtatgccgaggcccactgcgatacctgtcgcagacccatggtcgtcgaagcgtgtcgcggtggagtctctgcttccttctcggcctcaggtttcatcccagatggaacaattggaccctgcaccagctagtatacctcatagctctgcgttggcaccacttcccggaagagggtgcttggttgaccaagatgtgaactctgatcctcaaaatcatctcttgttcggtgttagtatagactcgcagtcactgctaatgcaagggggcattcctggtctccaaaacgggaatgattcagctgctataccttattccacttccaatttcctcagcccttctcagaatgactttcctctggaccatacactaaattcttcaggctgcttagatgattctgggtacgtcccgccatgttcagataattctgacaaagtgaaccgaccaccagcgaccttcgtgaaggtttacaaatctggaacctacgggaggtcgcttgatatcactaggtttagcagctatcacgagctccgtagggaactggggcgcctatttggccttgagggccagttggaagacccattgagatcaggctggcagcttgtattcgtcgaccgtgaggaggacgtccttctcgtgggcgacgacccttggcaggaattcgtgagcacggtgtcctgcataaagatcctctccccgcaggaggtgcagcagatggggaagcagggcctggagctcctgagctcggcccccgcgcggaggctcggtagcagctgtgacgactacgtcagcaggcaggagtcgagaagcctgagcaccgggatcgcgtccgtcggttcggtcgagttgggatgagcagcaagatagcgcgcacgcagcagcagcagcagcaggttacgcatcctcagcctcagggtaggtaggggactgaagggttggtctgcgacttgatgacccacgagctcctcgttgcgcgcttcgttcgcctccatgcgatggatagaagttcagcgcagaccaagccttagctctgcgagctatgtaccatctaataattctgtccgtgtcgtaccatgtcaactcctaagtagaagaattgaagaaactaccagcagccgctgtctggtatacacgctgaaacattttttttcttgtttggagaaatactaatcatctggatgtcaacaaaaaaaaaaaaaaaaaaaaaaaaaaaaaaaaaaaaaaaaaaaaaaaaaaaaaaaaaaa

SEQ ID NO: 2534 - DNA, 622 bp, Zea mays
  Clone ID: TF_ZmC3003_4
gtgccgcgcctgcaagtaccggttcggcctacgcgtgccgacctatgcgatcagagcgccaaccatttcatatattgttgaaagctcgcgtgttagctcctatcgtgtgtttattaggagatcactattatcatttcttacagctaaagagcttccctgttaggacaggtttggtcgccaatgaaagcactactccacctcttttacactttccaactattctggtcaatatcatgccaattaaagcccagcaaaataaaggagcaaggcatagattcatcgcataataatattgcataattgctttgcggccggacctatataatatcttgtgtagtcctatgatcctatcctcttcagtttatacacttctgctttgaatgggcttcaggttcataagcaaggagttgcgcttggtcgatctgtggatctctctagattcactgactatggtgaatcttagcatagaactcgaccttctattattttggatgtttggtttgcatgggataatctggtatgggatatatttatgaacattgatatcggttttatgcttactaacagaatgcatatggtctgaaaatggataaaatacccgctcttagatggcatatgcttt

SEQ ID NO: 2535 - DNA, 1379 bp, Zea mays
  Clone ID: TF_ZmC1405_5
tcgaggctcgtccgggcggaaccaagtggtttctgaataatagtgatggtaatgatacacgcggcctttatttaccaaatcacaatgccattatacacattactagcagaacgctgagctagctggccgcaaacaagaatatatataaaaacgcatgatctggctggctatcgatctcgaactctcgatggatcctattttcacatgatcgtaactaaaaactccgagttgcatgcatgtcagggcacaggccgtgggctggccaccagtccggtcgtaccgcaggaacgccatgaccgtcgtccaggccgtgaggagcaagaaggaagaggaacctgagaagcagcaacagcccgctgccgccaacgccttcgtgaaggtcagcatggacggcgcgccctacctgcgcaaggtggacctgaagacgtacggcagctacaaggacctctccgctgcactcaagaatatgttcggcaccttcgtcaccgcaactggtaaatctcaccccggcccgttggcataggaatctgcagcatacaatttttgtgaaccgaactgataccgatcgccacgcctttacaaattcggcgaatgcattgagttgagctgaacccacagaagctgtgcgtccatgatccgtcttaccagggaacagcatgaacgaggggagattggttgatccggccggcgatgctgatgatgtggtcactacttacgaagacaaggatggtgactggatgctggtcggcgacgtcccgtgggagtatgttctccgttctagcgtgccatcgtctgctttcgtatttactgacccatgattaggactccagtgtcttgtatgtcgccttgctgattttctggtccctgcaggatgtttgtcgactcatgcaagcgtctgaggatcatgaagagttctgaagccataggtcttggttagtgtctccagataaaattaccttccagagttccattgtaagatttttaatgcgtcaactctaaccgcctaagtttttcttcattgcaaaaaaaaaaaaatacagcaccaagaacgaaggataagtgcaagaacaagagctgaagaagatgcagtgttaaagatgttgcccattgtatcagaagaatggtccccttgcagtgcgctgccgttttttttttcctactagaaatataacgcgttttaattactagttggagggagacctgtcttgttcaactcgttcatggaccagaagcaataatatatccgtgtgtagctggattggtgttatgtcatgtcccctaccgtgtctcccagaatctacttggtgattttattccagtgttgttaatcaagtttatgtgattgttaagtaaagggcatcaatgggactattattatt

SEQ ID NO: 2536 - DNA, 1270 bp, Zea mays
  Clone ID: TF_ZmC1426_1
cggccgcgtgggctcacgggtagctcatggtcgagcgtagcatgcaggaacttatttgccgtgcgctcccaggtctccgctcgcgtgccttccagtctgtctcacactagctgctgtgggacgatcgaagtgggtgtgtcagctagctagctgcgccgtgaccacgcacatgaccgcagtgcgcgcggggctgatcaagggaaagtgatcggatggagctggagctcgggctcgcgccgccgaacccgcatcagccgctggctgccgccgccgagttcgtcggtctcctcagcagctcggctggctcgtgcgggaacaagagggttctcggcgacgcgttcggggccgccaaggcggccacgcttccgctcttcgtctgcgaggatggcgacggaggcggcggcgaccgcgaccgcgacggcgtcgtcgaccatgaacagcaaagcaacaaggaagaagaggctggtggggtggccgccggtgaagtgcgcgcgtaggcgtagctgcggcggcgggtacgtgaaggtgaagctggaaggggtgcccatcgggcggaaggtggacgtgtccatccacggctcgtaccaggagctgctccgcacgctcgagcgcatgttcccttcgggtaaccaacaagatcatgcagaagacgaggtggtggtctcgcacgagcgccgccgtcgccatccttatgtagtcacctacgaggacggcgaaggggactggttgctcgtcggagatgatgtgccgtgggaggtctttgtcaagtcagtgaagcggctcaagatacttgcgtagccgacggtcggcgcctcagagacgtcgtgtggtccgtctcaccaggatcggagcagtgtagtactcctgggcgtcatctgcgtaataacgttgtttctgtcctgtgtgcccgtagcagtacgtactgtcctatagtaagctagctttatggggtgcttcagctttcagagcatgacgaaagcactggttagctgctgtgatcacatttggttcgtctttgtgtcgtacggtatcgctggcgtcagtgtcgcggcagcctaggtgatctaagcatacttactatctcaagttacttttggttcccttagcttgcatggtaattcatataccgtatacgtgtgtgactagtatttgggtttgacttttcactctgtataagatatatattatacgagcgagtttatcgactgctaaaaaaaaaaaaaaaaaaaaaaaaaaactcgggactagttctctctctctctcctcgtgc

SEQ ID NO: 2537 - DNA, 858 bp, Zea mays
  Clone ID: TF_ZmC37547_2
cgtgctactttcatgaagtcacagaacggctcgtcgccagtacgcttgacagcgccagcagcatcacggtaacaaaggtggctcattacctctgccctctcgattccaaacatgtcggccaactgaccgtacagctcttcgtacgagccaaagacggacaggtcgatggtgcgaccgacatcctccgactccacaaataccttgcagtgcccggcttcaaattcgaacccgagcctagaagcctcgcggcctcgggacgaggaaccgatgcagatcgacgagccggagccatcggatacgtttcccgttttctgaacactgccatcggaactgttcccagtggcctcaggggagagtgtttcccttgaccctctagagctcatctgctgctcggtaaggataggctttccgaacagcattagatgtggtttcttcctgtcgtcagatctctctgcggcccgtggcgtgccgatcgtcagcacgcaagagacgctctcgtcgaccggtgcactgccgatcacaaagcccctggatatagggcatggtggagtgatagcgtcaagccgccgcttaaaaccgccgccttggaacagaccgaggtgcagcttgttaagctggcggtctgttagtggtagaccgaactgagcatgcctggctccctgtatgcctgcaggagcgatgtccgagaaacagcgaagagcaccgccgccgttgctcggaccgagtgggttgccgtggaaaatcggattcaacagctggccgtcgaacgggaagtccggatggtggggcacccgcagcttcttcctaggtgagaaaaggtcccaggggatcggtgaatcccggaaaacccgagggtac

SEQ ID NO: 2538 - DNA, 571 bp, Zea mays
  Clone ID: TF_LIB4185-022-R1-L1-G9
tgaattcggcacgagggtgacgcctatacggcgcccccgtgaggcaacgatcccggcttctgttgtgagctgatgatgcccaaccgcaagaactgttttcactagggctgcagcctgaaagtgagggcggccatgcaggatgcagctgccgatgaggcgccctgctgttcggcatctgtgagagacgtcacaaatacttccatgaacattatcaccggcgtcgtcacacgtttctttgtgaaattgagtctggactgtgccacgtacttgaggaaagcagacctgatgatgtaccactgctacaattagctcaattaggcccttgatgtgatggtgaactccgttatcacctcctacatgctgacaaaattcgccgccttctacgaagatccgaacggagatctcatgctcgtcggatacgatcaggtcgacatgttcgctagcacctatgcgaaggttgagatcatgatgagatctgagagcacacgtgtggtgtcgtacaccgcgaggtatcaatgactatcccatgtgatcgttatgacctccatgcgtggtaacgtagatcaacatg

SEQ ID NO: 2539 - DNA, 1087 bp, Zea mays
  Clone ID: TF_ZmC12865_2
ccggccggctctccaaacgaacgaacaaaaagaaagaactcccctcggccctctgcccctctcctccttgtgcttctgcttccccaccgagtctcctcaaccccaggcactcgccctctgtcccctcgcctcggcccgcgactccgatgccgccgccgccgctcctcgagccgcgcgactacctcggcgccggtgccacctcgtcgtgctgctcgtcgtcctgctcctccggccgcgagggcgcggggccccacctcgcgctgcggctcgggcttccggggtccgacgactcccccggccgcggcgcggacacggagcacgcccgcgcccacgtcgacgccgcgctcaccctcggccccggccccggccccgcgcctcccaggggcagcgccaagcgcgggttcgccgactccctcgaccggtccgcgaagctggacggcgttgccgcggatgacgctgctgggggcgtcacgcgggtagctggagctgctgccggagctccgcccgctgccaaggcacaagttgttggatggccgcctgttaggagctaccggaagaataccctagctgccagtgccacaaagacaaatgggggagatgaaggtaggagtgaggcgggatgctgttatgtcaaggtcagcatggatggagccccatacctaaggaaggtggacctcaagacctattcaagctatgaggatctctcgcttggtctggagaaaatgttcagttgcttcatcactggtcaaaacagttcatgcaagacttcaagaagggataggcttactgatggttctagggttgatgcccttcaggaccaagaatatgtccttacttacgaagataaagatgctgactggatgctcgttggtgatctgccctgggagtgagtcctaacttagtgtggtttgcaatatctatccaaatgataatgttccttctcggtttgtcccttccctagaccactcgtgttggagcatccggcaccgggtctgacctatagtgttccttttctgtttatatgcaaatgatagtgttctttttctcgaaaccaatggaaatcgatatgattttgatgcagcagtct

SEQ ID NO: 2540 - DNA, 1334 bp, Zea mays
  Clone ID: TF_ZmC11045_1
tgggaacaatgaggattcatctgttgcactcacacgtggtgattttgctggagagctacaagttcagcaggttgaacaagatgaactacttccaccaccgaagttagagtcatcaaagtcacctgatggagggaagtccgtcagttcgttcccaaaccaagggtgtttcccacagttctttgagggtctggattggatgatcccgccttcctgctaccaagactccaatggcatccattcagttaccgcatcggatagcatctttaatccgtctgaaggtatacctccttccacaatgaacgcggacggcatggacgcgttccaaacatcttgcctttccgagtgctttcctaattccatccaagaattcatcagcagtccagatataaacacactgacatttatgtcgcctgagatgcaacatctggatgcccaacacgacggcagcaacttgcagagcacgtccaactcctatgtgcagatgagcttctcggaggagagccagagtgcatccttaagtggcctacacatggaagctgtccatatcaacagctcctgccttcaaccactggcgacagggagctttgatgcagggacgttctcaaaactatcaaacataaaagaatgccaggccttgcctctgcaggagattcacagcagctccatgggaacaccttcgtgcagtatggatgcggcggcggtcgagtactgtatggatcgaagtgtgaagccactgaaaccaccggtccggacatatacaaaggttcaaaagttaggatcagttggaagatctatcgacgttacacgatttagagactaccatgagttgaggtcagccattgcctgcatgtttggactacaggggaaactggaacaccctggcagttcagactggaagcttgtttatgtcgactacgagaacgatgttctcctcgttggagacgacccatgggaggagttcatcaactgtgtgagatgcattcggatcctggcgccttcggaagtacagcagatgagcgagaatggtgtgcatgtcttgaacgactgcatgcaaatggcttagaaaatcagggttatattgccctgcgcagcctgcacagtgtaacgtcgcaaatacgagaaatgagtgttcttcgtagccacgcagcggctcttcttgtaaataaaagatacatcacgtgcatcccattctctgaatgctttgattcttttctagcacgagaagagaccattattatatggcggtgcattacaggtttattttctatttttttcatgcaatgacttgaattatgagcttacgaggaagagggtgataatgtatcaaattatcc

SEQ ID NO: 2541 - DNA, 1390 bp, Zea mays
  Clone ID: TF_ZmC9890_1
tgtccggggagatcggcgagattgagcccacaagtcgcgctccccgctcccccagccgcgtcccgctccccccgcagcgtcggctcccatccatggctgcgcgacgcgagatcggctcccctttccttgtgcgaagcgagatcgagcccacaaatcacgggacggcatggcagccttgccccgctcccccaacagcgcccgcctgcccctttccttgcgtgacttgagatggattggcgaatccatggatccgcgaatcgccggtctgccaaatccgccgcgaatcccgcccgcggaggcttccttctatggcgacgaatcccgcgctccatcctcgaatcaccggcccttcatcacggtgactcctgctaaagggagtggatctgcgcggagcatcttcttatccccgcccacgaccgccatccattgcatccgaatcccaagctttctcctctccgtgcaggtgcagcagccagcgcgcgcgtctctacaggaaacagagagcatccgagtcccaaagctcgcagctttgccagcaaagcaagaagacagttgcggcatggagctggagcttgggctggcgccgccgagcgcgcgccgtcccacccccatgacgatcgaccagcagcagcagcagcagcaacgccacctcgccgaggacgagctgagcagcacctcgtcggaccatcacccttgcgctgcgcgctccgggaagagaggattcgcggaagcgttccaggaggcggcggcgacgacgacgacgctgccgctcttcgacgacggctcgtcgtgcggcgggagaagcggcggcggaaagaggccgctggtcgggtggccgcccttgagctccgcgcgcagcagggcgtgcggcggcggcgccgccaagtacgtgaaggtgaagaaggaaggcgacgccatcggcaggaaagtggacctgtcgctccacgcctcctacgacgagctcctcgccacgctcgcccgcatgttcccgaccaacaacggcagccaagacgacaaggaaatcagcagcaagtccaccgccgccgccaccaccaccaccagccatagggacgtggtggtcacctacgaggacggagagggggactggatgctgctcggagatgtgccgtgggatgattttgcaaggtccgtcaaacggctcaagctactgggatgattggagtactgatactacatgttcttaattggagtataagcttcttttttgctgatgttttttaagagcacttggtgttaagaatcaaggcaatagtttggtggtgtacctgggccgggttacctcttgtgacaatacttatacgaacaggttttctggtctatacttggagatttccaaacaaaaaaataaaaaaaaaaaaaataacaaggc

SEQ ID NO: 2542 - DNA, 632 bp, Zea mays
  Clone ID: TF_ZmC2833_18
aactcaactcaccagggaggaaaacaattcctcccctgcaatttcaacaatcgcaattacagaagcaacgaccaggctgctgatcgatagatagacaatagactgatagacaagaaagaagagtgatctttggctttgtacaaccacgcatcatggagattcaactcgactctccactccttttgcatgtcttgctaaacacacacgcacacacacccctactaggggcacaaaagaaaaagaacaaagcgaccacacatcattccacgcatgcacaaagctttcctctctctctctctctctccctccttccaagcaagcagcttcatatttcgcctcgccatgtctctggtttgctgctagctgctgctccattgttggcagacaatgctaggggagaaggtacataatactcaacaccacacgcccacacccatgcagggacgccttggagaagaaataagaccccaaaagaacaaaagaatttgctggcgcatgcacgcacgcacagcacaagcatgcgatagacgcctcatcatcagttgttcttggccgagccgagccctctcgcttcagaccctttcatgatcctcagcctcttgcaggtgctgatgaacatgccgaagggcacg

SEQ ID NO: 2543 - DNA, 943 bp, Zea mays
  Clone ID: TF_ZmC1098_2
gcgctccactccaaacaaggggaaggcgagcgacagacaaacccaccccatcgcccctcctctgtctcctctcttgcccacccgccccaatgtcgccgcccctcgagccccacgactacatcggcctctccgcctccaggagcaaggcgccggcggaggaggccgcgtccggagctgggcccatgtacgtgaaggtgagcatggatggcgcgccctacctcaggaaggtggacatcaagatgtactccagctacgaggacctctccctggcgctcgagaagatgttcagctgcttcatcgctggtcaaagtggtctgcataaatcatcgagcaaagacaggctgactaatggctcaaaggtggatgccctcaaagaccaggagtatgtccttacatatgaggataaggatgcagactggatgcttgtcggtgatcttccctgggattattttacctctatctgccggaagctcaaaatcatgaggggctctgatgctgttggaatagctccacgaaccgtcgagcagacaggtcagaacaaataagctttggcctttgcctgcatccaaggaagacatctgagctagctgggagagtatgttgaaggctgaagcctgaaatagttgccgggaatcgtcaaaacccgtcaagtgtttagtgtagttttcacgtgtccttgagacatgtgcatttgtatgtttgtgacgtgatccgttagatcgtgcaatcgtaggttgctgttcttgtgccctttaaaggccagacagatcagggagctctctgcttccttagtgcacttgctttgcagcattccttgttattctactctgaaatcatacatcatgccacaagaaccgatggttcgtgatgtcaagagagctgccctaattgttccattgtaacctcgtaattgtgttcttccgcaggagaaattggttctgca

SEQ ID NO: 2544 - DNA, 1215 bp, Zea mays
  Clone ID: TF_ZmC1098_4
tcgaggggccggccggaaaaaaaaataaaaaaaaaaaaaaaaaaatcgtcgctccccacctcaccatctccactccaaacaaggggaaggcgagcgacagacaaacccaccccatcgtccctcctcttcctcctcctcgccggccccccgcctcactcttcgcctcggcctgccgggctccgagtcccccgaccgcgaccgggactgctgcgaggacgtcgccgccacgctctccctcggcccgctgccggcggcagccgccgtctccgccaagcgcgccttcccggaccccgcccagcgccccggcgcttccaaggctagcgacgccaagcagcaggcttcccccgccgcgccgccggccgccaaagcgcaggtggttggatggccgcccgtgcgcaactaccggaagaataccctcgccgccgcgaccgcctccaggagcaaggcgccggcggaggaggccgcgtccggagctgggcccatgtacgtgaaggtgagcatggatggcgcgccctacctcaggaaggtggacatcaagatgtactccagctacgaggacctctccctggcgctcgagaagatgttcagctgcttcatcgctggtcaaagtggtctgcataaatcatcgagcaaagacaggctgactaatggctcaaaggtggatgccctcaaagatcaggagtatgtccttacatatgaggataaggatgcagactggatgcttgtcggtgatcttccctgggattattttacctctatctgccggaagctcaaaatcatgaggggctctgatgctgttggaatagctccacgaaccgtcgagcagccaggtcagaacaaataagctttggcctttgcctgcatccaaggaagacatttgagctagctgggagactatgttgaaggctgaagcctgaaatagttgccgggaatcgtcaaaacccgtcaagtgtttagtgtagttttcacgtgtccttgagacatgtgcatttgtatgtctgtgacgtgatccgttagatcgtgcaatcgtaggttgctgttcttgtgccctttgaaggccagccccccccccccgctctttgcttccttagtgcacttgctttgcagcattccttgttattttactctgaaatcatacatcatgccccaagaaccgatggttcgtgatgtcaaaaaaaaaaaaaaaaaaaaaaaaaaaaaaaaaaaaaaaaacac

SEQ ID NO: 2545 - DNA, 385 bp, Zea mays
  Clone ID: TF_LIB3236-105-P1-N1-E7
ggactgcgtatactcctgacttgattaccaaatatccatggtatttacaaggcattcaaagaaacatggaatggaaacataaaataccaaaatttaattttgcaggggtggtaacaaggctggcgtttcttcagtacactgcacacggctagtatagcctcagcatcacgactccactctttagttcagcataatctttcctaatgaacctaatatatattaaaagaagaagaaacagagtttatccaccgcatgaaaaagattgctatctagcatctgtctgtttttcgaatcctcagctttttttacactttcgagaaaaagcttccacggtacatccccaaccatgattcagtctccatcatgggcttcataggtgagaaca

SEQ ID NO: 2546 - DNA, 292 bp, Zea mays
  Clone ID: TF_LIB3159-016-Q1-K1-H5
taccaggacacggacggtggcctcatactcatctgagacttaccgattgagatgttctttagcacctgcaggaagctgacgatcatgaagagatctgaaaccacaagcctgcgatcggcgagacaattaacaatgtgtgacgacgaccgagggcccgacaacgttcatgtcgagctcttctttttttttatttgagccccagtattttatttggttcttcttgtgcgaaagaccaccagccaaaagggtgagctttgggggtggtgcataatctacaaagcgcatgcatata

SEQ ID NO: 2547 - DNA, 1796 bp, Zea mays
  Clone ID: TF_ZmC12865_1
ccccaaaaaatagagggaaaggaggaaggagggggagatttttttttacaagcccacagtgagaccccccccaaaaggagggccccccacccctcccaaactaggggacccccccttggttgaaaaaaatgtcaggttttttaccggggcaaaaaagttttgaaaattttcaaaagaaaagggcctacaaggtttaaagggtatacccccccagggcccaaaaaatttgcccctcttacaaaaaaaaaaaccccacggaaaacccttttgggaaatcccccgggaacttgttaggccggccgggattgccatccacggaccatggtgtgccctctacttatcctcctctcggctacctccaccacgcctccgcccgctcgaacggaaaactcccctcggccctctcctcttgtgcttctgcttccccaccgagtctcctcaaccccaggcactcgccctctgtcggtctgtcccctcccttcctcgcctccgatgccgccgccgccgccgctcctcgagccgcgcgactacctcggcgccggcgccacctcgtcgtgctgctcgtcgtcctgctcctccggccgcgagggcgcggggccccacctcgcgctgcggctcgggcttccggggtccgacgactcccccggccgcagcgcggacgcggagcacgccggcgcccacgtcgacgccgcgctcaccctcggccccggccccgcccccgcgcctcccaggggcagcgccaagcgcgggttcgccgactccctcgaccggtccgcgaagcgggacggcgttgccgcggatgacgctgctgggggcgtcacgcgggtagctggagctgctgccggagctccgcccgctgccaaagaccttttcatgatagcttttagtgccatggacagggcacaagttgttggatggccgcctgttaggagctaccggaagaataccctagctgccagtgccacaaagacaaatgggggagatgaaggtaggagtgaggcgggatgctgttatgtcaaggtcagcatggatggagccccatacctaaggaaggtggacctcaagacctattcgagctatgaggacctctcgcttgctctggagaaaatgttcacctgcttcatcactggtcaaagcggttcgtgcaagacttcaagaagggagaggctcactgatggttctagggctgatgcccttcaggaccaagaatatgtccttacttacgaagataaagatgctgactggatgctcgttggtgatctcccctgggacttgttcaccacaatttgtgggaaacttagaatcatgagaggctctgatgctgctggcatggctccaagatcaccggagcagatagttgggaccagaataaggaacgttgcccggcatgcagagtcgtgaactgaaaggaaaggacagagtttacatggcgctgaagggagcggtgtttttacgtgaagtgctccggttaagtctctctcttcttttttttttgtaacccccacatgtgcaatgagatgtgtgtgcctactgtaagacaccccattttgcccacgaggttgtcacgtgttattgtagatggtcgcctttgtgttatgaacgatcaaactcggcagtagcctgcttgctgcttcctctatgatactttcctccgtatttggaagctcgtacttcatatggtagaagtaagaaaaaaaatgcccatgttgcccattaaaaaaaaaaaaaaggtttctttccccgtgctgtgtctgcgagtcaaactaacttttgagcgatatgagcatgcattggcc

SEQ ID NO: 2548 - DNA, 1959 bp, Zea mays
  unsure (1)..(1959): unsure at all n locations
  Clone ID: TF_ZmC784_8
gtaatcttttttttcttctctccctcgcagaagtcgagaaaaccaacccggtttagcatggcatcggtacggtagctcgctgcgttgattctgctgtttacgtgtgcctgagacaccagtacacggggggaatcatttttcttctgttgtgtttggggagggcggcctcgctggtgtgggggcgatccggctcctgggcggnggcgcggggccccccggcttgctgtccctcctggggacgcgaaggggtgagctgtgagcagcactgcgtgctctggaccttcgcaaattctctactttcgaaaatgcgctctttcaatttatctttcagaatccttgctttgtttttcactttttcttgcttgctcaagctcttctcatcttcttctctgctctccctgctttgtttttgttgtattttgtacaaaacattttgatccgtcattatcttgctcaaattctgtaactttcatcccaaagttcgccagaattcgtttcttttttattttgttaccagtagagcatctcctgatctacctcttcgtcgtgtttggtaaagactattgagctcaggtgtgttgcgttgtgcagagcacaggtggtgggatggccaccagtctgcaactaccgcaagaacacgatgactaccacccagctggagggcagcaaggaggatggtgatgccaagcagggtcaggggttcctgtacgtcaaggtcagcatggatggcgcgccgtacctcaggaagatcgacctcaagacttacaagaactacaaggacctgtcgaccgcgcttgagaagatgttcagtggcttcagtactggcaaggacggctcatctgagtaccgcaaggatggtgaatatgttctgacttacgaggacaaggatggagattggatgcttgtcggcgacgtaccatgggagtgagttacacccatctgtcttaattaaaacaatggaattggaactaaattaatcaccgattagggcatgtacagtgggtgtcttgagttatgtcttcgagtgtgtttaggggggtgaatgtaaaaaaactcaagatatgtatcttgacgaagacacagtgtcttagctctatgttcgagacatgagactagctgattggtcactttaatttattgaatgctctgattggtacaattaatatggtaagacacatgttttagacacgtccactgtattatgttgtgttttaagtgtgtcttatacttggagtaccgtgcaacagtgtctaggttgtacatgcccttaggtttcgtggctcattttttttctcaactaaatacatgtttagcttgccacatcgtctttcgctccaattgtaggatgttcgccggctcctgccgcaggctcaggatcatgaaaggctcagatgcgattggactcggtatgtttgtgctcctgttatgtctagtgtatcgtcgcgctaatcatgttgtcttggttgtttggtggaaacggtgggatcgaagtacgttctattgtcggttgtacatgatacaatttttgttaaggagttcctgtcccatggtcctggtccctgcatggctgcatcactggtggtagttctcttggctccaagggcagccgataagtccaagaaccgcaactagaacggtggcttcctatccttacacagtccggtacgagggaggagatgcagtgacttgtagggatctgtacgaaaaccgaaaaagtctactaacagctatgacttgtgagaagaattctggcttatggtctgcactagaatggcttggtacatcgtctatggacaaaacacgctattcgattaattgttgttaattaagccttggggggggtacgagtgctattcatgtaaatggtttggtgcatcgtgtgctgctgctgcctgctgctgttactacgattgagctcccctataatactatgatttgaagagagatggcgatgtcata

SEQ ID NO: 2549 - DNA, 1245 bp, Zea mays
  Clone ID: TF_ZmC1117_2
tgggtacctcgctaccggccgggtttccccaggcgggccggcagctcttcaatcccagtcccacacaaagtttctcctcgatcctcatctcctccctctctcgagtcaagagcagagcagctaccaaacaagctctcctttcgcttccgatccatggagctcgacgccgacaacctgagcgccaccgagctccgcctcggcctgcctgggaccagcagcagcagcagcgacgactggcagaagaagccgtcgccctccgtcggggccaagcgcgctctggacgacggcaccaagagcgaggcctcggggaccagcccggccgccagagacctcgacttcgaccacgaccacgacaccgccgcgcctcccaagtaagaactagaccccccatgtacacgctcccagctcccttcgtaggcaccgcctgcatcaagattcaattcaagagacaggggtgcatgggctaacctgcctttttcgcttcgtcagggcgcaagtggtcgggtggccgccggtgagggcgtacaggaagaacaccttccaggcggcggcggcggccaagaaggtcgagcagaagcagaagcagcagcagcagggaggcctgtacgtgaaggtgagcatggacggcgcgccgtacctcaggaaggtggacctccggatgtacaaggggtacagggagctcagggaggctctggacgcgctcttcaccaactccttctccgcggcggcagagggcggcggcgaccaccaccagcacgccatcgcctacgaggacaaggacggcgacctcatgctcgccggagacgtgccctgggaccgatatgttcatctcttcgtgcaagaagctgaggataatgaagggctcgggctctgaggccaggtgatcgctgatccatacataaacagaggctacagacacgccacctgggaacgcggatccaagagcacacacggatcgtacttgacgaggaaggagggaggagctgtgtggcttgagctctccagtgttgtacaaagacatgtttctttctgaacccaaaagggagaaagatgtatgaagcgtgtatataaaatcttagctagcagtttgttttcatttgtatgagcgatcgaaggctgcaaaaaatgaaaaagaaaaatgaaaagggaatgagaaattgactaaagctggtcattttcctctccgctggtcaaaaaaaaaacataagaaacaaatgaacaaaaaagaaaaaaacttgattgtgt

SEQ ID NO: 2550 - DNA, 1175 bp, Zea mays
  Clone ID: TF_ZmC1060_1
ccggccggggtagcagcagcacaactgcacgacccctcgccggccatggaggcctccgccaccggcgccgcggatccgcacttcccgatttacatctcctcggacgaggaagacgggcacgcctatttcatcgagtcctatagccccgaggaggtccagattcagcagaccattcttctctccctgtatacctctcgcgcccagacggccgccgcctgctccgcttcctcctcttaccctactggtgcctcctccacccctaaggccggtacctcctccacccctaaggaaactcctatcgatcacaaaagaaagcgcaagcttaaactagaagacgacacgaacgactccaaaatgaagcggtccacgcgcaaccgcttcaactgcgccatctgcttcgagatggttctggctgcggagaagtttgttgtgagtcactgccctcacgcgttctgcaacagttgcatcggaaggtatgtcgccggcaaggtagccgacaacgtagccgtgatcgggtgccctgaccccgcgtgtgagacggggtttattgagatggatctgtgtcgggatatcatcccgcctgaactatttgaccggtggagtgtcgtgctgtgcgaggagctactgggtgatgataagttctactgtccgttcaaggattgctcggcactgttactaaatgatgattcggcgaagatcagggaaacagagtgtccccactgtcacaggctgttctgtgctcgctgccatgtgccatggcacgatgggatcgagtgcaaggaatttaggaagcttggggatgacgagaagggggagaatgatttgatgcttaagaaacttgctgacaaggagaaatggcagaggtgccccaagtgcaggatgtatgtttcgcgaaaatctgggtgcttgttaataaattgcaggtgcaaacagtacttctgttaccattgtgctgcaccaatggatagggaaactcactattgtgagaattgcaagcactagagaagtagattaaggtctttttagataatgagtaggtaaagctcttagttaacaatgcaggctccgtgcgcagtcgtaggtgatacctaagtagaattttatccccttttagtggaagtaagttccacctttctgccatcgtgatattgttgagctatagagttgatgtgctg

SEQ ID NO: 2551 - DNA, 624 bp, Zea mays
  Clone ID: TF_ZmC1132424_1
agtccctgttcctcggagcgcgccgcacctactgccggttcccggtcggctctgggatgatggtcgccgacgacgacggcgaggagtgcgtgacccagtccgagtgccacgggtgccggcggctgttctgcgcgcggtgcgcggtgccgtggcacgccggcttgacctgcgaggagattgcgcggctcggtgagggggagcgcgagcgggaggacctgctgctcgtgaaggccgcccgggagggcagctggaagcgctgcccgcgctgcaggttctacgttgagaagtccagtggctgcctgcacataacctgcaggtgcggatatgagttttgctatggatgcggtcagcaatggcagctgatacatgacggctgtcctggagcatgaaacagggcttcgagctctcctgtggcttcgttaagcaatgggagctgatacgtgaatcacgtgatgagggtttcaaggatggagtaggtattgatgttgctatcagtatggtttctgtagtcccatggaacaatggtccatggatagtctgacaaccttctctacagaactttggaacattcttctctcatgtatgttgtctgtcttcagttaacatgccagacataatatcttt

SEQ ID NO: 2552 - DNA, 410 bp, Zea mays
  unsure (1)..(410): unsure at all n locations
  Clone ID: TF_700348060H1
cgattgttgcagcgtagtagnctcgaatctgctcgacactgtagtcttgctggaatgagtactgacaactcggatcgagcagaaccttgttgtgaattgcacctgccgcattgccgactgccgcgcccagcccaccggagccttcattcgtgccatcgtctcctcgccagaggtcatctcaaagtatgagaaggcgctcatggtggctatgtggagagcttctccaacctgacgtngtgcaccaacccccagggctgcgaccgcatcctgtgccgccatggcctgggctgtgggactacctgctgcaagtgtggctgngcctcttgcttcaactgtagcttctctgatgcacactacgctgctagctgtggccatatgtctcagtgggtcgacgacgggtgctactatga

SEQ ID NO: 2553 - DNA, 731 bp, Zea mays
  Clone ID: TF_ZmC108794_1
tcgttggaactctcccaggttgcccacaagagggatgcgccacgaagctcagtgtggagggttcgagggtatttctttcgccgcggccggtagagatcatggtgcagcgcatgagggaaggacagatccctccgagccaaaaggtctactgtccgtatcccaggtgctcggccttgatgtccttgggggaagtgattcatccgatgcaggagtcctcatcaaggcacacggctgctgatgctgccacgttgaggaagtgcgtgaaatgcagaggctccttctgcctgagctgtaaagtcccatggcatgatggcatgggttgctttgagtacaagatgtggtaccccctcgctcacccaggagatgccaagctgcagaacctggcaaggcagaggctgtggcgccaatgcgtgaaatgcaagcacatgatcgagcttgcggagggctgctaccacatgatctgcgtgtgcggctatgagttttgctacacctgtgggaaagaatggaagaataagaaagcaagctgctcctgcccgctgtgggatgaacgcaacatcatcagagatgaagacgacgatgacgacgaagatgatctttactagagaaggctgtttttgctgctttttttaatgatgatattcagcggctgcatggatacattgaaatgaccacctgatgttgaaattgaaactgctcatcctgtacatgttgggtactgcttaaaaaaaagg

SEQ ID NO: 2554 - DNA, 2198 bp, Zea mays
  Clone ID: TF_ZmC13270_1
attgagtttcatggttccttactgaaggttagtcctgtaagcatttacagccactcagggctaccatttcctgcagtaagagctaaagtttcttggccacgtaaggcaagcaggggagttgcacttgtaacatgtgctagtggtgaagctgaatttattgtgaaggactgctttgcccttggagttggtggaaggtatgtcaactgtgaggttagtaataagtgggcaaactgtgtctttgtcacagggattccattgcatgtaacagagccagaattgtatgatgcttttcatagtacaacaactaggagaatccttgacatccacttgcttagaggacagcccacagctagctcgtccgtttctgaatgtacagaagcactgatgagagcgatatcactattcatgccaaataggaactttccttgccaaaaattccgtgttcaagtgttccctccagaagagaaagactcaatgatgaaagctaccataacctttgatggaagttttcacagagaggctgcaagagcactggaccatcttcaaggaagtgttcttccttgttgcctaccttggcagataatccagtgcgaacatgtatttcatagtactgtctcctgtccgatgcgcatttacaatgttatcagccaagatgttggtgctctacttgagagcttccgtagccaaaaaggcgtggcatacaatttggagaagaatgagaatggaaatttccgtgttaagcttactgcaaatgccacaaaaacaatagcagatttgagaaggcctcttgagcttctgatgaagggaaaaataataaaccatcctgatctgatgttaagcacagttcaattgctatggtcccgtgatggtatggaacaattgagatcagttgaacgggagaccggcacttatattctgtatgacaggcaaagtctgaatattaaaatttttgggagcactgataatgtggctgcagcggaggaaaaattggttcacgcacttgtacagctccatgagaagaagcctcttgaggtttgtcttcgtggccggaacctcccaccaaacttgatgaaggaagtgattgtaaagtttggggctgatttagaaggactgaagaacgaggtccctgcagtagatcttcagttaaatacacgaaggcagacactttatgttcgaggcagcaaggaggataagcaaagggtggaagggatgatctctgaactgataacctctagtgaccatagtgctcaactgtcgtcagagaatgcatgtcctatttgcctgtgcgagctagaagatccctttaagcttgaatcatgtggccatatgttctgtttagcttgcttggtggatcagtgtgaatctgccatgaaatcacaggatggcttccctcttcgttgcctcgaaagtgggtgcaataagctgttcctcctagctgatctgaggtctctgctgcctgacaagctggacgagctgttcagggcttccttgaatgcatttgttgcatctagcgcagggttataccgtttctgccccacaccggactgcacatccatttaccaagtagctgctgcaggcgcacaaggcgacagaccctttgtctgtggggcttgctctgtggagacctgcaccaagtgccatatcgagtaccatcctttcatctcctgtgaggcatacaaagagtacaaggcagacccggacgcaactctgcttgaatggcgcaaagggaaggagaacgtgaagaactgcccttcatgtggatttacaattgagaagagtgaaggctgcaaccatgttgagtgcaggtgtggcagccacatttgttggaattgcctggagaacttcaagagcagtgaggagtgctatggccatctcagatccgtgcacttatcctatgcagatctgatgtaaatctgtacagattgtaatgaatcacgtggtctataatctggcaagctgaatttgccttccaacagtgattgtctgatcctaaccggttctcagcacaggtagagatgggaaccggttaggatcagacaatcactacctgtgctgagaatattgtaggcgctttatcatttgttactacagcggggaatgctctagtgtgcatcggggacggctcaaaaaaaaactcaacaaaaaaaaaaagggggcccccccagaggcgacctcaccgacccggaaatttttccggg

SEQ ID NO: 2555 - DNA, 1542 bp, Zea mays
  Clone ID: TF_ZmC3535_1
gattgtgggcctcgaggcagggcgggatcttcgcctttgaggaattcggagaagctctactttcagatagcagaagctgaaattcttgaagaccagcttttggtagctctaggacacaggattcttgaactggtggataagttggaagactttgatttgatattgcttcctagctttgaactagagaggcccttgcagttggctaaagaagctataggcatcagatatctgtctccctacgaggttggtacctgcccgatttgccgtgaggagaaactaggttctcagatgatcaaggcaggttgttctcacacatattgctataattgcctgactgggtatgttgaagagaagctgctgacctcgaagctgcctataaggtgtccacaattaaggtgtaaatacattatttccgctagtgagtgcaagtcgttccttccagttagcagctatgattccttggagagagcatttgcagaagctggcacctcaggaatggaaagattttattgtccctttccaaactgttcagtgctgttagaccttagtcagcacttctctagggcaagttcatcaagccagtcagatctcagttgtgtcgagtgcccagaatgccatagagatatatgtatcaactgtggagtgccgtggcacatcatgatgggctgtgatgagtaccagagcttgcccgctgaggaaagagatgctggagacctatctttgcatcggcttgcacagaacaataggtggaggcgttgccagagatgtcgacgtatgattgaactgacacagggctgcttccatatgacttgctggtgtgggcacgagttctgctactcctgcggtgctgactacgctagcggcgttcaaacatgccaatgcgtgttctgggacgacgaagccatggagccctcctccgccgcacggtccacccaagcagcgtccgagatctgggcgtgggacacatttgactgcatgccgaccgccgtggagggatactcggagcaggagagagcgcagctggcactcatccagaggttcctcgccggggggttcagcctgggtgagaacccctgccagtcgccgccccgctgcgccgactcctacatcgtcgacaccatgaaggacctccaccagctcccatggctcgagcggttcgtgtcggtgatcagcgacacgtacaacgatgactacatgcagtgaagagagggagggagggagagacagttatagatagcagtaaaagaaacggcacatactgagtcctccattcagaataatttgtttccatgcccccctgtaggcaattggcgcagggaaaaatgatatgctttcatcatgaatacactggtgttgtttcctccattgtatggtaaccttcggcttcggtgttagttgtgcatgggcacaagagttctccattttatatgattatgtccttatttctttaaagtgagtgtaatctctctctctatatgtatatcttcagagctttctgaaattactcgttttgaatcaaatcagcagcatgagcaactgcct

SEQ ID NO: 2556 - DNA, 2457 bp, Zea mays
  Clone ID: TF_ZmC1251_2
aattcggcacgaggagctctcgtttctagcttcaattcggcacgaggctcgttcctagcaaccaagctagcgaatccaacccaacccgtccatttctccacatccccaccctccctccgtctccgcctccgcctgcgccaccctccaatccgcgccggcgcgtcgccaccctacccgattgctacctcctcgtggtgggcgccgctccgatccgcccgatccgcgccggcgcctcgccaccctacccgattgctacctcctcgtggtgggcgcctgctcctggagttccggcgcgcggcgggggcggcgtagtaatggaatccgaggacgacatgcacgacgcgaacgactccgctgaagacgatttctacagcggcggggaggccggtctcgccgccagcgacgacggagacgccgactacgactttgcggaccacgactccgacgactccgcggagctcatctcccacagacagcagcaaaattatagtatattgagtgaagttgatatacagcggcgccaagaggatgatataaatagggtttcaaccgttctttcaatttccaaaccagaagcatgtgttcttctccgcaactataactggagtgttagtaaggtgcatgacgaatggtttgctgatgaagagcgtgtccggaaggttgtgggtttaccagagaagcataatgaaatgccaaatgacagagaagtaacatgtggaatatgtttcgaaagttgccctcgtgggtcgatgagtgctgctgcatgtggtcatcctttctgcagtacatgttggagaggttacattagcactgctataagtgatggtccaggatgtttgatgttgaggtgtcctgatccatcttgtgctgctgctgttggacaagatatgataaattcactggctgctgatgatgataaggaaaagtatgggcgatatcttcgcagatcttacattgaggataatagaaagacaaaatggtgtcctgcgcctggatgtgaatacgcagtggaattcgtcatgggcagtggcagctatgatgttaattgcaactgttcatatgggttttgttggaattgcaccgaggaagctcatcgtccagtagactgtgccactgtttcgaagtggatcctcaagaacagtgcagagtcagagaatatgaattggatactggctaattcaaagccttgtcccaaatgcaaacggcctattgaaaaaaatcagggatgcatgcacatcacatgcactccaccatgcaaatttgagttctgctggctatgtcttggtccatggtcagagcatggagagaggactggtggattttatgcttgtaaccgctatgagtcagcaaggcaagaaggagcgtatgatgaatctgaaaggagaagagaaatggcaaagaactcccttgagagatacacacattattatgaacgatgggcagccaatcagtcgtcgaggcaaaaggcactgggggaccttcaaagcctacagaatgacaagcttgaaaggttaagtgacatacaaagtcaacctgagtcacagctgaagttcattgtagaggcatggttacagattgttgaatgcagaagggtattgaagtggacttatgcctatggattttacctgccagagcatgagcatgccaaaagacagttctttgaatatctgcaaggtgaggcagaatctggtttggagcggctacatcaatgtgcagagaaagaacttcaaatataccttgacgcagaatctccctcgaaagacttcaatgatttccgtacaaagttggctggattaactagtgtgactcgcaattattttgaaaatctcgtccgggctctggaaactggattaaatgatgtaggcccttccactagccatggcacatgcagcaaaaagcgcaacttccaagagcctcggtggtaaaagtaagagtggcaagaacagggcatcaagcagcagttccaaatcgggtggctcaacccgaggtgtggatgatagtaacatatggacatgcgatcagtgcacatatgcaaaccccaaatctgccagagcctgccaggcttgtgatcgccagcatcgatagcgctgtcagtccttgctagagatttggaccccatttgtcgagaattttctggtgttgccccgtgcgatacacaacatacatgaaaattgaatattagctgatctctgggggtataggtaggttttcgtgtatcctggattgtttgtcgactgactgcgcatgtgaagcctcaactcagcatccactcccatttgtgtatataagtatatccatatctgtaacaatgttttgttcaatggaagtagcggagctaggaggcgtctgctgccaaaggaactcaactgttgtagtgctgttgtaatgtaagatgcattggtcaaatttaaagaaagttagtcaccctgttacagaaattccaagagaactcttgtt

SEQ ID NO: 2557 - DNA, 2662 bp, Zea mays
  Clone ID: TF_ZmC12013_1
gccggttcatcaaagtacgccgcaaagacatcagcccagccttccccaattccggccacacccgctacgcctgtggtgccgcctgccgcctccccttcctcttcgcttcccgtgcaagcttcaccgccgccatctcctcctcccgttgcgatgcttcccctttcgcgccacggttcctctatccccgccttccctgcccgctccggctcttgcacctgaccaagccaatccgccaatctgttccccttttccgtacgagaggtactatcgccggccatttcgattcggggctgatcggatcggcggctgatgggtcgcgatgctgagaatacttctcctccggtgtcctcgtcggaattggagcaggaagacgacgacgactgctacctaagcgatcagggggacgatgccctagaagagtctgttctccatgttctcgaggacgagcacctcgaggactgccattggtccgcctcatgcgtgatcaccaaggaatccctcttggcagcgcagagagaggatcttaggaaggtgatggagctgctagggttgagggagcaccatgcccggacgctcctcatccactaccgctgggacgtggagaggattttcgagcttcttgatcagaaggacagggatagcctcttctcggaggctggtattcctcttcagtacaccaataatgctggcccaacctcctcagcggaggtgacctgcaatgtttgttatgatgatgtgccaccctcgtgtgccttggagatggactgcggccacagctactgcaatgattgttggactgaatatttcattgtgaaaattaatgagggtcagagccggcgtgtcaggtgcatggctccaaagtgcaatgctatttgtgatgaagcaataattcgaaaactagtcattgcaagacacccagatatcgcagaacgctttgaaagatttttactggaatcatatattgaagataatgatacagtcaagtggtgcccaagcacaccacattgtggaaatgctatacgcgtcaagggcgatatttattgtgaggtggagtgcacatgtggatgccagttttgttttaattgctctttacgagcacactcaccgtgttcctgcatgatgtgggagctctggatcaagaaatgccgtgatgaatcagaaacagtgaattggataacagtaaatactaagccctgtcccaagtgtcacaaacctgtggagaagaatggtggctgcaacctggttgcatgtatatgtggacaagcattctgctggttatgtgggggtgctacaggtagagatcacacatggtcaactattagtggccacagttgtggcaggttcactgatgatcagactaagaagacagaacaagcaaggcgagacctctatagatatatgcactaccacaatagatacaaggctcacaccgactctcttaagcaggaagcaaagctaaagaatgagatccaggggaagatatccatttcagaaaataaggagtcaaagataaaagattattcttgggtcataaatgggttaaacaggctattcagatcaaggcgtgttctttcctattcgtatccgtttgcattctacatgtttggtgatgagattttcaaggatgagatgactcctgaggaaagagaactgaagcagaatttatttgaggaccagcaacaacagttagaatttaatgtcgaaagactgtctggtttccttgagaaagattttcaactttttaccgatgatgaggtcatggatacaatgaagcatgttataaatcttcccaatgtggttgataggctctgcaaacaaatgtatcaatgcattgagaatgatttgttatatcctctacgcacacctcacaacattgctccatacaaatctaagggcattgacagggcctcggagctcaatattagttgggatcctggtgaacaaagttcacagtcaacaaaacatagccaggatgaacacaggaacaaacaagcatcaaatattttgggtaaacgaactcatgaattgcatggttcgagttcttctaacaagcgagagagggtagatgttaacggtggtggtggtggcactttttgatctcaacgtgccagctgaagtggtggacaagatctgaaacttcattatctgatgggtgatggcacattcctttgaactgtacagctgacttaagcttcgtcaccaacataaaggaaaaaatactgttcttttttgctgccttaccaccatagagtacctgcatgtcaaatttttaccctggtgcttggatcccaaggtatagagtagcttttaagttatatgttgtatttcatggcatgatctgaagccaatgttcatagttctgatgaagttgtacccctcaagcaagatgaggatattttggaatagaaccatgcctgtgttgcaaattccagatataatgtatgcagcatggtgaaaagggaattgtttgttgagaagaatgtgagtgattatttcctggcaaatgggtggttctattgacaatgaagacaatgactgattcgtcgtattaaatgtgcactttgtttgttgcaactggcaaccatcttgtttctaggacagttttgtattcaacctgtgaaaatcccggttttctgggcacacattccagatttttatggct

SEQ ID NO: 2558 - DNA, 2566 bp, Zea mays
  unsure (1)..(2566): unsure at all n locations
  Clone ID: TF_ZmC1251_1
ngaaagggagtaatggagggagaaactagacaccactaaaaaggaaaaaaggtgaaagagagaggaaagctctcgttcctagcttccttctcttcaactaagcgagcgaatccaactcggcccgtccatttcttccttccctgttcacggattccaatccttcctccacacccccaccctcccttcgcctccacatccaccaccatccaatccgcgcgggtgcttcgccaccctatcccgattgctacctcctcgtggtgggcgccgctccgatccgcccgatccgcgctgctcctggggctccggcgcgcggcggcgagcggcggaggcggcgcaggaatggaatccgaggacgatatgcacgacgcaaacgactccgccgaagatgacttctacagcggcggggaggctggtctcgccgccagcgacgacggagacgcagactacgacttcgcggaccacgactccgacgactccgcggagctcctctcccacagacagcagcaaaattacagtatattgagtgaagttgatatcaagcggcgccaagaggatgacataaatagggtttcaactgttctttcaatttccaaaccagaggcatgtgttcttctccgcaactataactggagtgttagtaaggtgcatgacgaatggtttgctgatgaagagcgtgttcggaaggtggttggtttaccagagaagcatattgaaatgccaaatgacagagaagtaacatgtggaatatgtttcgaaagttgccctctcggatcgatgagtgctgctgcatgtggtcatcctttctgcggtacatgttggcgaggttacattagcactgctataagtgatggtccgggatgcttgatgctgaggtgtcctgatccgtcctgtgctgctgctgttggacaagatatgataaattcactggctgatgttgaggatacggaaaagtatgggcgatatcttcgcagatcttacattgaagataatagaaagacaaaatggtgtcctgcgcctggatgtgaatatgcagcggaattcgtcatgggcagtggcagctatgacgttaattgcaactgttcatatgggttttgttggaattgcaccgaggaagctcatcgtccagtagactgtgccactgtttcgaagtggatcctcaagaacagtgcggagtcggagaatatgaactggatactggctaattcaaagccttgtcccaaatgcaagcggcctattgaaaaaaatcagggatgcatgcacatcacatgcactccaccatgcaaatttgagttctgctggctatgtcttggtccatggtcagagcatggagagaggactggtggattttatgcttgtaaccgctatgagtcagcaaggcaagaaggagcgtatgatgaatctgaaaggagaagagaaatggcaaagaactcgcttgagagatatacacattattatgaacgatgggcagccaatcagtcgtcgaggcaaaaggcactgggggaccttcaaagcctacagaacgacaagcttgaaaggttaagtgacatacaaagtcaacctgagtcacagctgaagttcattatagaggcatggttacagattgtcgaatgcagaagggtattgaagtggacttatgcctatggattttacctgccagagcatgagcatgccaaaagacagttctttgaatatctgcaaggtgaggcagaatcaggattggagcggctacatcaatgtgcagagaaagaacttcaaatataccttgatgcagaatctccctcgaaagacttcaatgatttccgtacaaagttggctggattaactagtgtgactcgcaattattttgaaaacctcgtccgggctctggaaactggattaaatgatgtaggtccttccactagccatggtacatgcagcaaaagcgcaacttcgaagagcctcggtggtaaaagtaagagtggcaagaaccgagcatcaagcaccagttccaagtcgggtggctcaagccgaggtgtggatgatagtaacatatggacgtgcgatcagtgcacatatgcaaaccccaaatctgccagagcctgccaggcttgtgatcaccagcatcgatagcgctgtcagtccttgctagagatttgaaccccatttgttgagaatcttctggtgctcccccgtgtaatacacaaacatacatgaaattgaatgctagctgatctctgggggtaattgcactaggaatgctgtaggttttcgtgtatctcggattgtttgtcgactgacatcgcctgagaagcctcaactcatcatccagttcgatttgtgtatataagtgtatcatctgtaacaatgttctttagatgagctaggaggcgtctgctgccaaaggaactgaactgttgtactgctgttgtaatataataatgcatttgtcaaatttaaagaaagttagccatcctgctacggcgtatgctgccaaaggaaccaacttgtagtgctgttgtaatgtaagatgcattggtcaaatttaaaaaaagttagtcaccctgttacaaaaaaaaaaaaactcgag

SEQ ID NO: 2559 - DNA, 2910 bp, Zea mays
  Clone ID: TF_ZmC2198_1
cccctggttgaatataggtgttgtgactgttgtcaacttgaaaaattcctagtaatttaattattttaacataattttaagaagcatttttgtttactgcaagttgcttgggatcaataggcattgtcgttactgctgctatagattgacgatagctaccttttctctgaacatgtaggagagctgcatatcattatattaagaaggtgatgagtatagctagtttgactttatgtggcttgtaaatgtttgggattgatttaattttcatttatttgtcttgttgtttcttaaaaaaatcctttactaggcagtaggcacaagcaactaaggcactgttcaacttaaacttcgcattacctgcattatataaacatgttattgaggtaatgtgccaatgattgtttttattagctggtaatcatgattttttattctattgcttgtggcactccaaactgcatgaaaatgtttattatgttatgttcatctttggacccggccgggccgggttaactctaccgacctccgctcaccgccccctttcctcctatccctccccagagccccgacccggccggccggccggccggaaccctagccttatcgcccctccctttcccgcctcgcctccgcgcgatctcccgatcgccggattcgtgccgcggctggatggactccgacgtggagatgaacaccgccagcgatgaggaggtgatggacaacgatgactactacgactactgctacagcgacgtgggcgacgacggtgggagcaacagcgggagcgaggagctggtggccggggactacgacgagggcctcgaggccgaggggaccgacgaggtggtctctaggcgcgagcagacatttgtggttttaaacgaacaagttatatctgaacgtcaagccgaagatgtgagcaaggtatctgccgtcacactgattacaagggaggaggcgtgtgccctcctccatcactataaatggaacatcagcaagctgagtgacgaatggtttgcagatgaagaaaaagtccgccatactgttggcttacttttgaatggaaatcatgacccccgctctaggaagctagtctgtggaatatgttttgaggggtgttcttctgatatgatgagctctgctggttgtgctcatttttattgccatgaatgttgggaaggctacattagcgctgcaattggtgatggtccaggatgtttgtcattgcgatgccctgatccatcttgtagtgctatggttcttcaagggatgattaatgaattagctaaagatgaggatagaaaaaaatatgcacgatttctcttacgcgcatatgttgaaggtagcaagaagactaaatggtgtccagctcctgactgcacatgtgctgtggagttccttggtgatgaaaactatgatgtttcatgcaattgcatgttcagcttttgttggaattgcactgaggaagctcatcgaccagtgaactgtgagactgtttctaagtggatattaaaaaacagtgcagaatctgaaaacatgaactggatactggctaattctaagccctgtccaaagtgcaaacggccaatagagaaaaaccagggatgcatgcatatgacatgcacccctccttgtaaattcgaattttgctggttatgtctgggtgcatggtcagatcacggagagagaacaggtggcttttatgcttgcaatcgttatgaatcagcaaagaaagagggagtttacgacgagactgatgcaaggagggaaagagctaaaaactctcttgagagatatatgcattactatgagcgctgggcatccaatcagacatcgaggcagaaggcccaagcagatctgctaaaagcggaaaaggaccagattgcaaatttaactgacattttcgggataccagagacccagcttaagttcataatcgaagcttggtcacagattatagaatgcaggcgagtgttgaaatggacatatgcttatggctactatctggatgataagatcaagagtgaattttttgagtatctgcaaggtgaggctgagtctggtttggaacgcctgcatcagtgcgctgagaaagacttgcaaaattttttgccgtctgtgaaatctgacagcactgaaacaacgacacctacagtggctgaatttggtgaattccgcgtgaagcttgctggacttacaagcgtgactcggaattactttgagaaccttgttcaagctttggaagctgggttggaggatgtccgtgccacaggccaggctgctggtacatccagcactgccaccagctccaagaaaggaggaactaaatccaagaagaagcagcacactgcaccatcatctgaccacactgatgatgggtggccctgcgagcgctgcacatttcttaaccctcctacagtggatgcatgcagcgtctgcgaaaagagtaggtactagatgatggaatagctcaaagggagccagggaggcatcccaagaaaacctcaaagctcgtgagaagcatgcatgcatcggatgctgagaagaagagcttccagctgccgcaatgttgtacagagagttattttagggcctcggttggaaacggtgtggaggctcaagtggtcacatgtttgtgggggtcatttggttttctagttcttttctgttgttccttgtaaatatatttgttgtgatgtggtgacctgtgtttatgtgatgagtttttgtttctgacaaactgtgaaattaaactttaacaaaactgatgagaggtagctctgtttattccctcctaattgcgggcagggtctttgtctattcccagcagagaggaactaaatcagaacagcacactaagccatcggataggagaaaaacaggatgcatgcatatgacatgcacccc

SEQ ID NO: 2560 - DNA, 374 bp, Zea mays
  Clone ID: TF_LIB143-055-Q1-E1-D9
taaacagaatggagtttaaccaagctcacatgccctgatacaacttgctgcagcccacttccaccatcagttttgaaaagcctcctgggagatgattgctataagcgatgggaatcattcgcgttacagaagctcttagatacaatgcctgatctggtatattgtccgaggtgtaatgctgcctgcttggaggatgacaatgatgctcaatgcccagagtgttttttcaccttctgctctttgtgcaaagaacgcaggcatgtggggaaggattgcgttactccagaagaaaagattaggattctgagggaaaaacaccagaaatattccctcccagaaaaacaattgttgaaagaacagagggaaatagatga

SEQ ID NO: 2561 - DNA, 703 bp, Zea mays
  unsure (1)..(703): unsure at all n locations
  Clone ID: TF_LIB4603-008-R1-K1-G12
ccacgcgtccgatgaccattaattgcttcccgagatggttttgtttacataattcttcgagttctgatgtaagtaactatgagtttgtgatggctaggttgtttatttgtcaaactctgattgctgaattcttgtttcagagtgagctgctggctgccgagatcaattacatggccaaaagggagactgagcttcagaatgaccacatgaacctcaggaccaagattgaggagggagagcaacagctgcagcaggtgactgtggcccagtctgtcgcagcagcagctgccaccgacgtggagctgaatccgttcttggagatggataccaaatgcttcttccctggcggccccttcgcgacactggacatgaagtgcttcttccccggcagcttgcagatgctggaggcacagcagcgccagatgcttgccaccgagctgaacctcggctaccaactggcgccgcctgacactgacgttgccaacaataaccctcagcagttctaaactggatccatgagaaagccaactgtgaccgatggaagctggctgttgcctctagatgatattggcttccataacctagcttattatgggngtgtattggtgccttttgtgtgtgattctccttgctactgatggagaataacctaatcgattgggcataatgatcaaatgctacagcacccgtgaggctgtgatcg

SEQ ID NO: 2562 - DNA, 1254 bp, Zea mays
  Clone ID: TF_ZmC1392_3
ggccggccgggactttcgtcaaaagagactctctccctcctaccatttccgcctccggactgctccggacgcgcgcctcagatctactccaacacctgtatggattcctctggccgtgtggcctttccggcaactatagataggcaactatagctagggttctccttctcccctccctcctccgcttgcgcttgctcttggacggtgcttcctcttctttaccagctagtcaaagtaaccacgcgtgctgcttcatctctcccttccttcctgccgtgtggttgttggctgccgcagcggcggcgcccgcgggtggaggagcaggagcggcggcgccatggtcgggaccgggaagagggagcggatagcgatacggaggatcgacaacctggcggccaggcaggtgaccttctccaagaggcggcggggcctgttcaagaaggccgaggagctctccatcctctgcgacgccgaggtcggccttgtcgtcttctccgccaccggcaaactcttccacttcgccagctccaggcagatgagaggagaggagctccagaggctgagcgtcgaacagctgcaggagctcgagaagaccctcgaatccggcctcggctctgtactcaaaaccaagagccaaaaaatccttgacgagatcagcggtctggaaagaaagagaacgcagctgatcgaggagaactcaagactgaaggagcaagtgacacggatgtcgaggatggagacgcagcttggcgccgatccagagttcgtgtacgaggaagggcagtcgtctgaatccgtgacgaacacgtcctatccgcgcccgtccaccgacaccgacgactgctccgacacatcgctcaggctcgggctaccactcttcagctccaagtgacggagatttgacatgtccggtagcggagcggtgccgatcgcttgcccttctccactctagataggtctggattgggggagagcagcagtgctggatcgggaagacccaagtgaccaacgcgtcgcatcagaataaagcattttgagtgctgtatgatgtgtgtattctggctctgaaagtgagacctgcttttgttataatacatacatacaggcagcatggcaatacgtgacggggtatccgctgcctgcagtccgtgacctgtctgtcgtctctgtttctagtactcgctataatcaccctgcaattacctgcagctggtcattgttaggagaaattccagtccatgcaaatgaactccc

SEQ ID NO: 2563 - DNA, 1058 bp, Zea mays
  Clone ID: TF_ZmC2086_2
ccggccgggatagcaccggtaactccccacagtacgcgggggctccagacttccagcatctccgctccggctgcgctctgccttgctttcctgctacctgctctagcgcgagcgagagaggtacggcggccgatctggcggcgcaggcggagggctcggccggggccggcaagtcggcgccgaacatggggaggggccgggtcgagctcaagcggatcgagaacaagatcaaccgccaggtcaccttcgccaagcgccgcaacggcctgctcaagaaggcgtacgagctctcggtgctctgcgacgccgaggtcgcgctcatcatcttctccaaccgcggcaagctctacgagttctccagcacgcagagcatgccaaaaacacttgaaaagtaccaaaaaaaagaacaaatgttttgtgaagcaaataagtgtcttcgaagaagactggaggagagcaaccaggttatatggcagcatgcgtgggagcaaagcgagcggcattctgaagtgcagccgcagcagctcaatggcaataacttcttccatcccctcgatggtgctggtgaacccacccttcagatagggtatccttcagaggcactgactagctcatgcatgaccaccttcctgcccccgtggttgccatgagatcgaactactgcgcaattccgaattaataagcatggccgcatgcagctgcctgtgctatacgttgtgcttggagtgtactttaaggttcttgcatggcaagtatgtgtgtaacatttgtgatgaacatggaaactatccacttaattctcgaataatcaatgaactgggtaagattgtaacataaaaaaaaaaaaaagcggccaaaaaaaaaaaaataaaaaaaaaaaaaaaaaaaaaaaaaagtactctgcgttgttaccataaaaaaaaaaaaaatataataaaaaattaaaaataaataaaaaaaaaaaaagggggggcgcccttttaaaagaaccaagtttacttcccgggggtagcaaaattaaatttttttttatgggggaccaaaaattaattaaatgg

SEQ ID NO: 2564 - DNA, 756 bp, Zea mays
  Clone ID: TF_ZmC84_3
agcagtggtaacaacgcagagtacgcggggggttttcgtaagatgtggcactactaatattcctctgataaatatatatatggctagaggaaactttataagtaatatatggcagtcatgtttgccgaaatggagttatagggttgcacatattttcttttccctgaaattgatttcgatgaataaattacttggactacttttgctttttcttgcaattgagaaatgagtacaccatttaattcacattttgcagtcgcacctgtttgttatgaatgtcaatatggaacatccactaacaatttggatagaaaccaacagcagcatgaaatattactaaatgaacttttgcaaacttgcagcattacaagcaggaatctgctaggctgaggcagcagatcgttaacttgcagaactccaacaggttcagttcttatagaaaattatcatgtgcgcgagaatacagaaaggtcatttgatgaacttataagttttcagggccctgataggtgattctatcacaaccatgagccacaaggaacttaagcacttggagactaggttagacaaagctctcggaaagattagagcaaaaaagaacgatgtgctgtgttctgaagtcgagtacatgcagagaagggtagacagcaacaagaacacatttttcctctcgggaccttattgatttcgtggccattgcgcaaaaaaaaaaaaaaaaaaaaaaaaaaaaaagtactctgcgttgttaccactgct

SEQ ID NO: 2565 - DNA, 425 bp, Zea mays
  Clone ID: TF_LIB3067-030-Q1-K1-E9
cggacgcgtgggcggacgcgtgggcggacgcgtgggacagaacttcagaaaaaagaacgaatgttttgtgaagcaaataagtgtcttcgaagaagactggaggagagcaaccaggttatatggcagcatgcgtgggagcaaagcgagcggcattctgaagtgcagccgcagcagctcaatggcaataacttcttccatcccctcgatggtgctggtgaacccacccttcagatagggtatccttcagaggcactgactagctcatgcatgaccaccttcctgcccccgtggttgccatgagatcgaactactgcgcaattccgaattaataagcatggccgcatgcagctgcctgtgctatacgttgtgcttggagtgtactttaaggttcttgcatggccagtatgtgtgtaacatttgtgatg

SEQ ID NO: 2566 - DNA, 334 bp, Zea mays
  Clone ID: TF_LIB3088-002-Q1-K1-D4
gcgctgacgcatgggcaatgctcaagaggccaatggcgcactctgtgaaactcaaacctggtaccaggagatgctaaatctgagggcactattctaggtcttaacgcgcactcataggcactacgattggactggaactcggcccactgagtgctaaggagttgcaccagctagagaaacagctcgaatgtgctaagtcacacgcaagacacataaagacactacttatcatggaccaagtgaaatagctccgaataaaggagcgacacttgggagaaattaacacgcaacttacacacaatcttgaagctgcaggttgtagcaactacggaac

SEQ ID NO: 2567 - DNA, 1298 bp, Zea mays
  Clone ID: TF_ZmC1145_11
cctcgaggccggccgggaccttcttctttgagtcctctctctccgccgccgcagctagctgtgacgttatgctctcgccggcgccatagcgccagcgcctaccgtctacaactatccagccttaggcttacctatcccgtcaatcaagcctctcgtaaggaacaaggaaggtagctagctagttctatagctgctgtcgtcgtcgtcatcggcggcggcggcgcctgttcttagaggataaggttgtcctagcggagagggagctagccaggatttcggttgagatcaagagggggagcaggcggcggcggcggcgatggggcgcgggaaggtgcagctaaagcggatcgagaacaagatcaaccgccaggtgaccttctccaagcgccgctcggggctgctcaagaaggcgcacgagatctccgtgctctgcgacgccgaggtcgcgctcatcatcttctccaccaaagggaagctctacgagtattccaccgattcatgtatggacaaaattcttgaccggtacgagcgctactcctatgcagaaaaggttcttatttcagcagaatctgaaactcaggtttcatatgcatctgtatggtcatcaagtcggagggcagcgtttggtgcttggctggtgcatcagctctgcaggacctcctcctgcgccagctccctaggggaccctagcagtttgcctgctggtggtcgttttggtcgggttgttgctatgtgtgcgtggcgtgttgtgttaatgtcagggggtctgagccagcttatggtcgagtcaatttcagcgctccaacggaaggagaagtcactgcaggaggagaacaaggttctgcagaaggagaaagcgttactcctgcatgcagctcgcggagaagcagaaagaccagcggcagcaagtgcaacgggaccaaactcaacagcagaccagttcgtcttccacgtccttcatgttaagggaagctgccccaacaacaaatgtcagcatcttccctgtggcagcaggcgggagggtggtggaaggggcagcagcgcagccgcaggctcgcgttggactgccaccatggatgcttagccatctgagctgctgaaggtttgccctcaccgtcgcgatgtgatagcccaaaatccagcaagtcttccccggaccccggactgtccccgcttctccgcctggtgcagtatcgtcgtgatcgcgagaagcagcagcagcggtttgccgtattttttaccactgtgtataagtagcatatctgcaatgtgtatattttgttcaccgttcctgctgg

SEQ ID NO: 2568 - DNA, 788 bp, Zea mays
  unsure (1)..(788): unsure at all n locations
  Clone ID: TF_LIB4758-083-R1-K1-A9
ctcgnagccggccgggattttntggttgctgccccctttcccttccctagaccagatcctcgccccgttttccacttttgcctccaccgccggcccaattcggataacaagctccctccgcctcgccgcgtctcctcccagccgcaggagccgccgccatccgatccggaagagggaggaggggggagggaggaggatctgtgtcccgattcgattggagctctcgtccccggcggtccaggatggtgcggggcaagacgcagatgaagcggatagagaacccggccagtcgccaggtcaccttctccaagcgccgcaacggcctgctcaagaaggcgttcgagctctccgtcctctgcgacgccgaggtcgcgctcgtcgtcttctccccgcgcggcaagctctacgaattcgccagcggaagtgcccagaaaacaattgaacgttatagaacgtacacaaaggataatgtcagcaacaagacagcacatcaggacattgagcaagtaaaagctgatgctgagggcctggcaaagaaactggaagcacttgaagcttacaaaagaaaacttttgggtgagaggttggaagaatgctcctttgaagaactgcacagtttggaagtgaaactcgaaaagagccttcattgcatcaggggaagaaagtgcaagaagcagccgccgccgccgccgcctatgctgatgggtcctccgccgcctccagcgccggcagccatcgatcacacgggggccggaggatgtcgggatggacgtggagacggagctgta

SEQ ID NO: 2569 - DNA, 725 bp, Zea mays
  unsure (1)..(725): unsure at all n locations
  Clone ID: TF_ZmC1460_7
ccgggnacctggnagagctgatcgaaagtaccaaactgccagcgccgggaaaacgacgaccgacggctgcggcaggcacaacaggatggaccccaaacatgaaaccacggtgctgcaacaggaaatcaacctgcttcagaagggactgaggtacatctacgggaacagggcgaacgagcacatgaatgttgacgaactgaacgccctagagaggtacttggagatatggatgtacaacacccgctctgcaaagatgcagataatggctcaagagatccaagcactgaaaagcaaggcatgtcaaaaccctgtacatattaactctacgaagacccgaggctttcagcacccatttacctcactaaaagtgtctgcgtgtacgcaggaaggcatgttgaaagctgccaacgagattctccaggaaaagatagtagagcagagtagtttgcttgacgtaggcatggtggtagcggaccagcagaatgggcgttttagcacagtcccactggtagaagaggtgatcagtagtaacccactgactgtactgagtggctattctagctgtaggggttcagagatgggctactccttctgaccgtaataacaaacagcctggggggctccttctgttgattactactagtgtgtaatacatacagtcaataaagtctgtaatgggttggttgttctgctgctttggtgtatcatattcgattattcgtatc

SEQ ID NO: 2570 - DNA, 741 bp, Zea mays
  Clone ID: TF_ZmC1089_9
aagcaatcacgagacgggaggggttggcctttcgcctctagggttccgggtcgcccaccaccttaccggaaatggcaattgcgggacgcgcccccaatcactcaccacccctttcgtctcgccctttttaacccaatcccctctccacgattccacacccatctcctgagtcctgctgcctgcgctcgcctcagctcctttcttccccgccccttggcttttgcttggttgcatcgggccggtcgagccggagaggaaaagctagctagcagctaccagctctcggccggcggtggtagtctgcctgcagctggggttagaagctgcaagggttgggagccatggggaggggtcgggtggagctcaagcggatcgagaacaagatcaaccgccaggtcaccttcgccaagcgccgcaacggcctgctcaagaaggcgtacgagctctccgtgctctgcgacgccgaagtcgcgctcatcatcttctccaaccgcggcaagctctacgagttctgcagcggacagagcatcaccaaaacacttgagaggtatgaaaaaaacagttatggaggaccagatactgctgtacagaacaaggagaacgagttagtccagagcagtcgtaatgagtacctcaagctgaaagcgaaggtggataatttacagaggactcagaggaatttgcttggtgaagatctggggtcacttggtgtcaaagagcttgagcagcttgagaagcaac

SEQ ID NO: 2571 - DNA, 960 bp, Zea mays
  Clone ID: TF_ZmC3819_2
ctcgaggccggccgggaggcataggcatagcttggctcgcacggtgtcgctggctcccctccccttccctccccactgttacatccagcgagctgttcacggccgtgccgagctcagtgaggcagcgtttgcgagtccgggacgaggggagcggcgggcgacatggggaggggccgcagcgagataaagcggatcgagaaccccacgcagcggcagtccaccttctacaagcgcagggacggcctcttcaagaaggctagggagctctccgttctgtgcgacgtggacctgctgctgctcctcttctccacctccggcaagctctaccactacctctcgcccaccgtcccctccgtcaaggacctggtcgagaggtacgaggccacgacgcacaccaaggtctggaccgacatccgccaggagcggcgcgcggagctggagaaggcggagcagatgtgcgagctgatggagaaggagctgcgggtcatgacggtggacgacggggagcagtacacggtgccgtcgctggagctgctggagcacagcctggaggcggccgtgcgcaaggtgcgctccgagaaggaccgcaagatcggcggcgagatcaactacctcgagaacattatcagaggacgccacgaggagcgctacgggttgtgcgacaagcttgcgcactctcaggcctcgaacaacggcggggaaggtggagggtcgaccccaccaagcggcggcggcctggaactcaaactgggattcaactgacgctggctggcttggaagctggaggatggatcgaagactatgcgctgcttcattgtaccctatcactctgtcaggctacctccccccctgcaccctgttggttatggtttaaaatggttgttgaccaaagttgtcctggatcaaacaaggctcagcttgatgttaatgagctgagggatctaatgtattattagcctt

SEQ ID NO: 2572 - DNA, 763 bp, Zea mays
  unsure (1)..(763): unsure at all n locations
  Clone ID: TF_ZmC18079_3
gcacgagatgttcttgtaggttgaatagaagagtggaagcaccaagctgtaccaatggggcgtggaaaagtagagctgaagaagattgagaatccaacaaaccgccaagttaccttctccaagaggcggatggggttgttcaagaaggcaaatgagctagccattctttgtgatgcgcaaatcggagtcatcatattctctggcagtggcaggatgtacgagtactccagccctccatggagaatagcaagcgtctttgacaggtacctgaaagcccctagcacccgtttcgaggagatggacatccagcagaaaatcgtccaggagatgactaggatgaaggatgagaggaacagactgaggatgatcatggcgcagtacatggcggaggacctggcatcgttctccgcgcaggatctgagcaaccttgagcagcaaatcgagttctcgctgtacaaagttcgcctcaggaagcaagagctactcgaccagcagctgctcgagatccaccaaagggagatgcatatgccagcagagcagggcggctacctgtgcctcatgaacccggctgcggctattgctagcgggcagcaccagcaggctggcgagatggtgggaattaacccgaggccgttcccgtggtgggacgtgggagccagtggcagtggcagtggcagccagagccagcagcagctgctgcacggccgggacgccgcggagtcgtcgatgacggcgctcgggctgtcgncgcaactgcatgggt

SEQ ID NO: 2573 - DNA, 1488 bp, Zea mays
  unsure (1)..(1488): unsure at all n locations
  Clone ID: TF_21213723
gcacgannnnnnnnnnnnnnnnnnnnnnnnnnnnnnnnnnnnnnnnnnnnnngctacctgcctacccggcggttgcgcgccgcaatcgatcgaccggaagagannnnnnnnnnnnnnnnnnnnnnnatcggagcacggcaacaaggcgatggggcgcggcaaggtacagctgaagcggatagagaacaagataaaccggcaggtgaccttctccaagcgccggaacggcctgctcaagaaggcgcacgagatctccgtcctctgcgatgccgaggtcgccgtcatcgtcttctnnnnnaagggcaagctctacgagtacgccaccgactcccgcatggacaaaattcttgaacgctatgagcgatattcctatgctgaaaaggctcttatttcagctgaatctgaaagtgagggaaattggtgccacgaatacaggaaactgaaggccaaaattgagaccatacnnnnntgccacaagcacctgatgggagaggatctagagtctttgaatcccaaagnnnnnnnnnnnnnnnnnnnnnnnnnnnnnnnnnnnnnnnnnnnnnnnnnatcaaggaagagccaccttatggccgagtctatttctgnnnnnnnnnnnnnnnnnnnnnnnnnnnnnnnnnnnnnnnnnnnnnnnnnnnnnnnnnnnnnnnnnnnnnnnnnnnnnnnnnnnnnnnnnnnnnnnnnnnnnnnnnnnnnnnnnnnnnnnnnnnnnnnnacacatgcccaggcccagacaagctcatcatcgtcctccttcatgatgaggcaggatcagcagggactgccgcctccacacaacatctgcttcccgccgttgacaatgggagatagaggtgaagnnnnnnnntaaaactgctcgcgcgcgggcacgcagccactgccggggcaggcgcaaccgcagctccgcatcgcaggtctgccaccatggatgctgagccacctcaatgcataaggagagggtcgatgaacacatcgnnnnnnnnnnnnnnnnnnnnngcatgtggatcatgacgtacgcgtaccatatggttgctgtgcctgnnnnnatcgatcgcgagcaatggcacgctcatgcaagtgatcattgctccccgttggttaaaccctagcctatgttcatggcgtcagcaactaagctaaactattgttatgtttgcaagaaagggtaaacccgctagctgtgtaatcttgtccagctatcatgtatgcttgttactgcccagttacccttgaatctagcggcgcttttggtgagagggtgcagtttactttaaacatggttcgtgacttgctgtaaatagtagtattaatcgatttgggcatctagtaactnnnnnnnnnnnnnnnnnnnnnnnnnnnnnnnnnnntnnnnnnnnnnnnnnnnnnnnnnnagctggatccataaaatannnnnnnnnnnnnnnnnnnnnnnnnnnnnnnnnnnncttctagacagaccgcgggccctng

SEQ ID NO: 2574 - DNA, 1401 bp, Zea mays
  Clone ID: TF_ZmC18079_1
gttaattttatttcatggccttggtgatttgaacacatgttcttgtaggttgaatagaagagaagagtagaagcaccaagttgtaccaatggggcgtggaaaagtagagctgaagaagattgagaatccaacaaaccgccaagttaccttctccaagaggcggatggggttgttcaagaaggcaaacgagctagccattctttgtgatgcgcaaatcagagtcatcatattctctggcagtggcaggatgtacgagtactccagccctccatggaggtgcgtgaagcattatttatttatttatttatgtatttatttctgaagcttgtttagtacagtaacatataaggtttagctttattctgctataaggtttaatgagttcaaaagattcatgagagcttcagaactgatttgcaattattcctgccaactacaatcttacaactacaatcttatgtttagtacagtaacatcagaagagacgatgattaggtgtgtggtataagaccggtatcatatattcttattgccagcggttaatagtttcaatagttattatttatgactgagcacccatgaggggttttacgacgtttttatatcgtgctatatatcactgctgcttctggttgcagaatagcaagcgtctttgataggtacctgaaagccctagcacccgttttgaggagatggacatccagcagaaaatcgtccaggagatgactaggatgaaggatgagaggaacaggctgaggatgatcatggcgcagtaaatggcggaggacctggcctcattctccgcgcaggatctgagcaaccttgagcagcagatcgagttctcgttgtacaaagtttgcctcaggaagtaagagctactcgaccagcagctgctcgagatccgccaaagggtacacaacattccaacctccgatccgtcgcttggtagcctgtacacatctctctttcaaaaggcccgagttgttgtgacacacaagagttctgtttcgtcctaaactttcgaaggagatgcacatgccagcagagcagggcggctacctgtgcctcatgaacctggctgcggctactgctagcgggcaacaccagcaggctggcgagatggtgggaattaacccgaggccgttcctgtggtgggacgtgggagccagtggcagtggcagccagagccagcagctgctgcacggccgggacgccgcggagtcgtcgatgacggcgctggggctatcaccgcagatgcataggtacagactccatccgcgacagcccaacctgcggcaggacaccgacgtccacggctggctatggtaagctgccgccgcctgtgcctggacactcatttgatgttgactgttgtggcagaggagtgcgttctcaaatctc

SEQ ID NO: 2575 - DNA, 1201 bp, Zea mays
  Clone ID: TF_ZmC2134_5
ctcgaggccggccgggatttccggccctgcaatcctgcaccggcgcgaaagccccctcacggcctcacctccactccggtgatggccgcccctcctttacttctcagatctcagtgctcacgccgtccacggtccactagttgcatcggctcccgcataaagatccacaccacttgagcagcagctagctcaagggaaggagaaggctggaagtggaaagaagtgggttcttgcttgagctgagctcttgctgcccttgaatctgttagggagtggagaacggagtatggggcgcggcaagatcgagatcaagaggatcgagaactctaccaaccggcaggtgaccttctccaagcgccgggccggactggtcaagaaggcacgggagatcggcgtgctctgcgacgccgaggtcggcgtcgtcatcttctccagcggcggcaagctctacgactactgctcgcccaggacctcgctgtccaggatcttggagaagtaccagaccaactccgggaagattctgtggggtgagaagcacaagaacctgagtgcagagatcgacagagtcaagaaggagaacgacaacatgcagattcagctcaggcatctgaaaggcgaggacctgaactccctgcagcccagggagctgatcgctattgaagagggcctccagaatgggcagaccaacatgcgcgagaagcagatggactactggaggatgcacaagacgaatgggaagatgctggaggacgaacacaagatactgacttttaggatgcaccaacaggctgttgatctgagcggcggcatgagggagctggagaccggataccatcaggtccagcacgacagggatttcatttcccagatgccgttcaccttccgggtgcagcccaaccaccccaacctgcaggaagacgagtagctacagcctgctggatagtgttctgcatgccgctctgaactgaagctgcaggaagacgagtagctacagcctgctggatagtgttctgcatgccgctctgaactggagctcctcacctgcagcttctatctcgcgtttcatcattcagcgttagctgggtatctttcttttcatggcaccctggatgaagtctgtcagttgttactacgatgtggtcttgtcttgtgcgtctcttttgactttgctgggctgaggtcttgtcttgtgcgtctcttt

SEQ ID NO: 2576 - DNA, 1961 bp, Zea mays
  Clone ID: TF_ZmC1408_2
cattgggacctcgagccggccggggcctttaacctatcgtcagggccctgcggccggtggaaacgaaacctaggaggagcctagtggccacctagggtgaggaaaactgaggacgcgaggcgagagcgagatccaatctgcacccccccaccaaagaaagattcttccccgccggcctcgctctctcaacatccgtctcgctccttccaccctcgctgcgcctcaggcagcgagcgagcatatagcagcccaccacccacatgccgcagggccctcacccgtcgagccaattgagtggcagccagaaaaacccagagcgcgagcagcgagcgagcgcgggctcctgtgtgcagtgtgtctgcgctagagggcgaagggcacggaccgccttcgtcaataattgcggtacgaacggggcaaatccgtcgtttaaagaggtcgctgatagcgcctgctggtggcgagagagagaaagcagcagaatcgctgagggatcgtcgatccggagaggcaaaaaagccgagagatcaggcagggcaccatggggcgcgggaaggtggtgctgcagcggatcgagaacaagatcagccggcaggtgaccttcgccaagcgccggaacggcctgctcaagaaggcgtacgagctctccatcctctgcgacgccgaggtcgcgctcgtcctcttctcccacgccggccgcctctaccagttctcatcctcctccaatctgcttaagactctagagcggtaccagaggtacatctatgcttcagccgatgctgcagtgccatctagcgatcagatgcagaataactatcaagaatatgtgaagctgaaggcacgagttgaggttttacagcactcacaaaggaatcttcttggtgaagatctggccctacttagcccaagtgaacttgaccagcttgagaatcaagtagacaagaccttgaagcaaataagatcaagaaagactcaagtgttacttgatgaactttgtgacttaaagagaaaggaacaaatgctgcaagatgcaaacagggttctgaaaaggaagctgggcgagtttgaggcagaggcggcttctcccccgcagttagcgtggcaaggcgaaggcggcatgttgtcccatgaccctccacagccagaacacttcttccaggctctggagagcaacccatgtctgcaacctacataccatacgatggacatgaaccagcagccagtgccagcgccgggcggctgctatcctgcatggatgtcttagccagtgcttcattccattgccttgagaagtgtcctgaccttcacagatccctacgagctttattactgcttttgcctgcccctttgctgcttgcggtgcttactgaactgtccaaatgaccacatggtcatatataggttattgctgtctttatcttatgttgatcacggcctgctcagctgctttagcgccatgcaaaatggcttgggcgatgcacgcttgaatgggtcgaactgcttatgttttgggagtataaatcacttagcaataaaaaaaaaaaaaaaaaaatacatgaaccagcagccagagccagcgccgggcggctgctaccctcctgcgtggatggcttagccagcgctttggttccattgccttgacaagtgccgtgtccttcagagatcgctacgagtcctgctgctgcttttgcgaaccccccctttgctgcctgccatgcttaccgaactgttcaaataagaaataaccacatggtcctatataggttgctgttgtctttatcttctgttgatcacgtcctgctcagatgctttaaacgctatgcaaaatggcttagcgatgcatgctggaatgggctgaactgcttgtgttttgggagtataaatcgcttgggcgcttggcaataagtattattggcatgcctccctctgtttttataaatcattaatgaaaaggattgggt

SEQ ID NO: 2577 - DNA, 1437 bp, Zea mays
  Clone ID: TF_ZmC2121_1
ttgggtaccgccggccgggccgggatccacgccccccaaattgctggcaacgaggactctgctgcttagagctagagagaggacacggaggtagagagagacgaagctagagggacgcaaaacaagctagctaggaggaagatgggtcgcggcaaggtggagctgaagcggatcgagaacaagatcagccgccaggtgacgttcgccaagcgccgcaacgggctgctcaagaaggcgtacgagctgtcgctgttgtgcgacgcggaggtcgcgctcatcatcttctccggccgcggccgcctctttgagttctccagctcctcatgcatgtacaaaacactcgagagataccgcagctccaactactcacaagaagtaaaaactccactggacactgaaattaactaccaggattatctcaagttgaggacaagggtcgaattcctccaaactacacaaagaaatattcttggcgaggatctgggtccacttagcatgaaggagctcgagcagctggaggaccaaatagagatatctctgaagcatatcagctcaagaaagaatcaaatgctacttgatcagctctttgacctcaaaagcaaggaacaagaattgctggatctcaataaagacctaaggaagcagctgcaagaaacaaggccagagaacgcgctccgtgtctcctgggaggaaggtgggcacagtggcgcaagtgggaatgttcttgatccttatcaggggctccttcagcacctggacaacgatccttccctgcagttcgggtaccatcatcaagcctacatggatcagctgaacaacgaggacctggtggacccgaatgagcatggtcgatctggatggatatgaaatgctctgatgacccaaaataaagttgatgcacagcagggattcaccctgcaggacgcgagactatgtattgaagctaagacctcgtgtgtgttgtgttgtgtgcgaagcttggaactttataaatcgttgtcatgcccatggctttctatttctttctcggagctgcggaaaacttaagaactccagtgtattgtattgttgtgtgctgtgctgtgttgtcaaaagcttgcaactttgtatatgtacatgtatggtatttgttagtttcttggagctgcgcaaaaaaaaaaaaaaaaaaaaaaaaaaaaaaggtgccgctcggcgatctagaactagccatggatcttctatatatgttggacgtaatgcttttgataaatcctctatatataaccatatcggtcctagctttatgcatgctactgtatgtactaaactaaaaagccctacgacttttgttaagaaaaaatgttttgacgatcataactttttcttgctaaataaaaactactgtatctcattttgaattgatcgtctaataaaaaaccatgcttttgtgagtccttt

SEQ ID NO: 2578 - DNA, 2450 bp, Zea mays
  Clone ID: TF_ZmC2134_1
gaccgatccatcgccgcatcgcggaccttgaccccgcgctcactgagctaggagcagacgaggcttgagaacgagcgacggcgggatttccggccctgcaatcctgcaccggcgcgaaagccccctcacggcctcacctccactccggtgatggccgcctctcctttacttctcagtctcagtgctcacgccgtccacggtccactagttgcatcggcttcccgcataaagatccacaccacttgagcagcagctagctcaagggaaggagaaggctggaagtggaaagaagtgggttcttgcttgagctgagctcttgctgcccttggatctgtttgggagtggagaacgcagtatggggcgcggcaagatcaagatcaagaggatcgagaactctaccaaccggcaggtgaccttctccaagcgccgggccggactggtcaagaaggcacgggagatcggcgtgctctgcgacgccgaggtcggcgtcgtcatcttctccagcggcggcaagctctacgactactgctcgcccaggacctcgctgtccaggatcttggagaagtaccagaccaactccgggaagatactgtggggtgagaagcacaagaacctgagtgcagagatcgacagagtcaagaaggagaacgacaacatgcagattcagctcaggcatctgaaaggcgaggacctgaactccctacagcacagggagctgatcgctattgaagagggcctccagaatgggcagaccaacatgcgcgagaagcagatggactactggaggatgcacaagacgaatggaaagatgctggaggacgaacacaagatactgacttttaggatgcaccaacaggctgttgatctgagcggcggcatgagggagctggagaccggataccatcaggtccagcacgacagggatttcatttcccagatgccgttcaccttccgggtgcagcccaaccaccccaacctgcaggaagacgagtagctacagcctgctggatagtgttctgcatgccgctctgaactgaagctcctcacctgcagcttctatctcgcgtttcatcattcagcgttagctgggtatctttcttttcatggcaccctggaatctgcatgaagtctgtcagttgttactacgatgtggtcttgtcttgtgcgtctcttttgactttgctgggctgatttccgtgcacgtaacttgaccgacccatcgccgcatcgcggacctcgaccccgccctcactgagctaggagcagacgaggcttgagaacgagcgacggagacctagccgaagcaggagctccccatggcgaccggcaacctggcgagcgtggtggtggctgtagacggcagcgaggagagcatgaacgcgctgcagtgggcgctcgacaacctccgcctgcgccccgacggcgagctcgtcgtgctgcacgtccagccgccgcccaacatcgccgcgggactcaacccggcgcccatccccttcggcggccccagcgggttggaggtgccggcgttcacgcaggccatcgaggcgcaccagcggcgcataacgcaggcgatcctggagcacgccctgaagatttgttccgataagaatgtggaggtgaagacggaggtggtggtcggggaccccaaggagaaaatctgcgagattgcggccaaccgcaaggccgatctgctcgtcatgggctgccgtgccattgggccgctaaagagggtgttcttgggcagtgtgagcaactactgtatcaaccatgtgggctgccctgttgttgtgatcaaggggacatgatattccatcagcccagcattctttggtgtacttccattcaaggtttttgaggcttctgctgtgacatgtgtaatcctgtacgatatattactgcacattactatgcttttgttggtgctgctgagggatgaaagttgctatgtggtccctttcgttataaaggaggaagctttgtcggtcgtgtaatcgtggtaataagttggtcctgtggcggattcttgtgtatattcttgtaatcgttcaaagacatggttctgtctgaagtcccaacagcgcaaaattaccagagtctcggtttgtttgtttgaaaaaagcggccgcgaattcccgccgtttctgattcagatctgctcccgatctctagctgcgcgcgcacttcactagctcgctgttcgtgtgtgttcttgttgtgattgtgctagcgtgtccgtcacttgtgatggtgcaggcatctgaaaggcgaggacctgaactccctacagcacaggcagctgatcgctattgaagagggcctccagaatgggcagaccaacatgcgcgagaagcagatggactactggaggatgcacaagacgaatggaaagatgctggaggacgaacacaagatactgacttttaggatgcaccaacaggctgttgatctga

SEQ ID NO: 2579 - DNA, 824 bp, Zea mays
  Clone ID: TF_ZmC1442_5
cattgggtacctcgaggccggccggggaccctgccccttttcccggccgtctcgctctccaccgatattccgctcctcctgtccagtcctcctcccccgagccggctcattatatcgtccgtcgcgcagcacaacgcaagtttgctagcggccggatcagcagccacaaaacgaggagagcaaccacgctgcacacagagacgcccgtgtgtgagatatagagcaagctcgatcgaaggaaggagggaagctagagatcgtacgtcgccatggggaggggacgagttgagctcaagcggatcgagaacaagatcaaccgccaggtcaccttctccaagcgccgcaacggcctgctcaagaaggcctacgagctctccgtgctctgcgacgccgaggtcgcgctcatcatcttctccagccgcggcaagctctacgagttcggcagcgccggcataacaaaaactttagaaaggtaccaacattgctgctacaatgctcaagattccaatggcgcactctctgaaactcagagctggtaccaggaaatgtcaaaactgagggcaaaattcgaggccttgcagcgcactcagaggcacttgcttggggaggaacttggcccactgagtgtgaaggagttgcagcagctagagaaacagctcgaatgtgctttgtcacaggcaagacagagaaagacacaacttatgatggagcaagtggaagagctccgcagaaaggagcgacacctgggagaaatgacaggcaactcaaacacagcttgaagctgaaggttgtagcaactacagaaccctgcagcatgcagcctg

SEQ ID NO: 2580 - DNA, 1081 bp, Zea mays
  Clone ID: TF_ZmC7776_6
gcgcgagagagaaagagagcagcttctccatctagctagtagttagagagatgtagtactagctagctagctagtaccaccggcgacaaggtagttaggtttctcctctttctctctctagatctgtgctgctaggaaggatcggagatggggagagggaagatagagatcaagaggatcgacagcgcgacgagccggcaggtgaccttctccaagcgccgcagcgggctgttcaagaaggccaaggagctcgccatcctttgcgatgccgaggtcggcctcgccgtcttctccagcaccggccgcctgtatgacttcgctagcaccagcatgaaatgtgtgattgaaagatacagcgaggcaagagaggaacaccgtcagactatgagcgcaagtgctgaggccaaggcagttgttgggtcagcagctttctggcctgaacgtgggagatttgcagaatttagagaataagctggagacgagcctaagaaatattcgtctgaaaaaggaccaacttattttttatcagattcaagaattaaacaggaagggaagcctcatgcaccaggaaagcatagaactatacaacaaagttaaccttcttcatcaacataacactgaattacagagaaaggtgtatggacaaggagtaaataatgagcaaacaagtactactgttagacacagtacccgggatacagagaatcttccgatcaatcttgagctaagtgtgcaaagggacaaatcagaaacaccaagtgtaggcctgtagggtgagatttttgtccaaacttcaggataacacagagtcagtaaaccagatgatttaataaagaacactgaaagtgccataagactttaaatgcagtgaggatactaagccgagtgataagaaatggatatcgttggtggaattgtaagacctaacagctaaactttaagctgctagatgcgattgtttatgtatgaagaagaatgttgattttaatttagcttttcatataaagcttgccatcgcatgctattgtaaattgtactctgaattataagtcctcttggttttctaggtacatagtttttt

SEQ ID NO: 2581 - DNA, 1326 bp, Zea mays
  unsure (1)..(1326): unsure at all n locations
  Clone ID: TF_ZmC1145_13
ccggccgggggccggtccccttatccctcaccttctcctctgagtcctctctctccgccgccgcagctagctgtgacgttatgctctcgccggcgccatagcgccagcgcctaccgtctacaactatccagccttaggcttacctatcccgtcaatcaagcctctcgtaaggaacaaggaaggtagctagctagttcgtcatcggcggcggcggcgcctgttcttagaggataaggttgtcgtagcggagagggagctagccaggattttggttgagatcaggagggggagcaggcggcggcggcggcgatggggcgcggtaaggtgcagctgaagcggatcgagaacaagatcaaccgccaggtgaccttctccaagcgccgctcggggctgctcaagaaggcgcacgagatctccgtgctctgcgacgccgaggtcgcgctcatcatcttctccaccaaagggaagctctacgagtattccaccgattcatgtatggacaaaattcttgaccggtacgagcgctactcctatgcagaaaaggttcttatttcagtagaatctgaaactcagatgcgccatcaaaggataggcctgacgcagagtagaagcgttttcattgagccgaaggccctggattcgaatcagtctctctggaaatgttgagataagggcaattggtgccacgagtatagaaaactanaggcgaaggtcgagacaatacaaaaatgtcaaaagcacctcatgggagaggatcttgaaacgttgaatctcaaagagcttcagcaactagagcagcagctggagagttcactgaaacatatcagaaccaggaagaaccaacttatgctcgagtcaatttcggagctccaacggaaggagaagtcgctgcaggaggagaacaaggttctgcagaaggagaaagcgttgctcctgcctgcagctcgcggagaagcagaaagcccagcggaagcaagtgcaatggggccaaacccaacagcagaccagttcgtattcatcgtgcttcgtgataagggaagctgccccaccccnnaatatcagcattttttcctgtggcagcaggcgggaggttggtggaaggtgcagcagcgcagccacaggctcgcgttggactaccaccatggatgcttagccaaatgagcacccccccccctcagcaactcttcccgtttatccgcctggtgcagtatagtatcatcgtgatcgcgagagcagcagcagtgggtttgccgttctttttttaccaatgtatgtctatatatgtaagtatcaaatctgcaatgtgttcacccccccccccccctc

SEQ ID NO: 2582 - DNA, 3143 bp, Zea mays
  Clone ID: TF_ZmC7776_4
cagaaacagcaataagcaacgatctgcttcattattattctatttgattaagagtgtgtccttactccacacacaaaggaagttatgttattcgttgattaattcaactgtacacttgatggctacaaaaaatggtactttattttaatgttctctcttacatgtgaaattggtttgtacattgtacaataacatttgcattctcagaaatgcataagctaatgttctatgcaattttccactgcaggcagttgttgggtcagcagctttctggcctgaacgtgggagatttgcagaatttagagaataagctggagacgagcctaagaaatattcgtctgaaaaaggtttcattgcagattcttcagactccatcacatatttaacaacatatatagataccagttgctactttgtttaataactgccaatttgcaggaccaacttattttttatcagattcaagaattaaacaggaaggtttgtctacacgacttattcacaattaataacatattttacggtctcgcttcactacaaaaacttcttgtttgaattatagggaagcctcatgcaccaggaaagcatggaactatacaacaaagttaaccttcttcatcaacataacactgaattacggagaaaggtacatgcatctagaaatagttagacgaaataggatgcaattagtagaactcatctttaattttgttttgttttattccacatgtctagtgtatgtgaatcacaaaacatcgtttctttttcattttcaggtgtatggacaaggagtaaataatgagcaaacaagtactactgttagacacagtactcggaatacagagaatcttccgatcaatcttgagctaagtgtgcaaagggacaaatcagaaacacgatggttgaattgcaagacctaacagctaaactttatgctgctagatgcgattgttagatgatttaataaagaacactgaaagtgccataagactttaaatacagtgaggataactaaaccgagtgataagaaatggatatcgttggttgaattgcaagacctaacagctaaactttaagctgctagatgcgattgtttatgtattaagaagaatgttgattttaattttgcttttcatataagcttgccatgtatgctattgtaaattgtactctgaattataagtcctcttggttttctaggtacatagttttttctatacacctagatatactatgtctcttgagctaaaaccgcttataatttagaatggagtaacttcaaaagatagttataagttaaatattggatgaccttttaccattggaacttaacggaaaacaatgcactcatcagatatttacaagatatcagaaggagctattgagacataaataacgataaaacaacgagctacatgattttttttcttacaagaaatgctcttacaaaagtctataagacaagcagtacatgaacttgtcaatggcaaccagtacgtgaatttgtcaatggcaaccagtacgtgagtatagcctcactgagctttcttgaaaggtcatatcatgtccagcctcagtatgcaaatggccatgttacaggaatggtctgtagctgctgtgcggataaatgttgtttctttgataagaattgtcaagcttcacatctatggactaactcagcagcatcactcttcgttgttggccaatagaaaccaaatctgaaagccttcccgaccagagttctggacgctgcatgtgcttcgcactgcccgacatggatttcgtctaacagttgcttcccaatagccgagtgaatgcacttcatgaggactcctgtcgcacctcttctgtacagtatgccccctatgagggtgtagtgggctgattgccttgcgatgcgttccgctgccgccttgtcatccggttcttcttcattttctatgtacctgatgataggctctctccagtcattggggtccgactcaggttggctcaatgagaggatacttggttgtgatattttttgtacgaagatcccgggtggagcctgggcccgactggatcatagctttgacaacgcgtctgctgttgcgttgcggtctctttccacgtgatggaactccaatccttcgaacttgtactccgattttcggacggctgcacggtacttactcatggaatcagtcgagcaatcacaatctttgttaatctggcttatgaccactagcgaatctccatataccatcagcttcttgatgctgagtgatacggcgatgtttaatccgtggatcagtgcttcatattctgctgcattatttgatgccggaaacaatagttggagtgcatacttgagttgttcacctccaggagcaataaagagaatccttgcacctgctccttgcaacttcagcgagtcatcaaagtacattctccatacttcggtagtctccaggttgtctaggacctggtgttcagtacactcagatacgaagtcaaccagtgcctgagtcttgatagccgtgcggggccggaactctatgtcgtgagctcccagctcgcacgcccacttggctatccttccgatagcttctttgttgtgaagaatgtcccctattggaaatcctactatgactttgtggtcgtcaaagtagtgacggagcttgcgagcggttagaagtaccacgtatagcagtttctggacttggggatacttcattttttaagggcccgagaacttcgctgatgaagtagaccagatgctgcaccgggtatgtatgtccttcctccacccgctcgactactaacgcggtgctcaccacgtgagttgtgcaggagatgtataacaacagatcttctgctggctgattcggcgtggtggcttgagtactggtgtagtcaggaactttttcagtgcctctagagcttcatgtgcctctgtggtccactgaaacttgtccacctttttgagcaatttatagaatggcatgcatttctcccctagccttgatatcaacctgctcagggctgccatgcatccagtaagcctatgtacctttttctgtgatcgtggcgcttccattctcatgatggcctcgattttttctaggttagcttcaatttctcggtgactgacaatgaatccg

SEQ ID NO: 2583 - DNA, 672 bp, Zea mays
  Clone ID: TF_LIB4736-006-R1-K1-F10
agcagtggtaacaacgcagagtacttttttttttttttttttttttttttttaagaagagagaggccaacatactattttcaataatctatataaagcacacaaatcatatataagtatgcgcaaacccgcgtttctgatgatatggactggccggagggtacaatagtagtagatgcaacagctaaattcacacgtacaaatgcacgcacacagtggtggcactcacaaatatatatccctaacagttgcactaatcacaattattaataattaagcaaacgtacgtagagttacttgagatctcgatttggcacatgatataactgcatgcgtgatctatcgcgattgtgggccgggcgccgccaggtatatatagctgatttcatcatccgagctggagggttgtaggttgcagctgatgggagtagtgctgaggcatgctcacttgcagaaagtttctcgagtcgaaaggggccatgtggtcgtactcgctcgtcggcggcggcactcccatcatgtgcatcgccggctgccccgtttcattactctcagcgatcttgctcctcaggtacatgttatcagtctgcagagccatctcccttttttgcatatagtcaacttcagcatatagcagctcattcccgcgtactctggggttgtaccactgctt

SEQ ID NO: 2584 - DNA, 793 bp, Zea mays
  Clone ID: TF_LIB4764-099-A1-K1-G5
tcgaggccggccgggactagttgcatcggctagctcccgcataaagaccacgccacttgagcagcagctagctcaagggaaggagaaggctggaagtggaaagaagtgggttcttgcttgagctgagctcttgctgcccttggatctgtttgggagtggagaacgcagtatggggcgcggcaagatcaagatcaagaggatcgagaactctaccaaccggcaggtgaccttctccaagcgccgggccggactggtcaagaaggcacgggagatcggcgtgctctgcgacaccgaggtcggcgtcgtcatcttctccagcggcggcaagctctacgactactgctcgcccaggacctcgctgtccaggatcttggagaagtaccagaccaactccgggaagatactgtggggtgagaagcacaagaacctgagtgcagagatcgacagagtcaagaaggagaacgacaacatgcagattcagctcaggcatctgaaaggcgaggacctgaactccctacagcacagggagctgatcgctattgaagagggcctccagaatgggcagaccaacatgcgcgagaagcaggcagtaatccttactcttccagttgctcctgagcttatttagtcgcttgcagcacacaagcacggcatagttcattaggggaagggttttgtttctgatgttgctttatccactgttgctgtagatggactactggaggatgcacaagacgaatgtaaagatgctggaagacgacacaagatactgactttttaggatgccccaaca

SEQ ID NO: 2585 - DNA, 1272 bp, Zea mays
  Clone ID: TF_ZmC1442_2
ctcgtgcgctgatattccgctcctgtccctgtgtcctccccggatggagctagagccggctctgctcatcattatatcgtcgcgcacaaatgcagcacttgtgttgtcgtgggggtgtgtggcatattagctagcggataagcggccggccgggcagctagcagaagagagcaagctcggacctcggatcggaggaggtcggcatggggaggggacgcgtcgagctgaagcggatcgagaacaagatcaaccgccaggtcaccttctccaagcgccgcaacggcctgctcaagaaggcctacgagctctccgtgctctgcgacgccgaggtcgcgctcatcatcttctccggccgcggcaagctctacgagttcggcagcgccggcgtaactaaaactttagaaaggtatcaacattgctgctacaatgctcaagattccaacaatagtgcactctctgaatctcagagctggtaccaggaaatgtcaaaactgagggcaaaattcgaggccttgcagcgcactcagaggcacttgcttggcgaggaccttgggccactgagtgtgaaggaattgcagcagctagagaaacagctagaatgtgctttgtcacaggcaagacagagaaagacgcaagttatgatggagcaagtggaagagcttcgcagaacggagcgtcacctgggagaaatgaacaggcaactcaaacacaagctcgaagctgaaggctgtagcaactacacaaccttgcagcatgccgcctgctggccagctcccggcggcaccatcgtggagcatgacggcgccacctatcaagtgcatccgcctgcccactcagttgctatggactgtgaacccactctgcaaatcgggtaccctcatcaccagtttccgccccctgaggcagccaataatatcccaaggagcgctgccacaggcgagaacaacttcatgctgggatgggttctttgagttcttctgttaatccatccatcagatggatccatgttgaaaccaataaaaggcattcagtgctatatatatcatatgcatatccgtgctcaagtgcttgatttgccacgacgttggattgtatcgttctgtgtgtaatagctaatttagaacggcacatctattctatgtggttgtggtgtggcacttatactgtttattcatttggaccatgaatcggggtagtttgtaaaaacacatctatatatgctgccggtgcatagaattcaaagttatctgcaccgtaattattatatgctcc

SEQ ID NO: 2586 - DNA, 211 bp, Zea mays
  Clone ID: TF_LIB3117-033-P1-K1-D5
aggcccactcatcatgaatgagctcgagcagctatagaaccagatagaggtatggggggggcatatcaggggagggaggaatcatatgctactctatcagctcttttatctcaaaagcaaggaacaagagttgcatgatctcaacacagacctaagggtaatgctgcatgaaacaagcccgcatattgtgatccacgacgactcctgggag

SEQ ID NO: 2587 - DNA, 333 bp, Zea mays
  Clone ID: TF_LIB3068-025-Q1-K1-D7
tacgatccacagatgcactcacatacattccttggttaagatctgggttcacttgatgacatggaggttgatcagcttgagaagccaaccgattcattcttaaatcacatacgatccacaaggtcacagcatatgcttgaacagctcactgatcttcagacgtggtagcaaatgatgtgtgaagcatataacttcctaacaagaaagctggatgagaccagcatccaacttcatgtccaagtgtgcgttcacggcgccaactgattactctactaccagcggtactccttgccacagccagccccataacatgttgtcctttgattattcttt

SEQ ID NO: 2588 - DNA, 1255 bp, Zea mays
  Clone ID: TF_ZmC2121_2
gccggccgggccggagaagatcgataattacttgagtgtgtgagaccacgcgtccgggcgcgcgcgaggaagaagttaggttagaaggactctccaaaagcgccgcttgagtaaaaaagatctcgccccaaggggtacgacgactacgatcacacaatataagcatctctctgctgctcaaagcaacccaggccggactcccgagggagcttttttagagcaagagaggacggagaggtagagagagaagggggacggaacaagcagctagctagcagggaagatgggtcgcggcaaggtggagctgaagcggatcgagaacaagatcagccggcaggtgacgttcgccaagcgcaggaacgggctgctcaagaaggcgtacgagctgtcgctgctgtgcgacgccgaggtcgcgctcatcatattctccggccgcggccgcctcttcgagttctccagctcctcatgcatgtacaaaacactcgagagataccgcagctccaactacagcacacaggaagtaaaagctccactggagagtgaaattaactaccaggactacttgaagttgaggaccagagttgattttctccagactacacaaagaaacatccttggcgaagatctgggcccactcagcatgaaggagctcgagcagctggagaaccagatagaggtatccctgaagcatatcaggtcaagaaagaatcagatgctactcgatcagctctttgatctcaaaagcaaggaacaagagttgcaggatctcaacaaagacctaaggaaaaagctgcaagaaacaagtccgcagaatgtgatccacgacgtctcctgggaggaaggcgggcacagtgggagtagtgttcttggtccgttccagggactccttcagcaccatggcaatgatccttccctgcagacacggtaccatcagcaggcctacatggaccagctgaacgaggacatggcggaccctgacgagcacggtcggtctggatggatatgagatgctccggtccgatgccccccaaataatgtcgatgcatgcatatagtttcctgcggtatgcggaactatatatgtgttgaaactgcaccaacgattagctgcctgattgtaatggttaccttaagaactccagtgtattgtattgttgtgtgctgtgctgtgttgtcagaagcttgcaactttgtatatgtacatgtatggtattctgttagtttcttggagctgcgcaaaaaaaaaaaaaaaaaaa

SEQ ID NO: 2589 - DNA, 1174 bp, Zea mays
  Clone ID: TF_ZmC1442_3
cctagcagcacttgtgtccggcggccttgtgttcgtgggggatgtgtggcatattagctagctgataagcggccggccgaagagcaaccgcagtgagaagaagaagctcggatcggaggaggtcggcatggggaggggacgcgtcgagctgaagcggatcgagaacaagatcaaccgccaggtcactttctccaagcgccgcaacggcctgctcaagaaggcctacgagctctccgtgctctgcgacgccgaggtcgcgctcatcatcttctccggccgcggcaagctctacgagttcggcagcgccggcgtaactaaaactttagaaaggtatcaacatttctgctacaatgctcaagattccaacaatggtgcactctctgaatctcagagctggtaccaggaaatatcaaaactgagggcaaaattcgaggccttgcagcgcactcagagacacttgcttggggaggaccttggcccactgagtgtgaaggaattgcagcagctagagaaacagctagaatgtgctttgtcacaggcaagacagagaaagacacaacttatgatggagcaagtggaagagcttcgcagaacggagcgtcacctgggagaaatgaacaggcaactcaaacacaagctcgaagctgaaggctgtagcaactacacaaccttgcagcatgccgcctgctggccagctcccggcggcaccatcgtggagcatgacggcgccacctatcaagtgcatccgcctgcccactcagttgctatggactgtgaacccactctgcaaatcgggtaccctcatcaccagtttccgccccctgaggcagccaataatatcccaaggagcgctgccacaggcgagaacaacttcatgctgggatgggttctttgagttcttctgttaatccatccatcagatggatccatgttgaaaccaataaaaggcattcagtgccatatatatcatatgcatatccgtgctcaagtgcttgatttgccacgacgttggattgcatcgttctgtgtgtaatagctaatttagaacggcacatctattctattctatgtggttgtggtgtggcacttatactgtttattcatttggaccatgaatcggggtagtttgtaaaaacacatctatatatgctgccggtgcatagaattcaaagtt

SEQ ID NO: 2590 - DNA, 1352 bp, Zea mays
  Clone ID: TF_ZmC84_1
cccagagctaccacccctcttatccccacccctcctcctcctaccttttctccttcagacctcaaaatctgtgtgataggaacaagagcatgcacatccgagaagaggaggctacaccatccacagtaacaggcatcatgtcgaccctgacttcggcggggcagcagaagctgaaggagcccatatcccctggtggcggctccgcgtcggtcgctgggtccgctgcggagaggaacaacggcggcaggggcaagggcaagactgagatcaagcgcatcgagaacacgaccaacaggcaggtcaccttctgcaagcgccgcaacggcctcctcaagaaggcgtacgagctctccgtgctctgcgacgccgaggtcgcgctcatcgtcttctccagccgcggccgcctctacgagtacgccaacaacagcgtgaagggcaccattgagaggtacaagaaggcaaccagtgacaactccagcgcagctggtacgattgcagaggtcaccattcagcattacaagcaggaatctgctaggctgaggcagcagatcgttaacttgcagaactccaacagggccctgataggtgattctatcacaaccatgagccacaaggaacttaagcacttggagactaggttagacaaagctctcggaaagattagagcaaaaaagaacgatgtgctgtgttctgaagtcgagtacatgcagagaagggaaatggagttgcagaatgacaacttgtacttaaggagccgggttgatgagaatgaaagggcacaacagacagcgaacatgatgggggcaccatcgacaagtgagtatcagcagcacggttttactccttatgatccaataaggagcttcctgcagttcaacatcgtgcagcagcctcagttctattctcagcaggaggaccggaaagacttcaacgaccaaggtggaagataaatattggacctctcaagcttcagtacttatccgtgatgatgcatgactgccagtgagaaactgagctacattactgtggaattatatgtaaagactagtactactgcttcatatatgtgcatgtgcgcacacgcgcacgtagtatgcacaatttcatcccactattatggcttggcaccaactatgtctccttaattatcataggagaaaaataagtcacgcacaaaaaaattctaaagatgaggcgcagtgttggatgactgaaactgaaagataggattctcgtggatggcggtggtcatatacggcctgttttggttgatgtacccgagcgcacccgcggaatcttaaagcaagttgtgtttaattgactgcactttatatacgggttgaacagatgta

SEQ ID NO: 2591 - DNA, 1383 bp, Zea mays
  Clone ID: TF_ZmC84_2
taccctcgaggccggccgggcccaggagcaagaaacactcagaagctgcccagagctaccacccctcttatccccacccctcctcctcctaccttttctccttcagacctcaaaatctgtgtgtctcctgccgcggctagctgataggaacaagagcatgcacatccgagaagaggaggctacaccatccacagtaacaggcatcatgtcgaccctgacttcggcggggcagcagaagctgaaggagcccatatcccctggtggcggctccgcgtcggtcgctgggtccgctgcggagaggaacaacggcggcaggggcaagggcaagactgagatcaagcgcatcgagaacacgaccaacaggcaggtcaccttctgcaagcgccgcaacggcctcctcaagaaggcgtacgagctctccgtgctctgcgacgccgaggtcgcgctcatcgtcttctccagccgcggccgcctctacgagtacgccaacaacagcgtgaagggcaccattgagaggtacaagaaggcaaccagtgacaactccagcgcagctggtacgattgcagaggtcaccattcagcattacaagcaggaatctgctaggctgaggcagcagatcgttaacttgcagaactccaacagggccctgataggtgattctatcacaaccatgagccacaaggaacttaagcacttggagactaggttagacaaagctctcggaaagattagagcaaaaaagaacgatgtgctgtgttctgaagtcgagtacatgcagagaagggaaatggagttgcagaatgacaacttgtacttaaggagccgggttgatgagaatgaaagggcacaacagacagcgaacatgatgggggcaccatcgacaagtgagtatcagcagcacggttttactccttatgatccaataaggagcttcctgcagtccaacatcgtgcagcagcctcagttctattctcagcaggaggaccggaaagacttcaacgaccaaggtggaagataaatattggacctctcaagcttcagtacttatccgtgatgatgcatgactgccagtgagaaactgagctacattactgtggaattatatgtaaagactagtactactgcttcatatatgtgcatgtgcgcacacgcgcacgtagtatgcacaatttcatcccactattatggcttggcaccaactatgtctccttaattatcataggagaaaaataagtcacgcacaaaaaaattctaaagatgaggcgcagtgttggatgactgaaactgaaagataggattctcgtggatggcggtggtcatatatatgtcatgcacatctgatctctgttcagaaaaaaaaaaaaaaaaggcccctagggccct

SEQ ID NO: 2592 - DNA, 1417 bp, Zea mays
  Clone ID: TF_ZmC371_1
gccgcgcgcccggccaaaacccttacgcgcgacgcggccccctcctcttcttctctctcccaccaccgccctccccttgccatttttggtgagtgccccctttcccttccctagaccagatcctcgccccgttttccacttttgcctccaccgcccggcccaattcggataacaagctccctccgcctcgccgcgtctcctcccagccgcaggagccgccgccatccgatccggaagagggaggaggggggagggaggaggatctgtgtcccgattcgattggagctctcgtccccggcggtccaggatggtgcggggcaagacgcagatgaagcggatagagaacccggccagtcgccaggtcaccttctccaagcgccgcaacggcctgctcaagaaggcgttcgagctctccgtcctctgcgacgccgaggtcgcgctcgtcgtcttctccccgcgcggcaagctctacgaattcgccagcggaagtgcccagaaaacaattgaacgttatagaacatacacaaaggataatgtcagcaacaagacagcacatcaggacattgagcaagtaaaagctgatgctgagggcctggcaaagaaactggaagcacttgaagcttacaaaagaaaacttttgggtgagaggttggaagaatgctcctttgaagaactgcacagtttggaagtgaaactcgaaaagagccttcattgcatcaggggaagaaagactcagctgctggaggagcaactccataagctgaaggagaaggagatgaatctgcgcaagagcaacgaagatttacgtgaaaagtgcaagaagcagccgccgccgccgccgcctatgctgatggctcctccgccgcctccagcgccggcagccatcgatcacacggggccgaaggatgtcgggatggacgtggagacggagctgtacataggattgcccggcagagattaccgctcaaacaacaaagacatgactgcacagtagctgtcaggtcaggtcaggtcaggctagccagcagtgcagagaataatcttagatctgtggtgcggagaactggagatgcaagccaagcccaagccaatcaacatgataaggatcatgagtgtcgcgtcgtgttttacaaacctgtccaccgtccgtcaaaggcacatgcgccagaacgtccgtcagagaacacttaccccctcatctccctctattagctagctgctccggcctgctcatgtcgaaaccttctgttcaagtatgttctcctcctgatgaattccctgcccggcatgcattggtgagcttcttctcgagaagaagtgggtggggtggggacactgtcgttcatatttggcaacacaggtggctgctccggcctgctcatgtcgaaaccttctgttcaagtatgttctcctcctg

SEQ ID NO: 2593 - DNA, 839 bp, Zea mays
  unsure (1)..(839): unsure at all n locations
  Clone ID: TF_ZmC53_11
ctatatctatantgcagcacggacctcgcacccggccgggatgttttttccatctgcctcttgctttatgataattcaacttgcgctgattatattcttggctacctagctagaaatgtctaattaaactttgtttgctagctagattttgttgcttcttttcgcatctgatctttttatctcttctgagtgctccgcaaagccttccagtgttgaagaagctgctggaagaagagatgagctttctcttgaaggaaaaagagatgatcattgctgctggtatcgtcgccagcatgggtagaggaaggattgagatcaagaggatcgagaacaacacgagccggcaggtcaccttctgcaagcgccgcaatgggctcctcaagaaggcgtacgagctctccgtcctctgcgacgctgaggtggccctcatcgtcttctctagccgtggtcgcctctacgagtatgccaacaacagtgtcaaggctactgttgagaggtacaagaaggcacacaccgttggctcttcctctgggcccccgctcctagagcacaatgcccagcaattctaccagcaagaatcagcaaaactgcgcaaccagatccagatgctgcaaaacactaacaggcacttggttggtgactccgtgggaaacctgtcactcaaggagctgaagcagctggagagccgccttgagaaaggcatctctaagatcagggccaggaagagtgagctgctggctgcggagatcagttacatggccaaaagggagactgagcttcagaatgaccacatgacccctcagaccaagattgagggaggggagagcacagctgcagca

SEQ ID NO: 2594 - DNA, 551 bp, Zea mays
  unsure (1)..(551): unsure at all n locations
  Clone ID: TF_LIB4764-117-A1-K1-G12
gccggccgggnaaaaaaaattcaaaaaaaaaaaaaaaaaaaaaaaaaaaatctacaaggacacaacacatggttgatcaactgacagaacttcagaaaaaggaacaaatgttttgtgaagcaaataagtgtcttcgaagaagactggaggagagcaaccaggttatatggcagcatgcgtgggagcaaagcgagcggcattctgaagtgcagccgcagcagctcaatggcaataacttcttccatcccctcgatggtgctggtgaacccacccttcagatagggtatccttcagaggcactgactagctcatgcatgaccaccttcctgcccccgtggttgccatgagatcgaactactgcgcaattccgaattaataagcatggccgcatgcagctgcctgtgctatacgttgtgcttggagtgtacttcaaggttcttgcatgacaagtatgtgtgtaacatttgtgatgaacatggaaactatccacttaattctcgaataatcaatgaactgggtaagattataaaaaaaaaaaaaaaaaagcggcc

SEQ ID NO: 2595 - DNA, 1198 bp, Zea mays
  Clone ID: TF_ZmC1460_2
ggaacaagagagagaggacatagccgcacaaagggaaggagaccctcgccaacctcgaagctagtccaaactagtgggaggttgagtgcagggatcgatcgaggaagacgagacaagcttcttcttctgctgccgccgccgccagctctagctcaccacgagttactagccaatctgacaccgaccgtccatggcgcggggcaaggtgcaacttcggcgcgtcgagaacccggtgcaccggcaggtgacattctgcaagcgccgcgcggggctgctcaagaaggcccgggagctctccgtcctctgcgacgccagcgtcggcatcatcgtcttctccgcgcacggcaagctctacgacctcgccaccaccgggaccatggaggagctgatcgagaggtacaaggctgccagcgccggagaagcgacgaccgacggctgcggcaggcacaacaggatggaccccaaacatgaaaccacggtgctgcaacaggaaatcaacctgcttcagaagggactgaggtacatctacgggaacagggcgaacgagcacatgaatgttgacgaactgaacgccctagagaggtacttggagatatggatgtacaacacccgctctgcaaagatgcagataatggctcaagagatccaagcactgaaaagcaaggaaggcatgttgaaagctgccaacgagattctccaggaaaagatagtagagcagagtagtttgcttgacgtaggcatggtggtagcggaccagcagaatgggcgttttagcacagtcccactggtagaagaggtgatcagtagtaacccactgactatactgagtggctattctagctgtaggggttcagagatgggctactccttctgttgattactactagtgtgtaatacatacagtcaataatgtctgtgtaatgggttggttgttctgctgctttggtgtatcatattcgtatcatgtaggccttagataagcccttcaggagtgcccctggtattgtgtcgtcgtgccttttacttttccagaatgaagaaatattgtctattgaggagaaaaaaaaaagctgaaatggtgtatcatattagattattcgtatcatgtaggcttagataagcccttcaggagtgcccctggtattgtgtcgtcgtgcgtttacttctccagaatgaaaaaatattgtctattgaggag

SEQ ID NO: 2596 - DNA, 1138 bp, Zea mays
  Clone ID: TF_ZmC1460_3
ggggacatagccgcacaaagggaaggataccctcgccaacctcgaagctagtccaaactagtgggaggttgagtgcagggatcgatcggggaagacgagacaagcttcttctgctgctgctgccgcccccgccagctctagttcaccagagttactacttactagccaatctgacaccgatccaccgccggcaccgaccgtccatggcgcggggcaaggtgcagcttcggcgcgtcgagaacccggtgcaccggcaggtgacattctgcaagcgccgcgcggggctgctcaagaaggcccgggagctctccgtcctctgcgacgccagcgtcggcatcatcgtcttctctgcgcacggcaagctctacgacctcgccaccaccgggaccatggaggagctgatcgagaggtacaaagctgccagcgccggagaagcgacgaccgacggctgcggcaggcacaacaggatggaccccaaacatgaaaccacggtgctgcaacaggaaatcaacctgcttcagaagggactgaggtacatctacgggaacagggcgaacgagcacatgaatgttgacgaactgaacgccctagagaggtacttggagatatggatgtacaacacccgctctgcaaagatgcagataatggctcaagagatccaagcactgaaaagcaaggaaggcatgttgaaagctgccaacgagattctccaggaaaagatagtagagcagagtagtttgcttgacgtaggcatggtggtagcggaccagcagaatgggcgttttagcacagtcccactggtagaaaaggtgatcagtagtaaccccctgactgtactgagtggctattctagctgtaggggttcaaagatgggctactccttctgaccgtaataacaaacagcctgggggctccttctgttgattactactagtgtgtaatacatacagtcaataaagtctgtaatgggttggttgttctgctgctttggtgtatcatattcgattattcgtatcatgtaggccttagataagcccttcaggagtgcccctggtattgtgtcgtcgtgccttttacttttccagaatgaagaaatattgtctgttgaggagatctgatgatgtgctattaaatcaaa

SEQ ID NO: 2597 - DNA, 1241 bp, Zea mays
  Clone ID: TF_ZmC1808_2
cacaaaaggcagaagttcaggtcgataggagaaaaatgaccatgcacgccgccgctacttccttctgaatcttgaccgatctgagctgcgggccgtcgtccaaggcgaaaggagggcagccggcggcggcgccgggctccggcggcgacaggcaggggaggggcaagatcgagatcaagcgcatcgagaacacgacgaaccggcaggtcaccttctgcaagcgccgcaacggcctgctcaagaaggcgtacgagctctcggtgctctgcgacgccgaggtcgcgctcgtcgtcttctccagtaccctcgaggccggccgggacgccaacaacagtgtgaagtccaccattgagaggtacaagaaggccaacagtgacacctccaactctggcacagttgcagaagtcaatgctcagcactaccagcaggagtcctccaagctgcgccaggcgatcgatagcttgcaaaacgcaaacaggaccatagtgggagattcaatccacaccatgggcctcagggagcttaagcagatggagggcaagctggagaaggccataaacaagattagggctagaaagaatgagctcttgtatgctgaagttgaatatatgcaaagaaggatggatctgcagactgacaacatgtacctgaggagcaagatcgccgagaataataatgaaacggggcagccagcgatgaacatgattggagtgccgtcgacgagcgagtacgatcacatggcctcttttgttgactcgagaaactttcttcaggtgaacatgcagcagcagcagcctcagcattactcccatcagctgcaaccaacgaccctccaactcggatgatgaaattaagaatcttcggccaacaatccatgcacgcaagcacgcagtaaatcatgtgtgtccaactcagataaaaaaatctactctagcgtttgtataattattaataatcgtgactagtaaactgttatatatatatgtatagccatgtgtgtggtggcgcctacatatatgtcatgtggctgtacggcgagttttttttttcacaagcgtttgcagcagcatttggtgttgctcatcgatcaattaatcgcaagaaattaaacttgtcaccactgtgggtgtacgtgttaatgcagttgttgtatctgttaattgtaccctccatcagataaacgcgggtgcgcgtatgcatacttatttatgtgtatgattatttgtgtagtttatatcgcc

SEQ ID NO: 2598 - DNA, 678 bp, Zea mays
  unsure (1)..(678): unsure at all n locations
  Clone ID: TF_LIB4719-003-R1-K1-B4
aatagccttcatccccntcctgttccatacaaacacataggactaatcgccaaccactaaagccccgtacaatatgagccaatatatcataagaatgcttccagaaaatatagcgtcacaatgtgaaaaatcagctttgttgatttaatcagttttcttataaatgaaaaatgtaaaaaaaacatacttctccattatttcttgagattaatataattgttccttaaaattgttggcagacacaacttatgatggagcaagtggaagagctccgcagaaaggagcgacacctgggagaaatgaacaggcaactcaaacacaagcttgaagctgaaggttgtagcaactacagaaccctgcagcatgcagcctggccagctcccggcagcaccatggtggagcatgacggcgccacctatcatgtgcatccaacaactgctcaatcggttgcaatggactgtgaacccactctgcaaatcgggtaccctcctcatcaccagtttctgccttccgaggcagccaataatatcccaaggagcccccctggaggcgagaacaacttcatgctgggatgggttctttgagttgctctgttaatcatccatccatcagatggatgtccaaactaataaaggcactcagtgctaccatatgcatatccatgcctaagtgcttgat

SEQ ID NO: 2599 - DNA, 1785 bp, Zea mays
  Clone ID: TF_ZmC2134_2
acatgcgaacgtaacaaacacagcaacacgcccacgctagcggtttccatttccggccctgcaatcctgcaccggcgcgaaagccccctcacggcctcacctccactccggtgatggccgcctctcctttacttctcagatctcagtgctcacgccgtccacggtccactagttgcatcggctcccgcataaagatccacaccacttgagcagcagctacctcaagggaaggagaaggctggaagtggaaagaagtgggttcttgcttgagctgagctcttgctgcccttgaatctgtttgggagtggagaacggagtatggggcgcggcaagatcgagatcaagaggatcgagaactctaccaaccggcaggtgaccttctccaagcgccgggccggactggtcaagaaggcacgggagatcggcgtgctctgcgacgccgaggtcggcgtcgtcatcttctccagcggcggcaagctctatgactactgctcgcccaggacctcgtctgtccattgccctctcattctttttattcttttgcttgtttattatcgtccttcttcttttcttgtgtgcaagcaaaactgatcgcaaagacccaaacttggttggaaaggcaaaactgagtaaaaaacacggttaagcgtaaaattgaggacaccaataaaaatgagggcaccagcctaaaaaacccaaatttggtttggtggcaggctgtccaggatcttggagaagtaccagaccaactccgggaagattctgtggggtgagaagcacaagaacctgagtgcagagatcgacagagtcaagaaggagaacgacaacatgcagattcagctcaggcatctgaaaggcgaggacctgaactccctgcagcccagggagctgatcgctattgaagagggcctccagaatgggcagaccaacatgcgcgagaagcagatggactactggaggatgcacacaacgaatgggaagatgctggaggacgaacataagatactgacttttaggatgcaccaacaggctgttgatctgagcggcggcatgagggagctggagaccggataccatcaggtccagcacgacagggatttcatttcccagatgccgttcaccttccgggtgcagcccaaccaccccaacctgcaggaagacgagtagctacagcctgctggatagtgttctgcatgccgctctgaactgaagctgcaggaagacgagtagctacagcctgctggatagtgttctgcatgccgctctgaactggagctcctcacctgcagcttctttctcgcgtttcatcattcagcgttagctggtgatgataatgttggggcgaaggcgaagacgctatcattcgctcgatgccttcgtcgccttcgtcgtctcgcttcaccaacgacgccaaagacgccggtccaatgaggacttcgcgactggacttcgtgggcgtccttcgcccttctccattgcgagacgaaggcaagactccgacgatgtctgctagcctcacgtcctcatcgggtccggaagcccaagggagattcggcccactgtaacgggccccgcaaggataagcgtgttacgggcttcatctgtaatagtcttttctgtaatgacggtctgtaacctcccctggggaatattctaaggatactttgggttcccgagggcataaacgtccttgtttgagcgtggtaggcactcgggcacctataaatactcccgtacagtacccttgaggggacagattaacagagctattgtcgttccccgttg

SEQ ID NO: 2600 - DNA, 875 bp, Zea mays
  unsure (1)..(875): unsure at all n locations
  Clone ID: TF_ZmC1408_3
catgcataagtttgcttcatacctataaccataaaggagcatggtnagatatgttctcatgcatatgttcacatgaaaggattgttataaattaaagagagtagatgtggagacttttgggacctctccatccaatacctgttgcgagaagatgcagaataactatcaagaatatgtgaagctgaaagcacgagttgaggttttacaacactcgcaaaggaatcttcttggtgaagaactggctccacttagcccaagtgaacttgaccagcttgagagtcaagtagacaagaccttgaagcaaataagatcaagaaagactcaggtgttacttgatgaactttgcgacttaaagagaaaggaacaaatgctgcaagacgctaacagggttctgaaaaggaagctgcacgagtttgagacagaggctgcttctcccccacaattggcgtggcaaggcggaggcggcatgttgtcccatgaccctccacagccagaacactttttcgtggctctggagagcaacgcgcctctgcaacctacataccatactatggacatgaaccagcagccagagccagcgccgggcgactgctatcctcctgcgtggatggcttagccagcgctatggttccattgccttgagaagtgccgtgtccttcagagatcgctacgagtgctgctgcctgccatgcttactgaactgttcaaataagaaataaccacatggtcctatataggttgctgttgtctttatcttctgttgatcacgtccggctcagatgctttaacgctatgcaaaatggcttagcgatgcacgctggaatgggctgaactgcttgtgttttgggagtataaatcgcttgggcgcttggcac

SEQ ID NO: 2601 - DNA, 677 bp, Zea mays
  Clone ID: TF_LIB4764-090-A1-K1-F3
cgaggccggccggggcaatatacctgcgtgcgtgtgtgtatctgtgtgcgcgtaggtgcatggcggtgttcatataaaccggccgggtgtgggtggatccctaactggcacgagacatcctctcagcagatctacgagccctacgccttgcctctttcctccagcttctccggtagtcgtcgcccgcccccacgcccgccctttcctccatcttctccgggtgtctggagtggccatctttcgtgtgtgttgggtgggccggggcatgcgcgtgtcagagacacgcacggtcgattgctgctgaggtagctaggggatcgatcgtacgttgtcgctggatggaggaagcataacaaaaactttagaaaggtaccaacattgctgctacaatgctcaagattccaatggcgcactctctgaaactcagagctggtaccaggaaatgtcaaaactgagggcaaaattcgaggccttgcagcgcactcagaggcacttgcttggggaggaacttggcccactgagtgtgaaggagttgcagcagctagagaaacagctcgaatgtgctttgtcacaggcaagacagagaaagacacaacttatgatgggagcagtggaagagctccgcagaaaggagcgacacctgggagaaatgaccaggcaactcaaacaccagcttg

SEQ ID NO: 2602 - DNA, 1445 bp, Zea mays
  Clone ID: TF_ZmC1442_1
tggaccctcgaggccggccgggtacaggggcagccaggcacacacacacacagtgaccctgccccttttcccggccgtctcgctctccaccgatattccgctcctcctgtccagtcctcctcccccgagccggctcattatatcgtccgtcgcgcagcacaacgcaagtttgctagcggccggatcagcagccacaaaacgaggagagcaaccacgctgcacacagagacgcccgtgtgtgagatatagagcaagctcgatcgaaggaaggagggaagctagagatcgtacgtcgccatggggaggggacgagttgagctcaagcggatcgagaacaagatcaaccgccaggtcaccttctccaagcgccgcaacggcctgctcaagaaggcctacgagctctccgtgctctgcgacgccgaggtcgcgctcatcatcttctccagccgcggcaagctctacgagttcggcagcgccggcataacaaaaactttagaaaggtaccaacattgctgctacaatgctcaagattccaatggcgcactctctgaaactcagagctggtaccaggaaatgtcaaaactgagggcaaaattcgaggccttgcagcgcactcagaggcacttgcttggggaggaacttggcccactgagtgtgaaggagttgcagcagctagagaaacagctcgaatgtgctttgtcacaggcaagacagagaaagacacaacttatgatggagcaagtggaagagctccgcagaaaggagcgacacctgggagaaatgaacaggcaactcaaacacaagcttgaagctgaaggttgtagcaactacagaaccctgcagcatgcagcctggccagctcccggcagcaccatggtggagcatgacggcgccacctatcatgtgcatccaacaactgctcaatcggttgcaatggactgtgaacccactctgcaaatcgggtaccctcctcatcaccagtttctgccttccgaggcagccaataatatcccaaggagcccccctggaggcgagaacaacttcatgctgggatgggttctttgagttgctctgttaatcatccatccatcagatggatgtccaaactaataaaaggcactcagtgctaccatatgcatatccatgcttaagtgcttgatttgccacgacgtgggatatcttttaaatttatcgttctggtgtgtaataactaattaagaacggcaccttcattctatggttgtggtgtggcacttctatctatggtttttgtatttggaccacgaatgttgtaatttgtaaaaaaaatttaaagatttatctatgctgccggtgctgcggtgcatagcccggtgcatagaatccaaaaaaaaaaaaaaaaaaaaaaaaaaaaaaaaaaaaaaaaaaaaaaaaaaaaaaaaaaaaaaaaaaaaaaaaaaaagaaa

SEQ ID NO: 2603 - DNA, 831 bp, Zea mays
  Clone ID: TF_ZmC53_7
ggtaccctcggtgtcggcctgctattaaaccctttgcttgcaagtccaagaaactgctagagaggaacaagctgagatctccagcatggggaggggaaggattgagatcaagaggatcgagaacaacagtgtgaaggctacgatcgagaggtacaagaaggcacacgccgttggctcttcctctggccccccactcttagagcacaatgcccagcaattctaccagcaagaatccgcaaaactgcgcaaccagatccagatgctgcaaaacactaacaggcacttggttggtgactctgtgggaaacttgtcactcaaagagctgaagcagctggagagccgccttgagaaaggcatctctaagatcagggccaggaagagtgagctgctggctgccgagatcaattacatggccaaaagggagactgagcttcagaatgaccacatgaacctcaggaccaagattgaggagggagagcaacagctgcagcaggtgactgtggcccagtctgtcgcagcagcagctgccaccgacgtggagctgaatccgttcttggagatggataccaaatgcttcttccctggcggccccttcgcgacactggacatgaagtgcttcttccccggcagcttgcagatgctggaggcacagcagcgccagatgcttgccaccgagctgaacctcggctaccaactggcgccgcctgacactgacgttgccaacaataaccctcagcagttctaaactggatccatgagaaagccaactgtgaccgatggaagctggctgttgcctctagatgatattggcttccataacctagctattat

SEQ ID NO: 2604 - DNA, 1391 bp, Zea mays
  Clone ID: TF_ZmC53_2
tttgtttacataatcttcgagttctgatgtaagtaactatgagtttgtgatggctaggttgtttatttgtcaaactctgattgctgaattcttgtttcctcagcggcgggaaaaaaaaaaaagcatctcttttctatctaggttatctctttacatgctaaatttcagccgtatttctttctggatcagttctgtatacttctgtgatacacatcttgcgatgcggcttgtagtagtttctgctagctgagcgagatcgatctcgtttgtactttctccctttgaggaaacaactccccttttctgtgcttcaagttgttctgagatctccagcatggggaggggaaggattgagatcaagaggatcgagaacaacacgagccggcaggtcaccttctgcaaacgccgcaatgggctcctcaagaaggcctacgagctctccgtcctatgcgacgccgaggtggcgctcgtcgtcttctccagccgcggacgcctctacgagtacgccaacaacagtgtgaaggctacgatcgagaggtacaagaaggcacacgccgttggctcttcctctggccccccactcttagagcacaatgcccagcaattctaccagcaagaatccgcaaaactgcgcaaccagatccagatgctgcaaaacactaacaggcacttggttggtgactctgtgggaaacttgtcactcaaagagctgaagcagctggagagccgccttgagaaaggcatctctaagatcagggccaggaagagtgagctgctggctgccgagatcaattacatggccaaaagggagactgagcttcagaatgaccacatgaacctcaggaccaagattgaggagggagagcaacagctgcagcaggtgactgtggcccagtctgtcgcagcagcagcggccaccgacgtggagctgaatccgttcttggagatggataccaaatgcttcttccctggcggccccttcgcgacactggacatgaagtgcttcttccccggcagcttgcagatgctggaggcacagcagcgccagatgcttgccaccgagctgaacctcggctaccaactggcgccgcctgacactgacgttgccaacaataaccctcagcagttctaaactggatccatgagaaagccaactgtgaccgatggaagctggctgttgcctctagatgatattggcttccataacctagcttattatggtgtgtattgttgccttttgtgtgtgattctccttactactgatggagaataaacctaatcgattgggcataatgatcaaatgctacagcacccgtgaggctgtgatcaggacatcatgaaaaaaaaaaaaaaagcggccgttttgaatagcacttttatctattacgagg

SEQ ID NO: 2605 - DNA, 1230 bp, Zea mays
  Clone ID: TF_ZmC53_4
gccggccgggccgggagtagtggcattttgcccctgctgtgccatctctctctcgctctcgctcctctcctctttttctctcctgctcagccttgcttcccgtcccatcctttctttcccttgggcgcattcagcagcttcagcctggccggccggcctgctattaaaccactttgcttgcaagtccaagaaactgctagagaggaacaagctgagatctccagcatggggaggggaaggattgagatcaagaggatcgagaacaacacgagccggcaggtcaccttctgcaagcgccgcaatgggctcctcaagaaggcgtacgagctctccgtcctctgcgacgccgaggtggcgctcgtcgtcttctccagccgcggacgcctctacgagtacgccaacaacagtgtgaaggctacgatcgagaggtacaagaaggcacacgccgttggctcttcctctggccccccactcttagagcacaatgcccagcaattctaccagcaagaatccgcaaaactgcgcaaccagatccagatgctgcaaaacactaacaggcacttggttggtgactctgtgggaaacttgtcactcaaagagctgaagcagctggagagccgccttgagaaaggcatctctaagatcagggccaggaagagtgagctgctggctgccgagatcaattacatggccaaaagggagactgagcttcagaatgaccacatgaacctcaggaccaagattgaggagggagagcaacagctgcagcaggtgactgtggcccagtctgtcgcagcagcagctgccaccgacgtggagctgaatccgttcttggagatggataccaaatgcttcttccctggcggccccttcgcgacactggacatgaagtgcttcttccccggcagcttgcagatgctggaggcacagcagcgccagatgcttgccaccgagctgaacctcggctaccaactggcgccgcctgacactgacgttgccaacaataaccctcagcagttctaaactggatccatgagaaagccaactgtgaccgatggaagctggctgttgcctctagatgatattggcttccataacctagcttattatggtgtgtattgttgccttttgtgtgtgattctccttgctactgatggagaataaacctaatcgattgggcataatgatcaaatgctacagcacccgtgaggctgtgatcaggacatcatg

SEQ ID NO: 2606 - DNA, 1392 bp, Zea mays
  Clone ID: TF_ZmC53_5
tcccacgcgtccgcgaactcgtaaatcttgtgttcctgtgtggctgctttcgttagatctctcggctatgtctatatgatcgtcttggccagcatctctgggttcttttcgcggccgagaggaaacttactaactgatcgagtgtgccaggcatcaatctgtcgaatcgtgactcgtcgctttttcatgtcttcagattttgtccatctgtcaaatcatgtggaaaaattggcatatcttcttgtattctcttctgtcctttttaatgcctccagcggattaatttctagctagttccgttccattgatctgccttcagataatataacttaaattctcgctttcttatgcaagaactaaattacttgcatttcagctgagatctccagcatggggaggggaaggattgagatcaagaggatcgagaacaacacgagccggcaggtcaccttctgcaagcgccgcaatgggctcctcaagaaggcgtacgagctctccgtcctctgcgacgccgaggtggcgctcgtcgtcttctccagccgcggacgcctctacgagtacgccaacaacagtgtgaaggctacgatcgagaggtacaagaaggcacacgccgttggctcttcctctggccccccactcttagagcacaatgcccagcaattctaccagcaagaatccgcaaaactgcgcaaccagatccagatgctgcaaaacactaacaggcacttggttggtgactctgtgggaaacttgtcactcaaagagctgaagcagctggagagccgccttgagaaaggcatctctaagatcagggccaggaagagtgagctgctggctgccgagatcaattacatggccaaaagggagactgagcttcagaatgaccacatgaacctcaggaccaagattgaggagggagagcaacagctgcagcaggtgactgtggcccagtctgtcgcagcagcagcggccaccgacgtggagctgaatccgttcttggagatggataccaaatgcttcttccctggcggccccttcgcgacactggacatgaagtgcttcttccccggcagcttgcagatgctggaggcacagcagcgccagatgcttgccaccgagctgaacctcggctaccaactggcgccgcctgacactgacgttgccaacaataaccctcagcagttctaaactggatccatgagaaagccaactgtgaccgatggaagctggctgttgcctctagatgatattggcttccataacctagcttattatggtgtgtattgttgccttttgtgtgtgattctccttgctactgatggagaataaacctaatcgattgggcataatgatcaaatgctacagcacccgtgaggctgtgatcaggacatc

SEQ ID NO: 2607 - DNA, 2480 bp, Zea mays
  Clone ID: TF_ZmC1408_1
cccacgcgtccgcccacgcgtccgcccacgcgtccgcccacgcgtccgcgtcgtcgggggaattgagtgtgagagctcgaaaaaacccaggggatcggccggaccagcagcgagcgagcgcgagctctgcgtgcgtgtgtgtgtctgctctagattagatcacctccatcgtcaataattgcaggcagatccatagtctgctggtggcgagacaaagcaacggatcgtcgtcgatccggagagcggaaagcgcgcagatcgcgacggccatggggcgcggcaaggtggtgctgcagcggatcgagaacaagatcagccgccaggtcaccttcgccaagcgccggaacggccttagaaataaaaaaaatcgaggtgtatacaatttaggaggcatttaactggtatttaaaacttagattgtgctgcaatttaccattcttgtaatttagtattaaaaggctattcctgttttctcctgaaattcggaatgccgcaccatgtttctatccaagtaactcctttatgcatgtcttcatttgggtttggcaacctatatatcagcgccatgcgccccggccggtcgtaacctagctaggagtagctagctaggactagctagctaggagcctaagcgcccagcccagtgggtggtagcctaccaagggtgaggaagaggagctgagctaggaccgcggagcgagatccaatctgcaccccacgaacgaaaagattcttccccgccggcgtcgctctctcatccgtcgacgtctcgctccttccttcctctctctctctctctctctctctctctctctctttctctctctcagccagcagcaagcatatagcccagcaccaccccatgcccaagggccctccctctccctcgtcgtcgggccaattgagtgtgagagctcgaaaaaacccaggggatcggccggaccagcagcgagcgagcgcgagctctgcgtgcgtgtgtgtgtctgctctagattagatcacctccatcgtcaataattgcaggcagatccatagtctgctggtggcgagacaaagcaacggatcgtcgtcgatccggagagcggaaagcgcgcagatcgcgacggccatggggcgcggcaaggtggtgctgcagcggatcgagaacaagatcagccgccaggtcaccttcgccaagcgccggaacggcctgctcaagaaggcgtacgagctctccatcctctgcgacgccgaggtcgcgctcgtcctcttctcccacgccggccgcctctaccagttctcatcctcctccgatctgcttaagactctagagcggtaccagaggcacatctatgcttcagctgatgctgcagtgccatctagcgatgagatgcagaataactatcaagaatatgtgaagctgaaagcacgagttgaggttttacaacactcacaaaggaatcttcttggtgaagaactggctccacttagcccaagtgaacttgaccagcttgagagtcaagtagacaagaccttgaagcaaataagatcaagaaagactcaggtgttacttgatgaactttgcgacttaaagagaaaggaacaaatgctgcaagacgctaacagggttctgaaaaggaagctgcacgagtttgaggcagaggctgcttctcccccgcaattggcgtggcaaggcggaggcggcatgttgtcccatgaccctccacagccagaacacttcttcgtggctctggagagcaacgcgcctctgcaacctacataccatactatggacatgaaccagcagccagagccagcgccgggcggctgctaccctcctgcgtggatggcttagccagcgctttggttccattgccttgagaagtgccgtgtccttcagagatcgctacgagtgcttttgcctggccccctttgctgcctgccatgcttaccgaactgttcaaataagaaataaccacatggtcctatataggttattgctgtctttatcttatgttgatcacggcctgctcagctgctttagcgccatgcaaaatggcttggcgatgcacgcttgaatgggtcgaactgcttatgttttgggagtataaatcgcttggaatgcattggcaaaaaaaaaaggcatgcctcttgcctccctctgtttttcaacacaaatggattagcctgcgctttggttccattcccttgacaagtgccgtgtccttcagagatcgctacgagtcctgctgctgcttttgcgaaccccccctttgctgcctgccatgcttaccgaactgttcaaataagaaataaccacatggtcctatataggttgctgttgtctttatcttctgttgatcacgtcctgctcagatgctttaaacgctatgcaaaatggcttagcgatgcatgctggaatgggctgaactgcttgtgttttgggagtataaatcgcttgggcgcttggcaataagtattattggcaaaaaaaaaaaaaa

SEQ ID NO: 2608 - DNA, 1115 bp, Zea mays
  unsure (1)..(1115): unsure at all n locations
  Clone ID: TF_ZmC2121_7
cgggaaaagggantatctctgaagcatatcagctcaagaaagaatcaaatgctacttgatcagctctttgacctcaaaagcaaggaacaagaattgctggatctcaataaagacctaaggaagcagctgcaagaaacaaggccagagaacgcgctccgtgtctcctgggaggaaggtgggcacagtggcgcaagtgggaatgttcttgatccttatcaggggctccttcagcacctggacaacgatccttccctgcagttcgggtaccatcatcaagcctacatggatcagctgaacaacgaggacctggtggacccgaatgagcatggtcgatctggatggatatgaaatgctctgatgacccaaaataaagttgatgcacagcagggattcaccctgcaggacgcgagactatgtattgaagctaagacctcgtgtgtgttgtgttgtgtgcgaagcttggaactttataaatcgttgtcatgcccatggctttctatttctttctcggagctgcgcaaaaccgtctccatttctgggcttctcaggacagctggacgcgggaagccggaaccaaaaactctgttccgcactcatctcctctgctccaggcttcaacatccgcgcaggagcgaaaacgcgtcccaaatccttttttatttgccagaaatttctgagccctaacccgcgtgcgcgtggtgcctgggccgaattattaggagatccataggctgtctcactccctctggccagcagcctgactgtgaactccagactccgatcgtctggtcctctagctctcatgtcatggactcatggaggctactactcggcatgttcctggcccaggaaggagtgagcgagctcgccagcccaataccaaatgcgccggcctacaaatccaaaagccccaatttagcgctgagtcctccaggcttcgagtcatcgctgccacgtgtgtatccctacccatcgcacatgggtcacttgccacatgtttggttcagttttttctgattcttttaataagaatttggctgtaaaaagaatcttgctgtgtaaaaatccaaaagcctcaatttagcgctgagtccttcgggcttggcccttgcgtg

SEQ ID NO: 2609 - DNA, 1322 bp, Zea mays
  Clone ID: TF_ZmC8761_2
cattgggtacctcgaggccggccggccgtttggcggtgctctctgtgccgccatgcagttgccctatctttttcctcaccccggcccgttccatcaccctcacggcaagccctgatcacatcatcctgcttgtctctccccaacctagctccatctctctttcatctactcttccatcgatcgatccatcgtactgcgtgaggatggggaggggaaagattgagatcaagaggatcgagaacaccaccagccgccaggtgaccttctgcaagcgcaggaatgggctgctgaagaaggcctacgagctctccatcctctgcgacgctgagatcgctttgatcgtcttctctacccgaggccgcctatatgaatattccagtaacagcgtaaggtcgacgatcgagaggtacaagaaagcctctgccagcacttctggaacagctccagtgacagatgtcaactctcttcaatactttcagcaagaagcggcaaaactgcgccagcagatacaaaccttgcagaattcaaacaggcacctgatgggtgaatctactggcaatatgactgcaaaggagctaaagggccttgaaagcaggcttgaaagaggcattgggaggatccggtccaaaaagcatgagctgctgctcgcggagatcgaatatatgcagaagagggaagcagatctgcacaatgaaaacatgttcctgcgggccaaggttgcggaggctgagcgagctctggagcaggaggcggcagaagaccagacgatgatggtgccggcggcggtccgcggggctacgacggagctgaaagcgctgccggcgtcgttcgacgcgagtggctactaccagtaccagcagcatcagcatgtggtggccgccgcctccgctgcctcctcgtcgcagtacgcggagcagccccagggccagcaggagtaccaccaccagactgccctccacctcggctaccacgtcaagatcgactccgccgccgacaaaggcttcctctaggcgctcgcgcgcatgcatgcgtgaagcgtctcatctcataatctgacgtacggacgatgggtgccggacagctaacgtaaggcacgttgtcatcgcctgaccatggagtggagtggttgttgctatatgtgcttctatatagagagaaaataaggggtagatccgcgagtacctatgtacgcaagctgtatcaaacaatattgtcatgagatatatagattgactatataaaaaaaaaaaaaaaaaaaaaaaaaaaaaaaaaaaaaaagaaaaaaaaaaaaaaaaaaaaagggcggacgatataaaaagaac

SEQ ID NO: 2610 - DNA, 1333 bp, Zea mays
  Clone ID: TF_ZmC1408_4
ctctcagccagcagcaagcatatagcccacaccacactgcccaaggccctccctctccctcgtcctcttctcccacgccggccgcctctaccagttctcatcctcctccgatctgcttaagactctagagcggtaccagaggcacatctatgcttcagctgatgctgcagtgccatctagcgatgagatgcagaataactatcaagaatgtgaagctgaaagcacgagttgaggttttacaacactcgcaaaggaatcttcttggtgaagaactggctccacttagcccaagtgaacttgaccagcttgagagtcaagtagacaagaccttgaagcaaataagatcaagaaagactcaggtgttacttgatgaactttgcgacttaaagagaaaggaacaaatgctgcaagacgctaacagggttctgaaaaggaagctgcacgagtttgaggcagaggctgcttctccccacaattggcgtggcaaggcggaggcggcatgttgtcccatgaccctccacagccagaacacttcttcgtggctctggagagcaacgcgcgaggccggcctacattccatactatggcgagttgaggttttacaacactcgcaaaggaatcttcttggtgaagaactggctccacttagcccaagtgaacttgaccagcttgagagtcaagtagacaagaccttgaagcaaataagatcaagaaagactcaggtgttacttgatgaactttgcgacttaaagagaaaggaacaaatgctgcaagacgctaacagggttctgaaaaggaagctgcacgagtttgaggcagaggctgcttctcccccacaattggcgtggcaaggcggaggcggcatgttgtcccatgaccctccacagccagaacacttcttcgtggctctggagagcaacgcgcctctgcaacctacataccatactatggacatgaaccagcagccagagccagcgccgggcggctgctaccctcctgcgtggatggcttagccagcgctttggttccattgccttgacaagtgccgtgtccttcagagatcgctacgagtcctgctgctgcttttgcgaaccccccctttgctgcctgccatgcttaccgaactgttcaaataagaaataaccacatggtcctatataggttgctgttgtctttatcttctgttgatcacgtcctgctcagatgctttaaacgctatgcaaaatggcttagcgatgcatgctggaatgggctgaactgcttgtgttttgggagtataaatcgcttgggcgcttggcaataagtattattggcatgcctcctctgtttttat

SEQ ID NO: 2611 - DNA, 625 bp, Zea mays
  unsure (1)..(625): unsure at all n locations
  Clone ID: TF_LIB4185-037-R1-L1-D9
aattcggcacgaggctcattggctagggcggggaaggaaattgcgggaggatgcgaagccattggtgtattgcatatggtggcaccaagcatgaggcaggaactgcattacttgcaagaaagtcacaagtacactgcattacttgcaagaaagtcacaagctcattccaatctggttctctaaactttggaggtctcttacacctaggcctgaaagctcctctcccattagttgcctacaacattggaaaagagtttctcacattatcttagaatccattgcaagatcatacttgtggctttcttgcaagttgtgcagttgttgcctcaagcttgctgcctccctttgccagagctatcgttaaaacaggaagtccctggaaaggaaaatcgtgatttggaaaggaaatccatcaacaaacctgagtcggaaggatgcttangaagcgggattcaatcaattatttctggggtggtctacagccaatgcatagtctctatctgtgtgtgtgtttgtgtttcccgtacactctgttcctttcgagaggcactcgtgcctgaaatatggtttagcttcaggcaatgaagtggacgtcggatggagatccgagtgtccacgatgatag

SEQ ID NO: 2612 - DNA, 1146 bp, Zea mays
  Clone ID: TF_ZmC53_6
aggccggccgggatgtatagtttaccctcgaggccggccggggctctcgtttgtactttctccctttgaggaaagagtttccccttttctgtgcttcaagttcttctggtatcgccagcatgggtaggggaaggattgagatcaagaggatcgagaacaacacgagccggcaggtcaccttctgcaagcgccgcaatgggctcctcaagacgtatgagctctccgtcctctgcgacgctgaggtggccctcatcgtcttctctagccgtggtcgcctctacgagtatgccaacaacagtgtcaaggctactattgagaggtacaagaaggcacacaccgttggctcttcctctgggccaccgctcctagagcacaatgcccagcaattctaccagcaagaatcagcaaaactgcgcaaccagatccagatgctgcaaaacactaacaggcacttggttggtgattccgtgggaaacctgtcactcaaggagctgaagcagctggagagccgccttgagaaaggcatctctaagatcagggccaggaagagtgagctgctggctgcggagatcagttacatggccgaaagggagactgagcttcagaatgaccacatgaccctcaggaccgagattgaggagggagagcaacagctgcagcaggtgaccgtggcacggtcagttgcagcagcagcagcagctgccaccaacttggagctgaacccattcttagagatggataccaaatgcttcttcactggcggccccttcgcaacgctggacatgaagtgctttctccccggcagcttgcagcagatgctggaggcacagcagcgccagatgctcgccaccgagctgaacctcggctaccaactggcgccgcctggttctgacgctgccgacaataaccctcatcatcagttctaaactggatgcatgcacgagaagcttttcaagcgaactgtgaacgatggaagctggctgttgcctctagatgttcttggcttccatgacctagcttattatggtgtgtattgttgttgccttttgtgtgtgattctccttgctactctactgatggagaactaaacctaatcgattggacataatgatcaaatgctacagatcctgtgatgctgtgatcagg

SEQ ID NO: 2613 - DNA, 1642 bp, Zea mays
  Clone ID: TF_ZmC1089_4
ccggccggggcaagtgatgtgcaaatctttatcctacacacttaatggaattactgccatgtgtggactaatctccgcttacggccgggagctttctcctgagtcctgcctgcgctcgcctcagctcctttcttccccgccccttggcttttgcttggttgcatcgggccggtcgagccggagaggaaaagctagctagcagctaccagctctcggccggcggtggtagtctgcctgcagctggggttagctgcaagggttgggagctagccatggggaggggtcgggtggagctgaagcggatcgagaacaagatcaaccgccaggtcaccttcgccaagcgccgcaacggcctgctcaagaaggcgtacgagctctccgtgctctgcgacgccgaagtcgcgctcatcatcttctccaaccgcggcaagctctacgagttctgcagcggacagagcattaccaaaacacttgagaggtatgaaaaaaacagttatggaggaccagatactgctgtacagaacaaggagaacgagttagtccagagcagtcgtaatgagtacctcaagctgaaagcgagggtggataatttacagaggactcagaggcaagttgactctacgtttgagttgtatcttcgcaacaaaaggaatttgcttggtgaagatctggggtcacttggtgtcaaagagcttgagcagcttgagaagcaacttgattcatccttaaggcacataagatccacaaggacacaacatatgcttgatcagctcactgatcttcagaggagggagcaaatgctgtgtgaagcaataagtgcctttagagaaagctggaggagaccagcaaccaggtgcatggccaagtgtgggagcacggtgccaacttactcggctacgagaggcactctcctcaacagcaggccccatcacatgttggcaatggtttgttctttcatcccctggaagctgcagcagagccaaccctgcagatcgggttcgctcctgagcatatgaataacttcatgccaacatggctaccctgaagatggatcttgaggcaaaggaaataaataaagatgcggtggcagcatcatactctatgcaagctaagagtgacagctgtgtttcagtcacatatatgatctagtctgtgtgtcaatgtgtcgaaaaacatgtctgtgattttgttatatgaatgtaacgcgcaatgaaacatacaggactagctgcttgcttgacgatgcgtttgcgtgtatccgtataaattaaaggctataagccacatcgtatatgcgtactgcacatgcgtgcattatctaaagggcgtgattgaaagcctgcatagattctaggttaggttccacgggtgcaggtagcgtaatgtttggatgcctgtattggtctttggaccaagctggattcatggaactagaaaaaaaatataaaatattttgccttttttctgcaagctaagagtcacaccgcacgcgtccgcacatatatgatctagtctgtgtgtcaatgtgtcgaaaaacatgtctgtgattttgttatatgaatgtaacgcgcaatgtaacatacaggactagctgcttgcttgaaaaaaaaaaaaaaaatatccgtataaattacaggctaag

SEQ ID NO: 2614 - DNA, 1340 bp, Zea mays
  Clone ID: TF_ZmC29979_1
cattgggtacctcgaggccggccaggatggcaatgcgattagatagtttttctacttcggatcgtgtgcccttttattaggtttcctttatgtgactggtagtgctaggttcatttcgagctcatgcgcatatatgccccatgctaacaataattccaatcaagattcaagttgtccacccactagcgccgttaaccctttgtttgttttgtttgcttcactactcctcgatcatgtaggaaaagatctcctagcagctagccagctacagcctacagcaagagatcggcgcgttgattgcttggatcgaccgaccggccggggtggtcgccatgggacgcgggaagatcgagatcaagcggatcgagaactcgacgaaccggcaggtcaccttctccaagcgccggggcgggctgctcaagaaggccaacgagctcgccgtgctgtgcgacgcgcgcgtcggcgtcgtcatcttctccagcaccggcaagatgttcgagtactgcagccctgcctgcagcttgagggagcttattgagcagtatcagcatgctaccaacagccacttcgaggagataaaccatgatcagcaaatactgctggagatgacaaggatgaagaacgagatggagaagctggagacgggcatcaggaggtacaccggcgacgacctctcctccctcaccctcgacgacgtcagcgacctcgagcagcaactcgagtactccgtctccaaagtccgtgcaaggaagcatcagctcctgaaccaacagcttgacaacctacgtcgcaaggaacaaatcttggaagaccagaacaccttcctgtaccgcatgatcaacgagaaccagcaggccgcgttgaccggcgaggtgaagctgggggagatggcgccgctggcgatgctgcagccaccgccggcgttcgcgcactcggccaccgcctactacggcggggagtcgtcgtcgtcgggcacggcgctgcagctgatgtcggcggcgccgcagctgcacgccgacgacctcgggttccggctacagccgacgcagcccaacctgcaggacccggcggcgccgtgcggcggcctccatggccacggcctgcagctgtgattaactgcgatcaattgggaggactgtcacatgctgcatcgaagagggactattattggagcacgcagtttcaaggtcgcaaagctcgtcatgcataatttcgatcatatgttagtttgtcatctgaatagttttatatatgcatgcaatgcaatcaattctctggataataattcaactattgttatgtatctaattaagataggttcgtagactaaaaaaaaaaat

SEQ ID NO: 2615 - DNA, 1227 bp, Zea mays
  Clone ID: TF_ZmC29979_2
ttgggtacctcgaggccggccgggaagcgccctcgaggtatgcagacatagcttagccctctctctctctctctctctagctacctccatcatctccatctctactcctctgattatttcaagaaaaaaaggaaaagatctcctagcagctagccagctacagcctacagcaagagatcggcgcgttgattgcttggatcgaccgaccggccggggtggtcgccatgggacgcgggaagatcgagatcaagcggatcgagaactcgacgaaccggcaggtcaccttctccaagcgccggggcgggctgctcaagaaggccaacgagctcgccgtgctgtgcgacgcgcgcgtcggcgtcgtcatcttctccagcaccggcaagatgttcgagtactgcagccctgcctgcagcttgagggagcttattgagcagtatcagcatgctaccaacagccacttcgaggagataaaccatgatcagcaaatactgctggagatgacaaggatgaagaacgagatggagaagctggagacgggcatcaggaggtacaccggcgacgacctctcctccctcaccctcgacgacgtcagcgacctcgagcagcaactcgagtactccgtctccaaagtccgtgcaaggaagcatcagctcctgaaccaacagcttgacaacctacgtcgcaaggaacaaatcttggaagaccagaacaccttcctgtaccgcatgatcaacgagaaccagcaggccgcgttgaccggcgaggtgaagctgggggagatggcgccgctggcgatgctgcagccaccgccggcgttcgcgcactcggccaccgcctactacggcggggagtcgtcgtcgtcgggcacggcgctgcagctgatgtcggcggcgccgcagctgcacgccgacgacctcgggttccggctacagccgacgcagcccaacctgcaggacccggcggcgccgtgcggcggcctccatggccacggcctgcagctgtgattaactgcgatcaattgggaggactgtcacatgctctgcatcgaagagggactattggagcacacacgcagtttcatggtcgcaaagcccgtcatgcataatttcgatcatatgttagtttgtcatctgaatagttttatatatgcatgcaatgcaatcaattctctggataataattcaactattgttatgtatctaataaaaaaaaaaaaaaaaagcggcc

SEQ ID NO: 2616 - DNA, 936 bp, Zea mays
  Clone ID: TF_ZmC2121_4
aagatcagccggcaggtgacgttcgccaagcgccggaacgggctgctcaagaaggcgtacgagctgtcggtgctctgcgacgccgaggtcgcccttatcatcttctccagccgcggccgcctcttcgagttctccacctcctcatgcatctacaagacgctggagcgataccgcagctgcagctttgcatccgaagcatcagctccactagaggctgaattaaataattatcaggagtacttgaagttaaagacaagagttgagttcttacaaacaactcagagaaatctacttggtgaggacttgggtccacttagcgtgaaggagttagagcaacttgagaaccaaattgagatatctctcaagcaaatccgatcatcaaagaaccagcagatgctcgaccagctctttgatctcaagcgcaaggaacaacaactgcaagatgctaacaaagatttaagaatgaagatagaagaaactagtgaagaaaatgtgctgcgactgtctagccaggatattgggtgtagtggatctagtgggcatggtgatgaagccaaccaagaacaccttcaacttgctcttgatccttcgctgcatatagggtatcaagcttacatggaccacctgaacaatgattaagttgcttctttgtgcgctgtgtgctctagtggccatggatcttctatatatgttggacgtaatgcttttgataaatcctctatatataaccatatcggtcctagctttatgcatgctactgtatgtactaaactaagaagccctacgacttctgttgaggaagaatgttctgacgatcatgactttttcttgctaaataataactactgtatctcattttgaattgatcgtctaatgaagagccatgcttttgtgagtacttaaaaaaaaaaaaaaaaaaaaaaaaaaaccacccaa

SEQ ID NO: 2617 - DNA, 823 bp, Zea mays
  Clone ID: TF_ZmC2121_5
tctttgagttctccagctcctcatgcatgtacaaaacactcgagagataccgcagctccaactactcacaagaagtaaaaactccactggacactgaaattaaataccaggattatctcaagttgaggacaagggttgaattcctccaaactacacagagaaatattcttggggaggatctgggtccacttagcatgaaggagctcgagcagctggaggaccaaatagagatatctctgaagcatatcagctcaagaaagaatcaaatgctacttgatcagctctttgacctcaaaagcaaggaacaagaattgctggatctcaataaagacctaaggaagcaggtaatgcaatggcctccaaacatctctgtgtatacatacctgcaagaaacaaggccagagaacgcgctccgtgtctcctgggaggaaggtgggcacagtggcgcaagtgggaatgttcttgatccttatcaggggctccttcagcacctggacaacgatccttccctgcagttcgggtaccatcatcaagcctacatggatcagctgaacaacgaggacctggtggacccgaatgagcatggtcgatctggatggatatgaaatgctctgatgacccaaaataaagttgatgcacagcagggattcaccctgcaggacgcgagactatgtattgaagctaagacctcgtgtgtgttgtgttgtgtgcgaagcttggaactttataaatcgttgtcatgccccaaaaaaaaaaaaaaaaaaaaaaagaaaaaaaaaaaaaaaaaaaaaaaaaaaaagtactctgcgttgttaccactgct

SEQ ID NO: 2618 - DNA, 1346 bp, Zea mays
  Clone ID: TF_ZmC2086_1
agcagtggtaacaacgcagagtacttttttttttttttttttttttttttttttggtttttttttttttttttttttttttttttttgtttttgtgtgtgtgtggggcattgggtacctcgaggcgggccggggctttcctctcgttatttagccctccgttcccgaccctcatcctccgctccagacttccagcatctccgctccggctgcgctctgccttgctttcctgctacctgctctagcgcgagcgagagaggtacggcggccgatctggcggcgcaggcggagggctcggccggggccggcaagtcggcgccgaacatggggaggggccgggtcgagctcaagcggatcgagaacaagatcaaccgccaggtcaccttcgccaagcgccgcaacggcctgctcaagaaggcgtacgagctctcggtgctctgcgacgccgaggtcgcgctcatcatcttctccaaccgcggcaagctctacgagttctccagcacgcagagcatgccaaaaacacttgaaaagtaccaaaaatgcagttttgcagggcctgaaacagcactccagaatagagagaatgagcaactgaaaagtagccgcaatgagtacctcaaactgaaggcacgtgttgataatttacagcggactcaaaggaacttgcttggtgaagatcttgagtcattaggcataaaagagctggagcacctggagaagcagctcgattcgtccttgaagcacataagatctacaaggacacaacacatggttgatcaactgacagaacttcagaaaaaagaacaaatgttttgtgaagcaaataagtgtcttcgaagaagactggaggagagcaaccaggttatatggcagcatgcgtgggagcaaagcgagcggcattctgaagtgcagccgcagcagctcaatggcaataacttcttccatcccctcgatggtgctggtgaacccacccttcagatagggtatccttcagaggcactgactagctcatgcatgaccaccttcctgcccccgtggttgccatgagatcgaactactgcgcaattccgaattaataagcatggccgcatgcagctgcctgtgctatacgttgtgcttggagtgtactttaaggttcttgcatggcaagtatgtgtgtaacatttgtgatgaacatggaaactatccacttaattctcgaataatcaatgaactgggtaagattgtaacatagtgctttatgcctgaaacattaatttaggctgcgtgtgaatgatggaggttaaaaaccgcgtgttcggccaaaaaaaaaaaaaaaatggtaacagcagtttagggttggtgagg

SEQ ID NO: 2619 - DNA, 1129 bp, Zea mays
  Clone ID: TF_ZmC2086_3
gggtacctcgaggccggccggggggaaagcagtggtaacaacgcagagtacgcgggggctccagacttccagcatctccgctccggctgcgctctgccttgctttcctgctacctgctctagcgcgagcgagagaggtacggcggccgatctggcggcgcaggcggagggctcggccggggccggcaagtcggcgccgaacatggggaggggccgggtcgagctcaagcggatcgagaacaagatcaaccgccaggtcaccttcgccaagcgccgcaacggcctgctcaagaaggcgtacgagctctcggtgctctgcgacgccgaggtcgcgctcatcatcttctccaaccgcggcaagctctacgagttctccagcacgcagagcatgccaaaaacacttgaaaagtaccaaaaatgcagttttgcagggcctgaaacagcactccagaatagagagaatgagcaactgaaaagtagccgcaatgagtacctcaaactgaaggcacgtgttgataatttacagcggactcaaaggaacttgcttggtgaagatcttgagtcattaggcataaaagagctggagcacctggagaagcagctcgattcgtccttgaagcacataagatctacaaggacacaacacatggttgatcaactgacagaacttcagaaaaaagaacaaatgttttgtgaagcaaataagtgtcttcgaagaagactggaggagagcaaccaggttatatggcagcatgcgtgggagcaaagcgagcggcattctgaagtgcagccgcagcagctcaatggcaataacttcttccatcccctcgatggtgctggtgaacccacccttcagatagggtatccttcagaggcactgactagctcatgcatgaccaccttcctgcccccgtggttgccatgagatcgaactactgcgcaattccgaattaataagcatggccgcatgcagctgcctgtgctatacgttgtgcttggagtgtacttcaaggttcttgcatgacaaagtatgtgtgtaacatttgtgatgaacatggaaactatccacttaattctcgaataatcaatgaactgggtaagattggaaaaaaaaaaaaaaaaaagcggcc

SEQ ID NO: 2620 - DNA, 773 bp, Zea mays
  Clone ID: TF_LIB4742-134-Q1-K1-B1
cattgggtacctcgaggccggccggggctagagatgacaagctgagatctccagcatggggaggggaaggattgagatcaagaggatcgagaacaacacgagccggcaggtcaccttctgcaagcgccgcaatgggctcctcaagaaggcgtacgagctctccgtcctctgcgacgccgaggtggcgctcgtcgtcttctccagccgcggacgcctctacgagtacgccaacaacagtgtgaaggctacgatcgagaggtacaagaaggcacacgccgttggctcttcctctggccccccactcttagagcacaatgcccagcaattctaccagcaagaatccgtaaaactgcgcaaccagatccagatgctgcaaaacactaacaggcacttggttggtgactctgtgggaaacttgtcactcaaagagctgaagcagctggagagccgccttgagaaaggcatctctaagatcagggccaggaagagtgagctgctggctgccgagatcaattacatggccaaaagggagactgagcttcagaatgaccacatgaacctcaggaccaagattgaggagggagagcaacagctgcagcaggtgactgtggcccagtctgtcgcagcagcagctgccaccgacgtggagctgaatccgttcttggagatggataccaaatgcttctttcctggcggcccctcgcgacactggacatgaagtgcttcttccccgcagcttgcagatgctggaggcacagcagcgccagatgctt

SEQ ID NO: 2621 - DNA, 803 bp, Zea mays
  Clone ID: TF_LIB5026-042-Q1-XP2-F5
gccggccgggtcggaaaaaaaaaaacaagagagaaaggacatagccgcacaaattgaagagaccctcgccaacctcgaagctagtccaaactagtgggaggttgagtgcagggatcgatcgaggaagacgagacaagctgctgcttcttcttcttctgccgccgcagccgccgccagctcagctctagctcaccacgagttactagccaatctgacaccgatccaccgccggcaccgaccgtccatggcgcggggcaaggtgcagcttcggcgcgtcgagaacccggtgcaccggcaggtgacattctgcaagcgccgcgcggggctgctcaagaaggcccgggagctctccgtcctctgcgacgccagcgtcggcatcatcgtcttctccgcgcacggcaagctctacgacctcgccaccaccgggaccatggaggagctgatcgagaggtacaaggctgccagcgccggagaagcgacgaccgacggctgcggcaggcacaacaggatggaccccaaacatgaaaccacggtgctgcaacaggaaatcaacctgcttcagaagggactaagcattgttttgggtaggtacatccacgggaacagggcgaacgagcacatgaatgttgacgaactgaacgccctagagaggtacttggaagatatggatgtacaacacccgctctgcaaagatgcagataatggctcaagagatccaagcactgaaaagcaaggaaggcatggtgaaagctgccaacgagattctccaggaaaagatagtagagcagagtagtttgcttgac

SEQ ID NO: 2622 - DNA, 819 bp, Zea mays
  unsure (1)..(819): unsure at all n locations
  Clone ID: TF_LIB4742-069-R1-K1-D8
attgggtccctcgaggccggccggggctcgacgtagctcccttttccttgtttgcttattgcaagtctctgcaagaacctgctagagaggaacaagccttccagtgttgaagaagctgctggaagaacgaagagatgagctttctcttgaaggaaaaagagatgatcattgctgctggtatccccagcatgggtaggggaaggattgagatcaagaggatcgagaacaacacgagccggcaggtcaccttctgcaagcgccgcaatgggctcctcaagaaggcgtatgagctctccgtcctctgcgacgctgaggtggccctcatcgtcttctctagccgtggtcgcctctacgagtatgccaacaacagtgtcaaggctactattgagaggtacaagaaggcacacaccgttggctcttcctctgggccaccgctcctagagcacaatgcccagcaattctaccagcaagaatcagcaaaactgcgcaaccagatccagatgctgcaaaacactaacaggcacttggttggtgattccgtgggaaacctgtcactcaaggagctgaagcagctggagagccgccttgagaaaggcatctctaagatcagggccaggaagagtgagctgctggctgcggagatcagttacatggccaaaagggagactgagcttcagaatgaccacatgaccctcaggaccaagattgaggagggagacaacagctgcagcaggtgaccgtggcacggtcagttgcagcagcagcagcagctgccaccaacttggagctgaacccattcntagagatggataccaaatg

SEQ ID NO: 2623 - DNA, 1485 bp, Zea mays
  unsure (1)..(1485): unsure at all n locations
  Clone ID: TF_ZmC53_1
ggtccgnaaaaaaaaaaaaaaaaaaaaaaaaaaaaaaaaaaaaaaaaaaaaaaaaaaaaaaaaaaaaaaaaaaaaaaaaaaaaaaaaaaaaaaaaaaaaaaaaaacgaaaaaaaaaaaaaaaaaaaataagaaaaacaaagacaggaccggccggcctactgatcgctatcgctctcttgtgtactatatcccttcgaggaaatggatgcccttttatggacttcttcattgttaccctcgaggccggccggcctgctatattaaaccactttaccccccctctcgcggacgctcgacgcagctcccttttccttgcttgcttattgcaagtctctgcaagaacctgctagagaggaacaagctggtatcgtcgccagcatgggtagaggaaggattgagatcaagaggatcgagaacaacacgagccggcaggtcaccttctgcaagcgccgcaatgggctcctcaagaaggcgtacgagctctccgtcctctgcgacgctgaggtggccctcatcgtcttctctagccgtggtcgcctctacgagtatgccaacaacagtgtcaaggctactgttgagaggtacaagaaggcacacaccgttggctcttcctctgggcccccgctcctagagcacaatgcccagcaattctaccagcaagaatcagcaaaactgcgcaaccagatccagatgctgcaaaacactaacaggcacttggttggtgactccgtgggaaacctgtcactcaaggagctgaagcagctggagagccgccttgagaaaggcatctctaagatcagggccaggaagagtgagctgctggctgcggagatcagttacatggccaaaagggagactgagcttcagaatgaccacatgaccctcaggaccaagattgaggagggagagcaacagctgcagcaggtgaccgtggcacggtcagttgcagcagcagcagctgccaccaacttggagctgaacccattcttggagatggataccaaatgcttcttcactggcggccccttcgcgacgctggacatgaagtgctttctccccggcagcttgcagcagatgctggaggcacagcagcgccagatgctcgccaccgagctgaacctcggctaccaactggcgccgcctggttctgacgctgccaacaataaccctcatcatcagttctaaactggatgcatgtacgagaagcttttcaagcgaactgtgaacggtggaagctggctgttgcctctagatgttcttggcttccatgacctagcttattgcggtgtgtattgttgttgccttttgtgtgtgattctccttgtgctactctacctgatggagaactaaacctaatcgattggacataatgatcaaatgctacagatcctgtgaggctgtgatcaggttaaggcaaaacaagtatactgattgcttaaatgggtttacgagtgacgacaatgctatttgttgcttctattacc

SEQ ID NO: 2624 - DNA, 1253 bp, Zea mays
  Clone ID: TF_ZmC53_3
gctagattttgttgcttcctttcgcatctgatctttttatctcttctgagtgctccgcaaagccttccagtgttgaagaagctgctggaagaacgaagagatgagctttctcttgaaggaaaaagagatgatcattgctgctggtatcgccagcatgggtaggggaaggattgagatcaagaggatcgagaacaacacgagccggcaggtcaccttctgcaagcgccgcaatgggctcctcaagaaggcgtatgagctctccgtcctctgcgacgctgaggtggccctcatcgtcttctctagccgtggtcgcctctacgagtatgccaacaacagtgtcaaggctactattgagaggtacaagaaggcacacaccgttggctcttcctctgggccaccgctcctagagcacaatgcccagcaattctaccagcaagaatcagcaaaactgcgcaaccagatccagatgctgcaaaacactaacaggcacttggttggtgattccgtgggaaacctgtcactcaaggagctgaagcagctggagagccgccttgagaaaggcatctctaagatcagggccaggaagagtgagctgctggctgcggagatcagttacatggccaaaagggagactgagcttcagaatgaccacatgaccctcaggaccaagattgaggagggagagcaacagctgcagcaggtgaccgtggcacggtcagttgcagcagcagcagcagctaccaccaacttggagctgaacccattcttagagatggataccaaatgcttcttcactggcggccccttcgcaacgctggacatgaagtgctttctccccggcagcttgcagcagatgctggaggcacagcagcgccagatgctcgccaccgagctgaacctcggctaccaactggcgccgcctggttctgacgctgccgacaataaccctcatcatcagttctaaactggatgcatgcacgagaagcttttcaagcgaactgtgaacgatggaagctggctgttgcctctagatgttcttggcttccatgacctagcttattatggtgtgtattgttgttgccttttgtgtgtgattctccttgctactctactgatggagaactaaacctaatcgattggacataatgatcaaatgctacagatcctgtgatgctgtgatcaggttaaggcaaaacatgtatactgattgcttaaatgggtttacgagtgacgacaatgctatttgttgcttc

SEQ ID NO: 2625 - DNA, 833 bp, Zea mays
  Clone ID: TF_ZmC53_8
ccggccggcctgctattaaggcactttacccgcaccctctcggtgacgctcgacgcagctcccttttccttgtttgcttattgcaagtctctgcaagaacctgctagagaggaacaagctggtatcgccagcatgggtaggggaaggattgagatcaagaggatcgagaacaacacgagccggcaggtcaccttctgcaagcgccgcaatgggctcctcaagaaggcgtatgagctctccgtcctctgcgacgctgaggtggccctcatcgtcttctctagccgtggtcgcctctacgagtatgccaacaacagtgtcaaggctactattgagaggtacaagaaggcacacaccgttggctcttcctctgggccaccgctcctagagcacaatgcccagcaattctaccagcaagaatcagcaaaactgcgcaaccagatccagatgctgcaaaacactaacaggcacttggttggtgattccgtgggaaacctgtcactcaaggagctgaagcagctggagagccgccttgagaaaggcatctctaagatcagggccaggaagagtgagctgctggctgcggagatcagttacatggccaaaagggagactgagcttcagaatgaccacatgaccctcaggaccaagattgaggagggagagcaacagctgcagcaggtgaccgtggcacggtcagttgcagcagcagcagcagctgccaccaacttggagctgacccattcttagagatggataccaaatgcttcttcactggcggcccttcgcacgctggacatgaagtgctttctccccggcagcttgcagcagatgct

SEQ ID NO: 2626 - DNA, 870 bp, Zea mays
  Clone ID: TF_ZmC53_9
cggggccgggatagttcctgctaactgatcgagatcgctctcgtttgtactttctccctttgaggaaatagttccccttttatgtgcttcaagttcttctggtatcgtcgccagcatgggtagaggaaggattgagatcaagaggatcgagaacaacacgagccggcaggtcaccttctgcaagcgccgcaatgggctcctcaagaaggcgtacgagctctccgtcctctgcgacgctgaggtggccctcatcgtcttctctagccgtggtcgcctctacgagtatgccaacaacagtgtcaaggctactgttgagaggtacaagaaggcacacaccgttggctcttcctctgggcccccgctcctagagcacaatgcccagcaattctaccagcaagaatcagcaaaactgcgcaaccagatccagatgctgcaaaacactaacaggcacttggttggtgactccgtgggaaacctgtcactcaaggagctgaagcagctggagagccgccttgagaaaggcatctctaagatcagggccaggaagagtgagctgctggctgcggagatcagttacatggccaaaagggagactgagcttcagaatgaccacatgaccctcaggaccaagattgaggagggagagcaacagctgcagcaggtgaccgtggcacggtcagttgcagcagcagcagctgccaccaacttggagctgaacccattcttggagatggataccaaatgcttcttcactggcggccccttcgcgacgctggacatgaagtgctttctccccggcagcttgcagcagatgctgggagcacagcagcgccagatgctcgccaccgagctgaacctcggctaccaact

SEQ ID NO: 2627 - DNA, 1034 bp, Zea mays
  Clone ID: TF_13274179
taaagatccacaccacttgagcagcagctagctcaagggaaggagaaggctggaagtggaaagaagtgggttcttgcttgagctgagctcttgctgcccttggatctgtttgggagtggagaacgcagtatggggcgcggcaagatcaagatcaagaggatcgagaactctaccaaccggcaggtgaccttctccaagcgccgggccggactggtcaagaaggcacgggagatcggcgtgctctgcgacaccgaggtcggcgtcgtcatcttctccagcggcggcaagctctacgactactgctcgcccaggacctcgctgtccaggatcttggagaagtaccagaccaactccgggaagatactgtggggtgagaagcacaagaacctgagtgcagagatcgacagagtcaagaaggagaacgacaacatgcagattcagctcaggcatctgaaaggcgaggacctgaactccctacagcacagggagctgatcgctattgaagagggcctccagaatgggcagaccaacatgcgcgagaagcagatggactactggaggatgcacaagacgaatggaaagatgctggaggacgaacacaagatactgacttttaggatgcaccaacaggctgttgatctgagcggccgcatgagggagctggagatcggataccatcaggtccagcacgacagggatttcatttcccagatgccgttcaccttccgggtgcagcccaaccaccccaacctgcaggaagacgagtagctacagcctgctggatagtgatctgcatgccgctctgaactgaagctcctcacctgcagcttctatctcgcgtttcatcattcagcgttagctgggtatctttcttttcatggcaccctggatgaagtctgtcagtacgatgtggtctttgtcttgtgcgtctcttttgactttgctgggctgatttccgtgcatgtagtgatgatgacagcgttaattaagactgaaatgtgcaattaagttgtagcccgtgcttgcttggtctc

SEQ ID NO: 2628 - DNA, 1925 bp, Zea mays
  unsure (1)..(1925): unsure at all n locations
  Clone ID: TF_ZmC37457_1
aatccttactatattaggcataaaattaggtgtagtttatttatttactggtactacttctttagtcataattaggtgtactagcagctacgccctgacggagacaagcacacacaatagaaaagagcgccctcgtgctcagagtgctcgcctttagtttcgtggctactatatactagttgcgacgatttttattttctttctcttctgggctatcattagcacggccatttaggggtaatgagcancggccaataaacaaagccctgagatgcatggggtagccaatcgggtgtcgccgtgcgcgcgcgcgcgcgtctggcctcctccttccctttccttgctaaataaagcaagtagcagataggggaaagtctgctcgcaagttgcatccgccctgcgccaagaaaagccatcgttcttcccacaaacgcacacatagaagcatcattcccctctcggctagcttcctcctctctccctcctcttcgtcttcctctttccttctcccttgggaaacctgctgcctttgagctttcttcttcgagtgctcccaccagatctcctcctccttaccttctttggcacgttcggcggcgcgcgcggagaaagatagatcccgccatcgtcgtcgccgtccttgcttccgatcggagggccacaaccacaacctctcgctccttagcgtgcgcgcgcgagccagggtcaagaagagagctagctataggccggagatcgatggggaggggaaagatcgtgatccgcaggatcgataactccacgagccggcaggtgaccttctccaagcgccggaacgggatcttcaagaaggccaaggagctcgccatcctctgcgatgcggaggtcggcctcgtcatcttctccagcaccggccgcctctacgagtactctagcaccagcatgaaatcagttatagatcggtacggcaaggccaaggaagagcagcaagtcgtcgcaaatcccaactcggagcttaagttttggcaaagggaggcagcaagcttgagacaacaactgcacaacttgcaagaaaattatcggcagttgacgggagatgatctttctgggctgaatgtcaaagaactgcagtccctggagaatcaattggaaacaagcctgcgtggtgtccgcgcaaagaaggaccatctcttgatagatgagattcacgatttgaatcgaaaggcaagtttatttcaccaagaaaatacagacttgtacaataagatcaacctgattcgccaagaaaatgatgagttacataaaaagatctatgagactgaaggaccaagtggagttaatcgggagtcaccgactccattcaactttgcagtagtagaaaccagagatgttccagtgcaacttgaactcagcacactgccacaacaaaataacattgagccatctactgctcctaagctaggattgcaattaattccatgaagaagagtaaaactgccgtcttatgatgctgaaggaaactatttattgtgaagagatgatactcagagaaagacatatttgtggcagggagatttgagatatgaacttataaatgtaatgcaaataattttcagactggaatggggtcgtggaattcagaggatgattgctttctagttgcatttgatgtttgatgagacttttctcatgtgaaacgtttattaaaacttcaaaatggtgcagatgttgctactacccttgttaggcttgtataaatatttgactttgtgtactagcattacgaaaacagaaaagaagacagacagccgtgataggggacaatgatgcgatctaggagtacaaacagagtctagtttccactcagttgagttttatattgctctcaagcgttatcaagggtttagtaggatacagatataattaagatacagtggttaaatcgc

SEQ ID NO: 2629 - DNA, 1082 bp, Zea mays
  Clone ID: TF_ZmC1460_4
gggagggtagaatatagtgcaaggaggagcctcgccaacctcgaagctagtccaaactagtgggaggttgtgtgcagtgatcgatcgaggaagacgagaagcttttcgctgctagctaccgcccgcccggtgtctgtcgatctgtgacgaccgccaagccgaagccgaaggcagcagcagtcgtcaagttcatcgatctcggcatcgacgaccgcccggccgtccatggcgcgaggcaaggtgcagctgcggcgcatcgagaacccggtgcaccggcaggtgaccttctgcaagcgccgcgccgggctgctcaagaaggcccgggagctctccgtcctctgcgacgcccacgtcggcatcatcgtcttctccgcgcacggcaagctctacgacctcgccaccaccgggaccatggaagagctgatcgagaggtacaggactgccagcagcggagaagcagccgacggctgcggcgacaataacagaatggacgcaaagcaagaaaccatggtgctgcaacaggaaatcaacctgcttcagaaaggcctgaggtacatctatgggaacagaacaaatgaacacatgaatgttgaagaactgaatgctctagagaggtacttggagatatggatgtacaacatccgctctgcaaagatgcagataatgattcaagagatacaagcactgaaaagcaaggaaggcatgctgcaagctgctaacgaagttcttcaggagaagatagtagaacagagtagtttgcttgacgtaggcatggttgtagcggatcaacagaacgggcattttagtacagtcccactggtagaagagatgatcagtaacccgctgactatactgagtggctattctaactgtaggggctattccttctgacactgtcataacaccctggggggctaactctctgttgattactactactagtgtgtaatactaccagttaataaagcttgtgtaacttgccatatagccagccctccaggagtgccctggtattgtatctgtgtgctttttttttttacttcccataataaagaactgttgaggagctctcatgttgtgct

SEQ ID NO: 2630 - DNA, 1203 bp, Zea mays
  Clone ID: TF_ZmC17645_1
gctcggccctcggctccttaaggcttcatcttctcaagttccggccgtccatcgccgccgccggcctcggccggctcagttcctgcctgccagccaaaaattccacaccacccacccagagactgaggcgcgcggtggtgaagacgtgatcgaaagtcgaaaccaaaacgatatatagatggggcgcgggcgcggcaaggtggaggtgcgtcgcatcgagaacagcgtgagccggcaggtgaccttctcgaagcggcggcgcgggctggcgaagaaggcgcgggagctggccgtgctctgcgacgccgacgtcgcgctgctcgtcttctccgacaagggcaggctccacgacttcgccgcgcacggcagcatggagcgaatccttggccgatacgagaggtacttgctatgtgaagatagggacgatgtaacccaagactaccctgaagaatcgcaggggaacatgagctatgaccacatcaagttgaggtccaaactcgaagctataaagaagagccaaaggaatctcatgggggagcagctcgagtccctgacgttcagagaggtacagcagcttgagcaccggatagacagcgctctgaggaacgtcagatccaggaaggaccacatcttgctcaactcgatccaggagctccggaacaaggaaacttttctgatggaacaaaatggcattctagagaaggagaaggctgcagtgggggcatcatcatccctgcacaccaccaccagcaccgcagcagcttcttccacggcagcggcggcggcggcccttccaaacctgaacatctgtcccgacgactccgacgagccaggaatggcggcggcggcggggatcaggttgccgtggtggatgctccagccatctgccgtcagccaacggcaggaacagcactgaactgcttgtcttctcagatgatccacgctgcttgttccagctcgattctagtttctattagaactcgattcagctaaggcgggaatttgtgatctttctattgatctgccgttcttattggttgctagatcgattttatccttgtccttcttagtatctgaacctctgctgtgtcgtttgtcgtagttcttggtcgcaaaagctccggtttgcgtctctagtttggtttggttcctgtaaaatctgctgttgtccttcaatgagctgtgcaggccagttagatgatt

SEQ ID NO: 2631 - DNA, 1420 bp, Zea mays
  Clone ID: TF_ZmC1089_1
aagctatcgcgagacgcctgcggttggcctttcgcctctagggctccggctcgcccaccaccttaccccccaatccctttcgtctcgccctttttaaccaatcccctctccacgactccaccgccggccgggacccatctcctgagtcctgcctgcgctcgcctctcctttcttccccgccccttggcttttgcttggttgcatcgggccggtcgagccggagaggaaaagctagctagcagctaccagctctcggccggcggtggtagtctgcctgcagctggggttagctgcaagggttgggagccatggggaggggtcgggtggagctgaagcggatcgagaacaagatcaaccgccaggtcaccttcgccaagcgccgcaacggcctgctcaagaaggcgtacgagctctccgtgctctgcgacgccgaagtcgcgctcatcatcttctccaaccgcggcaagctctacgagttctgcagcggacagagcattaccaaaacacttgagaggtatgaaaaaaacagttatggaggaccagatactgctgtacagaacaaggagaacgagttagtccagagcagtcgtaatgagtacctcaagctgaaagcgagggtggataatttacagaggactcagaggaatttgcttggtgaagatctggggtcacttggtgtcaaagagcttgagcagcttgagaagcaacttgattcatccttaaggcacataagatccacaaggacacaacatatgcttgatcagctcactgatcttcagaggagggagcaaatgctgtgtgaagcaaataagtgccttagaagaaagctggaggagaccagcaaccaggtgcatggccaagtgtgggagcacggtgccaacttactcggctacgagaggcactctcctcaacagcaggccccatcacatgttggcaatggtttgttctttcatcccctggaagctgcagcagagccaaccctgcagatcgggttcgctcctgagcatatgaataacttcatgccaacatggctaccctgaagatggatcttgaggcaaaggaaataaataaagatgcggtggcagcatcatactctatgcaagctaagagtgacagctgtgtttcagtcacatatatgatctagtctgtgtgtcaatgtgtcgaaaaacatgtctgtgattttgttatatgaatgtaacgcgcaatgaaacatgcaggactagttgcttttgcttgtcgatgcgtttgcgtgtatccgtataaattaaaggctataagccacatcgtatatgcgtactgcacatgcgtgcatatctgttctgtgtaaaaaaaacaccccagaggattacgcgtgcaaggcctaaaaaaaaaaaaaaaaaaaaaaaaaaaaaaaaaaaaaatataaaaaaccccccccccc

SEQ ID NO: 2632 - DNA, 717 bp, Zea mays
  Clone ID: TF_ZmC2134_9
ggctggaagtggaaagaagtgggttcttgcttgagctgagctcttgctgcccttggatctgtttgggagtggagaacgcagtatggggcgcgggaagatcaagatcaagaggatcgagaactctaccaaccggcaggtgaccttctccaagcgccgggccggactggtcaagaaggcacgggagatcggcgtgctctgcgacgccgaggtcggcgtcgtcatcttctccagcggcggcaagctctacgactactgctcgcccaggacctcgctgtccaggatcttggagaagtaccagaccaactccgggaagatactgtggggtgagaaacacaagaacctgagtgcagagatcgacagagtcaagaaggagaacgacaacatgcagattcagctcaggccagtgtttctgattcagatctgctcccgatctctagctgcgcgcgcacttcactagctcgctgttcgtgtgtgttcttgttgtgattgtgctagcgtgtccgtcacttgtgatggtgcaggcatctgaaaggcgaggacctgaactccctacagcacagggagctgatcgctattgaagagggcctccagaatgggcagaccaacatgcgcgagaagcagatggactactggaggatgcacaagacgaatggaaagatgctggaggacgaacacaagatactgacttttaggatgcaccaacaggctgttgatctg

SEQ ID NO: 2633 - DNA, 1257 bp, Zea mays
  Clone ID: TF_ZmC1808_1
actaaagggaacaaaagctggagctccaccgcggtgcgccgctctagaactagtggatcccccgggctgcaggaattcggcacgagctcttccctgcagatcgagaggcactgcacaccaccaccaccaccaccaccaccaccacaccatgctcaacatgatgactgatctgagctgcgggccgtcgtccaaggtcaaggagcaggtggcggcggcgccgacgggctccggcgacaggcaggggcaggggagaggcaagatcgagatcaagcgcatcgagaacacgacgagccggcaggtgaccttctgcaagcgccgcaacggcctgctcaagaaggcgtacgagctctcggtgctctgcgacgccgaggtcgcgctcgtcgtcttctccagccgcggccgcctctacgagtacgccaacaacagtgtgaagtccaccattgagaggtacaagaaggccaacagtgactcctccaactctggcacagttgcagaagtcaatgcccagtactaccagcaggagtcctccaagctgcgacagatgatccacagcttgcaaaacgcaaacactaggaacatagtgggagattccatccacaccatgggcctcagggatcttaaacaaatggagggcaagctggagaaagccataatcaagattagagctagaaagaatgagctgctatacgctgaagttgactatatgcaaaaaagggagatggatctgcagactgacaacatgtacctgaggagcaagatcgctgagagtaatgaaacggggcagccggcgatgcacatgacgatgggagcgccgccgacgagcgagtacgaccacatggcccctttcgactcgagaaactttctgcaagtgagcatgcctcagcactactcccatcagctgcaacctacaaccctccagctcggatgatgaaatcagcgctatacctggcggcgcccggcccccaatcgagatagatcacgcatgcagttatatcatgtgccaaatcgagatctcaagtaactctacgtacgtttgcttaattattaataattgtgattagtgcaactgttagggtatatatatttgtgagtgccaccactgtgtgcgtgcatttgtacgtgtgaatttagctgttgcatctactactattgtaccctccggccaggccatatcatcagaaacgcgggtttatttacgcatacttatatatatatataatttgtgtgctttaatagattgaaaatagtatgttgggc

SEQ ID NO: 2634 - DNA, 897 bp, Zea mays
  Clone ID: TF_ZmC2121_3
cccacgcgtccggatttctaaagtaggtcagtggtactggattcttttttttaaaaaaaagtatatgctattttctattttctttagaactaggtttgtcggtttgtttggcaaacacgatctatgtactgacctgaactttgtgtattccctttttccaagcaggatctcacgttgacttactctgtttcgttgcgctctttcttttcaaaactagattaactaccaggattatctcaagttgaggacaagggtcgaattcctccaaactacacaaagaaatattcttggcgaggatctgggtccgcttagcatgaaggagctagagcagctggaggaccaaatagagatatctctgaagcatatcagctcaagaaagaatcaaatgctacttgaccagctatttgatctcaaaagcaaggaacaagaattgctggatctcaataaagacctaaggaagcagctgcaagaaacaaggccagagaacgcgctccgtgtctcctgggaggaaggtgggcacagtggcgcaagtgggaatgttcttgatccttatcaggggctccttcagcacctggacaacgatccttccctgcagttcgggtaccatcatcaagcctacatggatcagctgaacaacgaggacctggtggacccgaatgagcatggtcgatctggatggatatgaaatgctctgatgaccccaaataaagttgatgcacagcagggattcaccctgcaggacgcgagactatgtattgaggctaagacctcgtgtgtgttgtgttgtgtgcgaagcttggaactttataaatcgttgtcatgcccatggctttctaaaaaaaaaaaaaaaaaaaaaaaaaaaaaaaaaaaaaaaaaaagggcggccgtcgcgttcta

SEQ ID NO: 2635 - DNA, 1488 bp, Zea mays
  unsure (1)..(1488): unsure at all n locations
  Clone ID: TF_ZmC371_4
atacccttctcgtctccgcccagcagcaacggcacccaccgaatccgcccctccctctttccgttccgcctcgttgcgctcgctctcgctgcgccgcccgccccacctcacggagctcacggcaacaccggcagggaaggaaaaggaaagccgaggaggcgaggagagagagatacaaggcaggcagccaggcacaggcagcccgcggctggctacggggccaaaacccttacgcgcgacgcggccccctcctcttcttctctctcccaccaccgccctccccttgccatttttgccgcaggagccgccgccatccgatccggaagagggaggaggggggagggaggaggatctgtgtcccgattcgattggagctctcgtccccggcggtccaggatggtgcggggcaagacgcagatgaagcggatagagaacccggccagtcgccaggtcaccttctccaagcgccgcaacggcctgctcaagaaggcgttcgagctctccgtcctctgcgacgccgaggtcgcgctcgtcgtcttctccccgcgcggcaagctctacgaattcgccagcggaagtgcccagaaaacaattgaacgttatagaacgtacacaaaggataatgtcagcaacaagacagcacatcaggacattgagcaagtaaaagctgatgctgagggcctggcaaagaaactggaagcacttgaagcttacaaaagaaaacttttgggtgagaggttggaagaatgctcctttgaagaactgcacagtttggaagtgaaactcgaaaagagccttcattgcatcaggggaagaaagactcagctgctggaggagcaactccataagctgaaggagaaggagatgaatctgcgcaagagcaacgaagatttacgtgaaaaggtaatgggggcgaaaacattttgcagacgctgcactgcggcaagcggcatgccaacaacccaagaaaacagtgcaagaagcagccgccgccgccgccgcctatgctgatggctcctccgccgcctccagcgccggcagccatcgatcacacggggccgaaagatgtcgggatggacgtggagacggagctgtacataggattgcccggcagagattaccgctcaaacaacaaagacatgactgcacagtagctgtcaggtcaggtcaggtcaggccagccagcagtgcagagaataatcttagatctgtggtgcggagaactggagatgcaagccaagcccaagccaatcaacatgataaggatcatgagtgtcgcgtcgtgttttacaaacctgtccaccgtccgtcaaaggcacatgcgccagaacgtccgtcagagaacacttaccccctcatctccctctattagctagctgctccggcctgctcatgtcgaaaccttctgttcaagtatgttctcctcctgatgaaaaaaaaaaaaaaaaaaaaaaaaaaaagtcnaacaaaaactaaaaaaactcaaaa

SEQ ID NO: 2636 - DNA, 753 bp, Zea mays
  unsure (1)..(753): unsure at all n locations
  Clone ID: TF_LIB4172-011-Q1-L1-C9
gacgcctgcaggttccggtccggaattcccgggtcgacccacgcgtccgcccacgcgtccggttagaagccgtctgcatgcctgcttgctggctgggagcgcacgaagctgtggaggaggacaactgaggagcgtggagcgttcccgaaccccaaagagaatcccaatgtgagacctgagtgtttgagaccaaaccatccctgggcagtctgatgagaggaagccgcctgcctagtcccctttctcgggctctacttggttgatcgcggaacccagaagagaactagtcaactcaagttttaagccatggcccaaagactgatgacattcagagacgtggccgtagacttctctccagaggagtgggagtgtctgagcctggaccagaggagtttatacagagatgtgatgctggagagctacagccacctcgtctcagtgggactttttgtttatcggccacatctgttctccttgttggaaaaaggacaagacccctggatgattttgagggatgagacaaggggaccttatccagacatagatttcagttctcagaacaagaagttcctgggaaaacctagcacatatgaagaattatctcaaagggaaatgaaggaatattttagaaaacgcagtcttgaaagatttctgtttttggagatggnctgngatggcanaaatcagtttcaaacgcatcanaatcaggaatattctaagcanctggcagtcgcctatgaaaaagtgctcact

SEQ ID NO: 2637 - DNA, 605 bp, Zea mays
  Clone ID: TF_LIB3597-024-Q1-K6-D9
gttggccgcgccctgtgccgctgaggaccgcagcaggcgccactaccgtttcttattctgagagcccaaggaagcggacagcgcggctttgggagacggaggttgcgcagcagagcggcgcgacagagggcgcttcggcctcgaaggcggatcaggttgcagcgctgagaccactgctcaccaactgcagattccagctcacctgcacctgagcttcctggtctacagaagagccagtctgaggcctcggaagatctccgccctttgtccagggcagaccgagatggccacggcccaggaattgttgaccttcagggatgtgtgtgtggacttcaccctggaggagtggcagcaactggactcggctcagaagaacctctacagggatgtcatgctggagaactacagccacctggtgtccgtgggatacctaggtgccaaaccagatgtggtcctcagattgggacgaggagaggaggccggcatgacagagggagagacgccaacgtggaagtatccagatgtggcccctctggatgtgaacaggactgggctactttggaaagaagcttcctgccagcatccagatgcctatgatgagaaaa

SEQ ID NO: 2638 - DNA, 624 bp, Zea mays
  unsure (1)..(624): unsure at all n locations
  Clone ID: TF_LIB4073-009-Q6-K2-F5
ctcgcgtacgcgcaggttcctgccgacccggaagcggatctcgcggggctactggcgctctcggcccacacaatatgacctcggggaggatgcgaggaagatgaactgtgatgatccacttcttcttaatgaatgactgacttacctgagaaagaaactcagaggaagaggaaagaaagaagaggagggaatggctctttctcagggactgtttacattcaaggatgtggccatagaattctctcaagaggagtgggagtgcctggaccctgcccagagggccttgtacagggacgtgatgttggagaactacaggaacctgctttctctcgatgaggataacatccctccagaagatgatatttctgttggatttacaagcaagggattatcaccaaaggaaaataataaagaggaattataccatctggtgatattagaaagaaaggaaagccatggcatcaacaattttgacctcaaggaagtctgggaaaatatgcctaagtttgacagcctgtgggactatgatgtaaaaaattacanaggaaatgccttgacctgtaacaaanatctcactcacanganagatcaacnnacatataaatncctcatacatttctcttt

SEQ ID NO: 2639 - DNA, 366 bp, Zea mays
  Clone ID: TF_ZmC180138_1
ggcttcgcttgtgtcaactgtatttttagggctcctgcgccgaaacgaacacttaggcttttggtgttctggcgcgggaaggtccgatctttccggtcggaggaagaaatttcaggggaagaagcctgaagaagaatggccagctccagttctcaacacacggtctgtgggttagtgacatttagggatgtggctgttgacttctctcaggaggagtgggcctgcctggatgctactcagaaggtcctctacagggacacgatgttggagacctacagccacctcgtcacagtggtggggagttgcctttccaagccacacctgatcaccttactagagcaggagaaagagccctggatggctgtg

SEQ ID NO: 2640 - DNA, 549 bp, Zea mays
  unsure (1)..(549): unsure at all n locations
  Clone ID: TF_LIB3595-024-Q1-N6-E1
cagtgaagatttcactacttgatgcacaacagtttcattgaaaatgacagcaattccatggttcgctgatatgatccagctagcacagcagaggataccaaaatagagtagtagtctagtatcctcggggcatagatggaataacatacatcacgcggttttaagtagaaacaggaggcttcccaactctctcgcctccaaacccccactgtttaaatggcgtggtcaggaggaggaatcagaggccggttgttctggctgtgcttcagcagcgcgcttgacggacgcgcacttgatcaagtggttgtagcttcccttctccttgaaaagttgggagaaatggtgtttgcagtagaggatgccctccaaggctgcatagttggaaggtgtaatcgcgcagcccccgtgggagcatttgaagcatgacttatggtaggacttctcttcgactgttacctgcaatgtttttaacagccatgcattagaaccactgtccacanaaagagttttgataactcaaggcaatcaagaaaggataattagacgaat

SEQ ID NO: 2641 - DNA, 350 bp, Zea mays
  Clone ID: TF_LIB148-007-Q1-E1-H9
ggcgcgtgcgtgcgttcgtgcatccaccgccacgcttctgggcaccatgtctttcaccggcacgcacgccacgtgtccggcgtgcgactggaccgtccacgtcatcgccgtcttcatggccgtcggttgcatctaccatatcggatgcttcaagtgcagctaatgcatcggggtcctctcgatgtgcaggtcctcctccatggacggtgtgctgtactgcacgacctagttcgatcagctcttcaaagagactgggaccttctcctacaccttcacgccatctgccatgtcaatagatgacggtgaagtgacatggtgctcaaccaatctgtcgtctgcattttctggtt

SEQ ID NO: 2642 - DNA, 282 bp, Zea mays
  Clone ID: TF_LIB3066-032-Q1-K1-B12
tgcgacaagaccgtccacttgatcaacctcctcacagccgacggcgttacctaccatatgacatgcttcaagtgcagccactgcaaagggatcctctacatgagcagctactattgcatggacggcgcgctgaactgcacgacccacttcgagcagatcttcgtggacaccgacagcttctccaagatcttcacgccaagtggccagtcttcagacatgggtgtactggcctgaggccccagcatgctatcatctgcgtagtctggtactcacgagaagtgt

SEQ ID NO: 2643 - DNA, 2361 bp, Zea mays
  Clone ID: TF_ZmC1365_1
aaagttttcgttttgctataacgaaagatggccgggctcatcgttgcttttgcgcgtagcagggatgactgactgggaggaggagggagacgagaacgtgatgccgtgccgcccgcccgcccgcccgcccttgggctcgcttcaccttcaattcttttctttctgtcgcggccagcgccttcgcatcgcaccacgccgctttattctctaagaaccccgtcctctccattccatctcctcctccgtccatcgtgcagatcttgcttcttcgtcttctcctcttcctcctcctcctcctgaccaccctcctgctcagctcgtcgtacgtagacatcgcgatcgccgacgtcgatcggtctcgccaattaagctcttgcttcctccgttcttttctggttcggtttgttcggtgctctccctctacgtgggctgcgtctatatatatgctgtgttggcgccagctgcataaatggcgtactcctcgcggacttgtggtcggtgcaacaaccacgagaggagatccggtttcatgaagtggctctgcaatttcctcaaggggccgaagcccggcgagccgaaccgccggcggccccaggtgacggccggagaggaggaggacgcgctttggcaccaacgaccagttcgaccgaagaatgatccacctagaaatgacaacgaagaagtggaccgtgcaattgcagagtctctcacagaggacgtcagaacccccaaagagaaaacccgcaagggagacaaggacgacgaagatcttgcgagggccatacaggacagcctcaacatgaacccttacacgccttacaacccctatgctccctctcacgcccaacctagagggcacaggctgtgcgcaggctgcaagcatgagatagggcatggccattacttgagctgcatggggatttactggcaccctcagtgcttccgctgcaactcctgcggccaccctatccgtgagaccgagttcacattgctgagtacagatccataccacaagctgtgctacaaggagctgcaccatccgaaatgcgacgtctgccttcagtttattccaacgaacaggagtggcctgatagagtacagagcccacccgttctggggccagaagtattgcccttcgcatgagcacgacaggacgccacgttgctgcagctgtgagaaaatggagccaaggaacacaaagtacatgtcactgggagacggccgcagcctgtgcatggaatgcctggggtctgcggtcatggacaccggtgaatgccagcccctgtaccattctatcagagactactacgaggggatgaacatgaagctggaccagcagatacccatgctcttggttgagcggcaagcgcttaacgaagccatggaaggagagagtagaggcccacaccacatgcctgagacaaggggcctgtgtctgtcggaggagcagactgtgagcagtatacttaggaggcccagaattggtggaaaccggttactggacatgagaactcagccacaaaaactgactaggagatgtgaagttactgcaatacttgtcttgtatggcctccccaggctactaacaggatccatcctcgcccatgagctgatgcacgggtggttgcgcctcaaaggttaccgaaacctaaacgcggaggttgaagaaggaatatgccaggtcatgtcttacctgtggctggaatcagagattcttccgtcgtcctcaaggcacgcgcagccttcatcttcctacgcctcgtcctcctcttcgtcttactcttatccaccgacatcgtccaagaaaggtgggatatctcataccgaaaagaagctgggcgagttcttcatgcaccagattgcccatgacacgtcgacggcgtatggtgacggtttcagaactgcgtatgctgccgtcaacaagtatggccttcgccaaacactgaaccacatacgcctaacaggaggactccctgtataataagagagagagagagagagagagagagagagagagagagagagagagagagagagagagagagagaagacaaaatgtccatgccagacgcaacacaaagatcacatggatatcaaaggttatatacatattgagatgaagttgctggctatggaagcatggtgattcagtttcggtgaccttgagttttcaaagaggtcctgtcggagtaaatcaggaaaaagagctgtatttgctcggattaataggaactggcgatgccatgtgtaataagatcgccaaaaagcacacactaatgtaatgctctgttactcacactaatataatgaagtgtatacttatgtgtctgcagattttcaaccataaaaaaaaacccacaa

SEQ ID NO: 2644 - DNA, 679 bp, Zea mays
  Clone ID: TF_LIB4742-051-R1-K1-H8
cattgggtacctcgaggccggccgggattacactccttcgagggagtgctctactgcaggcctcacttcgaccagctcttcaagaggaccgggagcttggacaagagcttccaaggaaccccaaaggttgtcaagccagaaagaaacgttgggaatgagaatgctactaaagtctcgagcgccttcgctggcaccagggagaagtgtgttggatgcagcaagacagtctatccaattgagagggttactgtgaacaacactatgtaccacaagagctgcttcaagtgctgccatggaggatgcaccatcagcccttctaactacatcgcgcacgagggtaagctctactgcaagcaccaccacgtccagctgatcaaggagaagggcaacttcagccagctcgagaatgaccacgagaagacatcgcaggctgggtcgctggaggacgacgaagaagaagagtattaattaatcgctgagcaaaaatacataccaccagaagaataattaatcttccttcttgcactatatatttctgtgtcatttcagtcctaccaatggagatcatgtgcgttcagagaactacgatatcgttttcttgtatctgcatgtaaaccacgtctactaccttgatttcaccatttgcattgatcagatggtaatctagacttcttgttgg

SEQ ID NO: 2645 - DNA, 438 bp, Zea mays
  Clone ID: TF_LIB3061-021-Q1-K1-D2
cagaggcatcttctgaccaatgaaaatggtgaaaccaggtagagtatctgactcaaagataacaacgtttacatgcagatacaagacaacaatatcattgttctctgaacacacatgacctccattgtgacccagcctgtgatgtcttctcgtggtcattctcaagctggctgaagttccccttctccttgatcagctggatgtggtggtgcttgcagtacagcttcccctcgtgcgcaatgtagttagaagggctgatggtgcaccctccatggcagcacttgaagcagctcttgtggtacatagtgttgttaacagtgacctggatgcttaaccggttgtcaagtgaagaaggctcaaactaccggaagaatgattgagatggttgaacacagaatcttaccctctcagttggatagactgtcttgctgcatccaa

SEQ ID NO: 2646 - DNA, 1773 bp, Zea mays
  Clone ID: TF_ZmC7269_1
ccggccgggactcccgcccgatacatttctcgtacatcgctctcgctctcgctgtctctcatggtgcccaggcgattggtcgaggccggccgggacgccacagctacagagtcagaaagaaatgcctgtggctgtggacttgtggtggacgcggacggacctggtggtgtcatgtgttgtgtgcagcgactcgacagagagagaggcggcgctgtagaaagaaagggtcttgtgtgctgcgtcctccctctatttaggcgattggttgccccgagcccggccgggctcccgcccgatacatttctcgtacatcgctctcgctctcgctctctctcctgctgtccacgaccgaccaaaggcgccgggcacagactcttcgtcggatccaagagaagctcgcgccctccccgaccatggtctcggcggataccatccgtacggctatcggcgtcatcggcaatggcaccgcccttgtgctcttcctctccccggtgcccaccttcgtgggcatctggaagaagcgtgcggtggagcagtactcgccgatcccgtacgtggcgacgctgctgaactgcatgatgtgggtgctgtacgggctgccgctggtgcacccgcacagcatgctggtggtgaccatcaacggcaccggcatgctcatccagctcacctacgtggcgctcttcatcctctgctccgcgggggcggtgcgccgcagggtcgtgctcctgttcgccgccgaggtcgccttcgtcgtcgccttggccgcgctggtgctcaccctggcgcacacgcacgagcgcaggtccatgctcgtcggcatcgtctccgtcttcttcggcaccggcatgtacgctgcgccgctctcggtcatgaaattggtgatccagacaaagagcgtggaatacatgcccctgttcctgtccctggcctccctcgccaacagcatctgctggaccgcctacgcgctcatccgcttcgacctctacatcaccatccccaacgggctgggcgtgctgttcgcgctgggtcagctgggcctgtacgccatgttctacaagaacaccaagcagatcatggaggcacgcaggcgcaaggccgaccagcagtcaaccatgatggaggtggtcaccgacgcctccgccacgccgcccccgccacccaacaacaacaacggcggcggcggcggcaacggctactgatcgcatgcaacaggaaggacgacgacgatcgaccagcaagcaaaagccacatacatagcgtcgtcgtagcgccccgccgcccaccgaatgcttgttgttccgattccgatctccccaaggggacgatgctccgttgcattctctgcatatcctactaatataacgaaacgaaacaaaacaaaagacagcacaaaagggcttgctgggtttcacatttaccatatataatcgtctgctgctgtcttgttgctggtatcgctgctataaaaaaaaaaaaaaaaaagcggcctgatggacacaggcaacttctccaagaaattccaaggtggaggtggagcatcttcaaacaagaacgacccggcaaaggctccgagcaagctgtcatctgcattctctggaactcaagacaaatgcgcagcctgccagaagaccgtgtatccattggagaagatgacgctggaaggcgagtcgtaccacaagggctgctttcaatgctcgcacgggggctgcatcctgaacacctcctcctacgccgcgctcaacgggatcctctactgcaagatccatttcccgc

SEQ ID NO: 2647 - DNA, 1695 bp, Zea mays
  Clone ID: TF_ZmC383_1
gctggcttctcctccccctcttaaccagtcctcctcgggttagggttccttagggttttgtggaggggcgatggcggcggctgatgtggagtaccgttgcttcgtcggcgggcttgcctgggccaccagcaacgagtcgctgagagatgccttcgcctcctacggcgagatcctcgactccaaggtcatcaccgaccgggagacggggaggtcccgcggcttcagcttcgttaccttctcctccgagaactccatgctcgactctatcgacaacatgaacggcaaggtagctcgacagccgtaacatcaccgttaaccaggcccaggcccgtgacggcggctgtagcagtgcgtcacctacgattctcagtgctcagtgtacctgagctgcattgtagtattcagtgtgacacattgggtacctcgaggccggccggcgtgctgtgctgttcctgtgcctccatccttccgattcccatccccgtcgtcgcttgtttgctgctgccttttcctttccgccgcggcaaaagtgaggagcgcgcgggcgagttgggggagacgaacccgtcataactccctcgcttaatcgcgtctcgtgctcctgcctcctgcgtatataaacgcggcaatcgggacgcccggggaggcgttcgttctccttctccatcccacgcgcgcgcaggccaaggccggatcggcggcctctcagatctcgccggccgccgtgagacagagaccgaagggggggttgaccggtgctcgggaggaagatgtttagcgggacgcagcagaagtgcaaggtgtgcaccaagacggtgtacccgatggaccagctctccaccgacggcgtcgtcttccaccgctcctgcttcaagtgccagcactgcaagtctaccctctcactgagcaactattcctcgttcgaaggagtgccgtactgcaagacccatttcgagcagctgttcaaggagaccgggagttacaacaagagcttccaatcacagtcacctgcaaagattactccggaaaagttggcccctgagctgaccagatcaccaagcaaagctgcaaggatgttttcaggaacacaagacaagtgtgcgacttgtggtaaaactgcgtatcctcttgagaaggtaacagtcgaagagaagtcctaccataagtcatgcttcaaatgctcccacgggggctgcgcgattacaccttccaactatgcagccttggagggcatcctctactgcaaacaccatttctcccaacttttcaaggagaagggaagctacaaccacttgatcaagtgcgcgtccgtcaagcgcgctgctgaagcacagccagaacaaccggcctctgattcctcctcctgaccacgccatttaaacagtgggggtttggaggcgagagagttgggaagcctcctgtttctacttaaaaccgcgtgatgtatgttattccatctatgccccgaggatactagactactactctattttggtatcctctgctgtgctagctggatcatatcagcgaaccatggaattgctgtcattttcaatgaaactgttgtgcatcaagtagtgaaatcttcactgaaatcgggtatcttgcctttattgatcaatatattatctatgttgttttgttgtctttaaaaaaaaaaaaaaaaaaagccctcgcgactagttctcctcgtgc

SEQ ID NO: 2648 - DNA, 815 bp, Zea mays
  Clone ID: TF_LIB4744-028-R1-K1-C9
ccggcctgatcaatgataatgtggagctgccgttggttcatgaatggtaatgtaaatggtaacaataaaaaaaaaaaattcaacccacagttcccatataggcagccatcggctacacagcctcgcctccgtaagcagagtgtgtcgttggaagagagacgacggcggccatggcgacctccttccaggggacgaccaccaagtgcaccgcctgcgacaagacggtgtaccttgtggacaagctcaccgccgacaaccgcatctaccacaaggcctgcttccgctgccaccactgcaagggcaccctcaagctcgccaactacaactccttcgagggagtgctctactgcaggcctcacttcgaccagctgttcaagaggacagggagcttggacaagagcttcgaaggaactccgaaggttgtcaagccagaaagaaacgttgggaatgagaatgctactaaagtctcaagcgcctttgctggcaccagagagaaatgtgttggatgcagcaagacagtctatccaactgagagggtcactgttaataacactatgtaccacaagagctgcttcaagtgctgccatggagggtgcaccatcagcccttctaactacattgcgcacgaggggaagctgtactgcaagcaccaccacatccagctgatcaaggagaaagggaacttcagccagcttgagaatgaccacgagaagacatcacagggctgggtcactggaggaggatgaacaagagtattgatcactgagcacaccacagatgaataatgaatcctcttgcatttgcctagagcacta

SEQ ID NO: 2649 - DNA, 1562 bp, Zea mays
  Clone ID: TF_ZmC844_1
gattctgtgttcaaccatctcaatcattcttccggtagtttgagctttcttcacttgacaacctgtcacagaaatctctcactcaagaatcacataaatacaagattcccagattaaataaatcgttatatccatgaagacagcaactgctgcatttctaagctgaaagtttcaattattgatatttttgcctaaagataaggaaaggtgacaggaatactgtacatgaatatcagtatgctgattgcaactcaccggttaagcatcggaccctcgagccggccgggatcatgtggtatggcggcattcgtgcaggaccgacccccacctccacgcctcgtatgctctctctctctccttcccatggctgatgcctgacacggtgacacccccaacattctccctcactagctagctgtgtcctgcctacctagcggtatcaatacccggctgcagctcaccaccaccaccaaccaaccaacccacagttcccatataggcagccatcggctacacagcctcgcctccgtaagcagagtgtgtcgttgcggaggcaggaagagagacgacggcggccatggcgacctccttccaggggacgaccaccaagtgcaccgcctgcgacaagacggtgtaccttgtggacaagctcaccgccgacaaccgcatctaccacaaggcctgcttccgctgccaccactgcaagggcaccctcaagctcgccaactacaactccttcgagggagtgctctactgcaggcctcacttcgaccagctgttcaagaggacagggagcttggacaagagcttcgaaggaactcccaaggttgtcaagccagaaagaaacgttgggaatgagaatgctactaaagtctcaagcgcctttgctggcaccagagagaaatgtgttggatgcagcaagacagtctatccaactgagagggtcactgttaataacactatgtaccacaagagctgcttcaagtgctgccatggagggtgcaccatcagcccttctaactacattgcgcacgaggggaagctgtactgcaagcaccaccacatccagctgatcaaggagaaggggaacttcagccagcttgagaatgaccacgagaagacatcacaggctgggtcactggaggaggatgaacaagagtattgatcactgagcacaaccacagatgaataatgaatcctcttgcatttgcctagagcactatgtatttctgtggcgtggttcgatttcagttttaccaatggaggtcatgtgtgttcagagaacaatgatattgttgtcttgtatctgcatgtaaacgttgttatctttgagtcagatactctacctggtttcaccaaataaaaaaaaaagaagatgcctctgcacctacaagacacttgactgtaaccaaaggaggtcatgtgtgttcggagaacaatgatattgttgtcttgtatctggatggaaacgttgttaatgataatgtagatttgtatctgggtgtaaacctggggctcttggtccatcttttgtttaagatgatgtttggcaaaaaaaaaaa

SEQ ID NO: 2650 - DNA, 1558 bp, Zea mays
  Clone ID: TF_ZmC844_3
aacagatcacaaaaaaaaacttgtttttcatgaggcatttgactagatccgggctgtttatggttttaaacatgtttcatatcacccatccagttgacaccattcatgttttgttctttatgaacaactggcactagatgatgctcatcatgattgcatattatttggcaaaatgctactaaagtctcaagcgcctttgctggcaccaaaaaaaaatgtgttggatgcagcaagacagtttatccaactgagagggtaaaattctgtgttcaaccatttaaatcatttttccggtagtttgagcctttttcacttgacaaccggttaagcatccaggtcactgttaacaacactttgtaccacaagagctgcttcaagtgctgccatggagggtcccccccccacctccccctcgtctgctccctcgcgcctgccctcggctgctggccgctccccgacccgctgtcccccccgacaggctccctcgccagctgcctcggtcctgccttccttgcccccccttcccccggctgcacctcaccgcccccgccgtcctcccgcccccccgcccccatatggcgggccgctcgcggcaggccgtcgacccagtagccacagttcgcatataggcagccatcagctgtacggcctcgcgtccgtaagcagatcctgtcgttggaagagagacgacggcggccatggcgacctccttccaggggacgaccaccaagtgcaccgcctgcgacaagacggtgtaccttgtggacaagctcaccgccgacaaccgcatctaccacaaggcctgcttccgctgccaccactgcaagggcaccctcaagctcgccaactacaactccttcgagggagtgctctactgcaggcctcacttcgaccagctgttcaagaggacagggagcttggacaagagcttcgaaggaactccgaaggttgtcaagccagaaagaaacgttgggaatgagaatgctactaaagtctcaagcgcctttgctggcaccagagagaaatgtgttggatgcagcaagacagtctatccaactgagagggtcactgttaacaacactatgtaccacaagagctgcttcaagtgctgccatggagggtgcaccatcagcccttctaactacattgcgcacgaggggaagctgtactgcaagcaccaccacatccagctgatcaaggagaaggggaacttcagccagcttgagaatgaccacgagaagacatcacaggctgggtcactggaggaggatgaacaagagtattgatcactgagcacaaccacagatgaataatgaatcctcttgcatttgcctagagcactatgtatttctgcggcgtggttcgatttcagttttaccaatggaggtcatgtgtgttcagagaacaatgatattgttgtcttgtatctgcatgtaaacgttgttatctttgagtcagatactctacctggtttcaccattttcattggtcagaagatgcctctgcacctacaagacacagaactgttaaaaacaaaaaaaaaaaaaaaaaagcggcc

SEQ ID NO: 2651 - DNA, 2322 bp, Zea mays
  Clone ID: TF_ZmC13606_1
cgattgggtacctcgaggccggccggggtgggcacctgacgccgcgaccccggccccgagctggctttgccggccaatcggctcgcccgcgccgaccaccgcgcctcttcccctcgccgagatcgcctgaaaaggcaagcgaggccagcccgatccccctccccgcccccctcaagaaccaaaaaagggtgtcatttcgtcctaggatcgcagctcgagctcggtcgctctcgctcacctcgctccctactcgcctgctttccacttcctccgcgctcccgatttcctctccgattccttcgccgactcgtttcttcttggcaattcgttgcgcgggccatcgccccgacggcacctgggtacatcagctacaggacgggacaggtccctcttctaggagaggcttcgccagccgcctcccgcccccgtcactacgggcgccgtggagcggagatccatccggacttggatcggtctcgtcgcgtgattacagctcttgttttattgccagtttgagcaatatgggttggctgaccaagttttttagaggctcaacccacaatatctcggaagagcagtatcacagcaggcctgcagaagacacagcatggaatgaaccctctagctctcctgttgtgactgacatcctttcagagtttaacaatgaggatattgaccgtgctatagcgctctctctatcggaagaggagcaaagaaaggaaaaggcaatagataaggatatgcatttggaggaggatgagcaacttgcaagagctatccaggaaagtttgaatgttgagtcaccccctcgcagaaatggcagtgccaatggtggtactatgtatcatccgcctcgcgaaactggcaatgcatatcagccacctcgtgaaaatggcagtgccaatggtggaaatgcatatcacccattaccatttatgttctcatctggattcagagcatgcgcaggatgtcacagagagattggtcacgggcgttttctcagttgcatgggagctgtttggcatccggaatgttttcgttgccatgcatgtagtcaacctatatatgactatgagttctccatgtccgggaatcatccataccataaaacttgctacaaggagcagtttcacccgaaatgtgatgtctgcaagcagttcattcctacaaatatgaatggccttattgaatatagggcacatcctttctgggtacaaaaatactgtccttcacatgaaatggatggtactccgaggtgctgtagttgtgaaagaatggagccaagggaatcaaaatatgtattactggatgatggtcgtaagctctgcctggagtgccttgattccgcagtgatggatacaaacgactgccagcctttgtatcttgaaattcaggaattttacgaaggactgaatatgaaagtggaacagcaggttcctctgcttctggtcgagcgacaagctttgaatgaagccatggaaggagagaaggctggtcaccaccatcttcctgaaacaagaggactatgcttatcagaagaacagactgttagcacgatactgagaccaagaatggctggaaacaaaattatgggaatgataacagagccatataggctgacacggcgatgtgaagtgactgcaattcttattctgtatggtctcccaagattgttgacaggttcaattttagctcatgagatgatgcatgcatggttgcggcttaaaggataccggacactgagcccagacgtagaagagggcatttgccaagttcttgctcacatgtggatcgagtcagagatcatggccggatcaggcagtagtgccgcatcgtcatcctcaggatcttcgtcatccacatcatcgaaaaagggcgggcggtcccagtttgagcacaggcttggggactttttcaagcatcagatcgagacggatacttccatggcctacggagatggtttcagaactgggaatcgagccgttcttcattacggcttgaagcgcacccttgagcatatccggctaactgggacctttccattttgaagtagcatggattcatattttgggaaagcttatattatatacatgattttcttccagagttccattacaaccaaagagataaattgtaaaaaaacattctttccagaatccagagatataatatctatgaaggccaaaatgaagtattaaatgattgagatcgatggtcagtctgcccaatcattttgtattctgatcaaactctggaatgaaacaatggcaatctttttttatatggtgtcagtttcaataaataccagtacgattttacagt

SEQ ID NO: 2652 - DNA, 1602 bp, Zea mays
  Clone ID: TF_ZmC844_2
ccggccgggaatgccggccgctggggagtttggagcatacctctagcagcctcgcctctgtagctaggcattgtagtagaggggggaaagaagaagactagaagaagagggccatggcgacctccttccagggaaccaccaccaagtgcaccgcctgcgacaagacggtgtacctcgtcgacaagctcaccgcgacaaccgcgtctaccacaaggcctgcttccgctgccaccactgcaagggcacactcaagctcgccaattacaactccttcgagggagtgctctactgcaggcctcacttcgaccagctcttcaagaggaccgggagcttggacaagagtttccaaggtgttatctgttatcatcgcgcgtttcttaattttccctttgcaacgcaacatatatacatagatccgggtgtggttcttgcatgcttgcgtgtcctcacctcacctggctgcaaaattaatgcttcaggaaccccaaaggttgtcaagccagaaagaaacgttgggaatgaggtacgcaaacagcttaggattcatgttgcattttttttcactttcagtccagagtagagcagaatatgtatatatactaaatctaggcccatgagaaggggtacgggccgggaggccggccgctggggagtctggagcatacctctagcagcctcgcctctgtagctaggcattgtagtagaggggggaaagaagaagactagaagaaaagggccatggcgacctccttccagggaaccaccaccaagtgcaccgcctgcgacaagacggtgtacctcgtcgacaagctcaccgccgacaaccgcgtctaccacaaggcctgcttccgctgccaccactgcaagggcacactcaagctcgccaactacaactccttcgacggagtgctctactgcaggcctcacttcgaccagctcttcaagaggaccgggagcttggacaagagcttccaaggaaccccaaaggttgtcaagccagaaagaaacgttgggaatgagaatgctactaaagtctcgagcgccttcgctggcaccagggagaagtgtgtcggatgcagcaagacagtctatccaattgagagggttactgtgaacaacaccatgtaccacaagtgctgcttcaagtgctgccatggaggatgcaccatcagcccttctaactacatcgcgcacgaggggaagctctactgcaagcaccaccacgtccagctgatcaaggagaaagggaacttcagccagctcgagaatgaccacgagaagacatcgcaggctgggtcgctggaggacgacgaagaagaagagtattaattaatcgctgagcaaaaatacataccaccagaagaataattaatcttccttcttgcactatatatttctgtgccatttcagtcttaccaatggagatcatatgtgcgttcagagaacaatgatatcgttttcttgtatctgcatgtaaaccacgtctactacctgatttcaccatttgcattgatcaggtggtaatctagaccctgtttggaacttttccgtgttgctgtattttcaatgaaaatatcagtaccaaacagagcatacaagaag

SEQ ID NO: 2653 - DNA, 735 bp, Zea mays
  Clone ID: TF_ZmC2245_1
cggctcgagatacaacaacacatccatcacttttttatttgttttttcttttcattttaaaaaacttcaaaacaaacaactcaaaatgtcagctggaaagtgtgctgcttgtggcaagactgcctacccattggaaagtgtcaccgctttggaacaaaccttccacaagatttgcttcaagtgtgatgtgtgcaagggaacactcaacttgaagaactacaagggtgttaacggaaaggtttactgctttacccacacccctgtggacagaagctcaactggttccgactccgtcaccacaaagactgctatgcaggcaccaaagaagcaagctgagggtctcggaaccgctcaaaagggaactggtgagaagccaaacgttggcctcgacaccgtcactgttcaaaccgccatcaaggcaccaaaggctgttgctgagggtcttggtaccgctcaaaagggaactggtgagaagccaaccgttggcactgaatccgttcacttgaagagtgctttgagcgcaccaaaggtcagagccgagaacatcggaactgtccacaagggtgactctatcactgctccacaacaagcctccttcgacgtcgaacacccagcaccagcttccgaagaagcccaccaccacgaagaggcagaaccagtctcttacgatgaacaaccagctgacgagtaaggagtgacctcgttgtatatttagcgaccatacgacataaacag

SEQ ID NO: 2654 - DNA, 1652 bp, Zea mays
  unsure (1)..(1652): unsure at all n locations
  Clone ID: TF_ZmC1143_1
gaattgcgagcgagcgttcctctccgtccgcttccgccgtttgcccgtcgatcagttgttggctgccggccgggtactaccgcctgcacgagcagcggctagccacagcccacagacagacgacgtcaggtcttggcaggtgtgcaagcagacagagctcgctcggtcgcgtccgcccacgcgtccgcccacgcgtccgcccacgcgccgcccactcctcagggcgattgggttcctcgaggccggccggggagaagcgatcgggattgtgggcgagtgcgtgcgttcgtgcagccacagacaggcgtccgggcaccatgtctttcaccggcacgcaggacaagtgcacggcgtgcgacaagaccgtccacttcatcgacctcctcacggccgacggcgccatctaccataagacatgcttcaagtgcagccactgcaaaggggtcctctcgatgtgcagctactcctccatggacggtgtgctgtactgcaagacccacttcgagcagctcttcaaggagaccgggagcttctccaagaacttcacgccaggtggcaagtcatcagacaagggtgaactgacaagggccccaagcaagctgtcgtctgcattttctggtacccaggataagtgcgcagcatgccagaaaacagtgtacccgctggagaagttaactctggaaggcgagtcctaccacaagagctgcttcaagtgctcgcacggcggctgcatcctgaccacctcctcttatgccgcgctcaacggcgtcttgtactgcaagatccacttcgcgcagctgttcatggagaaggggagctacaaccacatgaacaagaagagcccgtcccaggaggttctgccggacgtggctgacgaggagcaaccgccggaaccagcgccaccgcaagatgagaaagaagaggacaactaggatcggagcgaccaacaaccacccatgcatatatatcacgcagactgaagtctacacgtttgccatatttctttacgacgacgacgcttctttattccctcctcccttttttttcctcttaatctctctgtgaacccggtttatcatcacgctgcaatcaagtgtgccagatgccttcgttacgtctgaggctcacgacaatggaaaatctgacatggacctgtcttagcctcgcggaaaaaaattgtaactttgtaagcagagccacttctttgaatatatgatcctaacaacgctgcccttaatacttaaaaaaaaaaaaaaaaaaaaaacccgcggccnnncatggggatcttggccaatgctaggcgcatactaaaagccttgccttgacaaccttttatggnnnnnnngccagatccctannnnnacaagccgcaggcgcggcttaaccgaaaagacccgcgcaatcggcgtagaacgtacaaaaattacccgccccccaaaaaaaaaaaaagccgtacgtgtctatctcccctaaaaaaacgaaccctgccccagtaagtagtcgtcccaagaaaatgttctttttttgtaaccttggcagcttggttcagtctgggattgtaacaagggcatgttgaattccctgttatgtattaaaaggctttggattcattcccattaaataagtaaatgggtgtaaacatttggcttccc

SEQ ID NO: 2655 - DNA, 644 bp, Zea mays
  Clone ID: TF_LIB5116-029-A1-PF1-H8
atctcatctctctttccccccttcgcttccttcgtttgtgcgttgcctttttctttccgccgcggcaactgtgagccggcccgatcgagccgcccacctcgagaggccgccataattcattccatccattcatccgctgccgcgtatataagcgcggccattggggcgctcgtggggtgctcgtcacatcgtcgcatcaggcgcgcgcaggccgagatcagatcggcggcggcggcggcgacggcgacggcgaccatgttcagcgggacgcagcagaagtgcaaggtgtgcaccaagacggtgtaccccatggaccagctctccaccgacggcgccgtcttccaccgcgcctgcttcaagtgccaccactgcaagtccaccctctcctttagcagctactcctcctttgaaggagtgccctactgcaagccccatttcgcgcagctgttcaaggagaccgggagctacaacaagagcttccagtcacaatcccccgcgaaatctgcgacggagaagttgactcctgagctgaccagatcgccaagcaaagctgcgggcatgttttcgggaacgcaggacaagtgcgccacttgtggtaaaacagcataccctcttgagaaggtgacagttgaagagaagtccta

SEQ ID NO: 2656 - DNA, 711 bp, Zea mays
  unsure (1)..(711): unsure at all n locations
  Clone ID: TF_ZmC844_14
cccacgcgtccggcggcattcgtgcaggaccgatccccacctccacctcgtatgctctctctctctctctctctccttcccatggctgatggctgctgcctgatgcctgacacggtgacacccccaacattctccctcactagctagctgagtcctgcctacctagcgggatcaatacccggctgcagctgaccaccaccaccaaccaaccaacccacagttcccatataggcagccatcggctacacagcctcgcctccgtaacacagttcccatataggcagccatcggctgaacagcctcgcctccgtaagcagagtgtgtcgttgcggaggcaggaagagagacgacggcggccatggcgacctccttccaggggacgaccaccaagtgcaccgtctgcgacaagacggtgtaccttgtggacaagctcaccgncgacaaccgcatctaccacaaggcctgcttccgctgccaccactgcaagggcaccctcaagctcgccaactacaactccttcgagggagtgctctactgcaggcctcacttcgaccagctgttcaagaggacagggagcttggacaagagcttcgaaggaactcccaaggttgtcaagccagaaagaaacgttgggaatgagaatgctactaaagtctcaagcgcctttgctggcaccagagagaaatgtgttggatgcagcangacagtcta

SEQ ID NO: 2657 - DNA, 830 bp, Zea mays
  Clone ID: TF_ZmC1143_8
ccacgcgtccttcctcgcgtccgcccacgcgtccgcggacgcgtgggtcgggattgtgggcgagtgcgtgcgttcgtgcagccacagacaggcgtccgggcaccatgtctttcaccggcacgcaggacaagtgcacggcgtgcgacaagaccgtccacttcatcgacctcctcacggccgacggcgccatctaccataagacatgcttcaagtgcagccactgcaaaggggtcctctcgatgtgcagctcttcaaggagaccgggagcttctccaagaacttcacgccaggtgacaagtcatcagacaagggtgaactgacaagggccccaagcaagctgtcgtctgcattttctggtacccaggataagtgcgcagcatgccagaaaacagtgtacccgctggagaagttaactctggaaggcgagtcctaccacaagagctgcttcaagtgctcgcacggcggctgcatcctgaccacctcctcttatgccgcgctcaacggcgtcttgtactacaagatccacttcgcgcagctgttcatggagaaggggagctacaaccacatgaacaagaagagcccgtcccaggaggttctgccggacgtggctgacgaggagcaaccgccggaaccagcgccaccgcaagatgagaaagaagaggacaactaggatcggagcgaccaacaaccacccatgcatatatatcacgcagactgaagtctacacgtttgccatatttctttacgacgacgacgcttctttattccctcctccttttttttcctcttatctctctgtgaaacccggtttatcatcacgctgcaatcaa

SEQ ID NO: 2658 - DNA, 1121 bp, Zea mays
  Clone ID: TF_ZmC383_2
gtgagacagagaccgaaggggggggttgaccggtgctcgggaggaagatgtttagcgggacgcagcagaagtgcaaggtgtgcaccaagacggtgtacccgatggaccagctctccaccgacggcgtcgtcttccaccgctcctgcttcaagtgccagcactggtgatgcaatgtagcatcgggtagtagatctgcgaattgccgcagcgaacagatctggtgcgagtttcctagtaccaggaaaattctacgcccaggagaggtcatgactttgtccgtttcccattcgctaacttggtgaaagaggattgggcagggaatccatgcaaatggacactcttatctgatcttctacttaggacgacctgtcgatgtctaggcaaagataagcagctgtgcgaggtctgacaatctccgtcttcatcctttccgcctttgacagctgagcaactattcctcgttcgaaggagtgccgtactgcaagacccatttcgagcagctgttcaaggagaccgggagttacaacaagagcttccaatcacagtcacctgcaaagattactccggaaaagttggcccctgagctgaccagatcaccaagcaaagctgcaaggatgttttcaggaacacaagacaagtgtgcgacttgtggtaaaactgcgtatcctcttgagaaggtaacagtcgaagagaagtcctaccataagtcatgcttcaaatgctcccacgggggctgcgcgattacaccttccaactatgcagccttggagggcatcctctactgcaaacaccatttctcccaacttttcaaggagaagggaagctacaaccacttgatcaagtgcgcgtcggtcaagcgcgccgctgaagcacagccagaacaaccggcctctgattcctcctcctgaccacgccatttaaacagtgggggtttggaggcgagagagttgggaatcctcctgtttctacttaaaaccgcatgatgtatgttattattccatctatgccccgaggatactagactactctattttggtatcctctgctgtgctagctggatcatatcagcgaaccatggaattgctgtcattttcaatgaaactgttgtgcatcaagtagtg

SEQ ID NO: 2659 - DNA, 1748 bp, Zea mays
  Clone ID: TF_ZmC844_11
aatagatccagtggtgttcttgcgtgtctcctccctacaaatggcttcaggaactccgaaggttgtcaagccagaaagaaacgttgggaatgaggtatatgcaacgccttaatattcatgtgtttatgtgtttttctcagtgcctacaaagtttgcattttttttccttcactttttcagtccagagtagcacaggaaacaaatacattcaatcattgatgcacaaacaactccttaaacatgatgtgagatgcttggatcttgaatgcacagcaatcccaatggttagagagagaaagatccactcaaaacctaactgttatgcttggatcagaacagagtaaatcttgtccaataaaaagatcagaacaccagatatttaacagatcacaaaaaaaaaacttgatattcatgaggcatatgactagatcagtgctgtatatggttttaaacatgtttcatatcacccatccagttgacaccattcatgttttgttctttatgaacaactggcactagatgatgctcatcatgattgcatattatttggcagaatgctactaaagtctcaagcgcctttgctggcaccagagagaaatgtgttggatgcagcaagacagtctatccaactgagagggtaagattctgtgttcaaccatctcaatcattcttccggtagtttgagccttcttcacttgacaaccggttaagcatccaggtcactgttaacaacactatgtaccacaagagctgcttcaagtgctgccatggagggtgcaccatcagcccttctaactacattgcgcacgaggggaagctgtactgcaagcaccaccacatccagctgatcaaggagaaggggaacttcagccagcttgagaatgaccacgagaagacatcacaggctgggtcactggaggaggatgaacaagagtattgatcactgagcacaaccacagatgaataatgaatcctcttgcatttgcctagagcactatgtatttctgtggcgtggttcgatttcagttttaccaatggaggtcatgtgtgttcagagaacaatgatattgttgtcttgtatctgcatgtaaacgttgttatctttgagtcagatactctacctggtttcaccattttcattggtcagaagatgcctctgcaccttcaccaggaagttatggtctgttgaagctaccttcaccaggaagtcgtctagcccatgctcatctccttgatccatctcccattggcttccccctcatcccaaccgccccagcctgaaattctcggattggaacacatgttccatcgcggcaaagcagaacagcgtccccgacttatccttgttctacagatcacgcagacaggggagagtgctaatccacttgatcgatccgccgttgactcttctggatctcccgcattgggaagctgggatccccaccgtctctcgtgtgcatccaactcatgaagcggatcctctcggcctcccttgctcccacctcacgtaggcacacggctcaatctcggcatcccgtatgagctcgagctgcacgccccccgtctcgaacagcgggatcatagcgttctccggcgcgagcccaatgaccacctcgctcgcccgcctcacagtcgccgccaccaaatccgccctctgttgctttaagttttttgccaacctagcaaagcgttgaagctcaaaattgtcgttttatcactcctcagttacttttggaaccaccgaacgc

SEQ ID NO: 2660 - DNA, 1087 bp, Zea mays
  Clone ID: TF_ZmC844_7
aaaaaaacttgatattcatgaggcatatgactagatcagtgctgtatatggttttaaacatgttttatatcacccatccagttgacaccattcatgttttgttctttatgaacaactggcactagatgatgctcatcatgattgcatattatttggcagaatgctactaaagtctcaagcgcctttgctggcaccagagagaaatgtgttggatgcagcaagacagtctatccaactgagagggtaagattctgtgttcaaccatctcaatcattcttccggtagtttgagccttcttcacttgacaaccggttaagcatccaggtcactgttaacaacactatgtaccacaagagctgcttcaagtgctgccatggagggtgcaccatcagcccttctaactacattgcgcacgaggggaagctgtactgcaagcaccaccacatccagctgatcaaggagaaggggaacttcagccagcttgagaatgaccacgagaagacatcacaggctgggtcactggtttcaccattttcattggtcagaagatgcctcttcaccaggaagttatggtctgttgaagctaccttcaccaggaagtcgtctagcccatgctcatctccttgatccatctcccattggcttccccctcatcccaactgccccagcctgaaattctcggattggaacacatgttccatcgcggcaaagcagaacagcgtccccgacttatccttgttctacagatcacgcagacaggggagagtgctaatccacttgatcgatccgccgttgactcttctggatctcccgcattgggaagctgggatccccaccgtctctcgtgtgcatccaactcatgaagcggatcctctcggcctcccttgctcccacctcacgtaggcacacggctcaatctcggcatcccgtatgagctcgagctgcacgccccccgtctcgaacagcgggatcatagcgttctccggcgcgagcccaatgaccacctcgctcgcccgcctcacagtcgccaccaccaaatccgccctataccactgccggaaagatcggaagcgaacgcacgcgtggg

SEQ ID NO: 2661 - DNA, 521 bp, Zea mays
  Clone ID: TF_LIB3601-009-P1-N6-H8
agccaaatatcatcttaaacaaaagatggaccatgagcttacagttctgtgtcttgtaggtgcagaggcatcttctgaccaatgaaaatggtgaaaccaggtagagtatctgactcaaagataacaacgtttacatgcagatacaagacaacaatatcattgttctctgaacacacatgacctccattggtaaaactgaaatcgaaccacgccgcagaaatacatagtgctctaggcaaatgcaagaggattcattattcatctgtggttgtgctcagtgatcaatactcttgttcatcctcctccagtgacccagcctgtgatgtcttctcgtggtcattctcaagctggctgaagttccccttctccttgatcagctggatgtggtggtgcttgcagtacagcttcccctcgtgcgcaatgtagttagaagggctgatggtgcaccctccatggcagcacttgaagcagctcttgtggtacatagtgttgttaacagtgacccttttagttggatagac

SEQ ID NO: 2662 - DNA, 570 bp, Zea mays
  Clone ID: TF_LIB4172-053-R1-L1-A4
aattcggcacgaggcaggaagagagacgacggcggccatggcgacctccttcaggggacgaccaccaagtgcactgcctgcgacaagacggtgtaccttgtggacaagctcaccgccgacaaccgcatctaccacaaggcctgcttccgctgccaccactgcaagggcaccctcaagccaactacaactccttcgagggagtgctctactgcaggcctcacttcgaccagctgttcaagaggacagggagcttggacaagagcttcgaagaatgctactaaagtctcaagcgcctttgctggcaccagagagaaatgtgttggatgcagcaagacagtctatccaactgagagggtcactgttaacaacactatgtaccacaagagctgcttcaagtgctgccatggagggtgcaccatcagcccttctaactacattgcgcacgaggggaagctgtactgcaagcaccaccacatccagctgatcaaggagaaggggaacttcagccagcttgagaatgaccacgaaaagacatcacaggctgggtcactggaggaggatgaacaagag

SEQ ID NO: 2663 - DNA, 778 bp, Zea mays
  Clone ID: TF_LIB5116-045-A1-PF1-G4
catttaccaccatataatcatcactcgcccccaggcttgtcgggagcgaagccaagccagtcttgtgttggaagaacgcctcaccatccatcagagcagctcggcttgcagatcgagagtgagggagtgagaggcaatggcgacttcgttccaggggacgaccaccaagtgcaacgcctgcgacaagacggtgtacctcgtcgacaagctcaccgccgacaaccgggtctaccacaaggcctgcttcaggtgccaccactgcaagggcaccctcaagctcgcgaattacaactcgttcgaaggagtgctctactgcaggcctcactttgaccagctcttcaagaggaccgggagcctcgacaagagcttcgaaggcactccaaaggttgtcaagccggaaaggaatgttgggaatgagaatgctattaaagtctcgagcgcatttgctggcaccagagagaaatgttttggatgcaccaagacagtctatccaattgagagggttactgtgaacaacaccatgtaccacaagagctgcttcaaatgctgccatggagggtgcaccatcagcccttcgaattacatcgcgcatgagggcaagctcttctgcaagcaccaccacacccagctgatcaaagagaagggcaatttcagccagctcgagaacgatcacgacaagacgtcacagagtgccgggtcagtggatgatgaagactcggagtattagtcagtccttgaggatatccagagatgaataacgagcccttttgcatttgca

SEQ ID NO: 2664 - DNA, 787 bp, Zea mays
  Clone ID: TF_ZmC1143_5
actcctatgggcgattggggccctcgaggccggccggcaggggaagcgatcgggattgtgggcgagtgcgtgcgttcgtgcagccacagacaggcgtccgggcaccatgtctttcaccggcacgcaggacaagtgcacggcgtgcgacaagaccgtccacttcatcgacctcctcacggccgacggcgccatctaccataagacatgcttcaagtgctcgcacggcggctgcatcctgaccacctcctcttatgccgcgctcaacggcgtcttgtactgcaagatccacttcgcgcagctgttcatggagaaggggagctacaaccacatgaacaagaagagcccgtcccaggaggttctgccggacgtggctgacgaggagcaaccgccggaaccagcgccaccgcaagatgagaaagaagaggacaactaggatcggagcgaccaacaaccacccatgcatatatatcacgcagactgaagtctacacgtttgccatatttctttacgacgacgacgcttctttattccctcctcccttttttttcctcttaatctctctgtgaacccggtttatcatcacgctgcaatcaagtgtgccagatgccttcgttacgtctgaggctcacgacaatggaaaatctgacatggacctgtcttagcctcgcggaaaaaaattgtaactttgtaagcagagccacttctttgaatatatgatcctaacaacgctgcccttaataccaaaaaaaaaaaaaaaaaataaaaaaaaataaaaaaatttgcggcc

SEQ ID NO: 2665 - DNA, 1329 bp, Zea mays
  Clone ID: TF_ZmC844_4
aggggttaaaacctgtttaaaatcacccatccggttgcccccattcatgttttgttctttaagaacaactggccctagatgatgctcataaagattgcatattatttggcaaaaggctactaaagtttaaagcgcctttgctggcaccaaaaaaaaatgtgttggatgcagaaagacagtttatccaactgggaggggaagattttgggttaaaccatttaaataattcttccgggagttagagccttttttacttgacaaccggttaagcatccagggcactgttaacaacactttgtcccacaagagctgttttaagggctgccatggggggggcaccattagcccttttaactacattgcgcacgaggggaagctgttctgcaagcacccccacatccaggtgatcaaggagaaggggaacttcggccccctcggaatgacggccgggaggcggccgctggggagtttggagatacctctagcagcctcgcctctgtagctaggcattgtagagggggggaagaagaagactagaagaagagggccatggcgacctccttccagggaaccaccaccaagtgcaccgcctgcgacaagacggtgtacctcgtcgacaagctcaccgccgacaaccgcgtctaccacaaggcctgcttccgctgccaccactgcaagggcacactcaagctcgccaattacaactccttcgagggagtgctctactgcaggcctcacttcgaccagctcttcaagaggaccgggagcttggacaagagcttccaaggaaccccaaaggttgtcaagccagaaagaaacgttgggaatgagaatgctactaaagtctcgagcgccttcgctggcaccagggagaagtgtgttggatgcagcaagacagtctatccaattgagagggttactgtgaacaacaccatgtaccacaagagctgcttcaagtgctgccatggaggatgcaccatcagcccttctaactacatcgcgcacgagggtaagctctactgcaagcaccaccacgtccagctgatcaaggagaagggcaacttcagccagctcgagaatgaccacgagaagacatcgcaggctgggtcgctggaggacgacgaagaagaagagtattgattaatcgctgagcaaaaatacataccaccagaagaataattaatcttccttcttgcactatatatttctgtgccatttcagtcttaccaatggagatcatgtgcgttcagagaacacgatatcgttttcttgtatctgcatgtaaaccacgtctactaccctgattccacatttgcatttgaccaaaaa

SEQ ID NO: 2666 - DNA, 748 bp, Zea mays
  Clone ID: TF_LIB5116-033-A1-PF1-B12
tcaccctcatcccatctctctttcctttccttcccctcccctacgttggttcccttttcctttccgccgcggcaactgtgagccggcccgatcgagccccccacctcgagagaccgccataattcattccatccatccatccgctgccgcctatataagcgcggccattggggcgctcgtggcggtgttcgtcacatcaggcgcgcgcaggccgagatcagatcggcgacggcgaccatgttcagcgggacgcagcagaagtgcaaggtgtgcaccaagacggtgtaccccatggaccagctctccaccgacggcgccgtcttccaccgcgcctgcttcaagtgccaccactgcaggtccaccctctcctttagcagctactcctcgtttgaaggggtgccctactgcaagccccatttcgcgcagctgttcaaggagaccgggagctacaacaagagcttccagtcacaatcacccgcgaaatctgcgacggagaagctgactcctgagctggtctgtgccgtattggctgcctctttctatatgtgtgtcttgtctctttgctgccgtgcgattcggttagtcttatgtgaaatgtgctgtttcaggccagatcgccaagcaaagctgcgggcatgttttcgggaacacaggacaagtgcgccacttgtggtaaaacagcataccctcttgagaaggtgactgttgaagagaagtcctaccacaagtcctgcttcaatgctctcat

SEQ ID NO: 2667 - DNA, 544 bp, Zea mays
  unsure (1)..(544): unsure at all n locations
  Clone ID: TF_LIB3608-040-Q1-K6-E4
cgccgtgagacagagaccgaaggggggttgaccggtgctcgggaggaagatgtttagcgggacgcagcagaagtgcaaggtgtgcaccaagacggtgtacccgatggaccagctctccaccgacggcgtcgtgagcttccaatcacagtcacctgtcttccaccgctcctgcttcaagtgccagcactgcaagtctaccctctcactgagcaactattcctcgttcgaaggagtgccgtactgcaagacccatttcgagcagctgttcaaggagaccgggagttacaacaacaaagattactccggaaaagttggcccctgagctgaccagatcaccaagcaaagctgcaaggatgttttcaggaacacaagacaagtgtgcgacttgtggtaaaactgcgtatcctcttgagaaggtaacagtcgaagagaagtcctaccataagtcatgcttcaaatgctcccacgggnggctgcgcgattacaccttccaactatgcagccttggagggcatcctctactgcaaacaccatttctcccaac

SEQ ID NO: 2668 - DNA, 1085 bp, Zea mays
  Clone ID: TF_ZmC1143_3
ggcgattgggttcctcgcggccgggactcgctcgcccgagcggcgccggggagcgattgggatcgggaggcgagagtgcgtgcgtgcagccacaggcaggcgtcggcaccatgtcttctttcaccggcacgcaggacaagtgcgcggagtgcgacaagaccgtccacttcatcgacctcctcacggccgacggcgtcacctaccataagacatgcttcaagtgcagccactgcaaagggatcctctcgatgtgcagctactcttccatggacggtgtgctgtactgcaagacccacttcgagcagctcttcaaggagaccgggagcttctccaagaacttcacgccaggtggcaagtcttcagacaagggtgaactgacaagggcccccagcaagctatcatctgcgttttctggtactcaggataagtgtgcagcttgccagaaaacagtgtacccgctggagaagttaactctggaaggcgagtcctaccacaagagctgcttcaagtgctcgcacgggggctgcatcctcaccacctcctcctacgccgcgctcaacggcgttctgtactgcaagatccacttcgcgcagctgttcatggagaaggggagctacagccacatgatgaagaagagcccgtcccaggatacgctgccggacatggcagccgacgagcaaccgccggaaccggcgccaccgcaagacggggaaggagaggacaactaggaggaagggaccgccaccaatatatatcacacacacacacacacactcacacattctcacactcaagtctgcgtttgccatttttcttttctttttctctacgacttcgttattccctcctttcatctatctctccgtgaactcggtttgtcgtccagctggctgtaagtgtaccagatgccttcgttacgtctgatgaggctcatgacaatggcgattttggcatggagttgtgttagcctcgcggaaaaactgtaactgtgtaagcagaactgctatatattgttcctaacaatgttgtccttaaaaaaaaaaaaaaaaaaaaagcggcccaaaaaaaaaaaaaaaaaagcggcc

SEQ ID NO: 2669 - DNA, 1146 bp, Zea mays
  unsure (1)..(1146): unsure at all n locations
  Clone ID: TF_ZmC1143_7
ccggngaaaaaaaaaaaaaaaaaaaaaaaaaaagcaattggggaatcgggaggcgagagtgcgtgcngtgcagccacaggcaggcgtcggcaccatgtcttctttcaccggcacgcaggacaagtgcgcggagtgcgacaagaccgtccacttcatcgacctcctcacggccgacggcgtcacctaccataagacatgcttcaagtgcagccactgcaaagggatcctctcgatgtgcagctactcttccatggacggtgtgctgtactgcaagacccacttcgagcagctcttcaaggagaccgggagcttctccaagaacttcacgccaggtggcaagtcttcagacaagggtgaactgacaagggcccccagcaagctatcatctgcgttttctggtactcaggataagtgtgcagcttgccagaaaacagtgtacccgctggagaagttaactctggaaggcgagtcctaccacaagagctgcttcaagtgctcgcacgggggctgcatcctcaccacctcctcctacgccgcgctcaacggcgttctgtactgcaagatccacttcgcgcagctgttcatggagaaggggagctacagccacatgatgaagaagagcccgtcccaggatacgctgccggacatggcagccgacgagcaaccgccggaaccggcgccaccgcaagacggggaaggagaggacaactaggaggaagggaccgccaccaatatatatcacacacacacacactcacacattctcacactcaagtctgcgtttgccatttttcttttctttttctctacgacgcttcgttattccctcctttcatctatctctccgtgaactcggtttgtcgtccagctggctgtaagtgtaccagatgccttcgttacgtctgatgaggctcatgacaatggcgattttggcatggagctgtgttagcctcgcggaaaaactgtaactgtgtaagcagaactgctatatattgttccgaaaaaaaaaaaaaaaaaagcggccgcttttttttttttttttttaatttaatttaatttgaatttcttatatataatggggaaatacaatataataacaagcatcgatcgatctctcgatcgagtggacacgattacaaatccgtc

SEQ ID NO: 2670 - DNA, 274 bp, Zea mays
  Clone ID: TF_701158756H1
ttcgcctctgagcgcctgccgcagctgcgccgcctagccatctgctagaatgccgaatctggcgactcggcatgaaatgtgctgtgtgtcatacgacggcttactttgccgaagaggctcagtgcgaaggcatcagcttccataaatgctgcttgctgtgcatggtctgcaagaagaatctggacagtaccactgtggccgtgcatggagaggagatttactgcaagtcctgctacggcaagaagtatgggcccaaaggctatggctacgggca

SEQ ID NO: 2671 - DNA, 2165 bp, Zea mays
  Clone ID: TF_ZmC26552_1
cggacgcgtgggtttttctctgaattcaaaatcttccctattctcccaaagctttctgagtttcaaggccacatgggacataagggagaagcaagcaaagagctgatagtgaaggtgccatgtgtgtttggaacaggtgcaggaagaaggatagtgtccctctccaaaactataaacatgggttggttgagtaaaatatttaaaggtccagtaaatagagtttcaagaggacactacaacgggaactcccatgaaggctattcaactcagcacactaaatcatatggtgtgcatggcaatgaggacgaagacatggatcatgctattgcattatccttatcagaggaagatcaaaggaagggaaaggccattgataccgggcatcatttagatgaagatgaacagattgcacaggctctgcaagaaaatattggtcataacctagctgaagatgaacagcttgcacgggctctgcaagaaagtatgaatgatggacctcctcgtcagcacattccagttgaagatgttaactcagaaagtactccagcaagcatcttgccctcaaatattttccgcacaagtggcttgagggtttgtgctggatgcagaagtccaattggccgcggtcggtttctcagttgtatggactctgtttggcatcccgagtgcttcaggtgttatgcttgtgatagaccaatatcagagtatgagtttgctgttcatgaaaaccatgcctaccacaggccctgctacaaggagcgtttccatcctaaatgtgatgtttgcagtagctttattcccacagataaaaatggcctcattgaataccgggcccatcctttttggatgcagaagtattgtccttcccatgaaaatgatggtacacctaggtgctgcagttgtgaacgaatggagccaaaggacagtcaatacataacattagatgatggccggagactctgcttggagtgtctgcatactgctattatggagaccaatgaatgccagccactgtacattgatattcaagaattttatgagggtatgaacatgaaagtagagcaacaagttcccttgcttttggttgagcgacaagctttaaatgaagccatggaagcagagaaatctgtgcaccaccttcctgaaacaagaggcctctgcctatctgaggagcagattgtcagaactatattgaaaggaccaattggaccaggcaacagaatcatagatatggtcacaggaccatacaaactcattagacggtgtgaagtgactgcaattcttatactgtacgggctgccaaggctgctaactggctcgattctggctcatgagatgatgcatgcttacctccgacttaaaggataccgaaccctgagtccagaggttgaagaaggcatctgtcaggttctagctcatctttggcttgagtcagaaatcacatcaggttctggtagcatgtcaaccacctcagatgcgtcatcgtcatcttcaacatcttcatcatcgaaaaagggcgcaaagacggaatttgaaaaaagacttggggagttcttcaagtaccaaattgaaacagattcttctgtcgcttatggagatgggtttcgagcaggcatgcgagccattgagcggtacggcttgagaagcacccttgatcatatcaagatgacggggtcttttccatgctgaagctggttttttttacctcggtttggatatgggtatacatattttttttggagaacttttggttcaggttatacatacgaaaagccgaacttctgtgtcgagaagaggcataaggatttagctatactgtccattgcaggaaaaaactgtttcccttttcaattataaaatttcacagttcagacatgaaggtatgtggtctttagcttggccaaccttgtggaatgctgtcacagtgtcacttgatgcaaaagaaaattcgaatacatatgctttgctgtgcttgaaaagcaatggttggatgctatgctcttctttattgcgttctctcattatttaacaaactaattacaattgatgcagtttccctttgatgaaggttgattctagtgccaatcctgttgccgcttgtccacggcagtcagggcagagcgataggatttgtttgcaattaacctgatcgtggcctcgtccac

SEQ ID NO: 2672 - DNA, 1120 bp, Zea mays
  Clone ID: TF_ZmC383_3
gtcaccagtgcttgcttctcccgtacttcttgccggtccccccaccgcagctgagctgcggaactccttactcaccgacacttaggtcccacccgcttgtggccccgccaccagtgacccaaaccatcagagcatcctgtgcacggagcttcctcctcgaatgcgcactaatggtggtagtaataattgctcattagtttaatgagcagcaggtaggcactgtgctggctgtgctgtgctgttcctgtgcctccatcatccgattcccatcccccgtcgtcgcttgtttgctgctgcctttttctttccgccgcggcaactgtgagccggcccgatcgagcgagccgccccccacgcacctcaagaaaccgccataattccatccatccatccgctgccgcgtcctacgcggccatttggggcgctcgtggggtgttcgtcacatcaaccgcgaggccgagatcagatcggcggcgacgacggcgaccatgttcagcgggacgcagcagaagtgcaaggtgtgcaccaagacggtgtaccccatggaccagctctccaccgacggcgccgtcttccaccgcgcctgcttcaagtgccaccactgcaagtccaccctctcctttagcagctactccccgtttgaaggggtgccctactgcaagccccatttcgcgcagctgttcaaggagaccgggagctacaacaagagcttccagtcacaatcacccgcgaaatctgcgacggagaagctgactcctgagctgaccagatcgccaagcaaagctgcgggcatgttttcgggaacacaggacaagtgcgccacttgtggtaaaacagcataccctcttgagaaggtgactgttgaagagaagtcctaccacaagtcctgcttcaaatgctctcatggaggctgcgccctctcgccgtccaactacgcggctttggaaggcatcctctactgcaagcaccatttctcccagcttttcaaggagaaggggagctacaaccatctgatcaagtgcgcatcggtcaagcgcgcagcagaggcgcaaacagcacaggcggcagcacaggcagcgccggcggcagctgaatcctcctgattatggctgtcatcttt

SEQ ID NO: 2673 - DNA, 2500 bp, Zea mays
  Clone ID: TF_ZmC39_1
ctttccaccaggggtccacggcgcgccattagcgaaccgcgacctattcgccgtcgccaatcgccatctcctctccatctcgacatccgcagggcgttcgacgaaatgcgacgcaaacgccgcgcggcgcgcgcccatgtggccaggcgtctcccccccgcacgctcctcctcatccggcctcgcgagcgcgcgagggagacgtcgctgtgccagcgcgaggcggacgtcacctcacctccccgccccgcgtagcttttctgacccggatgctacgctgcgtctccactactccgcctcccgccctgccgtccatgtcacgcctcggctccttcctttcgcctcccgactcctgcctgctgccccttgtcctcttccccacctcctccggaatctggccgcgcacctactcgtcgccctctcgttttcccgtctccgctttctttatcctgcgggcggagcgggtagggtggggcggtcgttgctctcggatcaagagaaagggaggaaaaaaaaaacagcgctttctttctgtggccggcggttcgcccgtctctcactggctgtgtggccactggccaagcgggacacggaactcgagctccgtttggggattccggatcacttcgaggctaaagggattctgatcatcacttaagctcaagatcatgagttggttaaacaaaatttttaagggttcagtaaacagagtttcaaggggtcactatgatggagactggcatgaaggtcattcatctgatcacaccagagatacttacgatgacagtgataatgaagatatagatcgtgccattgcattatcgctagctgaggaagatcagaataaggggaagtcggtggctattgatactgactataatctggaggaagatgaacaacttgcacgggctctgcaggagagcctgaatgcagagtctcctcctcgacagaatgttcctattgaggatgtgccagtgcctcaatggaatattcctgttgagcgggtgcctcctcgacagtatgttccagcaaatgaaccaaccccacatgtttacccacggggtggatccaggatttgtgctggatgccaaaacccaattggccatggacgtttccttagttgtatggattcagtttggcatcctcaatgcttcagatgttttgcttgcaacaaacccatatcagagtatgagtttgctatgcatgatgatcagccataccacaaatcctgctacaaagagttttttcatccgaaatgcgatgtttgcaacaactttattccaaccaatagagatggcctcattgaataccgagcacatcctttctggatgcagaagtactgtccttcccatgaagatgatggcactcctcggtgctgcagttgtgaacgaatggagccaagggagatcaagtacataacattagatgatgggaggaaactctgcttggaatgtctcaattctgcagtaatggattctccagaatgtcaacatctttacatggatattcaggaattttttgaaggtttgaacatgaaagtagaacagcaaattccattacttttggttgagaggcaggctctgaatgaagccttggaagccgagaaaaatgggcaccacctaccggaaaccagaggtctatgcctttctgaggagcaagttgttagaacgatcttaaaaagaccacagattggaccaggaaacagaatcttagatatgattataggaccatacaagctgtctcggcggtgtgaagtgactgcaatccttatattatatggtctgccaagattacaaactggttccattcttgcccatgagatgatgcatgcatatcttcgtctcaaaggattccgaaaccttagtattgaggttgaagaaggcatctgccaagttttatcccacctgtggttagagtcggaaatcatcgctggttctagtagcaacgttgcatccagttcagaagcatcatcatcttcatcatcctcagctcctacctcttcaaagaagggtgcgaagaccgaattcgagaagaagcttggggcattcatcaagcaccagatcgaaacggattcttccgaggcatacggaggtggttttagagctggctatccggctgttgagcgctatggcttgaaaagaacccttgatcatatgaagttgacagggtctttcccatattaaagcaacagaagtaaaggagggggctttcttccagttgtgaggatacactccacattggaggttttggtttgggttatacataactgatatgcataccaaacgaggggaattgtctgtaaatcaggagaaccctctgctgcgcggaaacttattgcaaactgtctttttataggaaaacgatacatgcaagttttcagacagggaacttgagaggatcatatgtaatttttgggcacttgtttttgactcctttggttatcaaaaacaaggcaacataataagattgaaatttatcttcatctttaaattcaaaaaaaa

SEQ ID NO: 2674 - DNA, 923 bp, Zea mays
  Clone ID: TF_ZmC39_5
gtaccctccaggccttccggggcgcacctactcgtcgccctctcgttttcccgtctccgctttctttatcctgcgggcggagcgggtagggtggggcggtcgttgctctcggatcaagagaaagggaggaaaaaaaaacagcgctttctttctgtggccggcggttcgcccgtcgctcactggctgaagcggctgcacccgcgccctcttgctgtgtggccactggccaagcgggacacggaactcgagctccgtttggggattccggatcacttcgaggctaaagggattctgatcatcacttaagctcaagatcatgagttggttaaacaaaatttttaagggttcagtaaacagagtttcaaggggtcactatgatggagactggcatgaaggtcattcatctgatcacaccagagatacttacgatgacagtgataatgaagatatagatcgtgccattgcattatcgctagctgaggaagatcataataagggaaagtcggtggctattgatactgactataatctggaggaagatgaacaacttgcacgggctctgcaggaaagcctgaatgcagagtctcctcctcgacagaatgttcctattgaggatgtgccagtgcctcaatggaatattcctgttgagcgggtgcctcctcgacagtatgttccagcaaatgaaccaaccccacatgtttacccacggggtggatccaggatttgtgctggatgccaaaacccaattggccatggacgtttccttagttgtatggattcagtttggcatcctcaatgcttcagatgttttgcttgcaacaaacccatatcagagtatgagtttgctatgcatgatgatcagccataccacaaatcctgctacaaagagttttttcatccgaaatgcgatgtttgcaacaact

SEQ ID NO: 2675 - DNA, 666 bp, Zea mays
  Clone ID: TF_ZmC844_10
gtaagattctgtgttcaaccatctcaatcattcttccggtagtttgagccttcttcacttgacaacctgtcacagaaatctctcactcaagaatcacataaatacaagattcccagattaaataaatcgttatatccatgaagacagcaactgctgcatttctaagctgaaagtttcaattattgatatttttgcctaaagataaggaaaggtgacaggaatactgtacatgaatatcagtatgctgattgcaactcaccggttaagcatccaggtcactgttaataacactatgtaccacaagagctgcttcaagtgctgccatggagggtgcaccatcagcccttctaactacattgcgcacgaggggaagctgtactgcaagcaccaccacatccagctgatcaaggagaaggggaacttcagccagcttgagaatgaccacgagaagacatcacaggctgggtcactggaggaggatgatcaatactcttgttcactgagcacaaccacagatgaataatgaatcctcttgcatttgcctagagcactatgtatttctgtggcgtggttcgatttcagttttaccaatggaggtcatgtgtgttcagagaacaatgatattgttgtcttgtatctgcatgtaaacgttgttatctttgagtc

SEQ ID NO: 2676 - DNA, 257 bp, Zea mays
  Clone ID: TF_700450670H1
ggagtccacacaggcagacttgaccttgaccagatagtcttcaagatgctcaacttaggcggaggcgcaaaatgtggagcctgtgaaaagaccgtctaccatgcagaagaaatccagtgcaatggaaggagtttccacaagacgtgtttccactgcatggcctgcaggaaggctcttgacagcacgacagtcgcggctcatgagtcggagatctactgcaaggctggctatgggcgcagatgatgggcccaaaggat

SEQ ID NO: 2677 - DNA, 410 bp, Zea mays
  Clone ID: TF_LIB4185-052-R1-L1-E7
aattcggcacgaggcaccgctgcagtttctagagccctctctgccactcgtgatcccactagtcacgatgcctgccctcgctaagcccgcctcccgcaccgccaagcccgccgcggctccgaagccgaagcctgccgccgccaagccgaaggcggccaccgctggtgcctcccacgcggcttacttcgagatgatcaagggggctatcacggcgctgagggagaggaccgggtccggctcgcctgcgatgggcgtgggtggggcggtcacgtgcggcggctcgctcttcggcgtcttctggatctggggcgcgacgtcgccgctcgggtggggggcgctgaggccgcggccccgggcggcgggcgcgacggctcgcctgtatgcgcgcggggggggctccgtccctggcg

SEQ ID NO: 2678 - DNA, 282 bp, Zea mays
  unsure (1)..(282): unsure at all n locations
  Clone ID: TF_jC-zmX3059031Q1K1F04b1
ccgtgaaccttatgattgttctgcacaccactgcagtttcaatattggtttttggcaaaggtgatcccactagtcacaatgcctgcccttgctaagcccaccttccgcacggccaagcccgcctcggctcctaagccgaatcctgccgacatctggccgaaggcggccaccgctggtgcctcccacccgcctaacttcgagatgatcaaggaggctttcacggcgcttaaggagaggaccgacccaagattnccttgcgaacagccaagatccttnctggat

SEQ ID NO: 2679 - DNA, 278 bp, Zea mays
  Clone ID: TF_LIB3332-033-P1-K1-A2
ctcctccgccgacaacagcgtactgtagtgtaattcccgagagggctggggagagtggtaatgatcctcaatgtcgacggaggaggctgttgtccctgaagtcccggtgaccgaggtgccagcggaggtccctgcggcccatgtggtcgatgcgcccaatgcgaataaggctcccaacgagaagaaggcgcctaatgagaataagccgtccgctggcgaataagccggcggcgcaccctccctacgctgagatgattgtagaggcgatcgctgccctc

SEQ ID NO: 2680 - DNA, 300 bp, Zea mays
  Clone ID: TF_LIB143-015-Q1-E1-F7
acatccaccgcctccgccgccgacaacagcgtagtgtagtgtaattccggagagggttggggagagtaatagtgatccgcaatgtcaactgaggaggctgttgtggctgaggtcccggtgaccgaggtgccagcggatgtcccggctgaccaggtggccgaagcgcccaaggcgaataaggcgcccaaggagaataaggcgcctaaggacaagaatctttccgcggcgaatatcccagcggcgcaacctccctacgctgagattattgtacaggcgatcgctgccctcaaggagaggaag

SEQ ID NO: 2681 - DNA, 1921 bp, Zea mays
  Clone ID: TF_ZmC1172_2
tacctgggacggccgggccggccgggcccactttccaattcgacatcttcgccctcgaatcgagcttccctccaccgaatcgagttcctccatccaaatcgagctcattgccgccggatcgaggtctgcgtggatcgagctcgagctttggagaaggagaggaaacgggggacgggcacggggggagcaaggcaaccaaacgggtggagggaaacacgccaaacaggctcctcgatcgttccgggctcgggctgccacccgccattcggtgtcccctccttgacaggtgcccgagccgcgccgagctccagcctcatttccacggtccgcgccggcactcttccctctcccgatcgtcctcctcgtcgcctgccgcctcttccttcttcccactccactagcttcaggttggactgcacaacgtggagcggagatctatccgaacacgggattgattcatctggtggtgttacaacatagggtttttgatatagcaatgggattactcatgtataaatgaacaaagtttggagacagttggacctgacaattgccactttttacatgttttaactcattttttttctgggaaacaagtaattctgaagttaccttggaagtcctttgcgcttttgactggtcgggttgcataggccattgttgagaggtgatttggcctaagaatgggggctccaaaacaaaggtggacttctgaggaagaggctgctcttagagctggaatagcaaggcatggagttggaaaatggcgcacaatattgaaagatccagaatttagttccaccttatgctaccgctcaaatgttgatctcaaggacaagtggcgaaacatgaatgtgattgtcagtacatcgagttctcgtgacaaggcgaagtctgcattgaagagaatacgaactattcccaagaataatgagcacaccatggcaattaccagagttacttctgatattgatgatgagattgttgacgaaaagcctatagtatcattgcctagtgaagcaaagaacacatcaagttcgaagaaatctcacaggctagataatattataatggaggctataaagaacttaaatgagcctacgggatcacacagaactactattgctaattacatagaggagcaatattggccacctagtgattttgatcacttactatctgcaaaactgaaggacttgtccaccagtggcaaattgataaaggtgaaccggaagtacagaatagcacctagttcacccaattcagagcgccgaagccccaaaatgccactgttggaagatgtccaaagagagcctgtcaagatatggagtgatgatactaaaacccttaccagatctcaagttgatgctgaattggcacgtatggcaaccatgactgctgaggaagcttcagtggcagcggctcgagcagttgctgaagcagaggccatcatggcagaagctgaagctgcagcgaaagaggcagaggctgcagaagcagaagcccaagccgcacaagcatttgctgaagcagcgtttttgacattgaagaacagaaatgctggaaaattgatggcctaaggttgatcctacttggactctcggcctcgcggctgttctgaaacggcttttctgtgccatgtagatttgtacaacagtacgtgtttactacacttcggtttaaagcagctgccccggtgagtgtatcaccttatgttagtgggagccatgtgaaaactccagcctccagcgcactagtagcaacaatagcagcttgccacaacgccattcagaaaactgggtggcataaactcttccagtgtcaaatgtttcgctaacgatttgcagtattgcattgtgcatgaacagcctttgcattagtgcattattgcgctgcctgccaacagtcggcccgtttgctg

SEQ ID NO: 2682 - DNA, 394 bp, Zea mays
  Clone ID: TF_jC-zmX700092020b1
ccgtctccgccgccgacaacagggtggtgttttttagttccggagtgggttggggcgagtagtagtgatccgcaatgtctactgaggaggctgttgtggctgatgtcccggtgaccgaggtgccagcggaggtccctgtggcccatgtggcctaggcgcccaatgctaataaggcgcccaaggagaagaaggcgcctaatgagaagaagctttccgtggcgaataagccggtggcgcaccctccctactctgagatgattgtagaggcgatcgctgctctcaaggagaggaaggggtttagctcggtggccatcagcatgtacgttgaggggaagcatggtggtaagtttccctcaactttctgtagcatttcactgttcaactgaagaagctc

SEQ ID NO: 2683 - DNA, 612 bp, Zea mays
  unsure (1)..(612): unsure at all n locations
  Clone ID: TF_LIB4729-127-A1-K1-F6
aaaccccgcgccgcctccggcttccttcccctggaagcctcctcccctctcgcgccgctccaaaaacttgctccaactcccggcacgcgcacccaaagccaaaacccctcgcgtcgtcggccgtcgcgcacgcttccctccatcgtgcgtctgcgccgtcacgttttccgcgatgccccgccccagttcacgcgccaaggcggcatcacggccaggaggcggtggncgtcgcctcncagagaacccctgcggcaccctcgctaagctgacatgatcgcagaattgatcgctgacccccagaagaggaacgggtcgaggtatgcgtgcatcacaaagtacgtgcaggtgaagcatggcgacaaggtctgcaccatcttgggcaaggacctcactgtgcagctaaagaaggtcgctgacgacgataagttgacgagggtgaacaactccttcaagctgccggccaccgacgccaagcccaaggncgctaagcctcacgcacccaaggtcgcgtactagaccaagtcttcgccgaaggggaaggacaagaccgctgcgaagcccaaggcggcgtcgacacaacccaaggccaaggccaaggtcaagtctgtcgct

SEQ ID NO: 2684 - DNA, 645 bp, Zea mays
  Clone ID: TF_LIB4766-082-R1-K1-G7
ttgggtccctcgaggccggccggggtctcttcatacatcacccaccgcctccgtcggcgacgacagcgtaatgtaatgcttttccgttgagggttgctgagagtctactgatccgctgtgtcgaccgaggaggctgttgtgcgctgaggtcccggtgaccgaggtgccaacggaggtcccgtcggcccatgtggccgaggggcccaaggataataaggctcctcaaggagaagaaggtgcctaaggagaagaagctttccgcgccgaagaagccggcggcgcaccctccctacgctgagatgattgtagaggcgatctctgccctctaggagaggaatgcgtcgagctcggtggccatcaacaagtacgtcgaggggtaattatggcggcaagctccccaccatcttctgctggtagttcactgtgcagctgaataatgtcgctgtcgtcgggaagctgacgaggctgaagaactccttctagctggcgtgcaccgacgcctaggccaaggacgtcatgtccaatgcactctatgtcgcgcccaatgccaagccctcgacgagagtgatgtcaagaccgctgcgaattccaaggctgtgtcgtctcaatcctgcgccaaggacatggccaagcctgtcgctcctg

SEQ ID NO: 2685 - DNA, 381 bp, Zea mays
  Clone ID: TF_LIB3354-080-Q6-K6-F1
cccaccgcctccgccgccgacaacagggtggtggagtgtagttccggaaagggttggggagagtagtagtgatccgcaatgtcgacggaggaggctgttgtggctgaggtcccggtgaccgaggtgccagcggaggtcccggcggcccatgtggcctaggcgcccaaggcgaagaaggcgcggcaggagaataaggctcctaaggagaagaagcttttcgcggataataagccggcggcgcaccctacctactctgagatgattgtacaggcgatcgctgttttcaaggagaggaatgggtctagctccgtagccataatcaagtacttctaggggaagcatggcggcaagctcttccaccaacttacccaagcatgttac

SEQ ID NO: 2686 - DNA, 580 bp, Zea mays
  Clone ID: TF_LIB4730-100-Q1-K1-F2
atccactaccacatcgctctccgaaataaggtatttacaccgatgctgctatctacgagccctactctgccacacgggatcgcaatatgaacgatgcctgcccgcgctataccaggctcacgaagcgacaagcgcgacgaggctccgaagccgaagcgtgcagctgccaatccgaaggcgcgcaccgctggcgcctcccacccggcttacttccagatgatcaaggaggctatcacggcagaaaaggagaggatcgcttccagactctcaagcgcatcgacaaggaagtgggggacaaggacgatgaactctctgccggccaatttaaaaaagatgctttccatccaactccgagtgcactaagctaagggcaagctcgggaaggccaaggcgttcggacaagctctcggacgccgcctagaatgcatcccccaagaccaaggctaaaacgaggaaagccgccgctgctaagaacaccgcccccaagtgcggcaaggacgacgccgacaagtcaaagaacgaacgggttgccaagataaagaaggtcgctgatgctgagaccaagggctgagagcccgac

SEQ ID NO: 2687 - DNA, 299 bp, Zea mays
  Clone ID: TF_ZM5033.C5.o1.fg
atgccttggtcaagcaccacggccgacggcaggcggcagcagcagcggcgaacggtcgagtccagcctatccgaacccactatcgttgggagggagcctggcctggcccgggtcactccgatgatcgtcgccgccctcgccgcgctcgccgaggagaacggctccagccaggccgccatcgcgcgccgcatcgaggcggaggcccgcggcgacctgccggcctcgcacccggcgctcgtcgcagcccacctctcgcgcatgtccgccgccggggagctcgtcgccgttgcggggggaaa

SEQ ID NO: 2688 - DNA, 764 bp, Zea mays
  Clone ID: TF_ZmC366_3
cgttccccccctcgggtcgacccagcgtccgctccggtcgtcaccgtctccgaggagccggcgccggaagcggcgaaggaggtggtgaagaagccggaggaggggaagaagcccgacgaggagggtgacgagaggaagaaggccgaccccgccgccgagaaggagaagaaggcgaggaagccgcggagcaggaagcccaagtccgccgggctgcaccacccgccctatttcgagatgatcaaggaggcgatcctgtcgcaggacggcgggaaggtcggggcgagcccgtacgcgatcgccaagcacatgggggagaagcaccgggacgtgctcccgcccaattaccgctgcctcggcgccgtcgagggaggcacgtaaggtgcgcgcgaagcgagcgaggaaggtggccccggcgcccgcgcagcccaagcccaagccagcccgcgccgccgcttccggtgccggcaagaaggtcaacaaggccagcgcctgattagcggcggccgtcctggtccccccgcgcgcgcctccgtgtattatactagccggtagtagcagtaggagttgcaagtactagcagcgtggtagtcgtgatgatgttgtggtcgtcgtctccgccggcccgatcgatcgggcgctctgttccgccgtgtggcagagttttgtaaataactagtctggtgtgatgcgctcatggcaataaagcgcgcgcttctagcttcccttgatgaaaaaaaaaaaagggcggccgccaccgcggtgga

SEQ ID NO: 2689 - DNA, 303 bp, Zea mays
  Clone ID: TF_jC-zmX700095987b1
acaaggcagcggggggggtttaaaaaaaaagaggcgtttataccacacgagaccccacaagacacgatgcctgacctcgctaagcccgccacccgcaccgccaagcccgccgaggctccaaagccgaagcctgccgccgccaagcccaaggccaacaccgctggcgccaaccacccgccttacttcgagatgaacaaggaggctatcacggcgctaaaggagaggaccgactccagcccccaagcgatcgccaagtatgagggggacaagcacggcgcgtacatggcggccaactcaaagaag

SEQ ID NO: 2690 - DNA, 467 bp, Zea mays
  Clone ID: TF_LIB4741-005-R1-K1-D2
gggtcggggagagagtgtatccgactgacacgtgaggaggcctggtggggctgaggccccggagaccgaggtgccagcggaggtcccggcggtccatgtggctcgaggcgcccatggtgaagaaggcgcccaaggagaagaaggctcctaaggagaacaagccgtccgcggggaagaagccgacggcgcaccctacctatgctgagatgattgtataggcgatcgctgccctcaaggagaggaaggggtcgagctcgttggctcatcaccaagtacgtggaggggcagcacggtggagagctccccaccaacttccgcacgcagcttaccgagcagctgaagaagctcgctgccgccggtaagctgacgagggtgaagaactccttcaagctgacggccaccggacgccaagcccaaggccgcccaagttaacgcacccaaggacgggcccaagccaaagccctcgc

SEQ ID NO: 2691 - DNA, 376 bp, Zea mays
  unsure (1)..(376): unsure at all n locations
  Clone ID: TF_LIB3150-101-P1-N1-A3
cgnncgtacctttttgtcttttgttgtcgacttccgcggggnggagagtagatccggagagggtcggggagagtaccagtgatccttattgtcgacggaggaggctgttgtggctgaggacccggagaccgaggngccagtggaggtntaggaggtttatgttggntgaggtgntcaatgtgaagaaggtgcccaaggtgaagaaggcgcctaaggagaagaagcttttcgcggtgaaaaaccggcggcgcacccttcctacgctgagatgattgtagaggcgatcgctgcccttcaggagaggaagggttctagctctgtggccttaaactagttctttcaggggaagcatggtggtaagctccctaccaacttt

SEQ ID NO: 2692 - DNA, 1368 bp, Zea mays
  unsure (1)..(1368): unsure at all n locations
  Clone ID: TF_ZmC1172_3
cattggtaccctcgaggccggccggggcggtggagggatcgggcgtaccccggtgcccgttcaccgccgttcacgccgcgtgtgcgctctgggtctgccgctctctctctctcctgcgcgtggcgcagctgccgtcctataccaggcgcccaggtctagcctcgtcggtgccttcgccaggtctttctcgggcccttcgccaacgacgagcgcccgctagaaggtatgcattcgtgttcataatattgtatttgactaaaaagactgggcctacgcatgggggctccaaaacagaggtggacttctgaggaagaggctgctcttagagctggagtagccagacatggagttggaaattggcgcatgatattgaatgatccagaacttagctccacattgcgctaccgctcgaatgttgacctaaaggttaaatctattcactcgtttttacgtaagattgatttagtgaagggactgccatatttgggtattccttgaaatcatgtgtcttttggttttcaaatttctagattcatcttcaatcttaatgctcatatgttccttttttatttatcactacttaggacaatggcgcaacatgaatgtaattgtcacttcatcgagtactcgtgacagggggagaacttccgaagagctgctcctaatgagcacaccatggcaattaccagagttacttctgatattgatgatgagattgttgacgaaaagcctatagtatcattgcctagtgaagcaaagaacacatcaagttcgaagaaatctcacaggctagataatattataatggaggctataaagaacttaaatgagcctacgggatcacacagaactactattgctaattacatagaggagcaatattggccacctagtgattttgatcacttactatctgcaaaactgaaggacttgtccaccagtggcaaattgataaagatggcctaaggttgatcctacttggactctcggcctcgcggctgttctgaaacggcttttctgtgccatgtagatttgtacaacagtacgtgtttactacacttcggtttaaagcagctgccccggtgagtgtatcaccttatgttagtgggagccatgtgaaaactccagcctccagcgcactagtagcaacaatagcagcttgccacaacgccattcagaaaactgggtggcataaactcttccagtgtcaaatgtttcgctaaaaaaaaaaaaaaannnnnnnnnnnnnnnggacctgcagccaaccatctaccagcgactcagcgagcgagagcagcacacacgcagctagctaggagcagcagcagcggcggcggcgatggcggcctccatgatctcctcgtcagc

SEQ ID NO: 2693 - DNA, 327 bp, Zea mays
  Clone ID: TF_LIB3076-019-Q1-K1-B5
aacgcctccgaagcaacctcactacgctgacatgattttacagtccatacgcttacctcaacgtgatcgaggctttaagctcgctagccatcagccagtacattgagggcaaacatggcgacaaactcgttaccaactttcacaagcagcttactgcgcagctcaagacgctcactgtcgacgacaagctgacgagggtgaacaactccttcaagctgcctgccaccgacgccaatcccatcgccagcaactccaaggtacccaacgacgcgcccaatagcaacacctcgcactaagcgaatgccaataccgcttccaagcccaagg

SEQ ID NO: 2694 - DNA, 354 bp, Zea mays
  unsure (1)..(354): unsure at all n locations
  Clone ID: TF_LIB4730-055-R1-K1-C2
natccagacacacctccctctccgaattaaggtagcatactccgttgtagtttatagagccctatctgcactcgagatcctactagtgaagaagcctgacctcgcgaagccctgcctcgcgcaatcccaagaccgacgcggctacgaagcccaagcctgctgtcaatcaatcggaatgccatcaccgctggtggctcaaacccgccttacttgcagaagatcatggaggctatcgcggaactaatagaaaggaccggctgcagctcacaagcgattgacatgtatgtgggtgacaacgcacgactcctatctgagcgacatcttaaaaagcatgctttacattcaactccgtgg

SEQ ID NO: 2695 - DNA, 748 bp, Zea mays
  Clone ID: TF_LIB4740-123-A1-K1-G5
atccagtcgcacctccctctccgaaatcaaggtagcatacaccgctgcagtttctagagccctctctgccactcgtgatcccactagtcacgatgcctgccctcgccaagcccgcctcccgcaccgccaagcccgccgcggctccgaagccgaagcctgccgccgccaagccgaaggcggccaccgctggtgcctcccacccgccttacttcgagatgatcaaggaggctatcacggcgctaaaggagaggaccggctccagctccgtgggtccgcagccaagggcaagctcgtgaaggtcaaggcttcgtacaagctctcggacgccgccaagaaggcatcccccaagaccaaggctaagccggcaaaggccgccgctgccaagaccaccgcccccaagccggccaaggccgccgccgccaagtcaaagaaggcagcggctgccatgccaaagaaggccgctgctgctgggaccaagcgcaaagtgcccgagaagaaggtcgtggcgaagccgaagaagtcccccgccgccaaggccaaggccaagccgaagaccttgaagtcccctgcctccaagaaggcacggaaggcctccgcatgagatgggttgctttaggtctaagctctgattgtggttggtgtcagttaggtactgtacaaactaagtgtgtgcccaaagtgtctcaggcggtgtgttatgtgcttagcaagttctatctatcagagtgttttagtttaacaatggttt

SEQ ID NO: 2696 - DNA, 381 bp, Zea mays
  unsure (1)..(381): unsure at all n locations
  Clone ID: TF_LIB3354-043-P1-K1-D8
ntcggacccnnncgcgtccgtatcaagagcatgcgtatcactcagctgcagaactcctaggaggcctactttctaggcactgcgtagaccatgagctagtgcactaattgccatgactctagtgcaagcgccgcgatgacggaccgcagatcccgccggggctacgaatcggatcctgtcccactgaagtcgaatgcggtcaccgttggtggatgctactcggctgacttggagatgataaaggaggctatcaccgcgctcaaggagaggaccggttgcagttcgcaagcaatcggcaagtatgtgggggacaagcactgtgcgtgtatgaccgtcaacttaaagagagatgctctgcatgcagcttcgtgggttcccaga

SEQ ID NO: 2697 - DNA, 458 bp, Zea mays
  Clone ID: TF_LIB3732-029-Q1-K6-C1
cgggtttgaccagcgtttttgggcgcgtgggcgcctccgccgccagacacagcgtagtgtagtgtagttccggcaagggttggggagagtagtagtgatccgcaatgtcgacggaggaggctgttgtggctgaggtcccggtgaccgaggtgccagcgtgagttccggcggcccaggtggccgaggcgcccagggcgaggagggggcccaagtgataagaaggcgcctaaggtagaagaagccgttcgtggggaataatccggctgtgcatactgcctacgctgagatgattgtagatgtaatcggtggcttataggataggaaagggtttagctcgtgggccattagcaaatacctagaggggatataagcttgctaattgtgaaaaaattaacgttatcagataacagaacaattgaagatactcactgatgctagatgaatttctagattctaaa

SEQ ID NO: 2698 - DNA, 531 bp, Zea mays
  Clone ID: TF_LIB4730-140-A1-K1-H11
atcgtttcatcaccgcctatgctgtcgacaacttctgagtgaaatgcagttcccgatagggctggtcagagtattaccgatccagaatgtcaacggaggaggctgttatgcgtgaggtcgcggtgaccgaggcgccagctgacgacccgcctgcccaagaggccgaagacctccgatcggacgagtcagccccaccataataatcctcctactgagaagatactttccgcggtgaaaaaaccggcgcggcaccctccctacactgagatgtttgtatcaaggattcctgcacctctttgcttcgacgggaacgagctcggcggccatgggctagtacatccagaggaagtatggtggagagatcctcaccaacttccgtaagcagatcactgtgcatgtgtacaatctcgctgacgccggtaatctgactatggtgaataactccttcaagctggctgtctctgacgccaagcccgatgccgccatagcccgatgctcccgaggatgaggacaagtccacgtcctctgccg

SEQ ID NO: 2699 - DNA, 529 bp, Zea mays
  Clone ID: TF_ZmC190195_1
cgtacgaagctcggattcggctcgagctcgaccgctcgagccgctcgagccgctcgagttccgttaacgctctccaatacaaaataaccactcactgaatattcggtcgaagatgtccgccgccgaagaagctaaagttcccgccgtcgaaaagccggtggaggaggtgaaggcgccgaagcttgccaaggagaagaaacctaaggctccgaaggaaaagaagccgaaacaggccaaaactgcttctcatcctccatatctccagatgattaaggacgctttgattgctctgaacgagaaaggaggatcgagtccatatgcgatacgaagtacatggaggagaagcacaaggcggtgcttcctgcgaatttcaagaagatactaggtctgcaactgaagaaccaagctgcgagagggaaactcgtcaagatcaaggcttcgtacaagttagccgaagccgcgaagaaggtgaaggagagcaccgccaaagcgacgaaggaatcgcgtccgaaacgaaacaaaatcgcaa

SEQ ID NO: 2700 - DNA, 566 bp, Zea mays
  Clone ID: TF_LIB4730-130-A1-K1-G9
attacgtgcacctccctctccgaaatcagggatttacaccgctgtagtttctagagacctctctgccactcgtgatcccagtagtcacatatggctgccatcaccaagaccgcctctgggaccgccaatgccggcgcggcatccaaagccgaagcctgccgtcgacaattagaaagcgtccatcgatgtcggctcccactcgccttacttccagatgaacaaagaggctatcacggaactaaaagagagaaccgagtccagctcgctagctatagtcaagtatgtgaagaaagaagcacgatgcgactctgatggtcaacttcaatcaatatggttttcattcatctcggcgtcatcgcagtcaaggttaagctcgtgaaagctgaggcttctcataagctctcggacgccgtacaagaagggatcccccaagagcaaggctaagtcgactaaagtgcggcgctgccaagagcaccgcccgcaggccgcgcaaggccgactgcgccaagtgaaagaagggagcggctgccaagccaaagaaggtcgctgctgctgggaccaagcgc

SEQ ID NO: 2701 - DNA, 344 bp, Zea mays
  Clone ID: TF_LIB84-011-Q1-E1-B9
cccagacatcatcgtagcatacaccgctgcagtttctagagccctctctgccactcgtgatcccactagtcacgatgcctgccctcgctaagcccgcctcccgcagcgccaagcccgccgcggctccgacgccgaagcctgccgccgccaatccgattgcggccatcgctggtgcctcgcacactccttacttccagatgatcaacgaggttatcacggcgctaaagtgaatgaccggctcgaattcgcaagcgatctccacgtaagtgggggaaaagcaccgtgcgtctcggcctgttaacttcaagaacatgccttccaatcagctccgttggtccgcagtc

SEQ ID NO: 2702 - DNA, 449 bp, Zea mays
  Clone ID: TF_LIB3357-015-P1-K1-C2
gtcgtcgcggcccctcccctccacccccgagtccccgtgcgctgcgcccccaattcccacgcgcccagacacgccgagaggggagaggaagcgacagccagcagccgaggcggccagcgcaggcatggccactcccacttccagtggcgacggctcgcccccgggctcctctgacctcgtgcccccctcctaccccgaggcaaccctacctactttccctctgctctgcgctgctcctttccgccagatctgtgccgatctgccgaattgactgacccgtgcgcctgccctggctgctgcagatgatcgtcgccgccctcgccgcgctcgccgaggagaacggctccagccaggccgccatcgcgcgccgcatcgaggcggaggcccgcggcgacctgccggcctcgcacccggcgctcgtcgcagcccacctctcgcgcatgtccgcc

SEQ ID NO: 2703 - DNA, 574 bp, Zea mays
  unsure (1)..(574): unsure at all n locations
  Clone ID: TF_LIB3355-019-P1-K1-G4
ctccctctccgaaatcaaggtagcgtacaccgctgcagtttctagagccctctctgccactcgtgatcccactagtcacaatgcctgccctcgccaagcccgcctcccgcaccgccaagcccgccgcggctccgaagccgaagcctgccgccgccaagccgaaggcggccaccgctggtgcctcccacccgccttacttcgagatgatcaaggaggctantcacggcgctcaaggagaggaccggctccagctcgcaagcgatcgccaagtatgtgggggacaagcacggcccgtctctgccggccaacttcaagaagatgctttccatccagcttcctggggtccgcaggccaaggcaagctcgtgaaggtcaaggcttcgtacaagctttcggacgccgccaagaaggcattcccctaggccaaggctaagccggcaaaggccggcgctgccaagacacccgccccaagccggcccagggccgccgcgccaaatcaaagaaaggcagcgggttgccaggccaaaaaagggccggtgctgcttggaccaagccgaaagtgcccgagaagaagg

SEQ ID NO: 2704 - DNA, 798 bp, Zea mays
  Clone ID: TF_ZmC1022_21
gccggccgccccgccaaggcggccaagacgtcggccaaggccacgccaggaaagaaggcgccggtgaccaagaagcccgcggccgccgcgaagaaggcgccggtggccaagaagcccgttccggcgaagaaggcggctgcccctgcccgaaaagcgccggcacggaaggcgaagaagtagaggggtaggcggcggagaaatgtagggtttggttctcgtatgacgctagatgtttgctctccctttagcctaggtggtgtctgtgtgtgcaatgttgtaaatttgatatcggatgctgggaacactaagtcaatcttacaaggacaagctcccgcccaacttccgcaagcttctgaacgttcagctcaagaagctcgtcgccggcggcaagctgaccaaggtgaagaactcgtacaagctgtcgtccgccaccaagccaaaggccgccccgaagaagaccaagaccggcgtgaagaagcccaaggccgctgccaaaccgaaggccaagtcccccgcgaagcccaagcccgccgcgaagaaggcgccggtagccaagaaggccgctccggcgaagaaggcggctgcccctgcccgaaaagcgccgtctcggaaggcgaagaagtagaggaggggtaggcgtcggagaaatgtaaggtttggttctcgtattacgctagatgtttgctctccctttagcctaggtggtgtctgtgtgtgcaatgttgtaaatttgatatcggatgctgggaacactaagtcaatctttcagtataaaaaaaaaaaaaaaaaaggccccta

SEQ ID NO: 2705 - DNA, 388 bp, Zea mays
  Clone ID: TF_LIB4732-048-R1-K1-C12
atgctcatcattaaccgtactccgccgccgacaacaccgtagtgtagtgtactgccttagagggttggggacagtagctctgctgccacgatggcgtacgctgcaggctgctgtggttgacgtcacccggacttagtaggcaaggtcgggatcgacggcccccggggctgatgcgcccaaggtgcagaatgcgcataacgagatatcggcccttaacgacaacgaactttccgctgcgaacaagacagcgtctcaccctccctacgttgaaatgattgtagagtcgatccctgccctgcttgagaggaagggcgcgagctcgatggacatctgtaagtacatggcagcgtgaagaatgcgcggtgaagctccccaccgatttccgcga

SEQ ID NO: 2706 - DNA, 274 bp, Zea mays
  Clone ID: TF_LIB3245-197-P1-N1-D11
cgaggtagcattcaccccggcagcatcggggggggtgcgtgacactcgggatgcgactagccacgacgcctgccctcggtaagcccgcctcccgcaccgccaagcccgccgcggctccgaagccgaagcctgccgccgccaagccgaaggcggccaccgctggtgcctcccacccgccttacttcgagatgatcaaggaggctatcacggcgctaaaggagaggaccggctccagcttgcattgcgaacgcctagtctgcgggtgacaagcacg

SEQ ID NO: 2707 - DNA, 497 bp, Zea mays
  Clone ID: TF_LIB4746-104-R1-K1-C3
cttggccttggccttggccttgggtttgggcgacgccgccttgggcttcgcagcggtcttggccttcgccttcggcgagggcttgggcttgggcgcggccttgggtgccttgggcttggcggccttgggcttggcctcggtggccatcagcaagtacgtcgaggggaagcatggcggcaagctccccaccaacttccgcaagcagctcactgtgcagctgaagaagctcgctgccgccgccaagctgacaagggtgaataactccctacagctgccgagcagcgaatgagacccaacaggcagccagcccgagacatcgcaggagctgctaagaatgtagaagtcgctcgaggagcacctgctcctcaagggaaaaaccgcagtggacctccccatgaacagagaacaaaagcaccctgcgaaaaggaaggccggtttacattcaggcagacaaactgcacccaagctgttgtgaatgccacgctgaaaacattgga

SEQ ID NO: 2708 - DNA, 403 bp, Zea mays
  Clone ID: TF_LIB3732-023-Q1-K6-A11
aaccccgggtcgaccacgcttcttccaccgcctccgccacctaacacagggtggtgtagtgtagttccacgcaagggttggggggggtactagtgatccgcaatgtcgacggaggaggctgttgtggctgaggtcccggagacctgagtgccagcggaggtcccggcttttacgtggccgcagcgcccaaggcgaagagggcggggagggagaacaaggcgcctaatgagaagaagccattcgcggagaagaagcccacggcccacccttcctacgctaagatcattgtagaggagatcgatgccctcaaagagaggaaggggttaatctcagtgggcataaacaaatacatagaggggaagcacggcggcaagctaatcaccaactttcacaagcatctcac

SEQ ID NO: 2709 - DNA, 1767 bp, Zea mays
  Clone ID: TF_ZmC238_1
ttgggaccctcgaggccggccgggtccgccaccttctccacccaacaacaaaacaagcctaatgggtaatggcttcctcagttcctctccatctcacgccactgcgctgccctagaaccttcgccgccgcccctctttaggattaccgtgtcctcgatcgccccctggcacgcccgccccgatcgccccctggcacgcccgccccggatcctgcaccggaattccgtgtggaattccggacccgatcgaaatcgaaccgcctccctgcgtgctcccctgatcaagaaattctcacgccgcgcgaacgcacgcctgaggcggttggatcctctggtggggttccttggtctcgatttgctgtgtggatgggggcgccgaagcagcgctggacgccggaggaagaggccgctctcaaggccggcgtcgccaagcacgggcccggcaagtggcgcaccatcctccgagactcggacttcagcgcgctcctgcgcctccgctccaatgttgacctcaaggacaagtggcgcaacttgagcgtcactgcaggaggttatgggtctagagagaaggcaaggatggcgttgaagaaaggtagacgcgtggtgcctaagcttactgctgagccaatggatgtagatgtgaaggatatggatgacgctcatgacacagccattgatgtggaacctttagcaatggctttcgagtccttgccaactgaggaaagtccagataagtcagttgctaggctcgatgatctcatattagaagctataaggaagcttaaggagccttctgggtccagtaaggcagccattgctgcatacattgaggaccaatactggccacctgctgattttcagcgcctgctatctacaaaactgaaggcattggttaattccggaaaattaatcaaggtaaaccaaaagtacagaattgcaccaagtccacccccctcgggcagaataggcactaaggtatcctctgctgaaggcatgaaggcagaaaataataatgctaaacggctaactaagcatcaagtgattgctgagctggagaagatgaaaggcatgaccaaggaagaggcagctgcctttgctgccaaggcagttgctgaggcagaagtagcaatagcagaagctgaggaagcagcaagagttgcagaggctgcagaaaatgatgctgaagctgcaaaggcttttcttgatgctgtcactttatcaatgagaaacaggaatgctgcttccatgatgcttcgagcttgctgatcctttacccatgcggtcatatggttttggccagcagcacaccggtgtttctgctgcaaagattttctggatatatgagtttcttgtatagccttatttatagatcacgacgcatcaactggaggggtttttaacatcttgctgttggtcctttgtcgttgcagcctttagacaatcgacaatatgataacaagagttatcttgaaagtagtcttcatttatttttgttttctccccattgtgttgctttgtaattaaactctagccttttcgtttagttatttgaaattgtgtcgtctagtagaacaactgtagtgaaaagaaaatgtcagatagccaccttagttattcaatttgctgtgatagtatgtttctagatatgattagctaatgacagcgtttaagattacattcccccaatggggtggtttggaaataaactttagcccttttggttaggtaattgaaaaaaaaaaaaaaaaggcggccggttctaaaagga

SEQ ID NO: 2710 - DNA, 700 bp, Zea mays
  Clone ID: TF_LIB4762-057-R1-K1-H8
aaaaaaaggaaaaaaaaaaaaaaaaaaaaaaaaaaaaaaaaaaaaaaaaaaaaaaaaaaaaaaatttatccagtcgcatttccctttccgaaatcaaggtagcgtacaccgctgcagtttctagagccctctttgccactcgggatcccactagtcacaatgcctgccctcgccaagcccgcctcccgcaccgccaagcccgccggggttccgaagccgtagcctgccgccgccaagccgaaggcggccaccgctggtgcctcccacccgccttacttcgagatgatcaaggaggctatcacggcgctcaaggagaggaccggctccagctcgcaagcgatcgccaagtatgtgggggacaagcacggggcgtttttgccggccaacttcaagaagatgctttccatccagctccgtgggtccgcagccaagggcaagctcgtgaaggtcaaggcttcgtacaagctctcggacgccgccaagaaggcatcccccaagaccaaggctaagccggcaaaggccgccgttgccaagaccaccgcccccaagccggccaaggccgccgccgccaagtcaaaaaaggcagcggctgccaagccaaaaaaggccgctgctgctgggaccaagcgcaaagtgcccgagaagaaggtcgtggcgaagccgaagaagtcccccgccgccaaggccaaggccaagccga

SEQ ID NO: 2711 - DNA, 423 bp, Zea mays
  Clone ID: TF_ZmC1022_25
acacgtccgcccacgcgtccgcagctctcgccttctctctctcatcggcacacccgagcttgcgccctccttccacttcgaggtccgagtcctgctttgatggcgaccgacgtggctgagactcccgcgccgttggtggatgcggccccagaggcgcccgcggacgccccggcggcgcctgctgccgacgcgaagccggccaaggccaagaaggccaccgcaccgaagaagcgcgccagcccgacccaccctccgtacgccgagatggtctcggaggcgatcacgtcactcaaggagaggacggggtccagcagctatgcgattgccaagttcgtggaggacaagcacaaggacaagctcccgcccaacttccgcaagcttctgaacgttcagctcaagaagctcgtcgccggcagcaagctg

SEQ ID NO: 2712 - DNA, 462 bp, Zea mays
  Clone ID: TF_LIB3354-104-Q6-K2-F6
ggccccgcggctccgaagccgaagcctgcggccgccaagccgaaggccggcaccggtgctgcctgccacccgccttactttgcgaggatcaaagaggctatcacagcgctcaacgagaggaccgcatccagctcgaaggcgaccgccaagtatgtcagagacaagcacagagcgtctctgacggccaactcaaagaagatgctgtccatccagctgctgagctccacacacaagggcaagctgataaagggcaaggctccgtacaaactgtcggacgccgtcatgaaagcatcgcccaagaccaaggctaagacaacacaagccgacggtgccaagaccaccaggcccaagcgcgccaaggccgtcgccgtcaagtcaaacaacgcagcgattgccaacccaaagaaggacgttgctgctgggaccaagcacaaagtgcccgaaaagaaggacaagaccaag

SEQ ID NO: 2713 - DNA, 430 bp, Zea mays
  Clone ID: TF_LIB5116-036-A1-PF1-H4
gctcctcctcctcctccaatctcaagcgagcacaccgcgcaagtagcaccgcttcagtttcggtttcagagctccgcttcagtcagctgacatgcctgccctcgccaagcccgctgcccgccccgccaagcccgccgccgcggcgccgaagccgaagcccgccgccgccaagcccaaggcggccgccgctggagccgcccacccgacctactttgagatgatcaaggaggcgatcgcggcgctcaaggacaggaccgggtcgagctcggtcgccatcgccaagtacatcgaggagaagcacggcaaggctctcccgcccaacttcaagaagatgctctccgtccagctccgcgcttccgccgccaagggcaagctcgtcaaggtcaaggcctcctacaagctctccgacgccgccaagaaggactccccc

SEQ ID NO: 2714 - DNA, 654 bp, Zea mays
  Clone ID: TF_ZmC159_1
ttcctcagagccgtctcgtcgcggcccctcccccctctcccgtgcgctgcgcccccaattcccgctccccacgcacccagacacgccgagcgggagaggaagcgacagccagcagccgaggcggccagcgccagcaggcatgaccactcccactcccagtggcgacggctcgcccccgggctcctccgacctcgtgcccccttcctaccccgagatgatcgtcgccgcgatcaccgccctcgccgaggagaacggctccagccaggccgccatcgcgcgccgcatcgaggcgcaggcccgcggcgacctgccggcctcgcacccggcgctcgtcgccgcccacctctcgcgcatgtccgccgcaggggagctcgtcgccgtcgcgggggggaagtacgcgctgcccccgccgccggcgcagccggcgccggagtcaccggctgacgacggcgaagacgacgacgacgacgacgagtgcgccgacgaggtggacgaggaagaggaggcgccggagcctctgctcgtgcctgtgcctgtgccgcagccgcccgccaagcgcgggcgtgggaggcccccgaagccgcgtcccgctggcttccccatcggcgtccccggagccgctgcgtcccccgccgccgcgccgcgacggcgcgg

SEQ ID NO: 2715 - DNA, 660 bp, Zea mays
  Clone ID: TF_ZmC1022_9
ccggccagacccagcaccgcagagctctcatctcctctctctctctctctctctctctctctcgcgctcgctttgcttcctcgtcgaggtccagttcctgcattgatggcgaccgaggtggctgagactcccgcgccgttggcggaggcggtccccgagacccccgcggaggcaccggcggcgcccgccgccgaggcgaattctaccaaggccaagaaggcctctgcgcccaagaagcgtgccaacccgacccacccgccgtacgccgagatgatctcggaggctgtcacgtcgctcaaggagcggacggggtccagccagtacgcgatcgccaagttcgtcgaggacaagcacaaggacaagctcccgcccaacttccgcaagctcctgctcggccagctcaagaagctcgtcgccgccggcaagctcaccaaggtgaagaactcctacaagctgcccgcacgcgccccggccgccgccaagccgaagcccaagtccaagaccgctgtgaagaagcccaaggccggggcgaagaagcccaaggccgccaccaagcccaagcccaaggccaaggccaagtcccccgctaaggcgaagcccgctgcaaagcccaaggcagccgcgaagccgaaacccgcagcagccaagcccaaggcggcc

SEQ ID NO: 2716 - DNA, 444 bp, Zea mays
  Clone ID: TF_LIB4740-023-R1-K1-D9
tggagtactacccaccgcctccgccgccgacacagcgtagtgtagtgtagttccggagagggttggggagagtagtagtgatccgcaatgtcgacggaggaggctgttgtggctgaggtcccggtgaccgaggtgccagcggaggtcccggcggcccaggtggccgaggcgcccaaggcgaagaaggcgcccaaggagaagaaggcgcctaaggagaagaagccgtccgcggcgaagaaaccggcggcgcacccttcctacccttagatgattgtagaggcgatcgctgcccttaaagagaggaaggggtcgagctccgtggccattaacaagtacctcgaggggaagcacggcgggaagcttcccacccactttctgaaggcagttaacctgcaaattaagaaacctcgttgccgccgccaacttacacagggtcaaaaattc

SEQ ID NO: 2717 - DNA, 624 bp, Zea mays
  Clone ID: TF_LIB4826-020-A1-N1-C2
ccggccgggatccagtcgcatctccctctccgaaatcaaggtagcgtacaccgctgcagtttctagagccctctctgccactcgtgatcccactagtcacaatgcctgccctcgccaagcccgcctcccgcaccgccaagcccgccgcggctccgaagccgaagcctgccgccgccaagccgaaggcggccaccgctggtgcctcccacccgccttacttcgagatgatcaaggaggctatcacggcgctcaaggagaggaccggctccagctcgcaagcgatcgccaagtatgtgggggacaagcacggcgcgtctctgccggccaacttcaagaagatgctttccatccaacttcaagaagtcccaagccgaagaccgtgaagtcccctgcctccaagaaggcacggaaggcctccgcatgagatgggttgctttaggtctaagctctgattgtggttggtgtcagttaggtactgtacaaactaagtgtgtgcccaaagtgtctcaggcggtgtgttatgtgcttagcaagttctatctatcagagtgttttagtttaacaatggttttacctctggcttttgtagtcaggtttctgaaaaaaaaaaaaaaaaaagcggcc

SEQ ID NO: 2718 - DNA, 603 bp, Zea mays
  Clone ID: TF_ZmC8559_2
ctttttctttcttgttccggtgctgttcttggcgcggattcgtccttgggctggagaggtagctgggttcgggggatgctgccgcgctccatgcgtgctgcatggcggtttctttcgtttccgtttgactaaaaatatatataaaaaagagaattttctctgtggtgggaaacaattcattccgcacggcatccgggaaggtctgcgtcgtcgccatggccaccgaggaagtcgccaagccgtccccgatcccgccctaccccgagtgagctaaccgacggcgcgtcgtgttggttgggcgttccggcagatgatcctggcggcgatcgaggacttaggcgacaagagcgggtcgaacaagtcggccatctccaggtacatcgagggcaagtacgacggcgacctgccgcccgcgcacgcgtcgctgctggccgcgcacctggcgcgcatgaaggagtcgggcgagctggtcttcgtcaagaacaactacttccgcgtcgacgcgcccgacgcgccgccgaagcgcgggcgcgggcggcccccgaaggcgcgggaccccggcgcgccggtgtcgccgccatcggggcgcgggcgcgggcctgt

SEQ ID NO: 2719 - DNA, 363 bp, Zea mays
  unsure (1)..(363): unsure at all n locations
  Clone ID: TF_LIB3117-014-Q1-K1-C6
atctccctctccnaaatcaaggtagcgtacaccgcttcagtttctagagccctctctgcggctcggtatcccactagtcacagggcgtgccctcgccaagcccgcctcccgcaccgccaagcccgccgcggctccgaagccgaagcctgccgccgccaagccgaaggcggccaccgctggtgcctcccacccgccttacttcgagatgatcaaggaggctatcacggcgctcaaggagaggaccggctccagctcgcaagcgatcgccaagtatgtgggggacaagcacggcgcgtctctgccggccaacttcaagaagatgctttccatccagctccgtgggtccgcaaccaaaggcaagct

SEQ ID NO: 2720 - DNA, 504 bp, Zea mays
  Clone ID: TF_LIB3354-004-P1-K1-B9
ggtagcgtacaccgatgcagtttctagagccgtggctgccaatcgtgatcccactagacacaatgcctgccctcgccaagcccgcctcccgcaccgccaagcccgacgaggctccgaagccgaagcctgccgccgccaagccgaaggcgggcaccgctggtgcctcccacccgccttacttcgagatgatcaaggaggctatcacggcgctcaaggagaggaccggctccagctcgcaagcgatcgccaaggatgtgggggacaagcacggcgcgtgtctgccggccaacttcaagaagatgctttccatccagctccgtgggtccgcagccaagggcaagctcgtgaagggcaaggcttcgtacaagctctcggacgccgacaagaaggcatactccaagaccaaggctaagccggcaaagggcgccggtgacaagaccaccgaccccaagccggacaaggccggcggcggcaagttaaaaaaggcagcgggtgccaagccaa

SEQ ID NO: 2721 - DNA, 571 bp, Zea mays
  Clone ID: TF_LIB3587-232-Q1-K6-F2
cacccaccggctccgccgccgtcaacagcgtagtgtagtgtagttccggcgagggttggggagagtagtagtgatccgcaagtcgaccgaggaggctgttgtggctgaggtcccggtgaccgaggtgccagcggaggtcccggcggcccaggtggcccaggcgcccaagcgaagaagcgcccaaggagaagaaggcgcctaacgagaagaagctttcaccggcgaagaagccggttgcgcaccctccctacgctgagatgattgtagaggccatcgctgcccttaaggagaggaaggggtcgagctcggtggccatcagcaagtacgtctaggggaagcatggcggcaagctccctaccaactttcgcaagcagatcactgtgcaacttaagaagctctctgccgcccgcaagctgacgaaggtgaagaactccttcaagatgacggtcaccgacgccaagcccaaggtcggcaagcccaaagcacccaagaacgcgcccaagcccaagccctctcctatagcgaaggccaagaccgctgcgaatcccaagtcggcgtggcccaaacccaa

SEQ ID NO: 2722 - DNA, 1378 bp, Zea mays
  Clone ID: TF_ZmC1022_1
cccacgccgcccagctcacctcattgctccctcgacccggcgggcatacccaccccacagctctcgccttctctctcccatcggcacacccgagctcgctccctccttccacgtcgaggtccgagtcctgctttgatggcgaccgacgtggctgagactcccgcgccgttggtggatgcggccccagaggcgcccgccgacgccccggcggcgcctgctgccgacgcgaagccggccaaggccaagaaggccaccgcgccgaagaagcgcgccagcccgacccacccgccgtacgccgagatggtctcggaggcgatcacgtcgctcaaggagaggacggggtccagcagctatgcgattgccaagttcgtggaggacaagcacaaggacaagctcccgcccaacttccgcaagcttctgaacgttcagctcaagaagctcgtcgccggcggcaagctgaccaaggtgaagaactcgtacaagctgtcgtccgccgccaccaagccgaatcccaagcccaaggccgccccgaagaagcccaagaccggcgctaagaagcccaaggccgctgccaagaccaaagctaagacccccgccaaggcgaagcccgccacaaagcccaagcccgccgcgaagccgaaagccgtagtgaagccgaagacacccgccaagcccaaggccaagccagctgccaaggcgaagcccaagaccgccggcgctaagccgaagccacttgctaagaaagccggccgccccgccaaggcggcgaagacgtcggccaaggacacgccagggaagaaggcgccggtggccaagaagtccgctgctgccgcgaagaaggcccctgccaagaaggccgctccctcgaagaaggcggcgaccccggtgcggaaagcgccgtcccgtaaggccaagaagtaaagcggccaagaaggggggcgcgatgctgtaaatttgatatcggagaggctcgggtacactggtcattcagtatccgagaccgatagctgaggctagtggcgatggaggactgtgttattactactataaactggtggttgtgtttctgtaactggtgaatgatcaagttggaagcttttagtctatcttagatatatcagtggatagtgttttttgtattttcgttttcttttccaatgtgtgttgggtcttgtggattatcctttttttctaatctaatacaatgaagaggcatgtcttttgaagcttccataaaaaaaaaaaaaaaaataggctgagaaaaaaatggtattatctgaattccctatctgaaatagagaattgttcggtgtgctagctgaaatgaatggtcggtggcgaacaatgacgatggagattttttaaaaaaaaaaaaaaa

SEQ ID NO: 2723 - DNA, 1227 bp, Zea mays
  Clone ID: TF_ZmC1022_4
ccccgcgtccgccccgcgtccgcccacgcgtccgcccacgcgtccgcggctcctctctcccatcggcacacccaagctcgcgccctccttccacgtcgaggtccgagtcctgctttgatggcgaccgacgtggctgagactcccgcgccgttggtggatgcggccccagaggcgcccgccgacgccccggcggcgcctgctgccgacgcgaagccggccaaggccaagaaggccaccgcgccgaagaagcgcgccagcccgacccacccgccgtacgccgagatggtctcggaggcgatcacgtcgctcaaggagaggacggggtccagcagctatgcgattgccaagttcgtggaggacaagcacaaggacaagctcccgcccaacttccgcaagcttctgaacgttcagctcaagaagctcgtcgccggcggcaagctgaccaaggtgaagaactcgtacaagctgtcgtccgccgccaccaagccgaatcccaagcccaaggccgccccgaagaagcccaagactggcgctaagaagcccaaggccgctgccaagcccaaagctaagacccccgccaaggcgaagcccgccacaaagcccaagcccgccgcgaagccgaaagccgtagtgaaaccaagccgaaggccaagccagctgccaaggccaagccgaaggctgccgcggccaagccgaagccagctgccaagaaggccggccgccccgccaaggccgccaagacgtcagccaaggacacgcccgggaagaaagcggcgcccgccaagaagcccgctgctgcggccaagaaggcccctgccaagaaggccgccccagccaagaaggctcccaccccgtcgcggaaggtgccgtcgcgtaaggcgaagaagtagagcggtggtcttggcaggaatctagggtttcatgctccttcgattttagatgtttactcgtttttgctctagttgtgggtggtgtgcggggtgggttactaggttgtaaatttgatgccggaggctggggtacacatgggcattctgtaccagcggtggaagggcggaggcgccggcgacgatgacgaaccagtgtgtgttattattagaagacgaagttgtatttctgtagctgaattgtggagttgcggatatcattgtgcttctaaggttaatgtgacgataaagttaaatgtcgagagttaccaacaaaaaaaaacgtacactgggattattc

SEQ ID NO: 2724 - DNA, 831 bp, Zea mays
  unsure (1)..(831): unsure at all n locations
  Clone ID: TF_ZmC673846_1
gggtacctcgaggccggccgggatcagtcatcacccaccgcctccgccgccgacaacagcgtagtgtagtgtagttccggagagggttggggagagtagtagtgatccgcaatgtcgacggaggaggctgttgtggctgaggtcccggtgaccgaggtgccagcggaggtcccggcggcccaggtggccgaggcgcccaaggcgaagaaggcgcccaaggagaagaaggcgcctaaggagaagaagctttccgcggcgaagaagccggcggcgcaccctccctacgctgaggtgaggtttagtccgttgcgatctagccgattcgttgcttcgttaggatcgtctcctcttatggaatctgttggattgattctgtcgctctgttctgttcatgtccgcgaattcgatattgaatctgagacgcaacctgttgggtctgtctggctgcagatgattgtagaggcgatcgctgccctcaaggagaggaaggggtcgagctcggtggccatcagcaagtacgtcgaggggaagcatggcggcaagctccccaccaacttccgcaagcagctcactgtgcagctgaagaagctcgctgccgccggcaagctgacgagggtgaagaactccttcaagctgccggccaccgacgccaagcccaaggccgccaagcccaaggcacccaaggccgcgcccaagcccaagccctcgccgaaggcgaaggccaagaccgctgcgaagcccaaggcggcgtcgcccaagcccaaggccaaggccaaggccaagcctgtcgctccggctgtcgctcctgccngcgcgtcgccccaagccccg

SEQ ID NO: 2725 - DNA, 1227 bp, Zea mays
  unsure (1)..(1227): unsure at all n locations
  Clone ID: TF_ZmC1022_5
ccccgcgtccgccccgcgtccgcagctcccggctcctctctctcatcggcacacccaagctcgcgcccaccttccacgtcgaggtccgagtcctgctttgatggcgaccgacgtggctgagactcccgcgccgttggtggatgcggccccagaggcgcccgccgacgccccggcggcgcctgctgccgacgcgaagccggccaaggccaagaaggccaccgcgccgaagaagcgcgccagcccgacccacccgccgtacgccgaggtaattggtgccctccctttgatccttctgccgtgccgtgctgtgcgtgcctctccgccgcgtctggatcttactgaatagtggatggtcggtgcgcagatggtctcggaggcgatcacgtcgctcaaggagaggacggggtccagcagctatgcgattgccaagttcgtggaggacaagcacaaggacaagctcccgcccaacttccgcaagcttctgaacgttcagctcaagaagctcgtcgccggcggcaagctgaccaaggtgaagaactcgtacaagctgtcgtccgccgccaccaagccgaatcccaagcccaaggccgccccgaagaagcccaagactggcgctaagaagcccaaggccgctgccaagcccaaagctaagacccccgccaaggcgaagcccgccacaaagcccaagcccgccgcgaagccgaaagccgtagtgaaaccgaagacacccgccaagcccaaggccaagccagctgccaaggcgaagcccaagaccgccggcgctaagccaaagccacttgctaagaaagccggccgccccgccaaggcggcgaagacgtcggccaaggacacgccagggaagaaggcgccggtggccaagaagtccgctgccgccgcgaagaaggcccctgccaagaaggccgctccctcgaagaaggcggcggccctggtgcggaaagcgccgtcccgtaaggccaagaagtagagcggccaagatggggggcgcgatgttgtaaatttgatatcggagaggctcggggtacactggtcattcagtatccgagaccgatagctgaggctagcggcgatggaggactgtgttattactactataaactggaggttgtgtttctgtaactggtgaatgatcaagttggaagcttttagtctatcttaaatagatcagtggatagtgttttttgtaaaaaaaaaaaaaaaaaaaanacc

SEQ ID NO: 2726 - DNA, 1337 bp, Zea mays
  Clone ID: TF_ZmC13520_2
acctcgaggcctggagggccgggccgggccgggatatacgttaaataaaataaattagaaagctatctatccaggtggattagggtttttgcctcggctagcagtagtagctaatttggacgcaggagatacggagtagggcgaaccgcgaggagagcaagctatgggcgcgccgaagcagaagtggacgtcggaagaggaggatgcgctccgccgtggcgttcgcaagcacggcgccggcaaatggcggaccatccagaaggacccccagttcagcccgatcctctcctcccgctccaatatcgacctcaaggacaaatggaggaatttaagtttcagtgcaagtggactgggatcgagtaaagtacgggttccaaagataactggatcctcatcttcaccatcatctagctcacaggctctgcttctcccagcggcaaataatgttacagaagctatgctgcctgcagatgctgacaaaaagccacgggatgggaaaactccgccaaagtatggtgccatgattatggaagctctttcggaattgaatcagccgaatggttcagatattgatgcaatcttcgacttcataaagcaaaggcatgtggtgcaatcgacctttagaagatttctaccctcaaagttacggcgacttgcagactcaaacaaaattgaaaaggtcgataacttctataggctcccagattcatttgcaacaaggactccagctcaaataaaagtttcagatccaaaacagaaggatccatctaaggcgtcaaagaccatagcttgtttgctgcctccagccctgcactagaggcagcgatggcagctgctgtcaaggtgactgacgccgaggcaaaagcacatgatgcacatgatcagatgatggaggcagaaaggatgctgaagatggctgaggataccgagtctatcctcacaattgcagcagagatctatgatcgatgttcaaggggggagataaccacattagttccagtggcgcaaagggagttttgaaatctattggagactcttgtcttgtacatgggataggttttggaatccggaggcccttacttgggatatgccctagggttaataacaacagcgcaccgcctgtcttcagactttgtaatgatatgtaatcccatctttcccattcccagcctgtcactgcaagctgcggtcgtgaatcctgatggcagtaaagttttttttttgttgacatgacgaaagaatagagcaggaaaaagtggtttaaacagatgaggtagggtagtaggatggtaaagtgttactggtataagataatataatgtgccgcagttttttcc

SEQ ID NO: 2727 - DNA, 372 bp, Zea mays
  Clone ID: TF_LIB3357-042-P1-K1-C6
ccgccgacaacagcgtagtgtagtgtagttccggagagggttggggagagtagtagtgatccggaatgtcgacggatgaggctgttgtggctgatgtccctgtgaccgaggtgccagcggatgtcccggcggaccatgtggccgacgcgcccaaggcgaagaaagcgcccaaggagaagatagcgcctaaggagaagaagctttccgcggcgaagaagccggcggcgcaccctccctacgctgagatgattgtagaggcgatcgctgccctcaaggagaggaaggggtcgagctcggtgtccatcatcaagtacgtccaggggaatcatggcggtaagcttcccaacaactttcaaaagcagctcactgtgc

SEQ ID NO: 2728 - DNA, 1156 bp, Zea mays
  Clone ID: TF_ZmC366_1
atgacgctgagttccggcgcgacccgggtaggagcaaccgcttgcgtcagacgcacactgacggagagtgatcactgatttctggtcatgcgagtaggagcaaccgcttgcgtcagacgcacactgacggagagtgatcactgatttctggtcatggcaaccgtaactgaggaagttgctccggtcgtcaccgtctccgaggagccggcgccggaagcggcgaaggaggtggtggagaagccggaggaggggaagaagcccgacgaggagggtgacgagaggaagaaggccgaccccgccgccgagaaggagaagaaggccgaccccgccgccgagaaggagaagaaggcgaggaagccgcggagcaggaagcccaagtccgccgggctgcaccacccgccctatttcgagatgatcaaggaggcgatcctgtcgcaggacggcgggaaggtcggggcgagcccgtacgcgatcgccaagcacatgggggagaagcaccgggacgtgctcccgcccaattaccgcaaggtgctggccgtgcagctgcgcggcttcgccgccaagggccgcctcgtcaaggtcaaggcctccttcaagctcgccgccgccgaggagaggaagccctccaagaagaaggcgtcggcgggaatggccaagcgcaagagggccgccgcgccggccaagatgaagccggcggccgctgcctcggcgccgtcggcctcggcgccgtcgagggaggcacgtaaggtgcgcgcgaagcgagcgaggaaggtggccccggcgcccgcgcagcccaagcccaagccagcccgcgccgccgcttccggtgccggcaagaaggtcaacaaggccagcgcctgattagcggcggccgtcctggtccccccgcgcgcgcctccgtgtattatactagccggtagtagcagtaggagttgcaagtactagcagcgtggtagtcgtgatgatgttgtggtcgtcgtctccgccggcccgatcgatcgggcgctctgttccgccgtgtggcagagttttgtaaataactagtctggtgtgatgcgctcatggcaataaagcgcgcgcttctagcttccttgatgaaaaaaaaaaaaaaaaaaaactaaaaaaaaaagggcggccctcgcgatctagaactagt

SEQ ID NO: 2729 - DNA, 779 bp, Zea mays
  Clone ID: TF_ZmC366_2
ggcccgcttctcccagctggggggttccccccgggcagcagagcgagggccgggtaggagcaaccgcttgcgtcagacgcacactgacggagagtgatcactgatttctggtcatggcaaccgtaactgaggaagttgctccggtcgtcaccgtctccgaggagccggcgccggaagcggcgaaggaggtggtggagaagccggaggaggggaagaagcccgacgaggagggtgacgagaggaagaaggccgaccccgccgccgagaaggagaagaaggcgaggaagccgcggagcaggaagcccaagtccgccgggctgcaccacccgccctatttcgagatgatcaaggaggcgatcctgtcgcaggacggcgggaaggtcggggcgagcccgtacgcgatcgccaagcacatgggggagaagcaccgggacgtgctcccgcccaattaccgcaaggtgctggcagtgcagctgcgcggcttcgccgccaagggccgcctcgtcaaggtcaaggcttccttcaagctcgccgccgccgaggagaggaagccctccgcggccgcgaaggcgaagaagaaggcgtcggcgggaatggccaagcgcaagagggccgccgcgccggccaagaagaagccggcggccgctgcctcggcgccgtcgagggaggcacgtaaggtgcgcgcgaagcgagcgaggaatgtggccccggcgcccgcgcagcccaagcccaagccagcccgcgccgccgctttcggtgccggcaagaaagtcaacaag

SEQ ID NO: 2730 - DNA, 624 bp, Zea mays
  Clone ID: TF_LIB5075-005-R1-XP1-C6
gccggccgggtcgggatccagtcgcatctccctctccgaaatcaaggtagcgtacaccgctgcagtttctagagccctctctgccactcgtgatcccactagtcacaatgcctgccctcgccaagcccgcctcccgcaccgccaagcccgccgcggctccgaagccgaagcctgccgccgccaagccgaaggcggacaccgctggtgcctcccacccgccttacttcgagatgatcaaggaggctatcacggcgctcaaggagaggaccggctgccaagccaaagaaggccgctgctgctgggaccaagcgcaaagtgcccgagaagaaggacgtggcgaagccgaagaagtcccccgccgccaaggccaaggccaagccgaagaccgcgaagtcccctgcctccaagaaggcacggaaggcctccgcatgagatgggttgctttaggtctaagctctgattgtggatggtgtcagttaagtactgtacaaactaagtgtgtgcccaaagtgtctcaggcggcgcgctatgtgcttagcaagctctatctatcagagtgttttagtttagtttgcccagaagttccttgagtttgatccactgcatgatgaaaaaaggccccta

SEQ ID NO: 2731 - DNA, 770 bp, Zea mays
  unsure (1)..(770): unsure at all n locations
  Clone ID: TF_ZmC159_3
cagnaccgcgtcgtcgcggcccctcccccctctcccgtgcgctgcgcccccaattcccgctccccacgcacccagacacgccgagcgggagaggaagcgacagccagcagccgaggcggccagcgccagcgcaggcatgaccactcccactcccagtggcgacggctcgcccccgggctcctccgacctcgtgcccccttcctaccccgaggcaagcctccctccctccgttccaaccctacctctttcgactcctctccgctactcctttccgccagatctgcgccgatctgcggaatcgactgacccgtgcgcctgccctggctgctgcagatgatcgtcgccgcgatcgcagccctcgccgaggagaacggctccagccaggccgccatcgcgcgccgcatcgaggcgcaggcccgcggcgacctgccggcctcgcacccggcgctcgtcgccgcccacctctcgcgcatgtccgccgcaggggagctcgtcgccgtcgcgggggggaagtacgcgctgcccccgccgccggcgcagccggcgccggagtcaccggctgacgacggcgaagacgacgacgacgacgacgactgcgccgacgaggtggacgaggaagaggaggcgccggagcctctgctcgtgcccgtgcctgtgccgcagccgcccgccaagcgcgggcgtgggaggcccccgaagccgcggcccgctggcttcncccatcggcgtccccggagccgctgcgtcccccgccgccgcgccgcgacggc

SEQ ID NO: 2732 - DNA, 422 bp, Zea mays
  unsure (1)..(422): unsure at all n locations
  Clone ID: TF_jC-zmXLIB3527P017Dg06a1
caccgctgcagtttctagagccctctctggcactngtgatcccactagtcacattgcctgccctcgccaagcccgcctcccgcaccgncaagcccgccgcggctccgaagccgaagcctgccgccgccaagccgaaggcggncaccgntggtgnctncnancngncttacttnnaaatgatcaaggaggctatcacggcgctcaaggagaggaccggctccagctcgcaagcgatcgccaagtatgtgggggacaagcacggcgcgtctctgccggccaacttcaagaagatgctttccatccagctccgtgggtccgcagccaagggcaagctcgtgaaggtcaaggcttcgtacaagctctcggacgccgccnagaaggcatnccccaagaccaaggctaagccggcaaagggccgcgct

SEQ ID NO: 2733 - DNA, 633 bp, Zea mays
  Clone ID: TF_LIB4766-069-R1-K1-F8
cattgggtccctcgaggccggccgggatcagtttttcccaccgcctccgccgccgacaacagtcgtagtgtagtgtagttccggagagggttggggagagtagtagtgatccgcaatgtcaacggaggaggctgttgtggttgacgttccggtgaccgaggtgccagcggaggtcccggcggcccttgtggccgaggcgcccatggcgaagaaggcgtccaaggagaaaaatgcgcctaaggagaagaagctttccgcggcgaagaagccggcggcgcaccctccctacgctgagatgattgtagaggcgatctctgccctctaggagaggaaggggtcgagctcggtggccatcagcaagtacgtcaaggggaagcatgtcggcaagctcccctccaacttccgcaagcatctcactgtgcatctgaagaagctcgctgccgccggcaagctgacgagggtgaagaactccttcatgctgccggccaccgacgccaagtccaagggcgtcaagtccaagggaccctacgacgcgcccaatatccaagtcctcgtcctacgtgaaggccaatatcgctgcagaatccttggaggagtcgctctaaccctaggccaagggcaaggtcaagactg

SEQ ID NO: 2734 - DNA, 801 bp, Zea mays
  Clone ID: TF_ZmC4197_3
cacctccctctccgaaataaggtagcatacaccgctgcagtttctagagccctctctgccactcgtgatcccactagtcacgatgcctgccctcgccaagcccgcctcccgcaccgccaagcccgccgcggctccgaagccgaagcctgccgccgccaagccgaaggcggccaccgctggtgcctcccacccgccttacttcgagatgatcaaggaggctatcacggcgctaaaggagaggaccggctccagctcgcaagcgatcgccaagtatgtgggggacaagcacggcgcgtctctgccggccaacttcaagaagatgcttacaacgcagcgcggggggtccgcagccaagggcaagctcgtgaaggtcaaggcttcgtacaagctctcggacgccgccaagaaggcatcccccaagaccaaggctaagccggcaaaggccgccgctgccaagaccaccgcccccaagcgcaaagtgcccgagaagaaggtcgtggcgaagccgaagaagtcccccgccgccaaggccaaggccaagccgaagaccgtgaagtcccctgcctccaagaaggcacggaaggcctccgcatgagatgggttgctttaggtctaagctctgattgtggttggtgtcagttaggtactgtacaaactaagtgtgtgcccaaagtgtctcaggcggtgtgttatgtgcttagcaagttctatctatcagagtgttttagtttaacaatggttttcccataaaaaaaaaaaaaaaaaaaaaaaaaaaaaagtactctgcgttgttaccactgc

SEQ ID NO: 2735 - DNA, 553 bp, Zea mays
  Clone ID: TF_LIB3912-032-Q6-K6-H10
cccacgcgtccgccctgtccgaaaccaagtagcgtacaccgctgcagtttctagagccctctctgccactcgtgatcccactagtcacaatgcctgccctcgccaagcccgcctcccgcaccgccaagcccgccgcggctccgaagccgaagcctgccgacgccaagccgaaggcggccaccgatggtgcctaccacccgacttacttcgagatgatcaaggaggctatcacggcgctcaaggagaggaccggctccagctcgcaagcgatcgccaagtatgtgggggacaagcacggcgcgtctctgccggacaacttcaagaagatgctttccatccagctacgcgggtccgcagccaagggcaagctcgtgaaggtcaaggcttcgtacaagctctcggacgccgccaagaaggcatccgccaagaccaaggctaagccggcaaaggccgccgctgccaagaccaccgcccacaagccggccaaggacgccgacgacaagtcaaataacgcagcggctgccaagccaaataatgccgctgctgctgggac

SEQ ID NO: 2736 - DNA, 577 bp, Zea mays
  unsure (1)..(577): unsure at all n locations
  Clone ID: TF_LIB3959-022-Q1-K6-A5
gggtcgacccagcgttcgccccgcgtccggcacctccgggggggggggggggggggggacaccgctgcagtttctagagccctctctgccactcgtgatcccactagtcacgatgcctgccctcgccaagcccgcctcccgcaccgccaagcccgccgcgggtcctaaccnaacctgccccccgggggggggggggaccgctnntgcctcccacccgccttactttgagatgatcaagggggctatcacggggctaaaggagaggaccggctccagctcgcaagcgatcgccaagtatgtgggggacaagcacggcgcgtctctgccggccaacttcaagaagatgctttccatccagctccgtgggtccgcagccaagggcaagctcgtgaaggtcaaggcctcgtacaagctatcggacgccgccaagaaggcatcgcccaagaccaaggccaagccggcaaaggccggcgcagccaagaccaccggctccaagccggccaagcccgccgccgccaagtcaaagaaagcagcgggtgccaagcctaaaaaaaccggtgctgctgggaccaagcgc

SEQ ID NO: 2737 - DNA, 770 bp, Zea mays
  Clone ID: TF_ZmC163344_1
ttgggaccctcgaggccggccgggagatccaggttctctctccctttcactccggtggcggcgagagcaagtagcacaaacttatgtgaaagcgactccaaactacgatggatccccagatctagtgacattgagggcaagtagcaagagtttggcagcagtcgtggactacgacggatccaaacaagtcaacctctcagatctgatctggtgactacaaggtcaagcagcacaaactttggtggtagcagcttcagactacgaaaggtcgccaagagtaataagcaggattcaaagatgatggttacacgagagcatccaatgaggagcagggaatgccagctttgccatgaaaacccgctctcttcgccaagcatgaccaaaatgattgtagaggcgatcgctgccctcaaggagaggaaggggtcgagctcggtggccatcagcaagtacgtcgaggggaagcatggcggcaagctccccaccaacttccgcaagcagctcactgtgcagctgaagaagctcgctgccgccggcaagctgacgagggtgaagaactccttcaagctgccggccaccgacgccaagcccaaggccgccaagcccaaggcacccaaggccgcgcccaagcccaagccctcgccgaaggcgaaggccaagaccgctgcgaagcccaaggcggcgtcgcccaaacccaaggccaaggccaaggccaagagcctgtcgctcctgccgccgcgtcgcccaagccccgcgggcgccctcccaag

SEQ ID NO: 2738 - DNA, 694 bp, Zea mays
  unsure (1)..(694): unsure at all n locations
  Clone ID: TF_ZmC163344_2
ggtaccctcgaggccgggcggagatcaggttctctctccctttcaactccggtggcggcgagagcaagtagcacaaacttatgtgaaagcgactccaaactacgatggatccccaggagtaataagcaggattcaaagatgatggttacacgagagcatccaatgaggagcagggaatgccagctttgccatgaaaacccgctctcttcgccaagcatgaccaaaatgattgtagaggcgatcgctgccctcaaggagaggaaggggtcgagctcggtggccatcagcaagtacgtcgaggggaagcatggcggcaagctccccaccaacttccgcaagcagctcactgtgcagctgaagaagctcgctgccgccggcaagctgacgagggtgaagaactccttcaagctgccggccaccgacgccaagcccaaggccgccaagcccaaggcacccaaggccgcgcccaagcccaagccctcgccgaaggcgaaggccaagaccgctgcgaagcccaaggcggcgtcgcccaaacccaaggccaaggccaaggccaagcctgtcgctcctgccgccgcgtccaaaannnccccccgngggcgcccttccaaggtcgccaagacctccgccaaggcctcccccgccaagccagccaagaaggcggctgctccctgccaagaagggaaaggcagcg

SEQ ID NO: 2739 - DNA, 518 bp, Zea mays
  unsure (1)..(518): unsure at all n locations
  Clone ID: TF_LIB4730-062-R1-K1-F6
agtcatgacccaccgcactccggcgccgctacagcgtagcggtgtgtatctccttacatggttgcagagagtactatatactccgcaatgcgcgacggcacgacgcttgntgttggctgatgtcgcctggtgatccgagggtgccagcgatatgtctcaggcgtcgccacgtggcgcgaggcgacccaacgtcgatagcaacgccgcctcaagacgaataaggcgcctaaggagaagaagccgtccgcggctgaagaagccggcggcgcaccctccctacgctgtgatgattggagaggcgatcgctgccctcaaggagaggaaggggtcgagctcggaggccatcaacaagtacgtctgagcggaatcactgcggcaagctccccaccaacttccgcaagcagctcaacgtgcaagtgaagaaggttgcttacgtcagcaagctaacgagggtgaagaactgcttgaagctgccgtgcaccgacgccaagcccaaggccggcaagcccaaggcaccc

SEQ ID NO: 2740 - DNA, 428 bp, Zea mays
  Clone ID: TF_cC-zmle189061e03d1
ccgaaatcaaagtagcagacaccgctgcagtttctagagccctctctgccactcgagatcccactagtcacaaagcctgccctcgccaagcccgcctcccgcaccgccaagcccgccgaggctccgaagccgaagcctgccgccgccaagccgaaggcggccaccgctggtgcctcccacccgccttacttcgagatgatcaaagaggctatcacggcgctcaaggagaggaccggctccagctcgcaagcgatcgccaagtatgagggggacaagcacggcgcgtctctgccggccaacttcaagaagaagctttccatccagctccgagggtccgcagccaaaggcaagctcgagaaggtcaaagcttcgtacaagctctcggacgccgccaagaaggcatcccccaagaccaatgctaagccggc

SEQ ID NO: 2741 - DNA, 441 bp, Zea mays
  Clone ID: TF_jC-zmX189017Q1E1C8b1
gctgcccacgcgtccgcagctctcgccttctctctctcattggcacacccgagcttgcgccctccttccacttcgaggtccgagtcctgctttgatggcgaccgacgtggctgagactcccgcgccgttggtggatgcggccccagaggcgcccgcggacgccccggcggcgcctgctgccgacgcgaagccggccaaggccaagaaggccaccgcaccgaagaagcgcgccagcccgacccaccctccgtacgccgagatggtctcggaggcgatcacgtcactcaaggagaggacggggtccagcagctatgcgattgccaagttcgtggaggacaagcacaaggacaagctcccgcccaacttccgcaagcttctgaacgttcagttcaagaagctcgtcgccggcggcaagctgaccaaggtgaagaacttgtacaa

SEQ ID NO: 2742 - DNA, 1115 bp, Zea mays
  Clone ID: TF_ZmC4197_1
tgggtccctcgggctcggccggaacagccttctattatctattgtcttttagttatacgtgtgcttgggagtccttgcaatttgaataaagctgcgaccattgggtccctcgaggccggccgggatccagtcgcacctccctctccgaaatcaaggtagcatacaccgctgcagtttctagagccctctctgccactcgtgatcccactagtcacgatgcctgccctcgccaagcccgcctcccgcaccgccaagcccgccgcggctccgaagccgaagcctgccgccgccaagccgaaggcggccaccgctggtgcctcccacccgccttacttcgagatgatcaaggaggctatcacggcgctaaaggagaggaccggctccagctcgcaagcgatcgccaagtatgtgggggacaagcacggcgcgtctctgccggccaacttcaagaagatgctttccatccagctccgtgggtccgcagccaagggcaagctcgtgaaggtcaaggcttcgtacaagctctcggacgccgccaagaaggcatcccccaagaccaaggctaagccggcaaaggccgccgctgccaagaccaccgcccccaagccggccaaggccgccgccgccaagtcaaagaaggcagcggctgccaagccaaagaaggccgctgctgctgggaccaagcgcaaagtgcccgagaagaaggtcgtggcgaagccgaagaagtcccccgccgccaaggccaaggccaagccgaagaccgtgaagtcccctgcctccaagaaggcacggaaggcctccgcatgagatgggttgctttaggtctaagctctgattgtggttggtgtcagttaggtactgtacaaactaagtgtgtgcccaaagtgtctcaggcggtgtgttatgtgcttagcaagttctatctatcagagtgttttagtttaacaatggttttacctctggcttttgtagtcaggtttctgaaaaaaaaaaaaaaaaaaacggccaaaaaaaaaaaacctatccaaaaaaaaaaaaaaaaaaaaaaacacttgaaaaacgccttgaataaagcagaaagataaaccaagtgaagcaacagaacaactaaatga

SEQ ID NO: 2743 - DNA, 1579 bp, Zea mays
  Clone ID: TF_ZmC4197_2
ttgggaccctcgaggccggccgggatagggagtcctgaaccccctatccagtcgcatctccctctccgaaatcaaggtagcgtacaccgctgcagtttctagagccctctctgccactcgtgatcccactagtcacaatgcctgccctcgccaagcccgcctcccgcaccgccaagcccgccgcggctccgaagccgaagcctgccgccgccaagccgaaggcggccaccgctggtgcctcccacccgccttacttcgagatgatcaaggaggctatcacggcgctcaaggagaggaccggctccagctcgcaagcgatcgccaagtatgtgggggacaagcacggcgcgtctctgccggccaacttcaagaagatgctttccatccagctccgtgggtccgcagccaagggcaagctcgtgaaggtcaaggcttcgtacaagctctcggacgccgccaagaaggcatcccccaagaccaaggctaagccggcaaaggccgccgctgccaagaccaccgcccccaagccggccaaggccgccgccgccaagtcaaagaaggcagcggctgccaagccaaagaaggccgctgctgctgggaccaagcgcaaagtgcccgagaagaaggtcgtggcgaagccgaagaagtcccccgccgccaaggccaaggccaagccgaagaccgtgaagtcccctgcctccaagaaggcacggaaggcctccgcatgagatgggttgctttaggtctaagctctgattgtggttggtgtcagttaggtactgtacaaactaagtgtgtgcccaaagtgtctcaggcggtgtgttatgtgcttagcaagttctatctatcagagtgttttagtttaaaaaaaaaaaaaaaaaaacaaaaaaaaaaaaaaaaaagcggccgaaagatacttttccttttttctgttgattcaatgacacatacaaaatactcatcggtctgcatctgccgaaaactcgcgcaaggcacgttgccaagcttttgacctccatgctctgccttgagtagggctcgctctcgagggagacaacctccatcaataagacctactgcccgctcccgccactagaataacgacagatgcaactctaaaggtgaatattgctaaaacttatacatgttattcgcattctactatttttcaatctttgaatacttattagttaactctgattcaccatttacaaatgtagttgatcatcaggctgcaaacagcctcctatgtatagtacaactgacaggctaaactggagttctcacatgtgttggtccaatgctaatcaggacaagattgttgtctagaaataggacattatgttcgctaaccagtttttttattacttctaggttttggttgagagaatgggtctgcctaaaggaaataatggactataattgttgcaaacaatcgcttaagtatatggttttgaggttggtctttaattagcaaatcctcaatatcttggtagtgacaattcttgggctacttataatgattacactgttcatacatgagctgcagttttatttcaacacatacaccatgcatcag

SEQ ID NO: 2744 - DNA, 866 bp, Zea mays
  Clone ID: TF_ZmC4197_4
atccagtctcacctccctctccgaaataaggtagatacaccgctgcagtttctagagccctctctgccactcgtgatcccactagtcacgatgcctgccctcgctaagcccgcctcccgcaccgccaagcccgccgcggctccgaagccgaagcctgccgccgccaagccgaaggcggccaccgctggtgcctcccacccgccttacttcgagatgatcaaggaggctatcacggcgctaaaggagaggaccggctccagctcgcaagcgatcgccaagtatgtgggggacaagcacggcgcgtctctgccggccaacttcaagaagatgctttccatccagctccgtgggtccgcagccaagggcaagctcgtgaaggtcaaggcttcgtacaagctctcggacgccgccaagaaggcatcccccaagaccaaggccgccgccgccaagtcaaagaaggcagcggctgccaagccaaagaagaccgctgctgctgggaccaagcgcaaagtgtccgagaagaaggtcgtggcgaagccgaagaagtcccccgccgccaaggccaaggccaagccgaagaccgtgaagtcccctgcctctaagaaggcacggaaggcctccgcatgagatgggttgctttaggtctaagctctgattgtggttggtgtcagttaggtactgtacaaactaagtgtgcccaaagtgtctcaggcggtgtgttatgtgcttagcaagttctatctatcagagtgttttagtttaacaatggttttacgtctggcttttgtagtcaggtttcggaaatccctgttgtcgcgcagtctaaatttttgaattctagagcccccccatcgtttcgatcaaaa

SEQ ID NO: 2745 - DNA, 1001 bp, Zea mays
  Clone ID: TF_ZmC4197_5
ccctcgaggctggccgggcggttaaaaaaaattggttggctgcatgcatatttggagtcgcatctccctctccgaaataaggtagcgtacaccgctgcagtttctagagccctctctgccactcgtgatcccactagtacaatgcctgccctcgccaagcccgcctcccgcaccgccaagcccgccgcggctccgaagccgaagcctgccgccgccaagccgaaggcggccaccgctggtgcctcccacccgccttacttcgagatgatcaaggaggctatcacggcgctcaaggagaggaccggctccagctcgcaagcgatcgccaagtatgtgggggacaagcacggcgcgtctctgccggccaacttcaagaagatgctttccatccagctccgtgggtccgcagccaagggcaagctcgtgaaggtcaaggcttcgtacaagctctcggacgccgccaagaaggcatcccccaagaccaaggctaagccggcaaaggccgccgctgccaagaccaccgcccccaagccggccaaggccgccgccgccaagtcaaagaaggcagcggctgccaagccaaagaaggccgctgctgctgggaccaagcgcaaagtgcccgagaagaaggtcgtggcgaagccgaagaagtcccccgccgccaaggccaaggccaagccgaagaccgtgaagtcccctgcctccaagaaggcacggaaggcctccgcatgagatgggttgctttaggtctaagctctgattgtggttggtgtcagttaggtactgtacaaactaagtgtgtgcccaaagtgtctcaggcggtgtgttatgtgcttagcaagttctatctatcagagtgttttagtttaacaatggttttacctctggcttttgtagtgaggtttcggaaatccctgttctcgcgcagtctaaatttctgaattctagcgcagcacaatcgtttcgatctccgttctagtttatccatgtagaactgcgct

SEQ ID NO: 2746 - DNA, 676 bp, Zea mays
  Clone ID: TF_LIB4730-076-R1-K1-C7
ccggccgggagtatctctccccgcctccgccgccgacaacagcgtactgtactgtagttccggagagggttggggagagtagtagtgatccgcaatgtcgacggaggaggttgttgtggctgaggtcccggtgaccgaggtgccttcggaggtcccggcggcccaggtggccgaggcgcccaaggcgaagaaggcgcccaaggagaacaaggcgcctaatgagaagaagccgtccgcggcgaacaagccggcggagcaccctccctacgctgacatgattgttcaggcgatcgctgccctcaaggagaggtaatcgggtcgagctctgtggccatcagtaagtacgtcgaggggaatcacggcggtaagctccccaccaacttccgcaagcatctcaccgtgcagctgaagaagctcgctgccgccggtaagctgacgagggtgaagaactccttcaagctgccggccaccgacgcctagcccaaggccgccaagcccaaggcacccaatgccgctcccaagcccaagtcctcgtcgaaggcgaaggtcaagaccgctgctaagcccaaggcggcgtcggcctagcccaatgccaaggacaaggtcaaggccaaggccaaacctgtcgttcctgccgccgcgtcgcccaagcctcgcgggcgtcctcccaaggtcg

SEQ ID NO: 2747 - DNA, 312 bp, Zea mays
  Clone ID: TF_9462059
tcaaggaggctatcacggcgctaaaggagaggaccggctccagctcgcaagcgatcgccaagtatgtgggggacaagcacggcgcgtctctgccggccaacttcaagaagatgctttccatccagctccgtgggtccgcagccaagggcaagctcgtgaaggtcaaggcctcgtacaagctctcggacgccgccaagaaggcatcccccaagaccaaggccaagccggcaaaggcggcggctgccaagaccaccgcctccaagccggcaaaggccgccgccgccaagtcaaagaaagcagcggctgccaagc

SEQ ID NO: 2748 - DNA, 837 bp, Zea mays
  Clone ID: TF_ZmC1022_20
gctgggattcggcttggtggcggacgacagcttgtacgagttcttcaccttggtcagcttgccgccgtacgccgagatggtctcggaggcgatcacgtcgctcaaggagaggacggggtccagcagctacgcgattgccaagttcgtggaggacaagcacaaggccaagctcccgcccaacttccgcaagcttctgaacgttcagctcaagaagctggtcgccggcggcaagctgaccaaggtgaagaactcgtacaagctgtcgtccgccaccaagccgaatcccaagccagacccggccccgaagaagcccaagaccggcgtgaagaagcccaaggccgctgccaaaccgaaggccaagtcccccgcgaagcccaagaaggccaagacgtcggccaaggccacgccaggaaagaaggcgccggtgaccaagaagcccgcggcccccgcgaagaaggcgccggtagccaagagggccgctccggcgaagaaggcggctgcccctgcccgaaaagcgccgtctcggaaggcgaagaagtagaggaggggtaggcgtcggagaaatgtagggtttggttctcgtattacgctagatgtttgctctccctttagcctaggtggtgtctgtgtgtgcaatgttgtaaatttgatatcggatgctgggaacactagtcaatctttcagtacctgttgtgaatgggcggtggcgaacgatgacgatggagtgtttgttattttttctcgggaggattcatttccgtggatgatggtggatctgttcctcgttgaggtaaggcttatgtggtgataaatttttttgaaaaaaaaaaaccgagc

SEQ ID NO: 2749 - DNA, 759 bp, Zea mays
  unsure (1)..(759): unsure at all n locations
  Clone ID: TF_LIB4729-137-A1-K1-H11
atcagtcatcacccaccgcctccgccgccgacaacagcgtagtgtagtgtagttccggagagggttggggagagtagtagtgatccgcaatgtcgacggaggaggctgttgtggctgaggtcccggtgaccgaggtgccagcggaggtcccggcggcccaggtggccgaggcgcccaaggcgaagaaggcgcccaaggagaagaaggcgcctaaggagaagaagctttccgcggcgaagaagccggcggcgcaccctccctacgctgagatgattgtagaggcgatcgctgccctcaaggagaggaaggggtcgagctcggtggccatcagcaagtacgtcgaggggaagcatggcggcaagctccccaccaacttccgcaaggcagccaagaaggcggctgctcctgccaagaagggaaaggcagcggcggctcctaagaaggtggcaaccccgaagaaggctgctgctgctgccgccccggccaggaagggcgtggccaggaaggccaagaagtagtctgcctgccttgtcgctggcgagatccccccctcaattccgcctatagattcccctctttcatggattttgatccaatcgtaatattgtcagtagctctagattcgtcggtagctccagcatgagtgtcggtggtagttctgtgcctgtaaaaacttgngatagttgatcgcgtgtgatcagccgtcatgctcctccagtctctatgaacaagctaagctataatagtattttgctatct

SEQ ID NO: 2750 - DNA, 719 bp, Zea mays
  Clone ID: TF_ZmC1022_10
cctctctctctctctctttctcgcgctcgctttgcttcctcgtcgaggtccaagttcctgcattgatggcgaccgaggtggctgagactcccgcgccgttggcggaggcggtccccgagacccccgcggaggcaccggcggcgcccgccgccgaggcgaagcctaccaaggccaagaaggcctctgcgcccaagaagcgtgccaacccgacccacccgccgtacgccgaggtaattgcagcctttgtgccacgttagcttgcacccatgtcgtgtatgtcgcgtctggatctgacggaattgtggacggtttgctggtgcgcagatgatctcggaggctgtcacgtcgctcaaggagcggacggggtccagccagtacgcgatcgccaagttcgtcgaggacaagcacaaggacaagctcccgcccaacttccgcaagctcctgctcggccagctcaagaagctcgtcgccggcggcaagctcaccaaggtgaagaactcctacaagctgcccgcacgcgccccggccgccgccaagccgaagcccaagtccaagaccgctgtgaagaagcccaaggccggtgccaagaagcccaaggccgccaccaagcccaagccgaagcccaaggccaagtcccccgccaaggcgaagcccgccgcaaagcccaaggcagccgcgaagcccgccgctaagccgaaacccgcagcggccaagcccaa

SEQ ID NO: 2751 - DNA, 388 bp, Zea mays
  Clone ID: TF_LIB3150-009-Q1-N1-D8
cgccgacaacagcgtagtgtagggtagtggcggacagggttggggagagtactactgatccgcaatgtcgacggatgaagctgttgtggctgaagtcccgaagaccgaagtgccatcgaaagtcccagcggcccaagtggccgacgcgcccaaggcgaagaaagcgcccaaggagaagaaagcgcctaacgagaagaaactttccgaggcgaaaaagccggcggcgcaccctccctacactgagatgattgtagaagcgatcgctgccctcaaggagaggaaggggtcgagctcagtggccatcagcaagtacgtctaggggaatcatggctgcaagctccccaccaacttcctcaagcagctcactgtgcagctgatgaagctcact

SEQ ID NO: 2752 - DNA, 397 bp, Zea mays
  Clone ID: TF_LIB3060-018-Q1-K1-D2
cctgcctctccgaaatcaaggtagcatacaccgctgcagtttctagagccctctctggcgctggtgatcccactagtcacgatgcctgccctcgctaagcccgcctcccgcaccgccaagcccgccgcggctccgaagccgaagcctgccgccgccaagccgaaggcggccaccgctggtgcctcccacccgccttacttcgagatgatcaaggaggctatcacggcgctaaaggagaggaccggctccagctcgcaagctatcgccacgtatgtgggggacaagcacggcacgtgtctgacggccaacttcaagaagatgctgtccatccagctccgggggtccgcagccaaggtcaagcacgtgaaggtcaaggcttcgtacaagctctcggacg

SEQ ID NO: 2753 - DNA, 1031 bp, Zea mays
  Clone ID: TF_11544761
accgcatctgggaaggtctcgtcttgctcgcctccgtccatggccaccgacgaagccaccaagccgtccccgatcccaccctatcccgagatgatcctggcggcgatcgagggtctagacgacaagagcgggtcgaacaagtccgccatctccaagtacatcgagggcaagtacggctcgctgccccccgcgcacgcatcgctgctgaccgcgcacctggcgcgcatgaaggagtccggagagctcgtcttcctcaagaacaactacttccgcgcgggcgcccccgacgcgccgccgaagcgcgggcgcgggcgccctcccaaggcgcgggacccgaacgcgccggcgccggcgcccaagtcgccgtcgtccacggggcgcgggcgcgggcgcccgcccaaggccaagagcccgctggaagccgccgtgaagcaggccaccgcggggatgcccaagccccgcggccgcccgcccaagaaggccaagaccgagggcgccgcgtccccgtccccgtcccctgcccctgctggcgacgggtccacccccggcaagcgcggccgcggcaggccccccaaggtacgccccgccgtgcccagcgagacggccgcggcttgacggcgcttcttggggataatagttcgtcccgccgcgagatgggatggttagggcgtagcaattcgtcccgctgcagctgccgtgttaatgttggtaggcttggtctccatgcttcatctaattgttgtcgtcgccgtcgtctgttgctcaattaattaatggagtaattaggaggatttgatgtgctgtcttctgtgctgtgttgtgttcagttcagtttcaccgtgtgtcctctggtgttattatgtgctggatctgttgtaagctaagctagggagcttgagtgctgtgttggtcgattaattatttaagctgctaatgtggatgtgtcaattaattagaggatggtgatgatgttcgtaaaatgttgatttgaggggtgcaaaaaaaaaaaaaaaaaaaaaaaaaaaaaaaaa

SEQ ID NO: 2754 - DNA, 1190 bp, Zea mays
  Clone ID: TF_ZmC8319_1
agaccacccgaaaaacaagggaaaaaatagtaaagaaacggagcgaggctcctcctcgtttcctatctatcctgatccaaatccgccctactcgcttcatatatcctcctgcgaggaaaacaattcattccgcgccgcatctgggaaggtctcgtcttgctcgcctccgtccgtcgccgcaccctgcgtcgtcgccatggccaccgacgaagccaccaagccgtccccgatcccaccctatcccgagatgatcctggcggcgatcgagggtctagacgacaagagcgggtcgaacaagtccgccatctccaagtacatcgagggcaagtacggctcgctgccccccgcgcacgcgtcgctgctgaccgcgcacctggcgcgcatgaaggagtccggagagctcgtcttcctcaagaacaactacttccgcgcgggcgcccccgacgcgccgccgaagcgcgggcgcgggcgccctcccaaggcgcgggacccgaacgcgccggcgccggcgcccaagtcgccgtcgtccacggggcagcttgagtgctgtgttggtcgattaattatttaagctgaagccgccgtgaagcaggccaccgcggggatgcccaagccccgcggccgcccgcccaagaaggccaagaccgacggcgccgcgtccccgtccccgtcccctgcccctgcccctgctggcgacgggtccacccccggcaagcgcggccgcggcaggccccccaaggtacgccccgccgtgcccagcgagacggccgcggcttgaccccgcttcttggggataatagttcgtcccgccgcgagatgggatggttagggcgtagcaattcgtcccgctgcagctgcggctgcagctgccgtgttaatgttggtaggcttggtctccatgcttcatctaattgttgtcgtcgtcggcgtcgtcgttgctcaattaattaatggagtaattaggaggattcgatgtgctgtcttctgtgctgtgttgtgttcagttcagtttcaccgtgtgtctctggtgttatgtgctggatctgttgtaagctaagctagggagcttgagtgctgtgttggtcgattaattattataagctgctaatgtggatgtgtacaattaattagaggatggtgatgatgttcgtaaaatgttgatttgaaaaaaaaaaaaaaaaaaaaaaaaa

SEQ ID NO: 2755 - DNA, 1468 bp, Zea mays
  Clone ID: TF_ZmC13520_1
cctctccggaattccgggtcgacgcaggcgtccgcccacgcgtccgcccccgcgtcgtgggcggcctcgtggggtttccgcgtcggctagtttggacgcatggctgctgcaggagagtagagaccacagcgcgcgaggcgaggagaataagctatgggcgcgccgaagcagaaatggacgtcggaagaggaggatgcgctccgcgccggcgtgcgcaagcacggcgccggcaaatggcggaccatccagaaggaccccgagttcagcccggtcctctcctcccgctccaacatcgacctcaaggacaaatggaggaatttaagtttcagtgcaagtggactgggatcaagtaaactgcgggttccaaagataactggaccctcatcttccccatcatctagctcgcagcctctgcttctcccagcggcaaacaaatttactgaagctacactgcctgcagatgctgagaaaaagccacaggatgggaaaactctgccaaagtatggtgccatgatcatggaagctcttttggaattgaatgagccgaatggttcagatattgctgcaatcttcggcttcatagagcaaaggtatgcggtacaaccgaccttcagaagatttctagcctcaaagttacggcgacttgcagactcaaacaaaattgaaaagatcgataagtcctataggctcccagactcccttgcaacaaggactccagctccaatgaatgcttcagctccaaaacagaaggatccatcaaagccatcgaaggtgtcaaaggccataggattgttttctgcctccagccctgcactagaggctgcgatggcagctgctgtcaaggtggctgacgcggaggcaaaagcacatgatgcgcatgatcagacgatggaggcagaaaggatcttcaagatggccgaggataccgagtctctcctcataattgcagcagagatctatgatcgatgttcaaggggagagataaccacgttagttccagtggcacaaagggagatttgagatctattggagtctctcttgtgttgtttgttgtacatggataggttctggaatccagtggcccggattgctcctgttgtatgatgtaaccgtttgtgttgtactacctccgttctcgaatatttgtctccaatatttatcgtccctagtttatttttgaaataaaatgcaacaaataaaaaaaaagaaaaagggcggccgccaccgccaggaaaaagtggtttaaaatatgtaacccggtcatcatgggatagtgttacgctgcgatcgtgtatattgtggtcagcagttattttcttttttcagaggcatgatgagagaatagattagtgttctgagacaacgaagtagggtaggaaggggaagtgttcttggcctttgatacgaataatatgtgccgataacagttttttcaatttgagaatgttgtgttagacccttgttcatc

SEQ ID NO: 2756 - DNA, 645 bp, Zea mays
  Clone ID: TF_ZmC1022_11
cgcagagctctcatcctctctctctctctttctcgcgctcgctttgcttcctcgtcgaggtccaagttcctgcattgatggcgaccgaggtggctgagactcccgcgccgttggcggaggcggtccccgagacccccgcggaggcaccggcggcgcccgccgccgaggcgaagcctgccaaggccaagaaggcctctgcgcccaagaagcgtgccaacccgacccacccgccgtacgccgagatgatctcggaggctgtcacgtcgctcaaggagcggacggggtccagccagtacgcgatcgccaagttcgtcgaggacaagcacaaggacaagctcccgcccaacttccgcaagctcctgctcggccagctcaagaagctcgtcgccggcggcaagctcaccaaggtgaagaactcctacaagctgccagcgcgcgccccggccgccgccaagccgaagcccaagtccaagaccgctgtgaagaagcccaaggccggtgccaagaagcccaaggccgccaccaagcccaagccgaagcccaaggccaagtcccccgccaaggcgaagcccgccgcaaagactaaggcagccgcgaagcccaccgcgaagccgaaacccgcagcggccaagcccaaggcggccg

SEQ ID NO: 2757 - DNA, 665 bp, Zea mays
  Clone ID: TF_ZmC1022_13
ttcacgcgtccgcccacgcgttcgtgcacacctcgagcccggccggggccagcaccgcagagctctcatctcctctctctctcgcgctcgctttgcttcctcgtcgaggtccaagttcctgcattgatggcgaccgaggtggctgagactcccgcgccgttggcggaggcggtccccgagacccccgcggaggcaccggcggcgcccgccgccgaggcgaagcctaccaaggccaagaaggcctctgcgcccaagaagcgtgccaacccgacccacccgccgtacgccgagatgatctcggaggctgtcacgtcgctcaaggagcggacggggtccagccagtacgcgatcgccaagttcgtcgaggacaagcacaaggacaagctcccgcccaacttccgcaagctcctgctcggccagctcaagaagctcgtcgccggcggcaagctcaccaaggtgaagaactcctacaagctgcccgcacgcgccccggccgccgccaagccgaagcccaagtccaagaccgctgtgaagaagccgaaggccggggcgaagaagcccaaggcagccaccaagcccaagccgaagcccaagggcaagtcccccgccaaggcgaaacccggcgcaaagcccaaggcagccgcgaagccgaaaccggcagcagc

SEQ ID NO: 2758 - DNA, 634 bp, Zea mays
  Clone ID: TF_ZmC1022_18
acccagtaccgcagagctctcatcttctctctctctctttctcgcgctcgctttgcttcctcgtcgaggtccagttcctgcattgatggcgaccgaggtggctgagactcccgcgccgttggcggaggcggtccccgagacccccgcggaggcaccggcggcgcccgccgccgaggcgaagcctaccaaggccaagaaggcctctgcgcccaagaagcgtgccaacccgacccacccgccgtacgccgagatgatctcggaggctgtcacgtcgctcaaggagcggacggggtccagccagtacgcgatcgccaagttcgtcgaggacaagcacaaggacaagctcccgcccaacttccgcaagctcctgctcggccagctcaagaagctcgtcgccggcggcaagctcaccaaggtgaagaactcctacaagctgcccgcacgcgccccggccgccgccaagccgaagcccaagtccaagaccgctgtgaagaagccgaaggccggggcgaagaagcccaaggcagccaccaagcccaagccgaagcccaaggccaagtcccccgccaaggcgaagcccgccgcaaagcccaaggcagccgcgaagccgaaaccggcagcagccaagcccaag

SEQ ID NO: 2759 - DNA, 1745 bp, Zea mays
  Clone ID: TF_ZmC1022_2
cattgggtacctcgaggccggccgggactcagcaccgcagagctctcatccgcgctctctctctctttctcgcgctcgctttgcttcctcgtcgaggtccaagttcctgcattgatggcgaccgaggtggctgagactcccgcgccgttggcggaggcggtccccgagacccccgcggaggcaccggcggcgcccgccgccgaggcgaagcctaccaaggccaagaaggcctctgcgcccaagaagcgtgccaacccgacccacccgccgtacgccgagatgatctcggaggctgtcacgtcgctcaaggagcggacggggtccagccagtacgcgatcgccaagttcgtcgaggacaagcacaaggacaagctcccgcccaacttccgcaagctcctgctcggccagctcaagaagctcgtcgccggcggcaagctcaccaaggtgaagaactcctacaagctgcccgcacgcgccccggccgccgccaagccgaagcccaagtccaagaccgctgtgaagaagcccaaggccggtgccaagaagcccaaggccgccaccaagcccaagccgaagcccaaggccaagtcccccgccaaggcgaagcccgccgcaaagcccaaggcagccgcgaagcccgccgctaagccgaaacccgcagcggccaagcccaaggcggccgccaagccgaaggccaagccagctgccaaggctaagccgaaggctgccgcggccaagccgaagccagctgccaagaaggccggccgccccgccaaggccgccaagacgtcagccaaggacacgcccgggaagaaagcggcgcccgccaagaagcccgccgctgcggccaagaaggcccctgccaagaaggccgccccagccaagaaggctgcgaccccgtcgcggaaggtgccgtcccgtaaggcgaagaagtagagcggtggtcttggcaggaatctagggtttcgtgctccttcgattttagatgtttactcgtttttgctctagttgtgggtggtgcgcggggtgggttactaggttgtaaatttgatgtcggaggctggggtacacatgggcattctgtaccagcggtggaaggcgccggcgacgatgacgaaccagtgtgtgttattattattagaagacaacgttgtatttctgtagctgaattgttgagttgcggatatcattgtgctgctaaggttaatgtgacgataaagttaatgtcaagagttaccttccttcgcgtgtatgtactctgattattcaggctgtttttggctgggattaatctggtcttatctgaattccctatctgaaatagagaattgttcggtgtgcattttgtgaccaataaatatttttaatattttatttttttatttaatatttaaaaaagggcggtcgtttttgaggttccaagctttcttcctcttccttcgattttagatgtttactcgtttttgctctagtttttaattgtgcgcggggtgggttactaggttgtaaatttgatgtcggaggctggggtacacatgggcattctgtaccagcggtggaaggcgccggcgacgatgacgaaccagtgtgtgttattattattagaagacaacgttgtatttctgtagctgaattgttgagttgcggatatcattgtgctcctaaggttaatgtgacgataacgttaatgtcaagagttaccttcaaaaaaaaaaaaaaagggcggcgctcgcgatagaactagt

SEQ ID NO: 2760 - DNA, 556 bp, Zea mays
  Clone ID: TF_LIB4730-130-A1-K1-A1
cggccgggatccgcctccacatccctctgcgacatcaagggaacatacacctgctgcagcttctacagccctctctgctactgcgtgatcccactagtcacaatgcctgccatcgcgaagcccgcctcccgcaccgccaaggccgccgggtttccgaagccgaagactgccgccgccaagccgaaggcggacaccgctggtgcctcccacccggcttacttcgagatgatcgaggaggttatcacggagataaaggagatgaccggctccagctcgcaagtgatcgccaagtatgtgggggacaagcacggcgcgtctctgccggtcaacttcaagaagatgctttccatccagctccgtgggtccgcagccaagggcaagctcgtgaaggtcaaggattcgtacaagctctcggacgccgccaagaaggcatcccccaagaccaaggctaagccggcaaaggccgccgctgccaagaccaccgcccccaagccggccaaggccgccgccgccaagtcaaagaatgcagcggctgtcaagccaaagaaggccgctg

SEQ ID NO: 2761 - DNA, 581 bp, Zea mays
  Clone ID: TF_LIB5026-070-Q1-XP1-H9
gccggcccggtcgaaaatacagtggaacctccctctccttttcaaggtagatacaccgctgcagtgtctatagccctctctgtcactctggatcccactagtcacgatgcctgccctcgtcaagtccgcctcccgtaccgccaagtccgacgcgagtccgaatacgaagtctgtcgccgcctagtcgaaggcgagcaccgctggtgcctcccacccgccttacttctacatggtctgggaggttatctcgatgctaatggagaggaccgcctcctgatcataagcgatcgccgaggatgtgatggacattgatgctacgattctgccgcccgacttcaacaagatgctttccatccatatccgagggtccgtatgctagggcaagctcgagaaagtcaaagcttcgtacaagctctcggacaccgccaatatcgcatccccctagaacaagggtaattcggcaaaggacgacgctgccaagaccaccgccacctagccggacaatgccgtcgacgtcaagtcaaagaatgcagcgactggcaagacaatgaatgacggtgctgctgagaccaatcgcaaag

SEQ ID NO: 2762 - DNA, 556 bp, Zea mays
  Clone ID: TF_ZmC159_2
cggccgcgtgggcgacagccagcagccgaggcggccagcgcaggcatggccactcccacttccagtggcgacggctcgcccccgggctcctctgacctcgtgcccccctcctaccccgagatgatcgtcgccgccctcgccgcgctcgccgaggagaacggctccagccaggccgccatcgcgcgccgcatcgaggcggaggcccgcggcgacctgccggcctcgcacccggcgctcgtcgcagcccacctctcgcgcatgtccgccgccggggagctcgtcgccgttgcggggggaaagtacgcgctgccgccgccggtcccaccgccgccggagtcaccggctgacgacgaagaagacgactacgccgacgacgaagaggaggaggaggaggctccggagccggagcctctgccgcagccgcccgctaagcgcgggcgcgggaggcccccgaagccgcggcccacgggcttccccgccggcgtgcccggagctgctggcccgggccccatcggcgtccccggagccgccgccgccgccgccgcgccgcgccggc

SEQ ID NO: 2763 - DNA, 524 bp, Zea mays
  unsure (1)..(524): unsure at all n locations
  Clone ID: TF_LIB4766-078-R1-K1-E1
gggtacctcgaggccggccgggaaaaaaacttctcagtcatcacccaccgcttccgccgtcgacaacagcgtagtgtagtgtagtttcggagagggttggggagagtagtagtgatccgcaatgtcgacggaggaggatgttgtggctgaggtcncggtgaccgaggtcgcagcggaggacccggcggctcaggtggtcgaggtgcccaaggcgaagaaggcgtccaaggagaagaaggcgcctaaggagaagaagctgtccgcggcgaagaagccggcggcgtaccctacctacgctgagatgattgtagaggcggtcgctgcccttaaggagaggaaggggtcgagctcggtggtcatcagtgagtacgccgaggggaagtatggcggcaagcaacataccaattatcgcaagcagcncactgtgcagatgaagaagctcgctgccgctcggcagttgacgagggtgaagaagttcctcaagctgccggccatcgatcgtaagcccaggccgtgaagctgaa

SEQ ID NO: 2764 - DNA, 629 bp, Zea mays
  Clone ID: TF_LIB4732-039-R1-K1-A11
taataatcacccaccgtctccgccgccgacgactgcgtagtgtagtgtagttccggagagggttgtggagagtagtagtgatccgtaatgtctacagaggacgctgttgtggctgaagtcccggagaccgaggtgccagtggatgtcccggcggaccaggtggacgaggtcgcccaagtccaactaggcgcccaaggacaagaaggcgcctaaggagaacaatctttccgcggggaataagccggcggcgcaccctccctacgctgagatgattgtagatgcgatcgctgccctcaaggagaggaaggggtcgagctcggtggccatcagcaagtacgtcgaggtgaagcatggcggcaagctccccaccaacttcggcaagaagctcactgtgcagctgaagaagctcgctgccgtcgtcaagctgacgatggtgaagaactccttcaagctggcggacaccgacgtcaaggccaaggccgccatgcccaaggaacccaaggacgtgcccatgaccaagccctctcctaaggcgaatgccaagactgctgctaagctcaaggcgacgtcgtccaagtccaatgtcaatgactatgtcaaggccaacgtcaactctgtcgctcctgacg

SEQ ID NO: 2765 - DNA, 741 bp, Zea mays
  unsure (1)..(741): unsure at all n locations
  Clone ID: TF_LIB5116-004-A1-PF1-B7
atcgagctccttctcgaatctcaagcgaccacaccgcgcaagtcgcagcttcagtttcagtttcagagctccgcttcagttagccaccatgcctgccctcgccaagcccgccgccgcggcgccgaagccgaagccagccgccgccaagcccaaggcggccgccgctggagccgcccacccgacctacttcgagatgatcaaggaggcgatcgcggcgctcaaggacaggaccgggtccagctcggtcgccatcgccaagtacatcgaggagaagcacggcaaggctctcccggccaacttcaagaagatgctctccgtccagctacgcgcctccgccgccaagggcaagctcgtcaaggtcaaggcctcctacaagctctccgacgccgccaagaaggacgcgcccaagcccaaagccgcggcgaagccctccaaggacgccgccaagcccaagaagaaggcggccgagaagcccaagaagaccgccgccgctggcaccaagcgcaaggcgcccgagaagaagaagctggtcaccaaggccaagaagtcgcccgctgccaaggccaaggcgaagccgaagaccgtccgctccccggccgccaagaaggcccgcaaggtcgccgccgcctgatctgatctgatccggtccgatagtgggtcttagnagtgcttgatgttccaagggtctgtacaaaaggatgctcatctcccttgggttttaagtttcggttctgcttggca

SEQ ID NO: 2766 - DNA, 647 bp, Zea mays
  unsure (1)..(647): unsure at all n locations
  Clone ID: TF_LIB4172-047-R1-L1-C9
aattcggcacgaggctgcagatgattgtagaggcgatcgctgccctcaaggagaggaaggggtcgagctcggtggccatcagcaagtacgtcgaggggaagcatggcggcaagctccccaccaacttccgcaagcagctcactgtgcagctgaagaagctcgctgccgccggcaagctgacgagggtgaagaactccttcaagctgccggccaccgacgccaagcccaaggccgccaagcccaaggcacccaaggccgcgcccaagcccaagccctcgccgaaggcgaaggccaagaccgctgcgaagcccaaggcggcgtcgcccaaacccaaggccaaggccaaggccaagcctgtcgctcctgccgccgcgtcgcccaagccccgcgggcgccctcccaaggtcgccaagacctccgccaaggcctcccccgccaaggcagccaagaaggcggctgctcctgccaagaagggaaaggcagcggcggctcctaagaaggtggcaaccccgaagaagctgctgctgctgccgnccccgccaggaagggcgtggccagaaaggccaagaagtagtctgcctgccttgtcgctggcgagatcccccccctcattcccgctatagattcccctctgtcatggaattttg

SEQ ID NO: 2767 - DNA, 601 bp, Zea mays
  Clone ID: TF_LIB4767-003-R1-N1-F9
ccggccggggttgctgttatcgtgtgaactgttgagatctgttagcatgtgcacttttatctatttatttggtaccatcttgctatttcaccttttgcaatacaagaatgctctaagacctaaaaaaaaaaaaaaaaaaaaaaaaaaaaaaaaaaaaaaaaaaaaaaaaaaaaaaaaaaaaaaaaaaaaaaaaaaaaaaaaaaaaaaaaaaaaaaaaaaaaattcagttttcacccaccgcttccgccgccaaaaaaagggaagggaagggaatttccgaaaagggttgggaaaaaaaaaaggaaccccaaatgtcaacgaagaaggtttttggggttaaggccccgggaaccaaggggccagggaaggccccgggggccaagggggccaaggccccaaagggaaaaaaggccccaaaggaaaaaaaggccccaaaggaaaaaaaattttccggggaaaaaaaaccgggggggaaccctccttaccctaaaaaaattgaaaaggcaatccttgccctaaagaaaagaaaggggtcaacctcgggggccataaaaaagtacgtcaagggaaacaatgggggaaagttcccaacaaatttccg

SEQ ID NO: 2768 - DNA, 564 bp, Zea mays
  Clone ID: TF_ZmC8559_1
tctctctcttcgcagacacaaccaaaagaccaagggggaaaaatagtaaagaaacggagcgaggctcctccgatttcttatctatcctgatccaaaccctccgagggggaaacaattcattccgcacggcatccgggaaggtctgcgtcgtcgccatggccaccgaggaagtcgccaagccgtccccgatcccgccctaccccgagatgatcctggcggcgatcgaggacctaggcgacaagagcgggtcgaacaagtcggccatctccaggcacatcgagggcaagtacgacggcgacctgccgcccgcgcacgcgtcgctgctggccgcgcacctggcgcgcatgaaggagtcgggcgagctggtcttcgtcaagaacaactacttccgcgccgacgcgcccgacgcgccgccgaagcgcgggcgcgggcggcccccgaaggcgcgggaccccggcacgccggtgtcgccgccatcggggcgcgggcgcgggcgcccgcccaagcccaaggacccgctggacgccgccgtgaagcaggccaccgcgggcatgcccagggccc

SEQ ID NO: 2769 - DNA, 1260 bp, Zea mays
  Clone ID: TF_ZmC238_3
gattctccggtgggggttccttggtctcgatttgctgctgatgggggtgccgaagcagcgctggacgccggaggaagaggccgcgctcaaggccggcgtcgccaagcacgggcccggcaagtggcgcaccatcctccgggactcggacttcagcgcgctcctgcgcctccgctccaatgttgacctcaaggacaagtggcgcaacttgagcgtcaccgcaggaggttacgggtctagagagaaggcaaggatggcgttgaagaaaggcaggcgcgtggtgcctaagcttactgctgagccaatggatgtagatgagaaggatatggacaacgctcatgacacagtcattgatgtggaaccgttagcaatggctttcgagcccttgccacttttggaaagcccagataagtcagttgctaggctcgatgatctcatagtagaagctataaggaagcttaacgagccatctgggtccaataaggcagtcatttctggatatattgaggaccaatactggccgcctgctgattttcaatacctgctatctacaaaattgaagtcattggttaattctggaaaattaatcaaggtaaaccaaaagtacagaattgcaccaagttcttccttgggcggaataagcactaaggtatcctcttctgaagggatgaacacagaaaataataatgttaaacggctaactaagcctcaagtggttgctgaactggagaagatgaaaggcatgaccagggaagaggctgctgccttcgctgccaaggcagttgccgaggcagaagtagcaatggcagaagctgaggaagcagcaagagttgcagaggctgcagaaaatgatgctgaagctgcaaaggcttttcttgatgctgtcattttgtcaatgagaaacaggaacgctgcttccatgatacttcgagcttgctgatccttcacccatgccgtcgcatggttttggcagcagcacaccgatgttctgctgcaaagattttctggatagatgagtttcttgtatagtcttatagatcatggcgggttttcaacagcttgctgttgtcctgtgctgtgcagccaatcgacaacatgataacaagaatgatcgagaaagtagtcttcatttttttttgtttcccattgtgttgctttgtaattaaactatagccttttcctttcattagttgatgaagtgatgtcgtctaatagaacaactgtagtgaaaagaaaatgtcagaaagccgccttagttaatgc

SEQ ID NO: 2770 - DNA, 560 bp, Zea mays
  Clone ID: TF_LIB4730-072-R1-K1-F11
tggtaccctcgggctcggcccgtgcccacggcgctggcccgcctcgcgcacctcggcgcgcctcagcctgctcgcgaacgcgctctgcgggcccatcgccggccccgctgaggcgcctgcaggccctgacgcacgtcaagcccaaggacgacaaggtgcacaaggccaattaggcccctaaggagaagaagctttccgctgcgaagaagccggcggcgcacccttcctacgctgagatgattggagaggcgatcgctgccctcaaggagaggaagggggcgagctcggtggccatcagcaagtacgtcgaggggaagcatggcggtaagctccccaccaactttcgcgagcagctcactgtgcagctgaagaagctcgctgccgccggcaagctgacgagggtgaagaactccttcaaggtgccggccaccgacgccaatccccaagcccgccaagcccaaggcaccccaaggacgcgcccaagaccccaagccctcgccgtaaggcaatggcccatacccgctgcggaagccccaagacggctgttcgcccccaaaccc

SEQ ID NO: 2771 - DNA, 397 bp, Zea mays
  Clone ID: TF_LIB3060-027-Q1-K1-F9
gcctccgccgccgacagcagcgtactgttttgtatctcccgagaagggttgtgagaaggagtagtatcctcaatgtccacgggaggaagctgttgatgctgaggtcctcattgaccgacgtgccagcagaggtcccggcggtccaggtggccgatgcgcccaaagcgaaaaatgcgcccacagagaagaaggcgcctaaggagaagaagctttccgcggcgaaaaagccggcggcgcaccctacctacgctgagatgattgtagaggcgatcgctgccctcaaggagaggaaggtgtcgagctcggtggccatcatcaagtacgtctagggtgagcatggcggcaaagctcacaccaacttgcgcaagcagctcactgtgcagctgaagaagctcgc

SEQ ID NO: 2772 - DNA, 508 bp, Zea mays
  Clone ID: TF_LIB4766-079-R1-K1-A11
ctcgaggccggccgggatcagtattccccatcgcctccgccgccgacacggcgtatggtagtgtagttccgtatatgggttggggagagtagtatggatccgcaatgtcgacggaggaggatgttgtgggtgaagtgccggtgaccgatgtgccatgggaggtcccggaggcccaggcggacgaggagcccaaggcgaagaacgcccccaaggagaagaatgtgcctaaggagaagaagatttctcgcggtgaataagccggtggcgtgccctccctacgctgagatgattgtacaggctatcgctgccctcaatgataggaaggggtcgagctcggcgtacatcaacaagtacatccaggtgaagcatggcgacaagctcccctgcaacttctgcaaggagctcactgtgcatgtgaagaaggtcgctggcgtcggcaagctgactagggagaagaactgcttcaagatggcgtccaccgacgtcaagcccgaggccgcctagacca

SEQ ID NO: 2773 - DNA, 667 bp, Zea mays
  Clone ID: TF_LIB4742-052-R1-K1-C9
cattgggtacctcgaggccggccgggatcagtcatcacccaccgactccgccgccgacaacagcgtattgtagtgtagttccgcgagagggttgatggagagtagtagtgatccgcaatgtcgacggaggaggctgttgtggctgaggtcccggtgaccgaggtgccagcggaggtcccggcggcccaggtgggcgaggcgcccaaggcgaagaaggcgtccaaggagaagaaggcgcctaaggagaataagctttccgcggcgaagaagtcggaggtgcaccctccctacgctgagatgattgtagaggcgatcgctgccctcaaggagaggaaggggtcgagctcggtggccatcagcaagtacctcgaggggaagcatggcggcaagctccccaccaacttccgcaagcagctcactgtgcagctgaacaagctcgctgccgccggcaagctgaccaggctgaagaactccttcaagctgccggccaccgacgtcaagcccaagggcgccaagccctaggcacccatggccgcgcccaagctcaagtcctcgccgaaggcgaaagccaagacctctgcgaagaccatggtggcgtcgaccaaacccaaggccaaggccaaggtcaagtctgtcgctcctgccgtcgcgtcgccaaagccccgcg

SEQ ID NO: 2774 - DNA, 573 bp, Zea mays
  Clone ID: TF_LIB5116-023-A1-PF1-D3
acctccgctcgaactgtcttgcgaaatttcacgcgcgctcagcacaagtagcagtttcagtttcagagctccgcttcagttagccaccatgcctgccctcgccaagcccgccgccgcggcaccgaagccgaagccctccgccgccaagccgaagaaggatgccgccggcccttcccacccggcctacttcgaggtgagcgcccgagcctctcctgttgaatcctctgcatctctgtgattcgttcgtttcggtttgccattggggctgattggattttgatttcgatcttggcagatgatcaaggaggcgatcgcggcgctcaaggacaggaccgggtccagctcggtcgccatcggcaagtacatcgaggagaagcacggcaagtccctcccggccaacttcaagtagatgctctccgtccagctccggtcgttcgcctccaagggcaagctcgtcaaggtcaaggcctcctacaagctctcagacgccgccaagaaggacgcgcccaagcccaagcccaaggccaagcccgccgcccccaagggccgcggcgaagcccgccaaggacgccg

SEQ ID NO: 2775 - DNA, 462 bp, Zea mays
  unsure (1)..(462): unsure at all n locations
  Clone ID: TF_LIB4729-008-R1-K1-B2
ccaccgtctccgccgccgacatcttcgtagtgtagtgtagttccggagagggttggggagagtagtagtgatccgcaatgtcgacggaggaggctgttgtggctgaggtcccggtgaccgaggtgccagcggaggtcccggcggcccaggtggccgaggcgcccaaggcgaataaggcgcccaaggagaagaaggcgccgggggagaagaagctttccgcggcgaagaagccggcggcgcaccctccctacgctgagatgattgtagaggcgatcgctgccctcanggagaggtttggctcccgctcggtggccatcagcaagtcctctgaggggattcatggcggcgggctccctnccntcctgcgtacgcaggtttctgtgcggctggtgaggctccctgccgcccgcccgctgtcgaggttggttcactgcttccagttgnctgccaccttcgcctgcc

SEQ ID NO: 2776 - DNA, 557 bp, Zea mays
  Clone ID: TF_ZmC1022_12
cgaaatcaccagcgcacagcactcctcatcggcgcacccgagctcgccctctccttcctcatcgaggcccaagtcctgctgtgatgacgaccgacgtggctgagactcccgcgccgttggtggatgcggcccctgaggcgcccgcggacaccccggcggcgcctgctgctgatgcgaagccggccaaggccaagaaggccacagcgccgaagaagcgcgccagcccgacccatccgccgtacgccgagatggtatcggaggcgatcgcgtcgctcaaggagaggacggggtccagcagctttgctattgccaagttcttggaagacaagcacaaggacaagctcccgcccaacttccgcaaacttctgaacgttcagctcaagaagctcgtcgccggcggcaagctgaccaaggtgaagaactcgtacaagctgtcgtccgccaccaagccaaaggccgccccgaagaagcccaagaccggcgtgaagaagcccaaggccgctgccaaaccgaaggccaagtcccccgcgaagcccaagcccgccacaaaccccaag

SEQ ID NO: 2777 - DNA, 603 bp, Zea mays
  unsure (1)..(603): unsure at all n locations
  Clone ID: TF_ZmC1022_14
gcggacccacgcgtncgcccacgcgtccgcggacgcgtgggtcccagcgcacagctctcctcatcggcgcacccgagctcgccctctccttccacatcgaggcccgagtcctgctctgatggcgaccgacgtggctgagactcccgcgccgttggtggatgcggcccctgaggcgcccgcggacaccccggcggcgcctgctgctgacgcgaagccggccaaggccaagaaggccacagcgccgaagaagcgcgccagcccgacccatccgccgtacgccgagatggtctcggaggcaatcgcgtcgctcaaggagaggacagggtccagcagctttgctattgccaagttcttggaggacaagcacaaggacaagctcccgcccaacttccgcaagcttctgaacgttcagctcaagaagctcgtcgccggcggcaagctgaccaaggtgaagaactcgtacaagctgtcgtccgccaccaagccgaagcccaagccaaaggcggccacgaagaagcccaagaccggcgtgaagaagcccaaggccgctgccaaaccgaaggccaagtcccccgcgaagcccaagcccgccacaaagcccaa

SEQ ID NO: 2778 - DNA, 968 bp, Zea mays
  Clone ID: TF_ZmC1022_7
gacccacgcgtgggcacctcgaggccggccggggacatcaccagcgcacagctctcctcatcggcgcacccgagctcgccctctccttcctcatcgaggcccgagtcctgctctgatggcgaccgacgtggctgagactcccgcgccgttggtggatgcggcccctgaggcgcccgcggacaccccggcggcgcctgctgttgacgcgaagccggccaaggccaagaaggccacagcgccgaagaagcgcgccagcccgacccatccgccgtacgccgagatggtctcggaggcgatcgcgtcgctcaaggagaggacggggtccagcagctttgctattgccaagttcttggaggacaagcacaaggacaagctcccgcccaacttccgcaagcttctgaacgttcagctcaagaagctcgtcgccggcggcaagctgaccaaggtgaagaactcgtacaagctgtcgtccgccaccaagccaaaggccgccccgaagaagaccaagaccggcgtgaagaagcccaaggccgctgccaaaccgaaggccaagtcccccgcgaagcccaagcccgccacaaagcccaaggcggccgccaagagtgagctcccaagacccccggcgttaagccaaagccccttgctaaaaaggccggccgccccgccaaggcggcgaaaacgtcggccaaggacaccccagggaaaaaggcgccggtggccaaaaagtccgctgctgccgcgaaaaaggcccctgccaaaaaggccgctccctcgaaaaaggcggcgaccccggcgcggaaagccccgtcccgtaaggccaaaaagtaaagcggcccaaaagggtgtgccatgttgtaaatttgatatcggaggggctcgggtacactggtcattcagtatctttgccccttcctcgtacctctgctgtacgtcctatggtttctttcccagataatagtcttcccccc

SEQ ID NO: 2779 - DNA, 619 bp, Zea mays
  unsure (1)..(619): unsure at all n locations
  Clone ID: TF_ZmC1022_8
ttgggtaccccctcgagnngccggccaggactcggcatagacagacactcgacacaaatcaccagcgcacagcactcctcatcgccacacccgagctcgccctctccttcctcatcgaggcccgagtcctgctttgatggcgaccgacgttgctgagactcccgcgccgctggtggatgcggcccctgaggcgcccgcggacaccccggcggcgcctgctgttgacgcgaagccggccaaggccaagaaggccacagcgccgaagaagcgcgccagcccgacccatccgccgtacgccgagatggtctcggaggcgatcgcgtcgctcaaggagaggacggggtccagcagctttgctattgccaagttcttggaggacaagcacaaggacaagctcccgcccaacttccgcaagcttctgaacgttcagctcaagaagctcgtcgccggcggcaagctgaccaaggtgaagaactcgtacaagctgtcgtccgccaccaagccaaaggccgccccgaagaagaccaagaccggcgtgaagaagcccaaggccgctgccaaaccgaaggccaagtcccccgcgaagcccaagcccgccacaaagcccaaggcggccctc

SEQ ID NO: 2780 - DNA, 756 bp, Zea mays
  Clone ID: TF_ZmC4197_8
cacctccctctccgaaatcaaggtagcatacaccgctgcagtttctagagccctctctgccactcgtgatcccactagtcacgatgcctgccctcgccaagcccgcctcccgcaccgccaagcccgccgcggctccgaagccgaagcctgccgccgccaagccgaaggcggccaccgctggtgcctcccacccgccttacttcgaggtgagccttgtcgacctgcgttcggtttttattgattgatattggtttccgtcggaattggtgttgatggaatctcatgtttcgtcgttcagatgatcaaggaggctatcacggcgctaaaggagaggaccggctccagctcgcaagcgatcgccaagtatgtgggggacaagcacggcgcgtctctgccggccaacttcaagaagatgctttccatccagctccgtgggtccgcagccaagggcaagctcgtgaaggtcaaggcttcgtacaagctctcggacgccgccaagaaggcatcccccaagaccaaggctaagccggcaaaggccgccgctgccaagaccaccgcccccaagccggccaaggccgccgccgccaagtcaaagaaggcagcggctgccaagccaaagaaggccgctgctgctgggaccaagcgcaaagtgcccgagtagaaggtcgtggcgaagccgaaagaagtcccccgccgccaaggccaaggccaagccgaaagaccttggaagtccctggcctccagaaaggcacggaa

SEQ ID NO: 2781 - DNA, 377 bp, Zea mays
  unsure (1)..(377): unsure at all n locations
  Clone ID: TF_LIB3245-307-P1-N1-F12
caactctgcactttctacaaagnctatgatctgtcagaaaagcatgttgtcgactcttcgattaattatcaatcacccaaacaacatttacaatgcctccaaagaaagcttccaccagcgctgctgccagctctgcctccaagaaggccgctcccagccattcttcctatcgcgatatgatcaaggatgctattattaacttgaaagatcgcaacggtagcagccgtcaatccatcaagaaatatgttcagaacaacaacaagatcaccgtcgtgtcgcaagctgctttcgacgctcagttcaacaaggccatcaaagctggcgttgagaaaggagaattcagtcaacccaagggaccctctggccccgtgaagctc

SEQ ID NO: 2782 - DNA, 450 bp, Zea mays
  Clone ID: TF_LIB3354-039-P1-K1-B7
cggaaaagccgggggagaccacgcggccgagaagccgggaaaccaacagcgaacggaggaggcaggcgcgggacacgccccggcgaccgaggagccagcggagggcccgagagcccaggcggccgaacgcgcccaaggcgaacaaggcgcccaaggagaacaaggcgcccaaggagaagaagctctccgcggcgaacaagccggcggcacaccctccctacgctgagacgacggcagaggcgagcgctaccctcaaggagaggaaggggtcaagctcggtggccatcagcaagtacttctaggggaatcatagcggcaagctccccacaaacttccgtaagcaacttactacgcagctgaagaagctcgctgccaacaccaagctgacgagggtgaaaaactccttcaagctgacgggcaccgacgccaagcccaaggccgccaagccta

SEQ ID NO: 2783 - DNA, 715 bp, Zea mays
  Clone ID: TF_ZmC366_4
aattcggcacgagggtctgctggggacctggggtgatcgaggtcagatgatcaaggaggcgatcctgtcgcaggacggcgggaaggtcggggcgagcccgtacgcgatcgccaagcacatgggggagaagcaccgggacgtgctcccgcccaattaccgcaaggtgctggcagtgcagctgcgcggcttcgccgccaagggccgcctcgtcaaggtcaaggcttccttcaagctcgccgccgccgaggagaggaagccctccgcggccgcgaaggcgaagaagaaggcgtcggcgggaatggccaagcgcaagagggccgccgcgccggccaagaagaagccggcggccgctgcctcggcgccgtcgagggaggcacgtaaggtgcgcgcgaagcgagcgaggaaggtggccccggcgcccgcgcagcccaagcccaagccagcccgcgccgccgcttccggtgccggcaagaaggtcaacaaggccagcgcctgattagcggcggccgtcctggtccccccgcgcgcgcctccgtgtattatactagccggtagtagcagtaggagttgcaagtactagcagcgtggtagtcgtgatgatgttgtggtcgtcgtctccgccggcccgatcgatcgggcgctctgttccgccgtgtggcagagttttgtaaataactagtctggtgtgatgcgctcatggcaataaagcgcgcgc

SEQ ID NO: 2784 - DNA, 446 bp, Zea mays
  unsure (1)..(446): unsure at all n locations
  Clone ID: TF_LIB4602-009-Q1-K1-G5
caacagcgtagtgtattgtatttccggagtagtggttggggagagtagtattgatccgcattgtcgacggaggatgctgttgtggctgatgtcccggtgaccgatgtgccatcggatgtcccggcggcccatgtggccgatgcgcccaaggcgaataatgcgcccaaggagaatatggcgcctaaggagaagaagccgtccgcggcgattaatccggcggcgcaccctccctacgctgagatgattgtagatgcgatcgctgccctcatggagaggaaggggtcgagctcggtggccatcatgctgtacgtcgaggggattcacggcggcntgctccccaccatcttccgcatgctgctcaccgtgcagctgatgatgctcgctgccgccggcntgcttgcgagggtgatgttctccttcntgctgccggcctccgtcgcccttcc

SEQ ID NO: 2785 - DNA, 291 bp, Zea mays
  Clone ID: TF_LIB3076-020-Q1-K1-B1
tccgagggatcactcttcgtactctgacatgtttgaagaggcgatcgttgccctaaagcagatgatttcttcaagctgcgggggcatcatcaagtacgtcgatggcaaccatgacacgtagctacccaccaaattacttaagcacctcactgcgcaccttaagaagctagatgacgccctcaaactgactaaggtgaagaactccttaaagctgccggtcaccgacgccaatcccaaagccgacaagtccaaggcacccaaggtcgcgcccaatcccaatccctcttcgaa

SEQ ID NO: 2786 - DNA, 1182 bp, Zea mays
  Clone ID: TF_ZmC154725_1
cccacgcgtccgatagattgtccaaaccccactcaccgcaacgagccgccgtatccatggccggcaaagacggctccgtcccttccccgcctcctcccctggccttaactttacggctgcaccgaccgaaaacccccatttcctcttctccaaaccccactcaccgcaacgagccgccggatccatggccggcaaagacgggtccccgcctcctcccccgctcccatcctaccctgagatgatcgtggaggcaatccgggcgctgggactcgagaacggctgcaacaagactgcgatctcggactacatcaagggcagctacggctccaacctccctgcccagcacaacgccgtcctcacgggtcacctcgcccgcatgaaggctaccggcgagctcgccttcctcaggaacaactatctcctccccaacgaggacgaagcctccccgctgagcaccggtgggcacaagggccccgccgccgccgaggaggagtctactggcgtgttggacgttggtgacgatgtgttgcttgcttcccctctcgtcatcgacgctgacgccgtcgacattgatgtgcctgctccagctcccgttgtcaccgctgatgtcgacgatattgacgtgcctgctccagctcccgttgtcaccgctgatgtcaaccctgttcataccaagcggggacgcggacggcccccgaagcccaaggaccccgttgctgagggctacggtggtaagcccgctacagctcccgtcgccgccgctgccgtgcctgtcaagcgcgggcgcggacgtccgccgaaacccaagaaccccgtcgccgaggactcagctcccactgcggcttccgttgtcaccactgatggcaatgccgtgcctggtgaagcgtgggcgcggacgccccccaaagctcaaggaccccatcaatgtggccactgaccaggccaccagcggcatgctgagcccgacgtggccgtgggcgcccgcccaagcagctcaggtcctggtggaagatcccagaggtgacctgctgaattgaatcctatggtggctgaggtttgggagtagcttggtgtatcaaattgagttctgaactatcttatccagttgggtgcatagcatcggaagactaatctcaataatcgagaaatttgctgttttgccactcgcaaaaaaaaaaaaaa

SEQ ID NO: 2787 - DNA, 594 bp, Zea mays
  Clone ID: TF_LIB3958-009-Q1-K6-G6
ctccggtggcggcgagtgcaagtagcacaaacttatgtgaaatctactccaacctacgatggatccccagatccggcgacggcgagggaaagtgacatagacttcagtggtagtggctctagattacaacacaccccgagcggatcaaccacatagattcattgtgtattgacatatcattcataggaccactgatgcgtatcctctcagatccaaattctctcaccctttttagatctagtgacattgagggcaagtagaagagtttggcaacagtcgtggactacgacagatccaaacaagtcaacctctcaaatctggagtaataagcaggattcaaagatgatggttacacgagagcatccaatgaggagcagggaatgccagctttgccatgaaaacccgctctcttcgccaagcatgaccaaaatgattgtagaggcgatcgctgccctcaaggagaggaaggggtcgagctcggtggccatcagcaagtacgtcgaggggaagcacggcggcaagctccccaccaacttccgcaagcagctcaccgtgcagctgaagaagctcgctgccgccggcaagctgacgagg

SEQ ID NO: 2788 - DNA, 534 bp, Zea mays
  unsure (1)..(534): unsure at all n locations
  Clone ID: TF_LIB4765-025-R1-K1-H5
gggtacctcgaggccggccggggcgcgcgaggctcgctggaaacgccagtctacgggcaccgatttgcacgtgctgcatccaacgaacctggtttgatgcccttgtcggcatcggggggcttcgcctacccgcatcacccacgctctccccgcttccctatccctcacgcagtcaggagatccccaattccccattcaccaatccccagtattgtagtaggggggaaaaacgagagaaaagaaacagcagtagcggaggcaagacgaaatggtggccgccgtcgcgtcgccttcgtcggcggcaccctccgccggccgtccccatccgacatacaaggagatgatcatgcaggcgctgacggagctgcgggacccgagcgggtcgagccgcagcgccatcgccagctacatcgccgaccacttctccggnctccactcgcgccacgatgccctcctctccgtccatctccgcagcctcaagtcccatgggcaacttcgcctcgtctctggcaactacttcgtctccaccgccgc

SEQ ID NO: 2789 - DNA, 801 bp, Zea mays
  Clone ID: TF_ZmC1022_15
gggtaccctgggcctccgaactaaccgcacacagctctcgccttctctctcccatcggcacacccgagctcgctccctccttccacgtcgaggtccgagtcctgctttgatggcgaccgacgtggctgagactcccgcgccgttggtggatgcggccccagaggctcccgctgacgccccggcggcgcctgctgcggacgcgaagccggccaaggccaagaaggccgccgcaccgaagaagcgcgccagcccgacccacccgccgtacgccgagatggtctcggaggcggtcacgtcactgaaggagaggacggggtccagcagctatgcgattgccaagttcgtagaggacaagcacaaggacaagctcccacccaacttccgcaagcttctgaacgttcagctcaagaagctcgtcgccggcggcaagctgaccaaggtgaagaactcgtacaagctgtcgtccgccaccaagccgaatcccaagcccaaggccgccccgaagaaggcccctgacaacgcaaggcccctccctcgaagaagccgacgaccccggtgcggaaagcgccgcccgccacgtaaagcggccaagcccggccgcgatgctaaaatttgatatcggagactcgggtacactgctcattcagtatccgagaccgatagctgaggctagtggcgatggaggactgtgttattactactataaactggtgggttgtggtttctgtaactggtgaatgatcaagttggaagcttttagtctatcttagatatatcaggggatagtggtttttggatttt

SEQ ID NO: 2790 - DNA, 745 bp, Zea mays
  Clone ID: TF_LIB4729-085-Q1-K1-C11
gtctcatcagtcttctccctccgcctccgccgtcgacaacagcgtagtgtagtgtagttccggagagggtcggggagagtagtagtgatccgcaatgtcgacggaggaggttgttgtggctgaggtcccggtgaccgaggtgccagcgtaggtcccggcggtccaggtggccgaggcgcccatggcgaataaggcgccctaggagaagaaggcgcctaaggataagaatctttccgcggcgaagaagccggcggcgcaccctccctacgctgagatgattgtagaggcgatcgctgccctcaaggagaggaaggggtcgagctcggtgttcatcagcaagtacgtcgaggggaagcatggtggcaagctccccaccaacttccgcaagcagctctctgtgcagctgaagaagctcgctgcctccgtcaagctgtcgaggttgaataactccttctagttgccggccaccgacgccaagcccaagggcgccaagcccaaggcacccaagggcgcgtccaagcccaagccctcgccgaaggtgaagggctagaccgctgctaagtccaaggcggcgtctcccaaactccaaggtcaaggtcaatgacaagcctgtctctcctgccgccgcgtcgcccaaattatcccgcgggtgcacctcccaaggtcgccaagacctccgccaaggtctcccccgtgcaggcagccaagaaggcgtctgctcctgcctacaagggaaaggcagcgg

SEQ ID NO: 2791 - DNA, 1542 bp, Zea mays
  Clone ID: TF_ZmC13520_3
atgggcgcgccgaagcagaagtggacgtcggaagaggaggatgcgctccgccgtggcgttcgcaagcacggcgccggcaaatggcggaccatccagaaggacccccagttcagcccgatcctctcctcccgctccaatatcgacctcaaggactttagggtgcttggtggtctccctgctggctgctgcagttttgtcggtagtaccgtagtagatttgggccatcgaaggcgagattttgtgttcggggtaactgataaatgtaggcgaaggttgaaatggccgtgttatgctgccgagggatgctttgatgtgatcattttgctcaaggacaatgatgctgtggtggtcatggacacgcagtgtcggattacatgtggcacatgccagcgaagaggcactctagtcagtgactcaacgtgctcagcagttattgctgttgggataggattcagtgtgataaatttgaaggatatcctgctaatgataccacactgtacagggattcatggttgggaagatattgccctcaagaagtttcttagagttttcaaccttagcaatttaaggccatggtatggtgccatgattatggaagctctttcggaattgaatcagccgaatggttcagatattgatgcaatcttcgacttcataaagcaaaggcatgtggtgcaatcgacctttagaagatttctaccctcaaagttacggcgacttgcagactcaaacaaaattgaaaaggtcgataacttctataggctcccagattcatttgcaacaaggactccagctcaaataaaagtttcagatccaaaacagaaggatccatctaaggcgtcaaagaccataggcttgtttgctgcctccagccctgcactagaggcagcgatggcagctgctgtcaaggtgactgacgccgaggcaaaagcacatgatgcacatgatcagatgatggaggcagaaaggatgctgaagatggctgaggataccgagtctatcctcacaattgcagcagagatctatgatcgatgttcaaggggggagataaccacattagttccagtggcgcaaagggagttttgagatctattggagtctctcttgtgttgtttgttgtacatggataggttctggaatccagtggcccggattgctcctgttgtatgatgtaaccgtttgtgttgtactatctccgttctccgatatttgtcttaccctagttcatttttaaaataaaatgcgacaaataaaaaagaacggagtgagtacttaggatgtgccctagggttaacaaaataacatcagcgcaccgcctgccttcaaaattctgtaatatgtaaccccgtctttcccagcctgtcactgcaagctgcgatcgtgtatcctgatgtcagtattgtattatttttccttggcatgatgagagaatagggaagtgttctaaacagatgaagtagggtaggaaggtgatgtgttcttggtatgcgataacaataatctgtgccgcacttgtacctttcaatttgagaatgttgtgtt

SEQ ID NO: 2792 - DNA, 678 bp, Zea mays
  Clone ID: TF_LIB4730-078-R1-K1-C8
aaatcgctcctcaaaccaactggtccagtcgacacaagcagcatcccgccggcggtgatggacctggcgtccagcgacctcgcggagctgggcgcggcgatagctggtccgcgtctacgggatcatcccgcgagaggatccgagcaccttgtaactactcagcagtctgaggcatattcactatgatccgcaatgttcacgcgaagacggtgatgtcgatgacgtccctgcgaccgatccggcagcggaagtcccggaggtccacgtggcctaggcgcccaaggttaataaggcgcccaaggagaacaaagcgcctaatgagaagaagccgtccgcggcgaagaagccggcggcgcaccctccctacgctgagatgattgtacaggcgatcgctgccctcaaggagaggaaggggtcgagctcggtggccatcaccaagtacgtcgaggggaagcacggcggcaagctccccaccaacttccgcaagcagctcaccgtgcagctgaagaagctcgctgccgccggcaagctgacgagggtgaagaactccttcaagctgccggccaccgacgccaagcccaaaggcgccaagcccaaggcacccaaggccgcgcccaaacccaagccctcgccgaaggcgaaggccaaaaccgctgcaaagcccaaagcggcgtcccc

SEQ ID NO: 2793 - DNA, 614 bp, Zea mays
  Clone ID: TF_LIB3689-248-Q1-K6-E3
caacagcgtagtgtagtgtagttccggagaggttggggagagtagtagtgatccgcaatgtcgacggaggaggctgttgtggctgaggtcccggtgaccgaggtgccagcggaggtcccggcggcccatgtggccgatgcgcccaaggcgaagaaggcgcccaaggagaagaaggcgcctaaggagaagaagctttccgcggcgaataagccggcggcgcaccctccctacgctgagatgattgtagaggcgatcgctgccctcaaggagaggaaggggtcgagctcggtggccatcagcaagtacgtcgaggggaagcatggcggcaagctccccaccaacttccgcaagcagctcactgtgcagctgaagaagctcgctgccgccggcaagctgacgagggtgaagaactccttcaagctgccggccaccgacgccaatcccaatgccgccaagcccatagcacccatagccgcgcccaatcccaagccctcgccgaatgcgatagccaagaccgctgcgaagcccaaggcggcgtcgcccaaacccaatgccaatgccaatgccaagcctgtcgctcctgccgccgcgtcgcccaatccccgctggcgccc

SEQ ID NO: 2794 - DNA, 770 bp, Zea mays
  Clone ID: TF_LIB4762-093-Q1-K1-C4
cattgggtacctcgaggccggccgggggatgctatcataccagcactaaagcaccggatcccatcagaactccgaagttaagcgtgcttgggcgagagtagtactaggatgggtgacctcctgggaagtcctcgtgttgcattccaatcagtcatcacccaccgcctccgccgccgacaacagcgtagtgtagtgtagttccggagagggttggggagagtagtagtgatccgcaatgtcgacggaggaggctgttgtggctgaggtcccggtgaccgaggtgccagcggaggtcccggcggcccaggtggccgaggcgcccaaggcgaagaaggcgcccaaggagaagaaggcgcctaaggagaagaagctttccgcggcgaagaagccggcggcgcaccctccctacgctgagatgattgtagaggcgatcgctgccctcaaggagaggaaggggtcgagctcggtggccatcagcaagtacgtcgaggggaagcatggcggcaagctccccaccaacttccgcaagcagctcactgtgcagctgaagaagctcgctgccgccggcaagctgacgagggtgaagaactccttcaagctgccggccaccgacgccaagcccaaggccgccaagcccaaggcacccaaggccgcgcccaagcccaagccctcgccgaaggcgaaggccaagaccgctgcgaagcccaaggcggcgtcgcccaaacccaaggccaaggccaaggccaagcctgtcgctcctgccgccgcgt

SEQ ID NO: 2795 - DNA, 1662 bp, Zea mays
  Clone ID: TF_ZmC2187_1
ggccaagccccttgggaagcccaagggggtgtcgcccaagcccaaggccaaggccaaggccaaggccaaggccaagcctgtggttcctgcccccgggtggcccaagccccgggggggccctcccaaggtggccaagacttccgccaaggcttcccccgccaaggcagccaaaaaggggggtgttcctgccaaaaagggctacgcaccggcggctcttaaaaaggtggcaaccccaaaaaaggctgttgctgtccgccccggccagaaagggcgtggccaggaaggccaaaaagtaggctgcctgccttgtcgctggcgagatccccccctcaattccgcctataaattcccctcttgcctggattttgatccaatcgtaaaattgtcagtagctttaaattcgtcggtagctccagcataagtgtcggtggtagttctgtgcctgtaaaaaccaccgcctccgccgccgacaacagcgtagtgtagtgtagttccggagagggttggggagagtagtagtgatccgcaatgtcgacggaggaggctgttgtggctgaggtcccggtgaccgaggtgccagcggaggtcccggcggcccaggtggccgaggcgcccaaggcgaagaaggcgcccaaggagaagaaggcgcctaaggagaagaagctttccgcggcgaagaagccggcggcgcaccctccctacgctgagatgattgtagaggcgatcgctgccctcaaggagaggaaggggtcgagctcggtggccatcagcaagtacgtcgaggggaagcatggcggcaagctccccaccaacttccgcaagcagctcactgtgcagctgaagaagctcgctgccgccggcaagctgacgagggtgaagaactccttcaagctgccggccaccgacgccaagcccaaggccgccaagcccaaggcacccaaggccgcgcccaagcccaagccctcgccgaaggcgaaggccaagaccgctgcgaagcccaaggcggcgtcgcccaaacccaaggccaaggccaaggccaagcctgtcgctcctgccgccgcgtcgcccaagccccgcgggcgccctcccaaggtcgccaagacctccgccaaggcctcccccgccaaggcagccaagaaggcggctgctcctgccaagaagggaaaggcagcggcggctcctaagaaggtggcaaccccgaagaaggctgctgctgctgccgccccggccaggaagggcgtggccaggaaggccaagaagtagtctgcctgccttgtcgctggcgagatccccccctcaattccgcctatagattcccctctttcatggattttgatccaatcgtaatattgtcagtagctctagattcgtcggtagctccagcatgagtgtcggtggtagttctgtgcctgtaaaaacttgggatagttgatcgcgtgtgatcagccgtcatgctcctccagtctctatgaacaagctaagctataatagtattttgctatcctaaaaaaaaaaaaaaaaaaaaaaaaaaaaaaaaaaaaaaaaaaaaaaaaaactcgaaaatgctatcctatgatccccgggttgttggcttattcacaagctaagctttaatagcatttcctaaaaaaaaaaaaaaagggcggccgcccccccggggag

SEQ ID NO: 2796 - DNA, 1294 bp, Zea mays
  Clone ID: TF_ZmC1022_3
cccacgcgtccgcccacgcgtccgcccacgcgtccgcccacgcgtccgcccacgcgtccgcagctctcggcttctctctctcatcggcacacccgagctcgcgccctccttccacgtcgaggtccgagtcctgctttgatggcgaccgacgtgactgagactcccgcgccgttggtggatgcggccccagaggcgcccgccgacgccccggcggcgcctgctgccgacgcgaagccggccaaggccaagaaggccaccgcgccgaagaagcgcgccagcccgacccacccgccgtacgccgagatggtctcggaggcgatcacgtcgctcaaggagaggacggggtccagcagctacgcgattgccaagttcgtggaggacaagcacaaggccaagctcccgcccaacttccgcaagcttctgaacgttcagctcaagaagctcgtcgccggcggcaagctgaccaaggtgaagaactcgtacaagctgtcgtccgccaccaagccgaatcccaagcccaaggccgccccgaagaagcccaagaccggcgctaagaagcccaaggccgctgccaagcccaaagctaagacccccgccaaggcgaagcccgccacaaagcccaagcccgccgcgaagccgaaagccgtagtgaaaccgaagacacccgccaagcccaaggccaagccagctgccaaggcgaagcccaagaccgccggcgctaagccgaagccacttgctaagaaggccggccgccccgccaaggcggcgaagacgtcggccaaggacacgccagggaagaaggcccctgccaagaaggccgctccctcgaagaaggcggcgaccccggtgcggaaagcgccgtcccgtaaggccaagaagtaaagcggccaagaaggggggcgcgatgctgtaaatttgatatcggagaggctcgggtacactggtcattcagtatccgagaccgatagctgaggctagtggcgatggaggactgtgttattactactataaactggtggttgtgtttctgtaactggtgaatgatcaagttggaagcttttagtctatcttagatatatcagtggatagtgttttttgtattttcgttttcttttccaatgtgtgttgggtcttgtggattatcctttttttctaatctaatacaatgaagaggcatgtcttttgaagcttccattgaaaaaagttactttttaacgattgttcagactgttttgtgcgggtgcaagatcctgtagatctgaattccaacaaaaaaaaaaaaaaaaaagcggcc

SEQ ID NO: 2797 - DNA, 1516 bp, Zea mays
  Clone ID: TF_ZmC238_2
ttgggaccctcgaggccggccgggccactcccgcgcgtctcccacccaacaacaaaacaagcctaatggcttcctctccatctcacgccactgcggttgcctacttgccctagaaccctcgccgccgcccctctttaggattcccatgtccctggtcgccccctgacacgcccgccccggatcctgcacccgaattccgcgtggaattccgggccgaaccgcctctctgcgtgcgcctccgaccaccaaactctctctctcacacgcgcgcgcgcgcgcacgtctgaggcggtttgattctccggtgggggttccttggtctcgaactctcgatttgctgctgatgggggtgccgaagcagcgctggacgccggaggaagaggccgcgctcaaggccggtgtcgccaagcacgggcccggcaagtggcgcaccatcctccgggactcggacttcagcgcgctcctgcgcctccgctccaatgttgacctcaaggacaagtggcgcaacttgagcgtcaccgcaggaggttacgggtctagagagaaggcaaggatggcgttgaaaaaaggcaggcgcgtggtgcctaagcttactgctgacccaatggatgtagatgagaaggatatggacaacgctcatgacacagtcattgatgtggaaccgttagcaatggctttcgagcccttgccacttttggaaagcccagataagtcagttgctaggctcgatgatctcatagtagaagctataaggaagcttaacgagccatctgggtccaataaggcagtcattgctggatatattgaggtaaaccaaaagtacagaattgcaccaagttcttccttgggcggaataagcactaaggtatcctcttctgaagggatgaacacagaaaataataatgttaaacggctaactaagcctcaagtggttgctgaactggagaagatgaaaggcatgaccagggaagaggctgctgcctttgctgccaaggcagttgccgaggcagaagtagcaatggcagaagctgaggaagcagcaagagttgcagaggctgcagaaaatgatgctgaagctgcaaaggcttttcttgatgctgtcattttgtcaatgagaaacaggaacgctgcttccatgatacttcgagcttgctgatccttcacccatgcagcacaccgatgttctgctgcaaagattttctggatagatgagtttcttgtatagccttatagatcatggcgggttttcaacagcttgctgttgtcctgtgctgtgcagccaatcgacaacatgataacaagaatgatcgagaaagtagtcttcatttttttttgtttcccattgtgttgctttgtaattaaactatagccttttcccttcattagttgatgaagtgatgtcgtctaatagaacaactgtagtgaaaagaaaatgtcagaaagccgccttagttaatgcaaattgctgtgatattatttttgcagaaatgattatatggtgacagcgtttaagatt

SEQ ID NO: 2798 - DNA, 551 bp, Zea mays
  Clone ID: TF_uC-zmflteosinte082a08a1
gagacaccaaagacatgtcatatactgttgattttctgcaaatttttcccactaggttttactggagtgttacacagtatattattgcaaaactcctattttctttacaggattttaaggagattatacatgatggacaactgcttaaggaggagtgttacaggatataagcagttactatgtacactcattttagtctacggttcctggtccacagggcttcttgggacgtgactgttgagcacgttcccacgttctctgtcctttcggttcctagacgaagggtcacgacccttgcctgtgtctcctccctagtaaagcatgtccagctacatgtttccccgttacatcaacggaaaagcatgttcctccacttgtccttcaagtccaccggtgtcctgccggtcaaagcctcagcattgttatctagaatatccctccaattgccaacaccatactcttcaacaccctttcttaaggtttcttcttcgaacaagctccacctccttgtctttctccgcttagtgtttttgtttccaggcggtggcaaa

SEQ ID NO: 2799 - DNA, 1039 bp, Zea mays
  unsure (1)..(1039): unsure at all n locations
  Clone ID: TF_ZmC38422_4
tttttatatgcggcagatgcaacagcaccacnntgcctctttttntgtttcacggttcttgtggcagagaggtcccctttagttgttcctgacttgttagaaattggttctgcaatccgcttgaaaaattgtccctttaggagatgctactctgctaccattttgagaatctattgacaagagctttacaggaggagtctcatccccaggagccttgctgataactggagatggagaagatatgcacatatccactcgtgaatgctttttcctggacttatttctgtccttcagcagttgttttcccaatgcttctacaaatgttttgaacctccgaggcttcaggtgcagctttgatgcactgcagctaaatttctcaagcagagaccaccagcgaagcatagcagcaatggtatccttggagttttttgcatcaagtgagaacctaggacccaatagcttcttcatgcgtcgaacaagacgataatagtaatgcctgacctgatccttgtttttactctgaacacggtgtgtaatcttgtcgaagtttttccctacttgccgcagtgcattgaagaaattctcctcctcttggtgtgtccacgctgcccattgtcgagtctgcttttttgcaggttgcttattgggatcggaagactcaggggcggacccggtgaaggacatgcgtgtgcacatgtacgccctataactggtaggtgttgatagccgaggaaggacccgagcacgtaggacggcggcggcggtcgcctagtagcggcaggagagcgctccccgcagcccgcacacggtggacgggagaagaaaaggcaggcggtgaatggattttggatgggagtcggaacgggaaagggaaacgttttgatggttcaagacgtgggttatgggttggaaaaatactcctatgtgggaatggggaatggctactatgcatcaggcaaaagaatgggtaatcgattgcaaaacgctactaccatttggtatggatcaggcaaacgaatgggtaataggagaccaaaat

SEQ ID NO: 2800 - DNA, 796 bp, Zea mays
  Clone ID: TF_LIB4980-057-A1-K1-E1
tcgaggccggccgggccggttttcaagaagggagaggagtgcccctagtctttccttgctttccactgaaatctcctatctgcagccatgcagttgctcaatcctggcctcagatgaagcccaaccattcattggtatataagtcgctacaacctttgcaatttcccactgcttcagaacatcgtcgaagaagctctgtgctaccggagaaggtgttcgtcgtcgtgcataattatacattccgcagacctgtaagctctgtgagtttggttggagctcccaggttctgcattgcgttgagatggggaggcattcttgctgctacaagcagaagctgagaaaggggctctggtcccctgaggaggatgagaaactcatgaatcacataacaaagcatggccatggctgctggagctctgttcccaaactcgctggtatgtacaatgaaatttttcttcccttggtcctcagttatcaactctcaatcctccccttctcctccctctgcatttttctcatttccaattgccagctgaaacccctcttgtctctcaaatacctatcggtcagttcaattatctaaattcgagaagacaaattgttgcagggcttcaaaggtgcggaaagagttgtaggctgaggtggataaactatctgaggccagacctcaagagaggggcattcgcccaagacgaagaagacctcatcatcgagctgcacgctgtcctccgggaaaggtggtctcaaattgcagcgcagcttgccagggagactgataatgagatcaagaatctat

SEQ ID NO: 2801 - DNA, 911 bp, Zea mays
  Clone ID: TF_ZmC42_44
gaggaggagcacaggttgttcctcctaggcctgaagaaatacggcaagggggactggaggaacatatcgcgcaactttgtccagaccagaacgcctactcaggtggccagccacgcgcagaagtacttcatcaggctcaactccggcggcaaggacaagaggaggtccagcatccacgacatcaccacggtcaacctgacggacgaccagccgccctcgccgtcccagtcctccctgatcaccagccagtcgaacgcaccagctccatctccagctccggctccagccgcggggatatgccaggtcccattggcggccgacgtcaagcgacacggtgccggaactctgcccttcagctcaccgaaccggacctctgcggtaccggcctacaggatggagtttcatgaccaacaaggcctgcagtgtggccctctgcatgatcagttgctcgccagccagagcgtcctgttctaggcgcggtggcagcccaccctgcgccatggatcgaccaggtgcctattgtataatacttgtggtatcgctgtagcttcagcgcctgtattgaagggattagcctttcgggagcataacagaaaggagatcttcatttcatggtggtccataatttgttggagaatgtaacaaaaagaacgccgagaattcgatgccatggtattttcagactgttgctcgagtggtacggctggaaatgtatcatgcatcctatgaagtggacttgcattcaatcatggatgatcctatgaagtgtcagttaaccttggttgtgaccatctgattctgctgctgtctctgaagatggtgccttatattgaggccttcagagttcaaaccattatgtagtgtccagacatatttatccgtagtaatcagtttgcctattggtgcctgcc

SEQ ID NO: 2802 - DNA, 359 bp, Zea mays
  Clone ID: TF_LIB4744-001-R1-K1-D4
gtttattggttgatggtgcaatcccatacccctatcgtcggagaacccagaatccaccgcatcgcatagacgagtagagttagatttatgctgacgtaagatggtgtgcatccggcacgcgaccatcgaagacctggtggcgatgcaggcgtgctgcctgatgcggctgccgggcacctaccagacgacgttctactttgcgggcgggccatctggcccgccctgcccattcatgcacgtctgctgcggagcgggaagcgctgcctcctgcggtggatcaactacctgcgcccgaacctctagcgcggcaacttcaccgccgcggaggaggaggccttgatcaagctccacgcctcgct

(The sequence listing continues in the following parts.)

1. (canceled)

2. A substantially purified protein or fragment thereof comprising an amino acid sequence of SEQ ID NO: 32913 or fragment of at least a contiguous 50 amino acid region of the amino acid sequence of SEQ ID NO: 32913.

3. (canceled)

4. (canceled)

5. The substantially purified protein of claim 2, wherein said protein is encoded by the nucleic acid sequence of SEQ ID NO: 29333.

6. (canceled)

7. (canceled)

8. (canceled)

9. The substantially purified protein or fragment thereof of claim 8, wherein said fragment is at least a contiguous 75 amino acid region of the amino acid sequence of SEQ ID NO: 32913.

10. An isolated polypeptide comprising an amino acid sequence of SEQ ID NO: 32913.

11. An isolated polypeptide molecule consisting of an amino acid sequence of SEQ ID NO: 32913.
